United States Patent Application Publication US 2011/0183924 A1 - sequence listing, part 112

SEQ ID NO: 327660 - DNA, 2470 bp, Homo sapiens
  misc_feature (47)..(47): n is a, c, g, or t
  misc_feature (49)..(49): n is a, c, g, or t
tgagaaaggagggaatgaagttataataggatgttattaaggtatantnaaagtgtcggggagggcttatcgagacaaattgaagttttggacccattgtgtactagcaacattgattatgtttactatattctcattttttgctgagcagttaattgcacttaagcggaagatatttcccagaaggaggatacacaaagaagctagtcccaatcgaatcagagtatagaagatcttcatttgaaaaccatctacctcagcatttactgagcattttaaaactcagcttcacagagatgtctttgtgatgtgatgcttagcagtttggcccgaagaaggaaaatatccagtaccatgctgttttgtggcatgaatatagcccactgaccaggaattatttaaccaacccactgaaaacttgtgtgttgagcagctctgaactgattttacttttaaagaatttgctcatggacctgtcatcctttttataaaaaggctcactgacaagagacagctgttaatttcccacagcaatcattgcagactaactttattaggagaagcctatgccagctgggagtgattgctaagaggctccagtctttgcattccaaagccttttgctaaagttttgcactttttttttttcatttcccatttttaagtagttactaagttaactagttattcttgcttctgagtataacgaattgggatgtctaaacctatttttatagatgttatttaaataatgcagcaatatcacctcttattgacaatacctaaattatgagttttattaatatttaagactgtaaatggtcttaaaccactaactactgaagagctcaatgattgacatctgaaatgctttgtaattattgacttcagcccctaagaatgctatgatttcacgtgcaggtctaatttcaaagggctagagttagtactacttaccagatgtaattatgttttggaaatgtacatattcaaacagaagtgcctcattttagaaatgagtagtgctgatggcactggcacattacagtggtgtcttgtttaatactcattggtatattccagtagctatctctctcagttggtttttgatagaacagaggccagcaaactttctttgtaaaaggctggttagtaaattattgcaggccacctgtgtctttgtcatacattcttcttgctgttgtttagtttgttttttttcaaacaaccctctaaaaatgtaaaaaccatgtttagcttgcagctgtacaaaaactgcccaccagccagatgtgaccctcaggccatcatttgccaatcactgagaattagtttttgttgttgttgttgttgttgtttttgagacagagtctctctctgttgcccaggctggagtgcagtggcgcaatctcagctcactgcaacctccgcctcccgggttcaagcagttctgtctcagccttctgagtagctgggactacaggtgcatgccaccacaccctgctaatttttgtatttttagtagagacgggggttccaccatattggtcaggcttatcttgaactcctgacctcaggtgatccacctgcctctgcctcccaaagtgctgagattacaggcataagccagtgcacccagccgagaattagtatttttatgtatggttaaaccttggcgtctagccatattttatgtcataatacaatggatttgtgaagagcagattccatgagtaactctgacaggtattttagatcatgatctcaacaatattcttccaaaatggcatacatcttttgtacaaagaacttgaaatgtaaatactgtgtttgtgctgtaagagttgtgtatttcaaaaactgaaatctcataaaaagttaaatttttgtctgacactttgatttttaaatctttgaggattgagtttactgttactcagattcagcagtcacttgagtgcctttactgtgtatcaggttctgtgctgaacattactaaaattaagtggaaagtaaggaaagattagtattatacagaagaatgttgctttatggggggaaaatagtttctaaatggaatttatcatatggtaaaatttaggatatctgggtatcattataaaagctgagatttattctagaaaagttagagaaatgaacatttgtctgtaatgacgatttctgtggttagatgaatatagtccatacctaattaggagcttgataatgggatggataatacaatcataggctattcatagactcattctaatgattctgtgattcagtagaatcattagaacagaggaacctcagaagttgatgagcagtcagatggtcagaaccatttgttcaaatcctatagaaaaggtcactctgtgttttagtttttttgtgctgctgtaacaaaatacctcagactgggtaatttacaaagaacagaaattcattttcttacagttctggaggc

SEQ ID NO: 327661 - DNA, 2491 bp, Homo sapiens
ctaatatttgtttttgttttggaagaggaatgatggagatttgtttgttgtctttttaatgtataagattgtggaaatgattaaggtcatatggctcttagaaagtttgatgcacttatattctttcatcaacgtgagaattaaaatgtattttctgtctttcatcatttagttaattgcacttaagcggaagatatttcccagaaggaggatacacaaagaagctagtcccaatcgaatcagagtatagaagatcttcatttgaaaaccatctacctcagcatttactgagcattttaaaactcagcttcacagagatgtctttgtgatgtgatgcttagcagtttggcccgaagaaggaaaatatccagtaccatgctgttttgtggcatgaatatagcccactgaccaggaattatttaaccaacccactgaaaacttgtgtgttgagcagctctgaactgattttacttttaaagaatttgctcatggacctgtcatcctttttataaaaaggctcactgacaagagacagctgttaatttcccacagcaatcattgcagactaactttattaggagaagcctatgccagctgggagtgattgctaagaggctccagtctttgcattccaaagccttttgctaaagttttgcactttttttttttcatttcccatttttaagtagttactaagttaactagttattcttgcttctgagtataacgaattgggatgtctaaacctatttttatagatgttatttaaataatgcagcaatatcacctcttattgacaatacctaaattatgagttttattaatatttaagactgtaaatggtcttaaaccactaactactgaagagctcaatgattgacatctgaaatgctttgtaattattgacttcagcccctaagaatgctatgatttcacgtgcaggtctaatttcaaagggctagagttagtactacttaccagatgtaattatgttttggaaatgtacatattcaaacagaagtgcctcattttagaaatgagtagtgctgatggcactggcacattacagtggtgtcttgtttaatactcattggtatattccagtagctatctctctcagttggtttttgatagaacagaggccagcaaactttctttgtaaaaggctggttagtaaattattgcaggccacctgtgtctttgtcatacattcttcttgctgttgtttagtttgttttttttcaaacaaccctctaaaaatgtaaaaaccatgtttagcttgcagctgtacaaaaactgcccaccagccagatgtgaccctcaggccatcatttgccaatcactgagaattagtttttgttgttgttgttgttgttgtttttgagacagagtctctctctgttgcccaggctggagtgcagtggcgcaatctcagctcactgcaacctccgcctcccgggttcaagcagttctgtctcagccttctgagtagctgggactacaggtgcatgccaccacaccctgctaatttttgtatttttagtagagacgggggttccaccatattggtcaggcttatcttgaactcctgacctcaggtgatccacctgcctctgcctcccaaagtgctgagattacaggcataagccagtgcacccagccgagaattagtatttttatgtatggttaaaccttggcgtctagccatattttatgtcataatacaatggatttgtgaagagcagattccatgagtaactctgacaggtattttagatcatgatctcaacaatattcttccaaaatggcatacatcttttgtacaaagaacttgaaatgtaaatactgtgtttgtgctgtaagagttgtgtatttcaaaaactgaaatctcataaaaagttaaatttttgtctgacactttgatttttaaatctttgaggattgagtttactgttactcagattcagcagtcacttgagtgcctttactgtgtatcaggttctgtgctgaacattactaaaattaagtggaaagtaaggaaagattagtattatacagaagaatgttgctttatggggggaaaatagtttctaaatggaatttatcatatggtaaaatttaggatatctgggtatcattataaaagctgagatttattctagaaaagttagagaaatgaacatttgtctgtaatgacgatttctgtggttagatgaatatagtccatacctaattaggagcttgataatgggatggataatacaatcataggctattcatagactcattctaatgattctgtgattcagtagaatcattagaacagaggaacctcagaagttgatgagcagtcagatggtcagaaccatttgttcaaatcctatagaaaaggtcactctgtgttttagtttttttgtgctgctgtaacaaaatacctcagactgggtaatttacaaagaacagaaattcattttcttacagttctggaggc

SEQ ID NO: 327662 - DNA, 5104 bp, Homo sapiens
actgcttaaaggaaatagcagacagacagtatggaggggctacttgacaacagataaagaagtccctggattagtgctaatgcaagatttggctttcctgagtggatttccaccaacattcaaggaaacaaatcaactaaaaacaaaattgccagaaaatctttcctctaaagtcaaactgttgcagttgtattcagaggccagtgtagcgcttctaaaactgaataaccccaaggattttcaagaattgaataagcaaactaagaagaacatgaccattgatggaaaagaactgaccataagtcctgcatatttattatgggatctgagcgccatcagccagtctaagcaggatgaagacatctctgccagtcgttttgaagataacgaagaactgaggtactcattgcgatctatcgagaggcatgcaccatgggttcggaatattttcattgtcaccaacgggcagattccatcctggctgaaccttgacaatcctcgagtgacaatagtaacacaccaggatgtttttcgaaatttgagccacttgcctacctttagttcacctgctattgaaagtcacattcatcgcatcgaagggctgtcccagaagtttatttacctaaatgatgatgtcatgtttgggaaggatgtctggccagatgatttttacagtcactccaaaggccagaaggtttatttgacatggcctgtgccaaactgtgccgagggctgcccaggttcctggattaaggatggctattgtgacaaggcttgtaataattcagcctgcgattgggatggtggggattgctctggaaacagtggagggagtcgctatattgcaggaggtggaggtactgggagtattggagttggacagccctggcagtttggtggaggaataaacagtgtctcttactgtaatcagggatgtgcgaattcctggctcgctgataagttctgtgaccaagcatgcaatgtcttgtcctgtgggtttgatgctggcgactgtgggcaagatcattttcatgaattgtataaagtgatccttctcccaaaccagactcactatattattccaaaaggtgaatgcctgccttatttcagctttgcagaagtagccaaaagaggagttgaaggtgcctatagtgacaatccaataattcgacatgcttctattgccaacaagtggaaaaccatccacctcataatgcacagtggaatgaatgccaccacaatacattttaatctcacgtttcaaaatacaaacgatgaagagttcaaaatgcagataacagtggaggtggacacaagggagggaccaaaactgaattctacagcccagaagggttacgaaaatttagttagtcccataacacttcttccagaggcggaaatcctttttgaggatattcccaaagaaaaacgcttcccgaagtttaagagacatgatgttaactcaacaaggagagcccaggaagaggtgaaaattcccctggtaaatatttcactccttccaaaagacgcccagttgagtctcaataccttggatttgcaactggaacatggagacatcactttgaaaggatacaatttgtccaagtcagccttgctgagatcatttctgatgaactcacagcatgctaaaataaaaaatcaagctataataacagatgaaacaaatgacagtttggtggctccacaggaaaaacaggttcataaaagcatcttgccaaacagcttaggagtgtctgaaagattgcagaggttgacttttcctgcagtgagtgtaaaagtgaatggtcatgaccagggtcagaatccacccctggacttggagaccacagcaagatttagagtggaaactcacacccaaaaaaccataggcggaaatgtgacaaaagaaaagcccccatctctgattgttccactggaaagccagatgacaaaagaaaagaaaatcacagggaaagaaaaagagaacagtagaatggaggaaaatgctgaaaatcacataggcgttactgaagtgttacttggaagaaagctgcagcattacacagatagttacttgggctttttgccatgggagaaaaaaaagtatttccaagatcttctcgacgaagaagagtcattgaagacacaattggcatacttcactgatagcaaaaatactgggaggcaactaaaagatacatttgcagattccctcagatatgtaaataaaattctaaatagcaagtttggattcacatcgcggaaagtccctgctcacatgcctcacatgattgaccggattgttatgcaagaactgcaagatatgttccctgaagaatttgacaagacgtcatttcacaaagtgcgccattctgaggatatgcagtttgccttctcttatttttattatctcatgagtgcagtgcagccactgaatatatctcaagtctttgatgaagttgatacagatcaatctggtgtcttgtctgacagagaaatccgaacactggctaccagaattcacgaactgccgttaagtttgcaggatttgacaggtctggaacacatgctaataaattgctcaaaaatgcttcctgctgatatcacgcagctaaataatattccaccaactcaggaatcctactatgatcccaacctgccaccggtcactaaaagtctagtaacaaactgtaaaccagtaactgacaaaatccacaaagcatataaggacaaaaacaaatataggtttgaaatcatgggagaagaagaaatcgcttttaaaatgattcgtaccaacgtttctcatgtggttggccagttggatgacataagaaaaaaccctaggaagtttgtttgcctgaatgacaacattgaccacaatcataaagatgctcagacagtgaaggctgttctcagggacttctatgaatccatgttccccataccttcccaatttgaactgccaagagagtatcgaaaccgtttccttcatatgcatgagctgcaggaatggagggcttatcgagacaaattgaagttttggacccattgtgtactagcaacattgattatgtttactatattctcattttttgctgagcagttaattgcacttaagcggaagatatttcccagaaggaggatacacaaagaagctagtcccaatcgaatcagagtatagaagatcttcatttgaaaaccatctacctcagcatttactgagcattttaaaactcagcttcacagagatgtctttgtgatgtgatgcttagcagtttggcccgaagaaggaaaatatccagtaccatgctgttttgtggcatgaatatagcccactgaccaggaattatttaaccaacccactgaaaacttgtgtgttgagcagctctgaactgattttacttttaaagaatttgctcatggacctgtcatcctttttataaaaaggctcactgacaagagacagctgttaatttcccacagcaatcattgcagactaactttattaggagaagcctatgccagctgggagtgattgctaagaggctccagtctttgcattccaaagccttttgctaaagttttgcactttttttttttcatttcccatttttaagtagttactaagttaactagttattcttgcttctgagtataacgaattgggatgtctaaacctatttttatagatgttatttaaataatgcagcaatatcacctcttattgacaatacctaaattatgagttttattaatatttaagactgtaaatggtcttaaaccactaactactgaagagctcaatgattgacatctgaaatgctttgtaattattgacttcagcccctaagaatgctatgatttcacgtgcaggtctaatttcaaagggctagagttagtactacttaccagatgtaattatgttttggaaatgtacatattcaaacagaagtgcctcattttagaaatgagtagtgctgatggcactggcacattacagtggtgtcttgtttaatactcattggtatattccagtagctatctctctcagttggtttttgatagaacagaggccagcaaactttctttgtaaaaggctggttagtaaattattgcaggccacctgtgtctttgtcatacattcttcttgctgttgtttagtttgttttttttcaaacaaccctctaaaaatgtaaaaaccatgtttagcttgcagctgtacaaaaactgcccaccagccagatgtgaccctcaggccatcatttgccaatcaccgagaattagtatttttatgtatggttaaaccttggcgtctagccatattttatgtcataatacaatggatttgtgaagagcagattccatgagtaactctgacaggtattttagatcatgatctcaacaatattcttccaaaatggcatacatcttttgtacaaagaacttgaaatgtaaatactgtgtttgtgctgtaagagttgtgtatttcaaaaactgaaatctcataaaaagttaaatttttgtctgacactttgatttttaaatctttgaggattgagtttactgttactcagattcagcagtcacttgagtgcctttactgtgtatcaggttctgtgctgaacattactaaaattaagtggaaagtaaggaaagattagtattatacagaagaatgttgctttatggggggaaaatagtttctaaatggaatttatcatatggtaaaatttaggatatctgggtatcattataaaagctgagatttattctagaaaagttagagaaatgaacatttgtctgtaatgacgatttctgtggttagatgaatatagtccatacctaattaggagcttgataatgggatggataatacaatcataggctattcatagactcattctaatgattctgtgattcagtagaatcattagaacagaggaacctcagaagttgatgagcagtcagatggtcagaaccatttgttcaaatcctatagaaaaggtcactctgtgttttagtttttttgtgctgctgtaacaaaatacctcagactgggtaatttacaaagaacagaaattcattttcttacagttctggaggc

SEQ ID NO: 327663 - DNA, 975 bp, Homo sapiens
ggaaatgcatctggtctgtgtaggtctttttgttgtgttttgatattgtcttatcatttcaagattaaagatcaggccagttgcagtggctcacgcctgtaatcccaaagtgctgagattacaggcataagccagtgcacccagccgagaattagtatttttatgtatggttaaaccttggcgtctagccatattttatgtcataatacaatggatttgtgaagagcagattccatgagtaactctgacaggtattttagatcatgatctcaacaatattcttccaaaatggcatacatcttttgtacaaagaacttgaaatgtaaatactgtgtttgtgctgtaagagttgtgtatttcaaaaactgaaatctcataaaaagttaaatttttgtctgacactttgatttttaaatctttgaggattgagtttactgttactcagattcagcagtcacttgagtgcctttactgtgtatcaggttctgtgctgaacattactaaaattaagtggaaagtaaggaaagattagtattatacagaagaatgttgctttatggggggaaaatagtttctaaatggaatttatcatatggtaaaatttaggatatctgggtatcattataaaagctgagatttattctagaaaagttagagaaatgaacatttgtctgtaatgacgatttctgtggttagatgaatatagtccatacctaattaggagcttgataatgggatggataatacaatcataggctattcatagactcattctaatgattctgtgattcagtagaatcattagaacagaggaacctcagaagttgatgagcagtcagatggtcagaaccatttgttcaaatcctatagaaaaggtcactctgtgttttagtttttttgtgctgctgtaacaaaatacctcagactgggtaatttacaaagaacagaaattcattttcttacagttctggaggc

SEQ ID NO: 327664 - DNA, 975 bp, Homo sapiens
gcctgggtgacagagccagactccatctcaaaaaaaaaaaaaaaaaaaaaaaaagaaaagaaaattcataggccaggtatggtggctcatgcctgcctgtaatcccaaagtgctgagattacaggcataagccagtgcacccagccgagaattagtatttttatgtatggttaaaccttggcgtctagccatattttatgtcataatacaatggatttgtgaagagcagattccatgagtaactctgacaggtattttagatcatgatctcaacaatattcttccaaaatggcatacatcttttgtacaaagaacttgaaatgtaaatactgtgtttgtgctgtaagagttgtgtatttcaaaaactgaaatctcataaaaagttaaatttttgtctgacactttgatttttaaatctttgaggattgagtttactgttactcagattcagcagtcacttgagtgcctttactgtgtatcaggttctgtgctgaacattactaaaattaagtggaaagtaaggaaagattagtattatacagaagaatgttgctttatggggggaaaatagtttctaaatggaatttatcatatggtaaaatttaggatatctgggtatcattataaaagctgagatttattctagaaaagttagagaaatgaacatttgtctgtaatgacgatttctgtggttagatgaatatagtccatacctaattaggagcttgataatgggatggataatacaatcataggctattcatagactcattctaatgattctgtgattcagtagaatcattagaacagaggaacctcagaagttgatgagcagtcagatggtcagaaccatttgttcaaatcctatagaaaaggtcactctgtgttttagtttttttgtgctgctgtaacaaaatacctcagactgggtaatttacaaagaacagaaattcattttcttacagttctggaggc

SEQ ID NO: 327665 - DNA, 998 bp, Homo sapiens
tacttctgcacctaggctgtgagggaggtggaggctgcaacagggtgggaaggtagtcaaacatcccaggaagtgaggggagtttcttgattccagggtttccctccggccgtatcttttttttggattttccaggagttaactgctctttgaaaataatcacccagccgagaattagtatttttatgtatggttaaaccttggcgtctagccatattttatgtcataatacaatggatttgtgaagagcagattccatgagtaactctgacaggtattttagatcatgatctcaacaatattcttccaaaatggcatacatcttttgtacaaagaacttgaaatgtaaatactgtgtttgtgctgtaagagttgtgtatttcaaaaactgaaatctcataaaaagttaaatttttgtctgacactttgatttttaaatctttgaggattgagtttactgttactcagattcagcagtcacttgagtgcctttactgtgtatcaggttctgtgctgaacattactaaaattaagtggaaagtaaggaaagattagtattatacagaagaatgttgctttatggggggaaaatagtttctaaatggaatttatcatatggtaaaatttaggatatctgggtatcattataaaagctgagatttattctagaaaagttagagaaatgaacatttgtctgtaatgacgatttctgtggttagatgaatatagtccatacctaattaggagcttgataatgggatggataatacaatcataggctattcatagactcattctaatgattctgtgattcagtagaatcattagaacagaggaacctcagaagttgatgagcagtcagatggtcagaaccatttgttcaaatcctatagaaaaggtcactctgtgttttagtttttttgtgctgctgtaacaaaatacctcagactgggtaatttacaaagaacagaaattcattttcttacagttctggaggc

SEQ ID NO: 327666 - DNA, 5422 bp, Homo sapiens
actgcttaaaggaaatagcagacagacagtatggaggggctacttgacaacagataaagaagtccctggattagtgctaatgcaagatttggctttcctgagtggatttccaccaacattcaaggaaacaaatcaactaaaaacaaaattgccagaaaatctttcctctaaagtcaaactgttgcagttgtattcagaggccagtgtagcgcttctaaaactgaataaccccaaggattttcaagaattgaataagcaaactaagaagaacatgaccattgatggaaaagaactgaccataagtcctgcatatttattatgggatctgagcgccatcagccagtctaagcaggatgaagacatctctgccagtcgttttgaagataacgaagaactgaggtactcattgcgatctatcgagaggcatgcaccatgggttcggaatattttcattgtcaccaacgggcagattccatcctggctgaaccttgacaatcctcgagtgacaatagtaacacaccaggatgtttttcgaaatttgagccacttgcctacctttagttcacctgctattgaaagtcacattcatcgcatcgaagggctgtcccagaagtttatttacctaaatgatgatgtcatgtttgggaaggatgtctggccagatgatttttacagtcactccaaaggccagaaggtttatttgacatggcctgtgccaaactgtgccgagggctgcccaggttcctggattaaggatggctattgtgacaaggcttgtaataattcagcctgcgattgggatggtggggattgctctggaaacagtggagggagtcgctatattgcaggaggtggaggtactgggagtattggagttggacagccctggcagtttggtggaggaataaacagtgtctcttactgtaatcagggatgtgcgaattcctggctcgctgataagttctgtgaccaagcatgcaatgtcttgtcctgtgggtttgatgctggcgactgtgggcaagatcattttcatgaattgtataaagtgatccttctcccaaaccagactcactatattattccaaaaggtgaatgcctgccttatttcagctttgcagaagtagccaaaagaggagttgaaggtgcctatagtgacaatccaataattcgacatgcttctattgccaacaagtggaaaaccatccacctcataatgcacagtggaatgaatgccaccacaatacattttaatctcacgtttcaaaatacaaacgatgaagagttcaaaatgcagataacagtggaggtggacacaagggagggaccaaaactgaattctacagcccagaagggttacgaaaatttagttagtcccataacacttcttccagaggcggaaatcctttttgaggatattcccaaagaaaaacgcttcccgaagtttaagagacatgatgttaactcaacaaggagagcccaggaagaggtgaaaattcccctggtaaatatttcactccttccaaaagacgcccagttgagtctcaataccttggatttgcaactggaacatggagacatcactttgaaaggatacaatttgtccaagtcagccttgctgagatcatttctgatgaactcacagcatgctaaaataaaaaatcaagctataataacagatgaaacaaatgacagtttggtggctccacaggaaaaacaggttcataaaagcatcttgccaaacagcttaggagtgtctgaaagattgcagaggttgacttttcctgcagtgagtgtaaaagtgaatggtcatgaccagggtcagaatccacccctggacttggagaccacagcaagatttagagtggaaactcacacccaaaaaaccataggcggaaatgtgacaaaagaaaagcccccatctctgattgttccactggaaagccagatgacaaaagaaaagaaaatcacagggaaagaaaaagagaacagtagaatggaggaaaatgctgaaaatcacataggcgttactgaagtgttacttggaagaaagctgcagcattacacagatagttacttgggctttttgccatgggagaaaaaaaagtatttccaagatcttctcgacgaagaagagtcattgaagacacaattggcatacttcactgatagcaaaaatactgggaggcaactaaaagatacatttgcagattccctcagatatgtaaataaaattctaaatagcaagtttggattcacatcgcggaaagtccctgctcacatgcctcacatgattgaccggattgttatgcaagaactgcaagatatgttccctgaagaatttgacaagacgtcatttcacaaagtgcgccattctgaggatatgcagtttgccttctcttatttttattatctcatgagtgcagtgcagccactgaatatatctcaagtctttgatgaagttgatacagatcaatctggtgtcttgtctgacagagaaatccgaacactggctaccagaattcacgaactgccgttaagtttgcaggatttgacaggtctggaacacatgctaataaattgctcaaaaatgcttcctgctgatatcacgcagctaaataatattccaccaactcaggaatcctactatgatcccaacctgccaccggtcactaaaagtctagtaacaaactgtaaaccagtaactgacaaaatccacaaagcatataaggacaaaaacaaatataggtttgaaatcatgggagaagaagaaatcgcttttaaaatgattcgtaccaacgtttctcatgtggttggccagttggatgacataagaaaaaaccctaggaagtttgtttgcctgaatgacaacattgaccacaatcataaagatgctcagacagtgaaggctgttctcagggacttctatgaatccatgttccccataccttcccaatttgaactgccaagagagtatcgaaaccgtttccttcatatgcatgagctgcaggaatggagggcttatcgagacaaattgaagttttggacccattgtgtactagcaacattgattatgtttactatattctcattttttgctgagcagttaattgcacttaagcggaagatatttcccagaaggaggatacacaaagaagctagtcccaatcgaatcagagtatagaagatcttcatttgaaaaccatctacctcagcatttactgagcattttaaaactcagcttcacagagatgtctttgtgatgtgatgcttagcagtttggcccgaagaaggaaaatatccagtaccatgctgttttgtggcatgaatatagcccactgaccaggaattatttaaccaacccactgaaaacttgtgtgttgagcagctctgaactgattttacttttaaagaatttgctcatggacctgtcatcctttttataaaaaggctcactgacaagagacagctgttaatttcccacagcaatcattgcagactaactttattaggagaagcctatgccagctgggagtgattgctaagaggctccagtctttgcattccaaagccttttgctaaagttttgcactttttttttttcatttcccatttttaagtagttactaagttaactagttattcttgcttctgagtataacgaattgggatgtctaaacctatttttatagatgttatttaaataatgcagcaatatcacctcttattgacaatacctaaattatgagttttattaatatttaagactgtaaatggtcttaaaccactaactactgaagagctcaatgattgacatctgaaatgctttgtaattattgacttcagcccctaagaatgctatgatttcacgtgcaggtctaatttcaaagggctagagttagtactacttaccagatgtaattatgttttggaaatgtacatattcaaacagaagtgcctcattttagaaatgagtagtgctgatggcactggcacattacagtggtgtcttgtttaatactcattggtatattccagtagctatctctctcagttggtttttgatagaacagaggccagcaaactttctttgtaaaaggctggttagtaaattattgcaggccacctgtgtctttgtcatacattcttcttgctgttgtttagtttgttttttttcaaacaaccctctaaaaatgtaaaaaccatgtttagcttgcagctgtacaaaaactgcccaccagccagatgtgaccctcaggccatcatttgccaatcactgagaattagtttttgttgttgttgttgttgttgtttttgagacagagtctctctctgttgcccaggctggagtgcagtggcgcaatctcagctcactgcaacctccgcctcccgggttcaagcagttctgtctcagccttctgagtagctgggactacaggtgcatgccaccacaccctgctaatttttgtatttttagtagagacgggggttccaccatattggtcaggcttatcttgaactcctgacctcaggtgatccacctgcctctgcctcccaaagtgctgagattacaggcataagccagtgcacccagccgagaattagtatttttatgtatggttaaaccttggcgtctagccatattttatgtcataatacaatggatttgtgaagagcagattccatgagtaactctgacaggtattttagatcatgatctcaacaatattcttccaaaatggcatacatcttttgtacaaagaacttgaaatgtaaatactgtgtttgtgctgtaagagttgtgtatttcaaaaactgaaatctcataaaaagttaaatttttgtctgacactttgatttttaaatctttgaggattgagtttactgttactcagattcagcagtcacttgagtgcctttactgtgtatcaggttctgtgctgaacattactaaaattaagtggaaagtaaggaaagattagtattatacagaagaatgttgctttatggggggaaaatagtttctaaatggaatttatcatatggtaaaatttaggatatctgggtatcattataaaagctgagatttattctagaaaagttagagaaatgaacatttgtctgtaatgacgatttctgtggttagatgaatatagtccatacctaattaggagcttgataatgggatggataatacaatcataggctattcatagactcattctaatgattctgtgattcagtagaatcattagaacagaggaacctcagaagttgatgagcagtcagatggtcagaaccatttgttcaaatcctatagaaaaggtcactctgtgttttagtttttttgtgctgctgtaacaaaatacctcagactgggtaatttacaaagaacagaaattcattttcttacagttctggaggc

SEQ ID NO: 327667 - DNA, 4779 bp, Homo sapiens
gatggggttttaccatgttggccaggctggtctcaaactcctgacctcaggtgatccagcctcctctgcctcccaaagtgttgagattacaggcgtcagccaccacacccagtccagaactgtctttcaaaattgtaattacagcaagaatccctcttcttcctccgatctacaggaaacagtggagggagtcgctatattgcaggaggtggaggtactgggagtattggagttggacagccctggcagtttggtggaggaataaacagtgtctcttactgtaatcagggatgtgcgaattcctggctcgctgataagttctgtgaccaagcatgcaatgtcttgtcctgtgggtttgatgctggcgactgtgggcaagatcattttcatgaattgtataaagtgatccttctcccaaaccagactcactatattattccaaaaggtgaatgcctgccttatttcagctttgcagaagtagccaaaagaggagttgaaggtgcctatagtgacaatccaataattcgacatgcttctattgccaacaagtggaaaaccatccacctcataatgcacagtggaatgaatgccaccacaatacattttaatctcacgtttcaaaatacaaacgatgaagagttcaaaatgcagataacagtggaggtggacacaagggagggaccaaaactgaattctacagcccagaagggttacgaaaatttagttagtcccataacacttcttccagaggcggaaatcctttttgaggatattcccaaagaaaaacgcttcccgaagtttaagagacatgatgttaactcaacaaggagagcccaggaagaggtgaaaattcccctggtaaatatttcactccttccaaaagacgcccagttgagtctcaataccttggatttgcaactggaacatggagacatcactttgaaaggatacaatttgtccaagtcagccttgctgagatcatttctgatgaactcacagcatgctaaaataaaaaatcaagctataataacagatgaaacaaatgacagtttggtggctccacaggaaaaacaggttcataaaagcatcttgccaaacagcttaggagtgtctgaaagattgcagaggttgacttttcctgcagtgagtgtaaaagtgaatggtcatgaccagggtcagaatccacccctggacttggagaccacagcaagatttagagtggaaactcacacccaaaaaaccataggcggaaatgtgacaaaagaaaagcccccatctctgattgttccactggaaagccagatgacaaaagaaaagaaaatcacagggaaagaaaaagagaacagtagaatggaggaaaatgctgaaaatcacataggcgttactgaagtgttacttggaagaaagctgcagcattacacagatagttacttgggctttttgccatgggagaaaaaaaagtatttccaagatcttctcgacgaagaagagtcattgaagacacaattggcatacttcactgatagcaaaaatactgggaggcaactaaaagatacatttgcagattccctcagatatgtaaataaaattctaaatagcaagtttggattcacatcgcggaaagtccctgctcacatgcctcacatgattgaccggattgttatgcaagaactgcaagatatgttccctgaagaatttgacaagacgtcatttcacaaagtgcgccattctgaggatatgcagtttgccttctcttatttttattatctcatgagtgcagtgcagccactgaatatatctcaagtctttgatgaagttgatacagatcaatctggtgtcttgtctgacagagaaatccgaacactggctaccagaattcacgaactgccgttaagtttgcaggatttgacaggtctggaacacatgctaataaattgctcaaaaatgcttcctgctgatatcacgcagctaaataatattccaccaactcaggaatcctactatgatcccaacctgccaccggtcactaaaagtctagtaacaaactgtaaaccagtaactgacaaaatccacaaagcatataaggacaaaaacaaatataggtttgaaatcatgggagaagaagaaatcgcttttaaaatgattcgtaccaacgtttctcatgtggttggccagttggatgacataagaaaaaaccctaggaagtttgtttgcctgaatgacaacattgaccacaatcataaagatgctcagacagtgaaggctgttctcagggacttctatgaatccatgttccccataccttcccaatttgaactgccaagagagtatcgaaaccgtttccttcatatgcatgagctgcaggaatggagggcttatcgagacaaattgaagttttggacccattgtgtactagcaacattgattatgtttactatattctcattttttgctgagcagttaattgcacttaagcggaagatatttcccagaaggaggatacacaaagaagctagtcccaatcgaatcagagtatagaagatcttcatttgaaaaccatctacctcagcatttactgagcattttaaaactcagcttcacagagatgtctttgtgatgtgatgcttagcagtttggcccgaagaaggaaaatatccagtaccatgctgttttgtggcatgaatatagcccactgaccaggaattatttaaccaacccactgaaaacttgtgtgttgagcagctctgaactgattttacttttaaagaatttgctcatggacctgtcatcctttttataaaaaggctcactgacaagagacagctgttaatttcccacagcaatcattgcagactaactttattaggagaagcctatgccagctgggagtgattgctaagaggctccagtctttgcattccaaagccttttgctaaagttttgcactttttttttttcatttcccatttttaagtagttactaagttaactagttattcttgcttctgagtataacgaattgggatgtctaaacctatttttatagatgttatttaaataatgcagcaatatcacctcttattgacaatacctaaattatgagttttattaatatttaagactgtaaatggtcttaaaccactaactactgaagagctcaatgattgacatctgaaatgctttgtaattattgacttcagcccctaagaatgctatgatttcacgtgcaggtctaatttcaaagggctagagttagtactacttaccagatgtaattatgttttggaaatgtacatattcaaacagaagtgcctcattttagaaatgagtagtgctgatggcactggcacattacagtggtgtcttgtttaatactcattggtatattccagtagctatctctctcagttggtttttgatagaacagaggccagcaaactttctttgtaaaaggctggttagtaaattattgcaggccacctgtgtctttgtcatacattcttcttgctgttgtttagtttgttttttttcaaacaaccctctaaaaatgtaaaaaccatgtttagcttgcagctgtacaaaaactgcccaccagccagatgtgaccctcaggccatcatttgccaatcactgagaattagtttttgttgttgttgttgttgttgtttttgagacagagtctctctctgttgcccaggctggagtgcagtggcgcaatctcagctcactgcaacctccgcctcccgggttcaagcagttctgtctcagccttctgagtagctgggactacaggtgcatgccaccacaccctgctaatttttgtatttttagtagagacgggggttccaccatattggtcaggcttatcttgaactcctgacctcaggtgatccacctgcctctgcctcccaaagtgctgagattacaggcataagccagtgcacccagccgagaattagtatttttatgtatggttaaaccttggcgtctagccatattttatgtcataatacaatggatttgtgaagagcagattccatgagtaactctgacaggtattttagatcatgatctcaacaatattcttccaaaatggcatacatcttttgtacaaagaacttgaaatgtaaatactgtgtttgtgctgtaagagttgtgtatttcaaaaactgaaatctcataaaaagttaaatttttgtctgacactttgatttttaaatctttgaggattgagtttactgttactcagattcagcagtcacttgagtgcctttactgtgtatcaggttctgtgctgaacattactaaaattaagtggaaagtaaggaaagattagtattatacagaagaatgttgctttatggggggaaaatagtttctaaatggaatttatcatatggtaaaatttaggatatctgggtatcattataaaagctgagatttattctagaaaagttagagaaatgaacatttgtctgtaatgacgatttctgtggttagatgaatatagtccatacctaattaggagcttgataatgggatggataatacaatcataggctattcatagactcattctaatgattctgtgattcagtagaatcattagaacagaggaacctcagaagttgatgagcagtcagatggtcagaaccatttgttcaaatcctatagaaaaggtcactctgtgttttagtttttttgtgctgctgtaacaaaatacctcagactgggtaatttacaaagaacagaaattcattttcttacagttctggaggc

SEQ ID NO: 327668 - DNA, 5125 bp, Homo sapiens
actgcttaaaggaaatagcagacagacagtatggaggggctacttgacaacagataaagaagtccctggattagtgctaatgcaagatttggctttcctgagtggatttccaccaacattcaaggaaacaaatcaactaaaaacaaaattgccagaaaatctttcctctaaagtcaaactgttgcagttgtattcagaggccagtgtagcgcttctaaaactgaataaccccaaggattttcaagaattgaataagcaaactaagaagaacatgaccattgatggaaaagaactgaccataagtcctgcatatttattatgggatctgagcgccatcagccagtctaagcaggatgaagacatctctgccagtcgttttgaagataacgaagaactgaggtactcattgcgatctatcgagaggcatgcaccatgggttcggaatattttcattgtcaccaacgggcagattccatcctggctgaaccttgacaatcctcgagtgacaatagtaacacaccaggatgtttttcgaaatttgagccacttgcctacctttagttcacctgctattgaaagtcacattcatcgcatcgaagggctgtcccagaagtttatttacctaaatgatgatgtcatgtttgggaaggatgtctggccagatgatttttacagtcactccaaaggccagaaggtttatttgacatggcctgtgccaaactgtgccgagggctgcccaggttcctggattaaggatggctattgtgacaaggcttgtaataattcagcctgcgattgggatggtggggattgctctggaaacagtggagggagtcgctatattgcaggaggtggaggtactgggagtattggagttggacagccctggcagtttggtggaggaataaacagtgtctcttactgtaatcagggatgtgcgaattcctggctcgctgataagttctgtgaccaagcatgcaatgtcttgtcctgtgggtttgatgctggcgactgtgggcaagatcattttcatgaattgtataaagtgatccttctcccaaaccagactcactatattattccaaaaggtgaatgcctgccttatttcagctttgcagaagtagccaaaagaggagttgaaggtgcctatagtgacaatccaataattcgacatgcttctattgccaacaagtggaaaaccatccacctcataatgcacagtggaatgaatgccaccacaatacattttaatctcacgtttcaaaatacaaacgatgaagagttcaaaatgcagataacagtggaggtggacacaagggagggaccaaaactgaattctacagcccagaagggttacgaaaatttagttagtcccataacacttcttccagaggcggaaatcctttttgaggatattcccaaagaaaaacgcttcccgaagtttaagagacatgatgttaactcaacaaggagagcccaggaagaggtgaaaattcccctggtaaatatttcactccttccaaaagacgcccagttgagtctcaataccttggatttgcaactggaacatggagacatcactttgaaaggatacaatttgtccaagtcagccttgctgagatcatttctgatgaactcacagcatgctaaaataaaaaatcaagctataataacagatgaaacaaatgacagtttggtggctccacaggaaaaacaggttcataaaagcatcttgccaaacagcttaggagtgtctgaaagattgcagaggttgacttttcctgcagtgagtgtaaaagtgaatggtcatgaccagggtcagaatccacccctggacttggagaccacagcaagatttagagtggaaactcacacccaaaaaaccataggcggaaatgtgacaaaagaaaagcccccatctctgattgttccactggaaagccagatgacaaaagaaaagaaaatcacagggaaagaaaaagagaacagtagaatggaggaaaatgctgaaaatcacataggcgttactgaagtgttacttggaagaaagctgcagcattacacagatagttacttgggctttttgccatgggagaaaaaaaagtatttccaagatcttctcgacgaagaagagtcattgaagacacaattggcatacttcactgatagcaaaaatactgggaggcaactaaaagatacatttgcagattccctcagatatgtaaataaaattctaaatagcaagtttggattcacatcgcggaaagtccctgctcacatgcctcacatgattgaccggattgttatgcaagaactgcaagatatgttccctgaagaatttgacaagacgtcatttcacaaagtgcgccattctgaggatatgcagtttgccttctcttatttttattatctcatgagtgcagtgcagccactgaatatatctcaagtctttgatgaagttgatacagatcaatctggtgtcttgtctgacagagaaatccgaacactggctaccagaattcacgaactgccgttaagtttgcaggatttgacaggtctggaacacatgctaataaattgctcaaaaatgcttcctgctgatatcacgcagctaaataatattccaccaactcaggaatcctactatgatcccaacctgccaccggtcactaaaagtctagtaacaaactgtaaaccagtaactgacaaaatccacaaagcatataaggacaaaaacaaatataggtttgaaatcatgggagaagaagaaatcgcttttaaaatgattcgtaccaacgtttctcatgtggttggccagttggatgacataagaaaaaaccctaggaagtttgtttgcctgaatgacaacattgaccacaatcataaagatgctcagacagtgaaggctgttctcagggacttctatgaatccatgttccccataccttcccaatttgaactgccaagagagtatcgaaaccgtttccttcatatgcatgagctgcaggaatggagggcttatcgagacaaattgaagttttggacccattgtgtactagcaacattgattatgtttactatattctcattttttgctgagcagttaattgcacttaagcggaagatatttcccagaaggaggatacacaaagaagctagtcccaatcgaatcagagtatagaagatcttcatttgaaaaccatctacctcagcatttactgagcattttaaaactcagcttcacagagatgtctttgtgatgtgatgcttagcagtttggcccgaagaaggaaaatatccagtaccatgctgttttgtggcatgaatatagcccactgaccaggaattatttaaccaacccactgaaaacttgtgtgttgagcagctctgaactgattttacttttaaagaatttgctcatggacctgtcatcctttttataaaaaggctcactgacaagagacagctgttaatttcccacagcaatcattgcagactaactttattaggagaagcctatgccagctgggagtgattgctaagaggctccagtctttgcattccaaagccttttgctaaagttttgcactttttttttttcatttcccatttttaagtagttactaagttaactagttattcttgcttctgagtataacgaattgggatgtctaaacctatttttatagatgttatttaaataatgcagcaatatcacctcttattgacaatacctaaattatgagttttattaatatttaagactgtaaatggtcttaaaccactaactactgaagagctcaatgattgacatctgaaatgctttgtaattattgacttcagcccctaagaatgctatgatttcacgtgcaggtctaatttcaaagggctagagttagtactacttaccagatgtaattatgttttggaaatgtacatattcaaacagaagtgcctcattttagaaatgagtagtgctgatggcactggcacattacagtggtgtcttgtttaatactcattggtatattccagtagctatctctctcagttggtttttgatagaacagaggccagcaaactttctttgtaaaaggctggttagtaaattattgcaggccacctgtgtctttgtcatacattcttcttgctgttgtttagtttgttttttttcaaacaaccctctaaaaatgtaaaaaccatgtttagcttgcagctgtacaaaaactgcccaccagccagatgtgaccctcaggccatcatttgccaatcactgagaattagtttttgttgttgttgttgttgttgtttttgagacagagtctctctctgttgcccaggctggagtgcagtggcgcaatctcagctcactgcaacctccgcctcccgggttcaagcagttctgtctcagccttctgagtagctgggactacaggtgcatgccaccacaccctgctaatttttgtatttttagtagagacgggggttccaccatattggtcaggcttatcttgaactcctgacctcaggtgatccacctgcctctgcctcccaaagtgctgagattacaggcataagccagtgcacccagccgagaattagtatttttatgtatggttaaaccttggcgtctagccatattttatgtcataatacaatggatttgtgaagagcagattccatgagtaactctgacaggtattttagatcatgatctcaacaatattcttccaaaatggcatacatcttttgtacaaagaacttgaaatgtaaatactgtgtttgtgctgtaagagttgtgtatttcaaaaactgaaatctcataaaaagcaaaaaaaaaagaaaagaaaacagaaaccatgtgttgggggcgcgccggagcacccagggaaaaaaggttttacaacaccacgtggttggggcgccggctgggcccagtagggtaagcgacacactgtggccactcagcacgtgtcccaagagaaaaccgggcgcagacactgctgctgcggttcccaccaagttaaaaaggcccgggggaacccgagggtctggaaacaaacccggaaggggccggacgccataacgggctcaacacggggcaaggaagctattactaccgcgg

SEQ ID NO: 327669 - DNA, 709 bp, Homo sapiens
aagtcagccttgctgagatcatttctgatgaactcacagcatgctaaaataaaaaatcaagctataataacagatgaaacaaatgacagtttggtggctccacaggaaaaacaggttcataaaagcatcttgccaaacagcttaggagtgtctgaaagattgcagaggttgacttttcctgcagtgagtgtaaaagtgaatggtcatgaccagggtcagaatccacccctggacttggagaccacagcaagatttagagtggaaactcacacccaaaaaaccataggcggaaatgtgacaaaagaaaagcccccatctctgattgttccactggaaagccagatgacaaaagaaaagaaaatcacagggaaagaaaaagagaacagtagaatggaggaaaatgctgaaaatcacataggcgttactgaagtgttacttggaagaaagctgcagcattacacagatagttacttgggctttttgccatgggagaaaaaaaagtatttccaagatcttctcgacgtaagtaacatccagcctcattctttctcatgctcaggaagagtaaataatctcatgataatatcattatagctaccatttattcagcacttccctgtgccggccatggaactaaatgcttttcttacatggtttcatttaatttacccaataaccctaataataaaaaatgtcatatgaaggtatt

SEQ ID NO: 327670 - DNA, 3047 bp, Homo sapiens
atggagatcagaggggcactcgatctgcgaaaaaggcaagttctaatattccttgttttgctgggattgtctcgggcaggtactgaatctgcacactattctgtggcagaggaaacagaaattggctcttttgtggctaatctagcgagggacctagggctgggggtggaggagctgtcttcacgtgaagcccgggtagtgtctgatgataataaaaagtatttgcaccttgatttgctgactgggaatttgctcctaaatgagaaactagaccgagacgagctgtgtggctccaccgagccctgtgtgctgcattttcaggtggttttggaaaaccctttacagttttttcggtttgagctgtgtgtcaaagacataaatgatcactcccctacatttctagacaaggaaatacttattaaaatatcagaaggtaccactgttggagctacctttctaatggagagtgctcaagatttggatgtcggaagcaacagtctccaaaactacacaattagccccaattctcacttctacattaaaattcccgacagtagtgacagaaagatatacccagagctggtcctagatagagctttagattatgaacaggaagctgaactcagattaacactcacagcagtggatggtggatccccgcccaagtctgggacaactttggttctcatcaaggtgttggacatcaatgataatgcccctgagtttcctcagagtctctatgaggtgcaagtccccgaggacagaccccttggctcctggattgccaccatctcagctaaggatctggatgcaggaaactatggaaaaatatcttacacatttttccatgcatcagaagatattcgtaaaacatttgaaattaatccaatatctggggaagttaatttgagatcacccctggattttgaagtaatacagtcctacactataaatattcaggcaacagatggtgggggtctttcaggaaaatgcacccttctagttaaagttatggatataaacgacaacccaccagaagtgaccatatcgtcgattacaaagagaattccagagaatgcctcagagaccctagtagctctttttagtatcctagaccaagactctggagacaatgggaggatgatttgctctattcaagataacctcccttttttcctgaaaccgaccttcaagaactttttcactctagtttctgaaaaagcactggacagagagagccaagccgagtacaacatcacgatcaccgtcacagacttggggacacccaggctgaaaaccgagtacaacataaccgtgctgctctctgacgtcaatgacaacgcccccaccttcacccaaacctcctacaccctgttcgtccgcgagaacaacagccccgccctgcacatcggcagcgtcagcgccacagacagagactcaggcaccaacgcccaggtcaactactcgctgctgccgccccaggaccggcacctgcccctcgcctccttggtctccatcaacgcggacaatggccacctgtttgccctcaggtcgctggactacgaggccctacaggagttcgagtttcgcgtgggcgccacagaccgcgggtccccggcgttgagcagcgaggcgctggtgcgcgtgctggtgctggacgccaacgacaactcgcccttcgtgctgtacccgctgcagaacggctccgcgccctgcaccgagctggtgccccgggcggccgagccgggctacctggtgaccaaggtggtggcggtggacggcgactcgggccagaacgcctggctgtcgtaccagctgctcaaggccacggagcccgggctgttcggcgtgtgggcgcacaatggcgaggtgcgcaccgccaggctgctgagcgagcgcgacgcggccaagcacaggctggtggtgctggtcaaggacaatggcgagcctcctcgctcggccaccgccacgctgcacgtgctcctggtggacggcttctcccagccctacctgccgctccctgaggcggccccggcccaggcccaggccgactccctcaccgtctacctggtggtggcattggcctcggtgtcgtcgctcttcctcttctcggtgctcctgttcgtggcggtgcggctgtgcaggaggagcagggcggcctcggtgggtcgctgctcggtgcccgagggtccctttccagggcatctggtggacgtgagcggcaccgggaccctgtcccagagctaccaatacgaggtgtgtctgacaggaggttccgggacaaatgagttcaaatttctgaagccgattatccccaattttcaagttcatgacactggtaggaatatgggggaaatcgagaactttcgaaatagctttggacttaacattcaataaaacaatttattttaaatgtctaatttttggttattcttggcaagctgatggtactttttgcataatcttttgtggattcttggttgtactgtagttgcatgcatgattatagctcttgtttttctcacagtttctttaaaaatctttattagtggctataatgacgtggaaatgtaatctgtgttttctggtttttcatttatttggccaaaatgttatattaatggagttattgctatttttgctgtgataatggtattatgcaagaccatattctcaattatttggatatgcaaactaaagtattaagagctaatgtcattatatatgtaacttaaatctagacaccatcaaagcataaaataaaaataaaaagcgttgctgaatctgggtcgaaaatgtagtgcgtttatcccactattctctctgaaaatgttctttagaaagggtaacaaagatgctatccctccattttcagttctggagaaccttattagtttttcaaatatttactttatgatgaaacttaagtggtcacattggaaattattaatttcttaagtaattttttctgtaactgcttttgttgataatcctgttgtggaggaagagtcttataatgctctgggctttgctgtcactctttggtt

SEQ ID NO: 327671 - DNA, 685 bp, Homo sapiens
ggcacgagatggaacctttgtattgtaattatcatagagaagcacagtttgcatcatattatggcaatttattctctatgataattacaatacaaaggttccattcagtgcagcatatacaataatgtaatttagtctaacacagttgaccctattttttgacacttccattgtttaaaaatacacatggaaaaaaaaaaaccctatatgcttactgtgcacctagagcttttttataacaacgtctttttgtttgtttgttttggattctttaaatatatattattctcatttagtgccctctttagccagaatctcattactgcttcatttttgtaataacatttaatttagatattttccatatattggcactgctaaaatagaatatagcatctttcatatggtaggaaccaacaaggaaactttcctttaactccctttttacactttatggtaagtagcagggggggaaatgcatttatagatcatttctaggcaaaattgtgaagctaatgaccaacctgtttctacctatatgcagtctctttattttactagaaatgggaatcatggcctcttgaagagaaaaaagtcaccattctgcatttagctgtattcatatattgcatttctgtattttttgtttgtattgtaaaaaattcacataataaacgatgttgtg

SEQ ID NO: 327672 - DNA, 799 bp, Homo sapiens
tttagggccaaaaccctgtgaccagggttcaagggcaggagtcaaagccttagccactccaatgcttcttgaagtcctgttctacctaacttttgctggcctaatacatcttcagagtgtttctgataaacttaaaccattggatattgagtttatgaagcgtttgcatgaaaaagtgaatatcatcccacttattgccaaagcagacacactcacaccagaggaatgccaacagtttaaaaaacagataatgaaagaaatccaagaacataaaattaaaatatacgaatttccagaaacagatgatgaagaagaaaataaacttgttaaaaagataaaggaccgtttacctcttgctgtggtaggtagtaatactatcattgaagttaatggcaaaagggtcagaggaaggcagtatccttggggtgttgctgaagttgaaaatggtgaacattgtgattttacaatcctaagaaatatgttgataagaacacacatgcaggacttgaaagatgttactaataatgtccactatgagaactacagaagcagaaaacttgcagctgtgacttataatggagttgataacaacaagaataaagggcagctgactaagagccctctggcacaaatggaagaagaaagaagggagcatgtagctaaaatgaagaagatggagatggagatggagcaggtgtttgagatgaaggtcaaagaaaaagttcaaaaactgaaggactctgaagctgagctccagcggcgccatgagcaaatgaaaaagaatttggaagcacagcac

SEQ ID NO: 327673 - DNA, 439 bp, Homo sapiens
cccccccgcccgccgccccccatccctccaacacaaccactcccacccagcgccctgtccagttacgatcctaccgccccttcactccagccaccccattccattcacacatttcccacacaccggcccccctccaatagaatatagcatctttcatatggtaggaaccaacaaggaaactttcctttaactccctttttacactttatggtaagtagcagggggggaaatgcatttatagatcatttctaggcaaaattgtgaagctaatgaccaacctgtttctacctatatgcagtctctttattttactagaaatgggaatcatggcctcttgaagagaaaaaagtcaccattctgcatttagctgtattcatatattgcatttctgtattttttgtttgtattgtaaaaaattcacataataaacgatgttgtg

SEQ ID NO: 327674 - DNA, 4293 bp, Homo sapiens
agcgggagtcgagcgagagcctgtggaggagtccgcctgctgtagcgtgcgtaagcaaggcagctacgccgggcggctacgctgcggaatcggcgtaggcgcctttggagaatcggcgggctgcgctccgctggggctggtcgcggagggggggaggggatgtcggtcagtgcgagatccgctgctgctgaggagaggagcgtcaacagcagcaccatggtagctcaacagaagaaccttgaaggctatgtgggatttgccaatctcccaaatcaagtatacagaaaatcggtgaagagaggttttgaattcacgcttatggtagtgggtgaatctggattgggaaagtcgacattaatcaactcattattcctcacagatttgtattctccagagtatccaggtccttctcatagaattaaaaagactgtacaggtggaacaatccaaagttttaatcaaagaaggtggtgttcagttgctgctcacaatagttgataccccaggatttggagatgcagtggataatagtaattgctggcagcctgttatcgactacattgatagtaaatttgaggactacctaaatgcagaatcacgagtgaacagacgtcagatgcctgataacagggtgcagtgttgtttatacttcattgctccttcaggacatggacttaaaccattggatattgagtttatgaagcgtttgcatgaaaaagtgaatatcatcccacttattgccaaagcagacacactcacaccagaggaatgccaacagtttaaaaaacagataatgaaagaaatccaagaacataaaattaaaatatacgaatttccagaaacagatgatgaagaagaaaataaacttgttaaaaagataaaggaccgtttacctcttgctgtggtaggtagtaatactatcattgaagttaatggcaaaagggtcagaggaaggcagtatccttggggtgttgctgaagttgaaaatggtgaacattgtgattttacaatcctaagaaatatgttgataagaacacacatgcaggacttgaaagatgttactaataatgtccactatgagaactacagaagcagaaaacttgcagctgtgacttataatggagttgataacaacaagaataaagggcagctgactaagagccctctggcacaaatggaagaagaaagaagggagcatgtagctaaaatgaagaagatggagatggagatggagcaggtgtttgagatgaaggtcaaagaaaaagttcaaaaactgaaggactctgaagctgagctccagcggcgccatgagcaaatgaaaaagaatttggaagcacagcacaaagaattggaggaaaaacgtcgtcagttcgaggatgagaaagcaaactgggaagctcaacaacgtattttagaacaacagaactcttcaagaaccttggaaaagaacaagaagaaagggaagatcttttaaactctctattgaccaccagttaacgtattagttgccaatatgccagcttggacatcagtgtttgttggatccgtttgaccaatttgcaccagttttatccataatgatggatttaacagcatgacaaaaattattttttttttggttcttgatggagattaagatgccttgaattgtctagggtgttctgtacttagaaagtaagagctctaagtacctttcctacattttctttttttattaaacagatatcttcagtttaatgcaagagaacattttactgttgtacaatcatgttctggtggtttgattgtttacaggatattccaaaataaaaggactctggaagattttcattgaggataaattgccataatatgatgcaaactgtgcttctctatgataattacaatacaaaggttccattcagtgcagcatatacaataatgtaatttagtctaacacagttgaccctattttttgacacttccattgtttaaaaatacacatggaaaaaaaaaaaccctatatgcttactgtgcacctagagcttttttataacaacgtctttttgtttgtttgttttggattctttaaatatatattattctcatttagtgccctctttagccagaatctcattactgcttcatttttgtaataacatttaatttagatattttccatatattggcactgctaaaatagaatatagcatctttcatatggtaggaaccaacaaggaaactttcctttaactccctttttacactttatggtaagtagcagggggggaaatgcatttatagatcatttctaggcaaaattgtgaagctaatgaccaacctgtttctacctatatgcagtctctttattttactagaaatgggaatcatggcctcttgaagagaaaaaagtcaccattctgcatttagctgtattcatatattgcatttctgtattttttgtttgtattgtaaaaaattcacataataaacgatgttgtgatgtaatattgtgtgaggtcttaaatatcctacagtcgatgtacaagagtagagtatgtttgggaagaaacttttcagcttaagtttgcctcctctacaatgacatcttttatatgcttgtctcatttagaatgcatatgtgctgattttctaatttaagagataccatatctctctattcatttctatctctcatttgtatgcttatttttctgagaacattttttttttcccccagacagggtcttgcttcattgcccaggctggagtgcggtggcacaaacacgactcgactgcagcctcaaccctctgggctcaagcagtcctcctgcctcagccccctgagtatctgggattgcaggcgtgcaccaccacgcctggctaatttttgtattttttgcagcctcccaaagttctgggattacaggcatgagccgtcatgcctggcctctgagaacagtttctgactcattcagattaggtatactctcaagtccctggaaactgaaattttttttaactgtaaagagggtagtgtcatttcttttcttaaggtcaagtgacatagattttaatgtaatgcataatttaggtaagaaattaattaatgtagcctagtttattatcttgaaatgttttaccctatttactttttaaaattaatgacctaagcggagggaataattataagtcaatagcagagagattgttgtttgggtgtttatttttttcagtttttgttttgagagattgggttaacacctctagccaaaattgtttggttttagggaggctaacaataacctactgaatttggaaaatgcaaaggtaaaaaatgtatatagactgcctgctgaactggttaagtactactgcttctgggaaatactatttcaaaattctatgtattataataataaatttgtaagacattcattattctaccatcctaatgaaaactttcagaagtctttctttatccatggcatgcccagggttttacctgaatctgatacaggatctatataactttactaggacttttgattgttgactccaggcttaggtatatcagaaggttctttttgccatttggcctgtggatgtctgagaagatcattcacaatacatgtaaaattcaggtaggcctaaggaaaggccagcctgtagaaagcaaaatggcagtgtctgttctccactgttggaggcattatgtaatttaagtatcctgttagccactgtctttctgctaattaagtggggctgaacaagtaagcactaataataccagtgaaccacttgggcaccttgtgggtagagttttgctgccacctagtggaatgggatatcattgcttccatatcaggttcacaagcaagttaagtgggcacagtttatttctgtgtagctcaggctgtaatcttgaaagctgaggagatacccatgcctctcagactcattagctgggtgtcacattaccacctgcacattctgacccaccgcatcttaatatgttttgtcctcttggagaaactaggagtagaagtcaggatatggtaggtaagggggaaaaaggaaagacggcttgatagctatgaatgcatgaggagcgaaatgttgactcagttatctagatcatggtctccaaacctgatgctatttccttacaaaaatatttgttgagcatgtgtccataattatatgtattgaacaatgaaaatatgtgtcaacaaatgtactgctacactaatgtgaacattatggaacaaaatttgaaagagtgaaataaaaggtttacactttaaaaaaaaac

SEQ ID NO: 327675 - DNA, 4326 bp, Homo sapiens
agcgggagtcgagcgagagcctgtggaggagtccgcctgctgtagcgtgcgtaagcaaggcagctacgccgggcggctacgctgcggaatcggcgtaggcgcctttggagaatcggcgggctgcgctccgctggggctggtcgcggagggggggaggggatgtcggtcagtgcgagatccgctgctgctgaggagaggagcgtcaacagcagcaccatggtagctcaacagaagaaccttgaaggctatgtgggatttgccaatctcccaaatcaagtatacagaaaatcggtgaagagaggttttgaattcacgcttatggtagtgggtgaatctggattgggaaagtcgacattaatcaactcattattcctcacagatttgtattctccagagtatccaggtccttctcatagaattaaaaagactgtacaggtggaacaatccaaagttttaatcaaagaaggtggtgttcagttgctgctcacaatagttgataccccaggatttggagatgcagtggataatagtaattgctggcagcctgttatcgactacattgatagtaaatttgaggactacctaaatgcagaatcacgagtgaacagacgtcagatgcctgataacagggtgcagtgttgtttatacttcattgctccttcaggacatggacttaaaccattggatattgagtttatgaagcgtttgcatgaaaaagtgaatatcatcccacttattgccaaagcagacacactcacaccagaggaatgccaacagtttaaaaaacagataatgaaagaaatccaagaacataaaattaaaatatacgaatttccagaaacagatgatgaagaagaaaataaacttgttaaaaagataaaggaccgtttacctcttgctgtggtaggtagtaatactatcattgaagttaatggcaaaagggtcagaggaaggcagtatccttggggtgttgctgaagttgaaaatggtgaacattgtgattttacaatcctaagaaatatgttgataagaacacacatgcaggacttgaaagatgttactaataatgtccactatgagaactacagaagcagaaaacttgcagctgtgacttataatggagttgataacaacaagaataaagggcagctgactaaacatttaatgattacccttaatattcgtgacaggagccctctggcacaaatggaagaagaaagaagggagcatgtagctaaaatgaagaagatggagatggagatggagcaggtgtttgagatgaaggtcaaagaaaaagttcaaaaactgaaggactctgaagctgagctccagcggcgccatgagcaaatgaaaaagaatttggaagcacagcacaaagaattggaggaaaaacgtcgtcagttcgaggatgagaaagcaaactgggaagctcaacaacgtattttagaacaacagaactcttcaagaaccttggaaaagaacaagaagaaagggaagatcttttaaactctctattgaccaccagttaacgtattagttgccaatatgccagcttggacatcagtgtttgttggatccgtttgaccaatttgcaccagttttatccataatgatggatttaacagcatgacaaaaattattttttttttggttcttgatggagattaagatgccttgaattgtctagggtgttctgtacttagaaagtaagagctctaagtacctttcctacattttctttttttattaaacagatatcttcagtttaatgcaagagaacattttactgttgtacaatcatgttctggtggtttgattgtttacaggatattccaaaataaaaggactctggaagattttcattgaggataaattgccataatatgatgcaaactgtgcttctctatgataattacaatacaaaggttccattcagtgcagcatatacaataatgtaatttagtctaacacagttgaccctattttttgacacttccattgtttaaaaatacacatggaaaaaaaaaaaccctatatgcttactgtgcacctagagcttttttataacaacgtctttttgtttgtttgttttggattctttaaatatatattattctcatttagtgccctctttagccagaatctcattactgcttcatttttgtaataacatttaatttagatattttccatatattggcactgctaaaatagaatatagcatctttcatatggtaggaaccaacaaggaaactttcctttaactccctttttacactttatggtaagtagcagggggggaaatgcatttatagatcatttctaggcaaaattgtgaagctaatgaccaacctgtttctacctatatgcagtctctttattttactagaaatgggaatcatggcctcttgaagagaaaaaagtcaccattctgcatttagctgtattcatatattgcatttctgtattttttgtttgtattgtaaaaaattcacataataaacgatgttgtgatgtaatattgtgtgaggtcttaaatatcctacagtcgatgtacaagagtagagtatgtttgggaagaaacttttcagcttaagtttgcctcctctacaatgacatcttttatatgcttgtctcatttagaatgcatatgtgctgattttctaatttaagagataccatatctctctattcatttctatctctcatttgtatgcttatttttctgagaacattttttttttcccccagacagggtcttgcttcattgcccaggctggagtgcggtggcacaaacacgactcgactgcagcctcaaccctctgggctcaagcagtcctcctgcctcagccccctgagtatctgggattgcaggcgtgcaccaccacgcctggctaatttttgtattttttgcagcctcccaaagttctgggattacaggcatgagccgtcatgcctggcctctgagaacagtttctgactcattcagattaggtatactctcaagtccctggaaactgaaattttttttaactgtaaagagggtagtgtcatttcttttcttaaggtcaagtgacatagattttaatgtaatgcataatttaggtaagaaattaattaatgtagcctagtttattatcttgaaatgttttaccctatttactttttaaaattaatgacctaagcggagggaataattataagtcaatagcagagagattgttgtttgggtgtttatttttttcagtttttgttttgagagattgggttaacacctctagccaaaattgtttggttttagggaggctaacaataacctactgaatttggaaaatgcaaaggtaaaaaatgtatatagactgcctgctgaactggttaagtactactgcttctgggaaatactatttcaaaattctatgtattataataataaatttgtaagacattcattattctaccatcctaatgaaaactttcagaagtctttctttatccatggcatgcccagggttttacctgaatctgatacaggatctatataactttactaggacttttgattgttgactccaggcttaggtatatcagaaggttctttttgccatttggcctgtggatgtctgagaagatcattcacaatacatgtaaaattcaggtaggcctaaggaaaggccagcctgtagaaagcaaaatggcagtgtctgttctccactgttggaggcattatgtaatttaagtatcctgttagccactgtctttctgctaattaagtggggctgaacaagtaagcactaataataccagtgaaccacttgggcaccttgtgggtagagttttgctgccacctagtggaatgggatatcattgcttccatatcaggttcacaagcaagttaagtgggcacagtttatttctgtgtagctcaggctgtaatcttgaaagctgaggagatacccatgcctctcagactcattagctgggtgtcacattaccacctgcacattctgacccaccgcatcttaatatgttttgtcctcttggagaaactaggagtagaagtcaggatatggtaggtaagggggaaaaaggaaagacggcttgatagctatgaatgcatgaggagcgaaatgttgactcagttatctagatcatggtctccaaacctgatgctatttccttacaaaaatatttgttgagcatgtgtccataattatatgtattgaacaatgaaaatatgtgtcaacaaatgtactgctacactaatgtgaacattatggaacaaaatttgaaagagtgaaataaaaggtttacactttaaaaaaaaac

SEQ ID NO: 327676 - DNA, 4248 bp, Homo sapiens
agcgggagtcgagcgagagcctgtggaggagtccgcctgctgtagcgtgcgtaagcaaggcagctacgccgggcggctacgctgcggaatcggcgtaggcgcctttggagaatcggcgggctgcgctccgctggggctggtcgcggagggggggaggggatgtcggtcagtgcgagatccgctgctgctgaggagaggagcgtcaacagcagcaccatggtagctcaacagaagaaccttgaaggctatgtgggatttgccaatctcccaaatcaagtatacagaaaatcggtgaagagaggttttgaattcacgcttatggtagtgggtgaatctggattgggaaagtcgacattaatcaactcattattcctcacagatttgtattctccagagtatccaggtccttctcatagaattaaaaagactgtacaggtggaacaatccaaagttttaatcaaagaaggtggtgttcagttgctgctcacaatagttgataccccaggatttggagatgcagtggataatagtaattgctggcagcctgttatcgactacattgatagtaaatttgaggactacctaaatgcagaatcacgagtgaacagacgtcagatgcctgataacagggtgcagtgttgtttatacttcattgctccttcaggacatggacttaaaccattggatattgagtttatgaagcgtttgcatgaaaaagtgaatatcatcccacttattgccaaagcagacacactcacaccagaggaatgccaacagtttaaaaaacagataatgaaagaaatccaagaacataaaattaaaatatacgaatttccagaaacagatgatgaagaagaaaataaacttgttaaaaagataaaggaccgtttacctcttgctgtggtaggtagtaatactatcattgaagttaatggcaaaagggtcagaggaaggcagtatccttggggtgttgctgaagttgaaaatggtgaacattgtgattttacaatcctaagaaatatgttgataagaacacacatgcaggacttgaaagatgttactaataatgtccactatgagaactacagaagcagaaaacttgcagctgtgacttataatggagttgataacaacaagaataaagggcagctgactaagagccctctggcacaaatggaagaagaaagaagggagcatgtagctaaaatgaagaagatggagatggagatggagcaggtgtttgagatgaaggtcaaagaaaaagttcaaaaactgaaggactctgaagctgagctccagcggcgccatgagcaaatgaaaaagaatttggaagcacagcacaaagaattggaggaaaaacgtcgtcagttcgaggatgagaaagcaaactgggaagctcaacaacgtattttagaacaacagaactcttcaagaaccttggaaaagaacaagaagaaagggaagatcttttaaactctctattgaccaccagttaacgtattagttgccaatatgccagcttggacatcagtgtttgttggatccgtttgaccaatttgcaccagttttatccataatgatggatttaacagcatgacaaattgtctagggtgttctgtacttagaaagtaagagctctaagtacctttcctacattttctttttttattaaacagatatcttcagtttaatgcaagagaacattttactgttgtacaatcatgttctggtggtttgattgtttacaggatattccaaaataaaaggactctggaagattttcattgaggataaattgccataatatgatgcaaactgtgcttctctatgataattacaatacaaaggttccattcagtgcagcatatacaataatgtaatttagtctaacacagttgaccctattttttgacacttccattgtttaaaaatacacatggaaaaaaaaaaaccctatatgcttactgtgcacctagagcttttttataacaacgtctttttgtttgtttgttttggattctttaaatatatattattctcatttagtgccctctttagccagaatctcattactgcttcatttttgtaataacatttaatttagatattttccatatattggcactgctaaaatagaatatagcatctttcatatggtaggaaccaacaaggaaactttcctttaactccctttttacactttatggtaagtagcagggggggaaatgcatttatagatcatttctaggcaaaattgtgaagctaatgaccaacctgtttctacctatatgcagtctctttattttactagaaatgggaatcatggcctcttgaagagaaaaaagtcaccattctgcatttagctgtattcatatattgcatttctgtattttttgtttgtattgtaaaaaattcacataataaacgatgttgtgatgtaatattgtgtgaggtcttaaatatcctacagtcgatgtacaagagtagagtatgtttgggaagaaacttttcagcttaagtttgcctcctctacaatgacatcttttatatgcttgtctcatttagaatgcatatgtgctgattttctaatttaagagataccatatctctctattcatttctatctctcatttgtatgcttatttttctgagaacattttttttttcccccagacagggtcttgcttcattgcccaggctggagtgcggtggcacaaacacgactcgactgcagcctcaaccctctgggctcaagcagtcctcctgcctcagccccctgagtatctgggattgcaggcgtgcaccaccacgcctggctaatttttgtattttttgcagcctcccaaagttctgggattacaggcatgagccgtcatgcctggcctctgagaacagtttctgactcattcagattaggtatactctcaagtccctggaaactgaaattttttttaactgtaaagagggtagtgtcatttcttttcttaaggtcaagtgacatagattttaatgtaatgcataatttaggtaagaaattaattaatgtagcctagtttattatcttgaaatgttttaccctatttactttttaaaattaatgacctaagcggagggaataattataagtcaatagcagagagattgttgtttgggtgtttatttttttcagtttttgttttgagagattgggttaacacctctagccaaaattgtttggttttagggaggctaacaataacctactgaatttggaaaatgcaaaggtaaaaaatgtatatagactgcctgctgaactggttaagtactactgcttctgggaaatactatttcaaaattctatgtattataataataaatttgtaagacattcattattctaccatcctaatgaaaactttcagaagtctttctttatccatggcatgcccagggttttacctgaatctgatacaggatctatataactttactaggacttttgattgttgactccaggcttaggtatatcagaaggttctttttgccatttggcctgtggatgtctgagaagatcattcacaatacatgtaaaattcaggtaggcctaaggaaaggccagcctgtagaaagcaaaatggcagtgtctgttctccactgttggaggcattatgtaatttaagtatcctgttagccactgtctttctgctaattaagtggggctgaacaagtaagcactaataataccagtgaaccacttgggcaccttgtgggtagagttttgctgccacctagtggaatgggatatcattgcttccatatcaggttcacaagcaagttaagtgggcacagtttatttctgtgtagctcaggctgtaatcttgaaagctgaggagatacccatgcctctcagactcattagctgggtgtcacattaccacctgcacattctgacccaccgcatcttaatatgttttgtcctcttggagaaactaggagtagaagtcaggatatggtaggtaagggggaaaaaggaaagacggcttgatagctatgaatgcatgaggagcgaaatgttgactcagttatctagatcatggtctccaaacctgatgctatttccttacaaaaatatttgttgagcatgtgtccataattatatgtattgaacaatgaaaatatgtgtcaacaaatgtactgctacactaatgtgaacattatggaacaaaatttgaaagagtgaaataaaaggtttacactttaaaaaaaaac

SEQ ID NO: 327677 - DNA, 4347 bp, Homo sapiens
agcgggagtcgagcgagagcctgtggaggagtccgcctgctgtagcgtgcgtaagcaaggcagctacgccgggcggctacgctgcggaatcggcgtaggcgcctttggagaatcggcgggctgcgctccgctggggctggtcgcggagggggggaggggatgtcggtcagtgcgagatccgctgctgctgaggagaggagcgtcaacagcagcaccatggtagctctgttggaatctggaacactggaatgatggaaatgtgttctttacaaagtagctcaacagaagaaccttgaaggctatgtgggatttgccaatctcccaaatcaagtatacagaaaatcggtgaagagaggttttgaattcacgcttatggtagtgggtgaatctggattgggaaagtcgacattaatcaactcattattcctcacagatttgtattctccagagtatccaggtccttctcatagaattaaaaagactgtacaggtggaacaatccaaagttttaatcaaagaaggtggtgttcagttgctgctcacaatagttgataccccaggatttggagatgcagtggataatagtaattgctggcagcctgttatcgactacattgatagtaaatttgaggactacctaaatgcagaatcacgagtgaacagacgtcagatgcctgataacagggtgcagtgttgtttatacttcattgctccttcaggacatggacttaaaccattggatattgagtttatgaagcgtttgcatgaaaaagtgaatatcatcccacttattgccaaagcagacacactcacaccagaggaatgccaacagtttaaaaaacagataatgaaagaaatccaagaacataaaattaaaatatacgaatttccagaaacagatgatgaagaagaaaataaacttgttaaaaagataaaggaccgtttacctcttgctgtggtaggtagtaatactatcattgaagttaatggcaaaagggtcagaggaaggcagtatccttggggtgttgctgaagttgaaaatggtgaacattgtgattttacaatcctaagaaatatgttgataagaacacacatgcaggacttgaaagatgttactaataatgtccactatgagaactacagaagcagaaaacttgcagctgtgacttataatggagttgataacaacaagaataaagggcagctgactaagagccctctggcacaaatggaagaagaaagaagggagcatgtagctaaaatgaagaagatggagatggagatggagcaggtgtttgagatgaaggtcaaagaaaaagttcaaaaactgaaggactctgaagctgagctccagcggcgccatgagcaaatgaaaaagaatttggaagcacagcacaaagaattggaggaaaaacgtcgtcagttcgaggatgagaaagcaaactgggaagctcaacaacgtattttagaacaacagaactcttcaagaaccttggaaaagaacaagaagaaagggaagatcttttaaactctctattgaccaccagttaacgtattagttgccaatatgccagcttggacatcagtgtttgttggatccgtttgaccaatttgcaccagttttatccataatgatggatttaacagcatgacaaaaattattttttttttggttcttgatggagattaagatgccttgaattgtctagggtgttctgtacttagaaagtaagagctctaagtacctttcctacattttctttttttattaaacagatatcttcagtttaatgcaagagaacattttactgttgtacaatcatgttctggtggtttgattgtttacaggatattccaaaataaaaggactctggaagattttcattgaggataaattgccataatatgatgcaaactgtgcttctctatgataattacaatacaaaggttccattcagtgcagcatatacaataatgtaatttagtctaacacagttgaccctattttttgacacttccattgtttaaaaatacacatggaaaaaaaaaaaccctatatgcttactgtgcacctagagcttttttataacaacgtctttttgtttgtttgttttggattctttaaatatatattattctcatttagtgccctctttagccagaatctcattactgcttcatttttgtaataacatttaatttagatattttccatatattggcactgctaaaatagaatatagcatctttcatatggtaggaaccaacaaggaaactttcctttaactccctttttacactttatggtaagtagcagggggggaaatgcatttatagatcatttctaggcaaaattgtgaagctaatgaccaacctgtttctacctatatgcagtctctttattttactagaaatgggaatcatggcctcttgaagagaaaaaagtcaccattctgcatttagctgtattcatatattgcatttctgtattttttgtttgtattgtaaaaaattcacataataaacgatgttgtgatgtaatattgtgtgaggtcttaaatatcctacagtcgatgtacaagagtagagtatgtttgggaagaaacttttcagcttaagtttgcctcctctacaatgacatcttttatatgcttgtctcatttagaatgcatatgtgctgattttctaatttaagagataccatatctctctattcatttctatctctcatttgtatgcttatttttctgagaacattttttttttcccccagacagggtcttgcttcattgcccaggctggagtgcggtggcacaaacacgactcgactgcagcctcaaccctctgggctcaagcagtcctcctgcctcagccccctgagtatctgggattgcaggcgtgcaccaccacgcctggctaatttttgtattttttgcagcctcccaaagttctgggattacaggcatgagccgtcatgcctggcctctgagaacagtttctgactcattcagattaggtatactctcaagtccctggaaactgaaattttttttaactgtaaagagggtagtgtcatttcttttcttaaggtcaagtgacatagattttaatgtaatgcataatttaggtaagaaattaattaatgtagcctagtttattatcttgaaatgttttaccctatttactttttaaaattaatgacctaagcggagggaataattataagtcaatagcagagagattgttgtttgggtgtttatttttttcagtttttgttttgagagattgggttaacacctctagccaaaattgtttggttttagggaggctaacaataacctactgaatttggaaaatgcaaaggtaaaaaatgtatatagactgcctgctgaactggttaagtactactgcttctgggaaatactatttcaaaattctatgtattataataataaatttgtaagacattcattattctaccatcctaatgaaaactttcagaagtctttctttatccatggcatgcccagggttttacctgaatctgatacaggatctatataactttactaggacttttgattgttgactccaggcttaggtatatcagaaggttctttttgccatttggcctgtggatgtctgagaagatcattcacaatacatgtaaaattcaggtaggcctaaggaaaggccagcctgtagaaagcaaaatggcagtgtctgttctccactgttggaggcattatgtaatttaagtatcctgttagccactgtctttctgctaattaagtggggctgaacaagtaagcactaataataccagtgaaccacttgggcaccttgtgggtagagttttgctgccacctagtggaatgggatatcattgcttccatatcaggttcacaagcaagttaagtgggcacagtttatttctgtgtagctcaggctgtaatcttgaaagctgaggagatacccatgcctctcagactcattagctgggtgtcacattaccacctgcacattctgacccaccgcatcttaatatgttttgtcctcttggagaaactaggagtagaagtcaggatatggtaggtaagggggaaaaaggaaagacggcttgatagctatgaatgcatgaggagcgaaatgttgactcagttatctagatcatggtctccaaacctgatgctatttccttacaaaaatatttgttgagcatgtgtccataattatatgtattgaacaatgaaaatatgtgtcaacaaatgtactgctacactaatgtgaacattatggaacaaaatttgaaagagtgaaataaaaggtttacactttaaaaaaaaac

SEQ ID NO: 327678 - DNA, 2999 bp, Homo sapiens
agcgggagtcgagcgagagcctgtggaggagtccgcctgctgtagcgtgcgtaagcaaggcagctacgccgggcggctacgctgcggaatcggcgtaggcgcctttggagaatcggcgggctgcgctccgctggggctggtcgcggagggggggaggggatgtcggtcagtgcgagatccgctgctgctgaggagaggagcgtcaacagcagcaccatggtagctcaacagaagaaccttgaaggctatgtgggatttgccaatctcccaaatcaagtatacagaaaatcggtgaagagaggttttgaattcacgcttatggtagtgggtgaatctggattgggaaagtcgacattaatcaactcattattcctcacagatttgtattctccagagtatccaggtccttctcatagaattaaaaagactgtacaggtggaacaatccaaagttttaatcaaagaaggtggtgttcagttgctgctcacaatagttgataccccaggatttggagatgcagtggataatagtaattgctggcagcctgttatcgactacattgatagtaaatttgaggactacctaaatgcagaatcacgagtgaacagacgtcagatgcctgataacagggtgcagtgttgtttatacttcattgctccttcaggacatggacttaaaccattggatattgagtttatgaagcgtttgcatgaaaaagtgaatatcatcccacttattgccaaagcagacacactcacaccagaggaatgccaacagtttaaaaaacagataatgaaagaaatccaagaacataaaattaaaatatacgaatttccagaaacagatgatgaagaagaaaataaacttgttaaaaagataaaggaccgtttacctcttgctgtggtaggtagtaatactatcattgaagttaatggcaaaagggtcagaggaaggcagtatccttggggtgttgctgaagttgaaaatggtgaacattgtgattttacaatcctaagaaatatgttgataagaacacacatgcaggacttgaaagatgttactaataatgtccactatgagaactacagaagcagaaaacttgcagctgtgacttataatggagttgataacaacaagaataaagggcagctgactaagagccctctggcacaaatggaagaagaaagaagggagcatgtagctaaaatgaagaagatggagatggagatggagcaggtgtttgagatgaaggtcaaagaaaaagttcaaaaactgaaggactctgaagctgagctccagcggcgccatgagcaaatgaaaaagaatttggaagcacagcacaaagaattggaggaaaaacgtcgtcagttcgaggatgagaaagcaaactgggaagctcaacaacgtattttagaacaacagaactcttcaagaaccttggaaaagaacaagaagaaagggaagatcttttaaactctctattgaccaccagttaacgtattagttgccaatatgccagcttggacatcagtgtttgttggatccgtttgaccaatttgcaccagttttatccataatgatggatttaacagcatgacaaaaattattttttttttggttcttgatggagattaagatgccttgaattgtctagggtgttctgtacttagaaagtaagagctctaagtacctttcctacattttctttttttattaaacagatatcttcagtttaatgcaagagaacattttactgttgtacaatcatgttctggtggtttgattgtttacaggatattccaaaataaaaggactctggaagattttcattgaggataaattgccataatatgatgcaaactgtgcttctctatgataattacaatacaaaggttccattcagtgcagcatatacaataatgtaatttagtctaacacagttgaccctattttttgacacttccattgtttaaaaatacacatggaaaaaaaaaaaccctatatgcttactgtgcacctagagcttttttataacaacgtctttttgtttgtttgttttggattctttaaatatatattattctcatttagtgccctctttagccagaatctcattactgcttcatttttgtaataacatttaatttagatattttccatatattggcactgctaaaatagaatatagcatctttcatatggtaggaaccaacaaggaaactttcctttaactccctttttacactttatggtaagtagcagggggggaaatgcatttatagatcatttctaggcaaaattgtgaagctaatgaccaacctgtttctacctatatgcagtctctttattttactagaaatgggaatcatggcctcttgaagagaaaaaagtcaccattctgcatttagctgtattcatatattgcatttctgtattttttgtttgtattgtaaaaaattcacataataaacgatgttgtgaaaaaaaaaaaaaaaacaaaaaaaaccaaaaaaacaaaaaactaatcaaaataaaataaaaaaaaaaaaaaacctcttgtcccctcaaaaagaaaaaaaataaatattcgggcccgaaaatggacctatttgggccattcccccttttagggggacttttaaaaattaaggggcgggggttttaaaaaccggggggactgggaaaaacccctgggggttaccccaaattaaatcggctttgagaaacaaacccctttttccccatttggggagatattgaaaaaaggggcccacctgatcccctcttcccaaacagtttgcccaccctaaatgggacatggagaatttgtaagctttattttttggttaaaacccgggtaatttttgggaatacaccttattttttaaccaaaaggcgaaaatcggaaaattcctttaaattaaaaataaacccgggaatggtgggggttgtttccctttggacaaagacctctttttacgggggccccctccgggccc

SEQ ID NO: 327679 - DNA, 2535 bp, Homo sapiens
agcgggagtcgagcgagagcctgtggaggagtccgcctgctgtagcgtgcgtaagcaaggcagctacgccgggcggctacgctgcggaatcggcgtaggcgcctttggagaatcggcgggctgcgctccgctggggctggtcgcggagggggggaggggatgtcggtcagtgcgagatccgctgctgctgaggagaggagcgtcaacagcagcaccatggtagctcaacagaagaaccttgaaggctatgtgggatttgccaatctcccaaatcaagtatacagaaaatcggtgaagagaggttttgaattcacgcttatggtagtgggtgaatctggattgggaaagtcgacattaatcaactcattattcctcacagatttgtattctccagagtatccaggtccttctcatagaattaaaaagactgtacaggtggaacaatccaaagttttaatcaaagaaggtggtgttcagttgctgctcacaatagttgataccccaggatttggagatgcagtggataatagtaattgctggcagcctgttatcgactacattgatagtaaatttgaggactacctaaatgcagaatcacgagtgaacagacgtcagatgcctgataacagggtgcagtgttgtttatacttcattgctccttcaggacatggacttaaaccattggatattgagtttatgaagcgtttgcatgaaaaagtgaatatcatcccacttattgccaaagcagacacactcacaccagaggaatgccaacagtttaaaaaacagataatgaaagaaatccaagaacataaaattaaaatatacgaatttccagaaacagatgatgaagaagaaaataaacttgttaaaaagataaaggaccgtttacctcttgctgtggtaggtagtaatactatcattgaagttaatggcaaaagggtcagaggaaggcagtatccttggggtgttgctgaagttgaaaatggtgaacattgtgattttacaatcctaagaaatatgttgataagaacacacatgcaggacttgaaagatgttactaataatgtccactatgagaactacagaagcagaaaacttgcagctgtgacttataatggagttgataacaacaagaataaagggcagctgactaagagccctctggcacaaatggaagaagaaagaagggagcatgtagctaaaatgaagaagatggagatggagatggagcaggtgtttgagatgaaggtcaaagaaaaagttcaaaaactgaaggactctgaagctgagctccagcggcgccatgagcaaatgaaaaagaatttggaagcacagcacaaagaattggaggaaaaacgtcgtcagttcgaggatgagaaagcaaactgggaagctcaacaacgtattttagaacaacagaactcttcaagaaccttggaaaagaacaagaagaaagggaagatcttttaaactctctattgaccaccagttaacgtattagttgccaatatgccagcttggacatcagtgtttgttggatccgtttgaccaatttgcaccagttttatccataatgatggatttaacagcatgacaaaaattattttttttttggttcttgatggagattaagatgccttgaattgtctagggtgttctgtacttagaaagtaagagctctaagtacctttcctacattttctttttttattaaacagatatcttcagtttaatgcaagagaacattttactgttgtacaatcatgttctggtggtttgattgtttacaggatattccaaaataaaaggactctggaagattttcattgaggataaattgccataatatgatgcaaactgtgcttctctatgataattacaatacaaaggttccattcagtgcagcatatacaataatgtaatttagtctaacacagttgaccctattttttgacacttccattgtttaaaaatacacatggaaaaaaaaaaaccctatatgcttactgtgcacctagagcttttttataacaacgtctttttgtttgtttgttttggattctttaaatatatattattctcatttagtgccctctttagccagaatctcattactgcttcatttttgtaataacatttaatttagatattttccatatattggcactgctaaaatagaatatagcatctttcatatggtaggaaccaacaaggaaactttcctttaactccctttttacactttatggtaagtagcagggggggaaatgcatttatagatcatttctaggcaaaattgtgaagctaatgaccaacctgtttctacctatatgcagtctctttattttactagaaatgggaatcatggcctcttgaagagaaaaaagtcaccattctgcatttagctgtattcatatattgcatttctgtattttttgtttgtattgtaaaaaattcacataataaacgatgttgtgagcagtatgcgtcaagtgttccctcccctctttcctccccggcagtacgcacccc

SEQ ID NO: 327680 - DNA, 4277 bp, Homo sapiens
cgggcgggcggcggcggggagggaggaagaaggatgcaccaggctgaggctgtggtggaggcggcggcggcggctgcagccgcagctccagtcaccgcgtcgcctccccgctcctcctcccgcctctcggggttgcctctctccaggcgcagcccggaaggccggtggatggcgggcgagtcttgagaacggagggagaatcggtagttcaacagaagaaccttgaaggctatgtgggatttgccaatctcccaaatcaagtatacagaaaatcggtgaagagaggttttgaattcacgcttatggtagtgggtgaatctggattgggaaagtcgacattaatcaactcattattcctcacagatttgtattctccagagtatccaggtccttctcatagaattaaaaagactgtacaggtggaacaatccaaagttttaatcaaagaaggtggtgttcagttgctgctcacaatagttgataccccaggatttggagatgcagtggataatagtaattgctggcagcctgttatcgactacattgatagtaaatttgaggactacctaaatgcagaatcacgagtgaacagacgtcagatgcctgataacagggtgcagtgttgtttatacttcattgctccttcaggacatggacttaaaccattggatattgagtttatgaagcgtttgcatgaaaaagtgaatatcatcccacttattgccaaagcagacacactcacaccagaggaatgccaacagtttaaaaaacagataatgaaagaaatccaagaacataaaattaaaatatacgaatttccagaaacagatgatgaagaagaaaataaacttgttaaaaagataaaggaccgtttacctcttgctgtggtaggtagtaatactatcattgaagttaatggcaaaagggtcagaggaaggcagtatccttggggtgttgctgaagttgaaaatggtgaacattgtgattttacaatcctaagaaatatgttgataagaacacacatgcaggacttgaaagatgttactaataatgtccactatgagaactacagaagcagaaaacttgcagctgtgacttataatggagttgataacaacaagaataaagggcagctgactaagagccctctggcacaaatggaagaagaaagaagggagcatgtagctaaaatgaagaagatggagatggagatggagcaggtgtttgagatgaaggtcaaagaaaaagttcaaaaactgaaggactctgaagctgagctccagcggcgccatgagcaaatgaaaaagaatttggaagcacagcacaaagaattggaggaaaaacgtcgtcagttcgaggatgagaaagcaaactgggaagctcaacaacgtattttagaacaacagaactcttcaagaaccttggaaaagaacaagaagaaagggaagatcttttaaactctctattgaccaccagttaacgtattagttgccaatatgccagcttggacatcagtgtttgttggatccgtttgaccaatttgcaccagttttatccataatgatggatttaacagcatgacaaaaattattttttttttggttcttgatggagattaagatgccttgaattgtctagggtgttctgtacttagaaagtaagagctctaagtacctttcctacattttctttttttattaaacagatatcttcagtttaatgcaagagaacattttactgttgtacaatcatgttctggtggtttgattgtttacaggatattccaaaataaaaggactctggaagattttcattgaggataaattgccataatatgatgcaaactgtgcttctctatgataattacaatacaaaggttccattcagtgcagcatatacaataatgtaatttagtctaacacagttgaccctattttttgacacttccattgtttaaaaatacacatggaaaaaaaaaaaccctatatgcttactgtgcacctagagcttttttataacaacgtctttttgtttgtttgttttggattctttaaatatatattattctcatttagtgccctctttagccagaatctcattactgcttcatttttgtaataacatttaatttagatattttccatatattggcactgctaaaatagaatatagcatctttcatatggtaggaaccaacaaggaaactttcctttaactccctttttacactttatggtaagtagcagggggggaaatgcatttatagatcatttctaggcaaaattgtgaagctaatgaccaacctgtttctacctatatgcagtctctttattttactagaaatgggaatcatggcctcttgaagagaaaaaagtcaccattctgcatttagctgtattcatatattgcatttctgtattttttgtttgtattgtaaaaaattcacataataaacgatgttgtgatgtaatattgtgtgaggtcttaaatatcctacagtcgatgtacaagagtagagtatgtttgggaagaaacttttcagcttaagtttgcctcctctacaatgacatcttttatatgcttgtctcatttagaatgcatatgtgctgattttctaatttaagagataccatatctctctattcatttctatctctcatttgtatgcttatttttctgagaacattttttttttcccccagacagggtcttgcttcattgcccaggctggagtgcggtggcacaaacacgactcgactgcagcctcaaccctctgggctcaagcagtcctcctgcctcagccccctgagtatctgggattgcaggcgtgcaccaccacgcctggctaatttttgtattttttgcagcctcccaaagttctgggattacaggcatgagccgtcatgcctggcctctgagaacagtttctgactcattcagattaggtatactctcaagtccctggaaactgaaattttttttaactgtaaagagggtagtgtcatttcttttcttaaggtcaagtgacatagattttaatgtaatgcataatttaggtaagaaattaattaatgtagcctagtttattatcttgaaatgttttaccctatttactttttaaaattaatgacctaagcggagggaataattataagtcaatagcagagagattgttgtttgggtgtttatttttttcagtttttgttttgagagattgggttaacacctctagccaaaattgtttggttttagggaggctaacaataacctactgaatttggaaaatgcaaaggtaaaaaatgtatatagactgcctgctgaactggttaagtactactgcttctgggaaatactatttcaaaattctatgtattataataataaatttgtaagacattcattattctaccatcctaatgaaaactttcagaagtctttctttatccatggcatgcccagggttttacctgaatctgatacaggatctatataactttactaggacttttgattgttgactccaggcttaggtatatcagaaggttctttttgccatttggcctgtggatgtctgagaagatcattcacaatacatgtaaaattcaggtaggcctaaggaaaggccagcctgtagaaagcaaaatggcagtgtctgttctccactgttggaggcattatgtaatttaagtatcctgttagccactgtctttctgctaattaagtggggctgaacaagtaagcactaataataccagtgaaccacttgggcaccttgtgggtagagttttgctgccacctagtggaatgggatatcattgcttccatatcaggttcacaagcaagttaagtgggcacagtttatttctgtgtagctcaggctgtaatcttgaaagctgaggagatacccatgcctctcagactcattagctgggtgtcacattaccacctgcacattctgacccaccgcatcttaatatgttttgtcctcttggagaaactaggagtagaagtcaggatatggtaggtaagggggaaaaaggaaagacggcttgatagctatgaatgcatgaggagcgaaatgttgactcagttatctagatcatggtctccaaacctgatgctatttccttacaaaaatatttgttgagcatgtgtccataattatatgtattgaacaatgaaaatatgtgtcaacaaatgtactgctacactaatgtgaacattatggaacaaaatttgaaagagtgaaataaaaggtttacactttaaaaaaaaac

SEQ ID NO: 327681 - DNA, 4386 bp, Homo sapiens
ttatgctgttcctgagtgatccccttcgacggtgtctgaggaccgagagagtgaagaatggggaggggaagagagtggcacatggggttgagcagaggagaaagtcagaaaggtggcttggagaatccgctggggctggtcgcggagggggggaggggatgtcggtcagtgcgagatccgctgctgctgaggagaggagcgtcaacagcagcaccatggtagctcaacagaagaaccttgaaggctatgtgggatttgccaatctcccaaatcaagtatacagaaaatcggtgaagagaggttttgaattcacgcttatggtagtggaggtgatgtttcaccatgttgcccgtggctaatcttgaactcctgggctcaagcgatccatccgccttggcctcccaaagtgctaggattacaggtgaatctggattgggaaagtcgacattaatcaactcattattcctcacagatttgtattctccagagtatccaggtccttctcatagaattaaaaagactgtacaggtggaacaatccaaagttttaatcaaagaaggtggtgttcagttgctgctcacaatagttgataccccaggatttggagatgcagtggataatagtaattgctggcagcctgttatcgactacattgatagtaaatttgaggactacctaaatgcagaatcacgagtgaacagacgtcagatgcctgataacagggtgcagtgttgtttatacttcattgctccttcaggacatggacttaaaccattggatattgagtttatgaagcgtttgcatgaaaaagtgaatatcatcccacttattgccaaagcagacacactcacaccagaggaatgccaacagtttaaaaaacagataatgaaagaaatccaagaacataaaattaaaatatacgaatttccagaaacagatgatgaagaagaaaataaacttgttaaaaagataaaggaccgtttacctcttgctgtggtaggtagtaatactatcattgaagttaatggcaaaagggtcagaggaaggcagtatccttggggtgttgctgaagttgaaaatggtgaacattgtgattttacaatcctaagaaatatgttgataagaacacacatgcaggacttgaaagatgttactaataatgtccactatgagaactacagaagcagaaaacttgcagctgtgacttataatggagttgataacaacaagaataaagggcagctgactaagagccctctggcacaaatggaagaagaaagaagggagcatgtagctaaaatgaagaagatggagatggagatggagcaggtgtttgagatgaaggtcaaagaaaaagttcaaaaactgaaggactctgaagctgagctccagcggcgccatgagcaaatgaaaaagaatttggaagcacagcacaaagaattggaggaaaaacgtcgtcagttcgaggatgagaaagcaaactgggaagctcaacaacgtattttagaacaacagaactcttcaagaaccttggaaaagaacaagaagaaagggaagatcttttaaactctctattgaccaccagttaacgtattagttgccaatatgccagcttggacatcagtgtttgttggatccgtttgaccaatttgcaccagttttatccataatgatggatttaacagcatgacaaaaattattttttttttggttcttgatggagattaagatgccttgaattgtctagggtgttctgtacttagaaagtaagagctctaagtacctttcctacattttctttttttattaaacagatatcttcagtttaatgcaagagaacattttactgttgtacaatcatgttctggtggtttgattgtttacaggatattccaaaataaaaggactctggaagattttcattgaggataaattgccataatatgatgcaaactgtgcttctctatgataattacaatacaaaggttccattcagtgcagcatatacaataatgtaatttagtctaacacagttgaccctattttttgacacttccattgtttaaaaatacacatggaaaaaaaaaaaccctatatgcttactgtgcacctagagcttttttataacaacgtctttttgtttgtttgttttggattctttaaatatatattattctcatttagtgccctctttagccagaatctcattactgcttcatttttgtaataacatttaatttagatattttccatatattggcactgctaaaatagaatatagcatctttcatatggtaggaaccaacaaggaaactttcctttaactccctttttacactttatggtaagtagcagggggggaaatgcatttatagatcatttctaggcaaaattgtgaagctaatgaccaacctgtttctacctatatgcagtctctttattttactagaaatgggaatcatggcctcttgaagagaaaaaagtcaccattctgcatttagctgtattcatatattgcatttctgtattttttgtttgtattgtaaaaaattcacataataaacgatgttgtgatgtaatattgtgtgaggtcttaaatatcctacagtcgatgtacaagagtagagtatgtttgggaagaaacttttcagcttaagtttgcctcctctacaatgacatcttttatatgcttgtctcatttagaatgcatatgtgctgattttctaatttaagagataccatatctctctattcatttctatctctcatttgtatgcttatttttctgagaacattttttttttcccccagacagggtcttgcttcattgcccaggctggagtgcggtggcacaaacacgactcgactgcagcctcaaccctctgggctcaagcagtcctcctgcctcagccccctgagtatctgggattgcaggcgtgcaccaccacgcctggctaatttttgtattttttgcagcctcccaaagttctgggattacaggcatgagccgtcatgcctggcctctgagaacagtttctgactcattcagattaggtatactctcaagtccctggaaactgaaattttttttaactgtaaagagggtagtgtcatttcttttcttaaggtcaagtgacatagattttaatgtaatgcataatttaggtaagaaattaattaatgtagcctagtttattatcttgaaatgttttaccctatttactttttaaaattaatgacctaagcggagggaataattataagtcaatagcagagagattgttgtttgggtgtttatttttttcagtttttgttttgagagattgggttaacacctctagccaaaattgtttggttttagggaggctaacaataacctactgaatttggaaaatgcaaaggtaaaaaatgtatatagactgcctgctgaactggttaagtactactgcttctgggaaatactatttcaaaattctatgtattataataataaatttgtaagacattcattattctaccatcctaatgaaaactttcagaagtctttctttatccatggcatgcccagggttttacctgaatctgatacaggatctatataactttactaggacttttgattgttgactccaggcttaggtatatcagaaggttctttttgccatttggcctgtggatgtctgagaagatcattcacaatacatgtaaaattcaggtaggcctaaggaaaggccagcctgtagaaagcaaaatggcagtgtctgttctccactgttggaggcattatgtaatttaagtatcctgttagccactgtctttctgctaattaagtggggctgaacaagtaagcactaataataccagtgaaccacttgggcaccttgtgggtagagttttgctgccacctagtggaatgggatatcattgcttccatatcaggttcacaagcaagttaagtgggcacagtttatttctgtgtagctcaggctgtaatcttgaaagctgaggagatacccatgcctctcagactcattagctgggtgtcacattaccacctgcacattctgacccaccgcatcttaatatgttttgtcctcttggagaaactaggagtagaagtcaggatatggtaggtaagggggaaaaaggaaagacggcttgatagctatgaatgcatgaggagcgaaatgttgactcagttatctagatcatggtctccaaacctgatgctatttccttacaaaaatatttgttgagcatgtgtccataattatatgtattgaacaatgaaaatatgtgtcaacaaatgtactgctacactaatgtgaacattatggaacaaaatttgaaagagtgaaataaaaggtttacactttaaaaaaaaac

SEQ ID NO: 327682 - DNA, 4189 bp, Homo sapiens
ttatgctgttcctgagtgatccccttcgacggtgtctgaggaccgagagagtgaagaatggggaggggaagagagtggcacatggggttgagcagaggagaaagtcagaaaggtggcttggagaatccgctggggctggtcgcggagggggggaggggatgtcggtcagtgcgagatccgctgctgctgaggagaggagcgtcaacagcagcaccatggtagctgtgaatctggattgggaaagtcgacattaatcaactcattattcctcacagatttgtattctccagagtatccaggtccttctcatagaattaaaaagactgtacaggtggaacaatccaaagttttaatcaaagaaggtggtgttcagttgctgctcacaatagttgataccccaggatttggagatgcagtggataatagtaattgctggcagcctgttatcgactacattgatagtaaatttgaggactacctaaatgcagaatcacgagtgaacagacgtcagatgcctgataacagggtgcagtgttgtttatacttcattgctccttcaggacatggacttaaaccattggatattgagtttatgaagcgtttgcatgaaaaagtgaatatcatcccacttattgccaaagcagacacactcacaccagaggaatgccaacagtttaaaaaacagataatgaaagaaatccaagaacataaaattaaaatatacgaatttccagaaacagatgatgaagaagaaaataaacttgttaaaaagataaaggaccgtttacctcttgctgtggtaggtagtaatactatcattgaagttaatggcaaaagggtcagaggaaggcagtatccttggggtgttgctgaagttgaaaatggtgaacattgtgattttacaatcctaagaaatatgttgataagaacacacatgcaggacttgaaagatgttactaataatgtccactatgagaactacagaagcagaaaacttgcagctgtgacttataatggagttgataacaacaagaataaagggcagctgactaagagccctctggcacaaatggaagaagaaagaagggagcatgtagctaaaatgaagaagatggagatggagatggagcaggtgtttgagatgaaggtcaaagaaaaagttcaaaaactgaaggactctgaagctgagctccagcggcgccatgagcaaatgaaaaagaatttggaagcacagcacaaagaattggaggaaaaacgtcgtcagttcgaggatgagaaagcaaactgggaagctcaacaacgtattttagaacaacagaactcttcaagaaccttggaaaagaacaagaagaaagggaagatcttttaaactctctattgaccaccagttaacgtattagttgccaatatgccagcttggacatcagtgtttgttggatccgtttgaccaatttgcaccagttttatccataatgatggatttaacagcatgacaaaaattattttttttttggttcttgatggagattaagatgccttgaattgtctagggtgttctgtacttagaaagtaagagctctaagtacctttcctacattttctttttttattaaacagatatcttcagtttaatgcaagagaacattttactgttgtacaatcatgttctggtggtttgattgtttacaggatattccaaaataaaaggactctggaagattttcattgaggataaattgccataatatgatgcaaactgtgcttctctatgataattacaatacaaaggttccattcagtgcagcatatacaataatgtaatttagtctaacacagttgaccctattttttgacacttccattgtttaaaaatacacatggaaaaaaaaaaaccctatatgcttactgtgcacctagagcttttttataacaacgtctttttgtttgtttgttttggattctttaaatatatattattctcatttagtgccctctttagccagaatctcattactgcttcatttttgtaataacatttaatttagatattttccatatattggcactgctaaaatagaatatagcatctttcatatggtaggaaccaacaaggaaactttcctttaactccctttttacactttatggtaagtagcagggggggaaatgcatttatagatcatttctaggcaaaattgtgaagctaatgaccaacctgtttctacctatatgcagtctctttattttactagaaatgggaatcatggcctcttgaagagaaaaaagtcaccattctgcatttagctgtattcatatattgcatttctgtattttttgtttgtattgtaaaaaattcacataataaacgatgttgtgatgtaatattgtgtgaggtcttaaatatcctacagtcgatgtacaagagtagagtatgtttgggaagaaacttttcagcttaagtttgcctcctctacaatgacatcttttatatgcttgtctcatttagaatgcatatgtgctgattttctaatttaagagataccatatctctctattcatttctatctctcatttgtatgcttatttttctgagaacattttttttttcccccagacagggtcttgcttcattgcccaggctggagtgcggtggcacaaacacgactcgactgcagcctcaaccctctgggctcaagcagtcctcctgcctcagccccctgagtatctgggattgcaggcgtgcaccaccacgcctggctaatttttgtattttttgcagcctcccaaagttctgggattacaggcatgagccgtcatgcctggcctctgagaacagtttctgactcattcagattaggtatactctcaagtccctggaaactgaaattttttttaactgtaaagagggtagtgtcatttcttttcttaaggtcaagtgacatagattttaatgtaatgcataatttaggtaagaaattaattaatgtagcctagtttattatcttgaaatgttttaccctatttactttttaaaattaatgacctaagcggagggaataattataagtcaatagcagagagattgttgtttgggtgtttatttttttcagtttttgttttgagagattgggttaacacctctagccaaaattgtttggttttagggaggctaacaataacctactgaatttggaaaatgcaaaggtaaaaaatgtatatagactgcctgctgaactggttaagtactactgcttctgggaaatactatttcaaaattctatgtattataataataaatttgtaagacattcattattctaccatcctaatgaaaactttcagaagtctttctttatccatggcatgcccagggttttacctgaatctgatacaggatctatataactttactaggacttttgattgttgactccaggcttaggtatatcagaaggttctttttgccatttggcctgtggatgtctgagaagatcattcacaatacatgtaaaattcaggtaggcctaaggaaaggccagcctgtagaaagcaaaatggcagtgtctgttctccactgttggaggcattatgtaatttaagtatcctgttagccactgtctttctgctaattaagtggggctgaacaagtaagcactaataataccagtgaaccacttgggcaccttgtgggtagagttttgctgccacctagtggaatgggatatcattgcttccatatcaggttcacaagcaagttaagtgggcacagtttatttctgtgtagctcaggctgtaatcttgaaagctgaggagatacccatgcctctcagactcattagctgggtgtcacattaccacctgcacattctgacccaccgcatcttaatatgttttgtcctcttggagaaactaggagtagaagtcaggatatggtaggtaagggggaaaaaggaaagacggcttgatagctatgaatgcatgaggagcgaaatgttgactcagttatctagatcatggtctccaaacctgatgctatttccttacaaaaatatttgttgagcatgtgtccataattatatgtattgaacaatgaaaatatgtgtcaacaaatgtactgctacactaatgtgaacattatggaacaaaatttgaaagagtgaaataaaaggtttacactttaaaaaaaaac

SEQ ID NO: 327683 - DNA, 3934 bp, Homo sapiens
agcgggagtcgagcgagagcctgtggaggagtccgcctgctgtagcgtgcgtaagcaaggcagctacgccgggcggctacgctgcggaatcggcgtaggcgcctttggagaatcggcgggctgcgctccgctggggctggtcgcggagggggggaggggatgtcggtcagtgcgagatccgctgctgctgaggagaggagcgtcaacagcagcaccatggtagctcaacagaagaaccttgaaggctatgtgggatttgccaatctcccaaatcaagtatacagaaaatcggtgaagagaggttttgaattcacgcttatggtagtgggtgaatctggattgggaaagtcgacattaatcaactcattattcctcacagatttgtattctccagagtatccaggtccttctcatagaattaaaaagactgtacaggtggaacaatccaaagttttaatcaaagaaggtggtgttcagttgctgctcacaatagttgataccccaggatttggagatgcagtggataatagtaattgctggcagcctgttatcgactacattgatagtaaatttgaggactacctaaatgcagaatcacgagtgaacagacgtcagatgcctgataacagggtgcagtgttgtttatacttcattgctccttcaggacatggacttaaaccattggatattgagtttatgaagcgtttgcatgaaaaagtgaatatcatcccacttattgccaaagcagacacactcacaccagaggaatgccaacagtttaaaaaacagataatgaaagaaatccaagaacataaaattaaaatatacgaatttccagaaacagatgatgaagaagatggagatggagatggagcaggtgtttgagatgaaggtcaaagaaaaagttcaaaaactgaaggactctgaagctgagctccagcggcgccatgagcaaatgaaaaagaatttggaagcacagcacaaagaattggaggaaaaacgtcgtcagttcgaggatgagaaagcaaactgggaagctcaacaacgtattttagaacaacagaactcttcaagaaccttggaaaagaacaagaagaaagggaagatcttttaaactctctattgaccaccagttaacgtattagttgccaatatgccagcttggacatcagtgtttgttggatccgtttgaccaatttgcaccagttttatccataatgatggatttaacagcatgacaaaaattattttttttttggttcttgatggagattaagatgccttgaattgtctagggtgttctgtacttagaaagtaagagctctaagtacctttcctacattttctttttttattaaacagatatcttcagtttaatgcaagagaacattttactgttgtacaatcatgttctggtggtttgattgtttacaggatattccaaaataaaaggactctggaagattttcattgaggataaattgccataatatgatgcaaactgtgcttctctatgataattacaatacaaaggttccattcagtgcagcatatacaataatgtaatttagtctaacacagttgaccctattttttgacacttccattgtttaaaaatacacatggaaaaaaaaaaaccctatatgcttactgtgcacctagagcttttttataacaacgtctttttgtttgtttgttttggattctttaaatatatattattctcatttagtgccctctttagccagaatctcattactgcttcatttttgtaataacatttaatttagatattttccatatattggcactgctaaaatagaatatagcatctttcatatggtaggaaccaacaaggaaactttcctttaactccctttttacactttatggtaagtagcagggggggaaatgcatttatagatcatttctaggcaaaattgtgaagctaatgaccaacctgtttctacctatatgcagtctctttattttactagaaatgggaatcatggcctcttgaagagaaaaaagtcaccattctgcatttagctgtattcatatattgcatttctgtattttttgtttgtattgtaaaaaattcacataataaacgatgttgtgatgtaatattgtgtgaggtcttaaatatcctacagtcgatgtacaagagtagagtatgtttgggaagaaacttttcagcttaagtttgcctcctctacaatgacatcttttatatgcttgtctcatttagaatgcatatgtgctgattttctaatttaagagataccatatctctctattcatttctatctctcatttgtatgcttatttttctgagaacattttttttttcccccagacagggtcttgcttcattgcccaggctggagtgcggtggcacaaacacgactcgactgcagcctcaaccctctgggctcaagcagtcctcctgcctcagccccctgagtatctgggattgcaggcgtgcaccaccacgcctggctaatttttgtattttttgcagcctcccaaagttctgggattacaggcatgagccgtcatgcctggcctctgagaacagtttctgactcattcagattaggtatactctcaagtccctggaaactgaaattttttttaactgtaaagagggtagtgtcatttcttttcttaaggtcaagtgacatagattttaatgtaatgcataatttaggtaagaaattaattaatgtagcctagtttattatcttgaaatgttttaccctatttactttttaaaattaatgacctaagcggagggaataattataagtcaatagcagagagattgttgtttgggtgtttatttttttcagtttttgttttgagagattgggttaacacctctagccaaaattgtttggttttagggaggctaacaataacctactgaatttggaaaatgcaaaggtaaaaaatgtatatagactgcctgctgaactggttaagtactactgcttctgggaaatactatttcaaaattctatgtattataataataaatttgtaagacattcattattctaccatcctaatgaaaactttcagaagtctttctttatccatggcatgcccagggttttacctgaatctgatacaggatctatataactttactaggacttttgattgttgactccaggcttaggtatatcagaaggttctttttgccatttggcctgtggatgtctgagaagatcattcacaatacatgtaaaattcaggtaggcctaaggaaaggccagcctgtagaaagcaaaatggcagtgtctgttctccactgttggaggcattatgtaatttaagtatcctgttagccactgtctttctgctaattaagtggggctgaacaagtaagcactaataataccagtgaaccacttgggcaccttgtgggtagagttttgctgccacctagtggaatgggatatcattgcttccatatcaggttcacaagcaagttaagtgggcacagtttatttctgtgtagctcaggctgtaatcttgaaagctgaggagatacccatgcctctcagactcattagctgggtgtcacattaccacctgcacattctgacccaccgcatcttaatatgttttgtcctcttggagaaactaggagtagaagtcaggatatggtaggtaagggggaaaaaggaaagacggcttgatagctatgaatgcatgaggagcgaaatgttgactcagttatctagatcatggtctccaaacctgatgctatttccttacaaaaatatttgttgagcatgtgtccataattatatgtattgaacaatgaaaatatgtgtcaacaaatgtactgctacactaatgtgaacattatggaacaaaatttgaaagagtgaaataaaaggtttacactttaaaaaaaaac

SEQ ID NO: 327684 - DNA, 3680 bp, Homo sapiens
  misc_feature (46)..(47): n is a, c, g, or t
  misc_feature (57)..(57): n is a, c, g, or t
tgtgaggtgttggtggagggcgtgtggcgcgtgtagaagtagaggnnagaattaagnaacttaaaccattggatattgagtttatgaagcgtttgcatgaaaaagtgaatatcatcccacttattgccaaagcagacacactcacaccagaggaatgccaacagtttaaaaaacagataatgaaagaaatccaagaacataaaattaaaatatacgaatttccagaaacagatgatgaagaagaaaataaacttgttaaaaagataaaggaccgtttacctcttgctgtggtaggtagtaatactatcattgaagttaatggcaaaagggtcagaggaaggcagtatccttggggtgttgctgaagttgaaaatggtgaacattgtgattttacaatcctaagaaatatgttgataagaacacacatgcaggacttgaaagatgttactaataatgtccactatgagaactacagaagcagaaaacttgcagctgtgacttataatggagttgataacaacaagaataaagggcagctgactaagagccctctggcacaaatggaagaagaaagaagggagcatgtagctaaaatgaagaagatggagatggagatggagcaggtgtttgagatgaaggtcaaagaaaaagttcaaaaactgaaggactctgaagctgagctccagcggcgccatgagcaaatgaaaaagaatttggaagcacagcacaaagaattggaggaaaaacgtcgtcagttcgaggatgagaaagcaaactgggaagctcaacaacgtattttagaacaacagaactcttcaagaaccttggaaaagaacaagaagaaagggaagatcttttaaactctctattgaccaccagttaacgtattagttgccaatatgccagcttggacatcagtgtttgttggatccgtttgaccaatttgcaccagttttatccataatgatggatttaacagcatgacaaaaattattttttttttggttcttgatggagattaagatgccttgaattgtctagggtgttctgtacttagaaagtaagagctctaagtacctttcctacattttctttttttattaaacagatatcttcagtttaatgcaagagaacattttactgttgtacaatcatgttctggtggtttgattgtttacaggatattccaaaataaaaggactctggaagattttcattgaggataaattgccataatatgatgcaaactgtgcttctctatgataattacaatacaaaggttccattcagtgcagcatatacaataatgtaatttagtctaacacagttgaccctattttttgacacttccattgtttaaaaatacacatggaaaaaaaaaaaccctatatgcttactgtgcacctagagcttttttataacaacgtctttttgtttgtttgttttggattctttaaatatatattattctcatttagtgccctctttagccagaatctcattactgcttcatttttgtaataacatttaatttagatattttccatatattggcactgctaaaatagaatatagcatctttcatatggtaggaaccaacaaggaaactttcctttaactccctttttacactttatggtaagtagcagggggggaaatgcatttatagatcatttctaggcaaaattgtgaagctaatgaccaacctgtttctacctatatgcagtctctttattttactagaaatgggaatcatggcctcttgaagagaaaaaagtcaccattctgcatttagctgtattcatatattgcatttctgtattttttgtttgtattgtaaaaaattcacataataaacgatgttgtgatgtaatattgtgtgaggtcttaaatatcctacagtcgatgtacaagagtagagtatgtttgggaagaaacttttcagcttaagtttgcctcctctacaatgacatcttttatatgcttgtctcatttagaatgcatatgtgctgattttctaatttaagagataccatatctctctattcatttctatctctcatttgtatgcttatttttctgagaacattttttttttcccccagacagggtcttgcttcattgcccaggctggagtgcggtggcacaaacacgactcgactgcagcctcaaccctctgggctcaagcagtcctcctgcctcagccccctgagtatctgggattgcaggcgtgcaccaccacgcctggctaatttttgtattttttgcagcctcccaaagttctgggattacaggcatgagccgtcatgcctggcctctgagaacagtttctgactcattcagattaggtatactctcaagtccctggaaactgaaattttttttaactgtaaagagggtagtgtcatttcttttcttaaggtcaagtgacatagattttaatgtaatgcataatttaggtaagaaattaattaatgtagcctagtttattatcttgaaatgttttaccctatttactttttaaaattaatgacctaagcggagggaataattataagtcaatagcagagagattgttgtttgggtgtttatttttttcagtttttgttttgagagattgggttaacacctctagccaaaattgtttggttttagggaggctaacaataacctactgaatttggaaaatgcaaaggtaaaaaatgtatatagactgcctgctgaactggttaagtactactgcttctgggaaatactatttcaaaattctatgtattataataataaatttgtaagacattcattattctaccatcctaatgaaaactttcagaagtctttctttatccatggcatgcccagggttttacctgaatctgatacaggatctatataactttactaggacttttgattgttgactccaggcttaggtatatcagaaggttctttttgccatttggcctgtggatgtctgagaagatcattcacaatacatgtaaaattcaggtaggcctaaggaaaggccagcctgtagaaagcaaaatggcagtgtctgttctccactgttggaggcattatgtaatttaagtatcctgttagccactgtctttctgctaattaagtggggctgaacaagtaagcactaataataccagtgaaccacttgggcaccttgtgggtagagttttgctgccacctagtggaatgggatatcattgcttccatatcaggttcacaagcaagttaagtgggcacagtttatttctgtgtagctcaggctgtaatcttgaaagctgaggagatacccatgcctctcagactcattagctgggtgtcacattaccacctgcacattctgacccaccgcatcttaatatgttttgtcctcttggagaaactaggagtagaagtcaggatatggtaggtaagggggaaaaaggaaagacggcttgatagctatgaatgcatgaggagcgaaatgttgactcagttatctagatcatggtctccaaacctgatgctatttccttacaaaaatatttgttgagcatgtgtccataattatatgtattgaacaatgaaaatatgtgtcaacaaatgtactgctacactaatgtgaacattatggaacaaaatttgaaagagtgaaataaaaggtttacactttaaaaaaaaac

SEQ ID NO: 327685 - DNA, 1714 bp, Homo sapiens
agcgggagtcgagcgagagcctgtggaggagtccgcctgctgtagcgtgcgtaagcaaggcagctacgccgggcggctacgctgcggaatcggcgtaggcgcctttggagaatcggcgggctgcgctccgctggggctggtcgcggagggggggaggggatgtcggtcagtgcgagatccgctgctgctgaggagaggagcgtcaacagcagcaccatggtagctcaacagaagaaccttgaaggctatgtgggatttgccaatctcccaaatcaagtatacagaaaatcggtgaagagaggttttgaattcacgcttatggtagtgggtgaatctggattgggaaagtcgacattaatcaactcattattcctcacagatttgtattctccagagtatccaggtccttctcatagaattaaaaagactgtacaggtggaacaatccaaagttttaatcaaagaaggtggtgttcagttgctgctcacaatagttgataccccaggatttggagatgcagtggataatagtaattgctggcagcctgttatcgactacattgatagtaaatttgaggactacctaaatgcagaatcacgagtgaacagacgtcagatgcctgataacagggtgcagtgttgtttatacttcattgctccttcaggacatggacttaaaccattggatattgagtttatgaagcgtttgcatgaaaaagtgaatatcatcccacttattgccaaagcagacacactcacaccagaggaatgccaacagtttaaaaaacagataatgaaagaaatccaagaacataaaattaaaatatacgaatttccagaaacagatgatgaagaagaaaataaacttgttaaaaagataaaggaccgtttacctcttgctgtggtaggtagtaatactatcattgaagttaatggcaaaagggtcagaggaaggcagtatccttggggtgttgctgaagttgaaaatggtgaacattgtgattttacaatcctaagaaatatgttgataagaacacacatgcaggacttgaaagatgttactaataatgtccactatgagaactacagaagcagaaaacttgcagctgtgacttataatggagttgataacaacaagaataaagggcagctgactaagagccctctggcacaaatggaagaagaaagaagggagcatgtagctaaaatgaagaagatggagatggagatggagcaggtgtttgagatgaaggtcaaagaaaaagttcaaaaactgaaggactctgaagctgagctccagcggcgccatgagcaaatgaaaaagaatttggaagcacagcacaaagaattggaggaaaaacgtcgtcagttcgaggatgagaaagcaaactgggaagctcaacaacgtattttagaacaacagaactcttcaagaaccttggaaaagaacaagaagaaagggaagatcttttaaactctctattgaccaccagttaacgtattagttgccaatatgccagcttggacatcagtgtttgttggatccgtttgaccaatttgcaccagttttatccataatgatggatttaacagcatgacaaaaattattttttttttggttcttgatggagattaagatgccttgaattgtgctaaggtgggtttcttggttaaacccccctctttttttttttttttaaacagggcgccccccc

SEQ ID NO: 327686 - DNA, 1341 bp, Homo sapiens
agcgggagtcgagcgagagcctgtggaggagtccgcctgctgtagcgtgcgtaagcaaggcagctacgccgggcggctacgctgcggaatcggcgtaggcgcctttggagaatcggcgggctgcgctccgctggggctggtcgcggagggggggaggggatgtcggtcagtgcgagatccgctgctgctgaggagaggagcgtcaacagcagcaccatggtagctcaacagaagaaccttgaaggctatgtgggatttgccaatctcccaaatcaagtatacagaaaatcggtgaagagaggttttgaattcacgcttatggtagtgggtgaatctggattgggaaagtcgacattaatcaactcattattcctcacagatttgtattctccagagtatccaggtccttctcatagaattaaaaagactgtacaggtggaacaatccaaagttttaatcaaagaaggtggtgttcagttgctgctcacaatagttgataccccaggatttggagatgcagtggataatagtaattgctggcagcctgttatcgactacattgatagtaaatttgaggactacctaaatgcagaatcacgagtgaacagacgtcagatgcctgataacagggtgcagtgttgtttatacttcattgctccttcaggacatggacttaaaccattggatattgagtttatgaagcgtttgcatgaaaaagtgaatatcatcccacttattgccaaagcagacacactcacaccagaggaatgccaacagtttaaaaaacagataatgaaagaaatccaagaacataaaattaaaatatacgaatttccagaaacagatgatgaagaagaaaataaacttgttaaaaagataaaggaccgtttacctcttgctgtggtaggtagtaatactatcattgaagttaatggcaaaagggtcagaggaaggcagtatccttggggtgttgctgaagttgaaaatggtgaacattgtgattttacaatcctaagaaatatgttgataagaacacacatgcaggacttgaaagatgttactaataatgtccactatgagaactacagaagcagaaaacttgcagctgtgacttataatggagttgataacaacaagaataaagggcagctgactaagagccctctggcacaaatggaagaagaaagaagggagcatgtagctaaaatgaagaagatggagatggagatggagcaggtgtttgagatgaaggtcaaagaaaaagttcaaaaactgaaggactctgaagctgagctccagcggcgccatgagcaaatgaaaaagaatttggaagcacagcac

SEQ ID NO: 327687 - DNA, 1325 bp, Homo sapiens
agcgggagtcgagcgagagcctgtggaggagtccgcctgctgtagcgtgcgtaagcaaggcagctacgccgggcggctacgctgcggaatcggcgtaggcgcctttggagaatcggcgggctgcgctccgctggggctggtcgcggagggggggaggggatgtcggtcagtgcgagatccgctgctgctgaggagaggagcgtcaacagcagcaccatggtagctcaacagaagaaccttgaaggctatgtgggatttgccaatctcccaaatcaagtatacagaaaatcggtgaagagaggttttgaattcacgcttatggtagtgggtgaatctggattgggaaagtcgacattaatcaactcattattcctcacagatttgtattctccagagtatccaggtccttctcatagaattaaaaagactgtacaggtggaacaatccaaagttttaatcaaagaaggtggtgttcagttgctgctcacaatagttgataccccaggatttggagatgcagtggataatagtaattgctggcagcctgttatcgactacattgatagtaaatttgaggactacctaaatgcagaatcacgagtgaacagacgtcagatgcctgataacagggtgcagtgttgtttatacttcattgctccttcaggacatggacttaaaccattggatattgagtttatgaagcgtttgcatgaaaaagtgaatatcatcccacttattgccaaagcagacacactcacaccagaggaatgccaacagtttaaaaaacagataatgaaagaaatccaagaacataaaattaaaatatacgaatttccagaaacagatgatgaagaagaaaataaacttgttaaaaagataaaggaccgtttacctcttgctgtggtaggtagtaatactatcattgaagttaatggcaaaagggtcagaggaaggcagtatccttggggtgttgctgaagttgaaaatggtgaacattgtgattttacaatcctaagaaatatgttgataagaacacacatgcaggacttgaaagatgttactaataatgtccactatgagaactacagaagcagaaaacttgcacagggggggaaatgcatttatagatcatttctaggcaaaattgtgaagctaatgaccaacctgtttctacctatatgcagtctctttattttactagaaatgggaatcatggcctcttgaagagaaaaaagtcaccattctgcatttagctgtattcatatattgcatttctgtattttttgtttgtattgtaaaaaattcacataataaacgatgttgtg

SEQ ID NO: 327688 - DNA, 2498 bp, Homo sapiens
ggcacgagatggaacctttgtattgtaattatcatagagaagcacagtttgcatcatattatggcaatttattctctatgataattacaatacaaaggttccattcagtgcagcatatacaataatgtaatttagtctaacacagttgaccctattttttgacacttccattgtttaaaaatacacatggaaaaaaaaaaaccctatatgcttactgtgcacctagagcttttttataacaacgtctttttgtttgtttgttttggattctttaaatatatattattctcatttagtgccctctttagccagaatctcattactgcttcatttttgtaataacatttaatttagatattttccatatattggcactgctaaaatagaatatagcatctttcatatggtaggaaccaacaaggaaactttcctttaactccctttttacactttatggtaagtagcagggggggaaatgcatttatagatcatttctaggcaaaattgtgaagctaatgaccaacctgtttctacctatatgcagtctctttattttactagaaatgggaatcatggcctcttgaagagaaaaaagtcaccattctgcatttagctgtattcatatattgcatttctgtattttttgtttgtattgtaaaaaattcacataataaacgatgttgtgatgtaatattgtgtgaggtcttaaatatcctacagtcgatgtacaagagtagagtatgtttgggaagaaacttttcagcttaagtttgcctcctctacaatgacatcttttatatgcttgtctcatttagaatgcatatgtgctgattttctaatttaagagataccatatctctctattcatttctatctctcatttgtatgcttatttttctgagaacattttttttttcccccagacagggtcttgcttcattgcccaggctggagtgcggtggcacaaacacgactcgactgcagcctcaaccctctgggctcaagcagtcctcctgcctcagccccctgagtatctgggattgcaggcgtgcaccaccacgcctggctaatttttgtattttttgcagcctcccaaagttctgggattacaggcatgagccgtcatgcctggcctctgagaacagtttctgactcattcagattaggtatactctcaagtccctggaaactgaaattttttttaactgtaaagagggtagtgtcatttcttttcttaaggtcaagtgacatagattttaatgtaatgcataatttaggtaagaaattaattaatgtagcctagtttattatcttgaaatgttttaccctatttactttttaaaattaatgacctaagcggagggaataattataagtcaatagcagagagattgttgtttgggtgtttatttttttcagtttttgttttgagagattgggttaacacctctagccaaaattgtttggttttagggaggctaacaataacctactgaatttggaaaatgcaaaggtaaaaaatgtatatagactgcctgctgaactggttaagtactactgcttctgggaaatactatttcaaaattctatgtattataataataaatttgtaagacattcattattctaccatcctaatgaaaactttcagaagtctttctttatccatggcatgcccagggttttacctgaatctgatacaggatctatataactttactaggacttttgattgttgactccaggcttaggtatatcagaaggttctttttgccatttggcctgtggatgtctgagaagatcattcacaatacatgtaaaattcaggtaggcctaaggaaaggccagcctgtagaaagcaaaatggcagtgtctgttctccactgttggaggcattatgtaatttaagtatcctgttagccactgtctttctgctaattaagtggggctgaacaagtaagcactaataataccagtgaaccacttgggcaccttgtgggtagagttttgctgccacctagtggaatgggatatcattgcttccatatcaggttcacaagcaagttaagtgggcacagtttatttctgtgtagctcaggctgtaatcttgaaagctgaggagatacccatgcctctcagactcattagctgggtgtcacattaccacctgcacattctgacccaccgcatcttaatatgttttgtcctcttggagaaactaggagtagaagtcaggatatggtaggtaagggggaaaaaggaaagacggcttgatagctatgaatgcatgaggagcgaaatgttgactcagttatctagatcatggtctccaaacctgatgctatttccttacaaaaatatttgttgagcatgtgtccataattatatgtattgaacaatgaaaatatgtgtcaacaaatgtactgctacactaatgtgaacattatggaacaaaatttgaaagagtgaaataaaaggtttacactttaaaaaaaaac

SEQ ID NO: 327689 - DNA, 962 bp, Homo sapiens
agcgggagtcgagcgagagcctgtggaggagtccgcctgctgtagcgtgcgtaagcaaggcagctacgccgggcggctacgctgcggaatcggcgtaggcgcctttggagaatcggcgggctgcgctccgctggggctggtcgcggagggggggaggggatgtcggtcagtgcgagatccgctgctgctgaggagaggagcgtcaacagcagcaccatggtagctcaacagaagaaccttgaaggctatgtgggatttgccaatctcccaaatcaagtatacagaaaatcggtgaagagaggttttgaattcacgcttatggtagtgggtgaatctggattgggaaagtcgacattaatcaactcattattcctcacagatttgtattctccagagtatccaggtccttctcatagaattaaaaagactgtacaggtggaacaatccaaagttttaatcaaagaaggtggtgttcagttgctgctcacaatagttgataccccaggatttggagatgcagtggataatagtaattgctggcagcctgttatcgactacattgatagtaaatttgaggactacctaaatgcagaatcacgagtgaacagacgtcagatgcctgataacagggtgcagtgttgtttatacttcattgctccttcaggacatggacttaaaccattggatattgagtttatgaagcgtttgcatgaaaaagtgaatatcatcccacttattgccaaagcagacacactcacaccagaggaatgccaacagtttaaaaaacagataatgaaagaaatccaagaacagagatcaagtggtatgaaaaggtaggagttttaagctcaagtctcaaagataacctacctttacattctcagtcagaatttgacccagaaagaggaagtttcttcaggaacagaccgtacgttgatgaaggagaatctcggtccggccat

SEQ ID NO: 327690 - DNA, 153 bp, Homo sapiens
gtaagattttcttcagtgaatgactttctaaaatatctcaaaactgattaaaaatttgtatttatagtaagtagtacagtatgcacactgtattgatatagtctagattttcaaggataatactgatttcaggttcttgtagtctcaattttc

SEQ ID NO: 327691 - DNA, 4292 bp, Homo sapiens
ttatgctgttcctgagtgatccccttcgacggtgtctgaggaccgagagagtgaagaatggggaggggaagagagtggcacatggggttgagcagaggagaaagtcagaaaggtggcttggagaatccgctggggctggtcgcggagggggggaggggatgtcggtcagtgcgagatccgctgctgctgaggagaggagcgtcaacagcagcaccatggtagctcaacagaagaaccttgaaggctatgtgggatttgccaatctcccaaatcaagtatacagaaaatcggtgaagagaggttttgaattcacgcttatggtagtgggtgaatctggattgggaaagtcgacattaatcaactcattattcctcacagatttgtattctccagagtatccaggtccttctcatagaattaaaaagactgtacaggtggaacaatccaaagttttaatcaaagaaggtggtgttcagttgctgctcacaatagttgataccccaggatttggagatgcagtggataatagtaattgctggcagcctgttatcgactacattgatagtaaatttgaggactacctaaatgcagaatcacgagtgaacagacgtcagatgcctgataacagggtgcagtgttgtttatacttcattgctccttcaggacatggacttaaaccattggatattgagtttatgaagcgtttgcatgaaaaagtgaatatcatcccacttattgccaaagcagacacactcacaccagaggaatgccaacagtttaaaaaacagataatgaaagaaatccaagaacataaaattaaaatatacgaatttccagaaacagatgatgaagaagaaaataaacttgttaaaaagataaaggaccgtttacctcttgctgtggtaggtagtaatactatcattgaagttaatggcaaaagggtcagaggaaggcagtatccttggggtgttgctgaagttgaaaatggtgaacattgtgattttacaatcctaagaaatatgttgataagaacacacatgcaggacttgaaagatgttactaataatgtccactatgagaactacagaagcagaaaacttgcagctgtgacttataatggagttgataacaacaagaataaagggcagctgactaagagccctctggcacaaatggaagaagaaagaagggagcatgtagctaaaatgaagaagatggagatggagatggagcaggtgtttgagatgaaggtcaaagaaaaagttcaaaaactgaaggactctgaagctgagctccagcggcgccatgagcaaatgaaaaagaatttggaagcacagcacaaagaattggaggaaaaacgtcgtcagttcgaggatgagaaagcaaactgggaagctcaacaacgtattttagaacaacagaactcttcaagaaccttggaaaagaacaagaagaaagggaagatcttttaaactctctattgaccaccagttaacgtattagttgccaatatgccagcttggacatcagtgtttgttggatccgtttgaccaatttgcaccagttttatccataatgatggatttaacagcatgacaaaaattattttttttttggttcttgatggagattaagatgccttgaattgtctagggtgttctgtacttagaaagtaagagctctaagtacctttcctacattttctttttttattaaacagatatcttcagtttaatgcaagagaacattttactgttgtacaatcatgttctggtggtttgattgtttacaggatattccaaaataaaaggactctggaagattttcattgaggataaattgccataatatgatgcaaactgtgcttctctatgataattacaatacaaaggttccattcagtgcagcatatacaataatgtaatttagtctaacacagttgaccctattttttgacacttccattgtttaaaaatacacatggaaaaaaaaaaaccctatatgcttactgtgcacctagagcttttttataacaacgtctttttgtttgtttgttttggattctttaaatatatattattctcatttagtgccctctttagccagaatctcattactgcttcatttttgtaataacatttaatttagatattttccatatattggcactgctaaaatagaatatagcatctttcatatggtaggaaccaacaaggaaactttcctttaactccctttttacactttatggtaagtagcagggggggaaatgcatttatagatcatttctaggcaaaattgtgaagctaatgaccaacctgtttctacctatatgcagtctctttattttactagaaatgggaatcatggcctcttgaagagaaaaaagtcaccattctgcatttagctgtattcatatattgcatttctgtattttttgtttgtattgtaaaaaattcacataataaacgatgttgtgatgtaatattgtgtgaggtcttaaatatcctacagtcgatgtacaagagtagagtatgtttgggaagaaacttttcagcttaagtttgcctcctctacaatgacatcttttatatgcttgtctcatttagaatgcatatgtgctgattttctaatttaagagataccatatctctctattcatttctatctctcatttgtatgcttatttttctgagaacattttttttttcccccagacagggtcttgcttcattgcccaggctggagtgcggtggcacaaacacgactcgactgcagcctcaaccctctgggctcaagcagtcctcctgcctcagccccctgagtatctgggattgcaggcgtgcaccaccacgcctggctaatttttgtattttttgcagcctcccaaagttctgggattacaggcatgagccgtcatgcctggcctctgagaacagtttctgactcattcagattaggtatactctcaagtccctggaaactgaaattttttttaactgtaaagagggtagtgtcatttcttttcttaaggtcaagtgacatagattttaatgtaatgcataatttaggtaagaaattaattaatgtagcctagtttattatcttgaaatgttttaccctatttactttttaaaattaatgacctaagcggagggaataattataagtcaatagcagagagattgttgtttgggtgtttatttttttcagtttttgttttgagagattgggttaacacctctagccaaaattgtttggttttagggaggctaacaataacctactgaatttggaaaatgcaaaggtaaaaaatgtatatagactgcctgctgaactggttaagtactactgcttctgggaaatactatttcaaaattctatgtattataataataaatttgtaagacattcattattctaccatcctaatgaaaactttcagaagtctttctttatccatggcatgcccagggttttacctgaatctgatacaggatctatataactttactaggacttttgattgttgactccaggcttaggtatatcagaaggttctttttgccatttggcctgtggatgtctgagaagatcattcacaatacatgtaaaattcaggtaggcctaaggaaaggccagcctgtagaaagcaaaatggcagtgtctgttctccactgttggaggcattatgtaatttaagtatcctgttagccactgtctttctgctaattaagtggggctgaacaagtaagcactaataataccagtgaaccacttgggcaccttgtgggtagagttttgctgccacctagtggaatgggatatcattgcttccatatcaggttcacaagcaagttaagtgggcacagtttatttctgtgtagctcaggctgtaatcttgaaagctgaggagatacccatgcctctcagactcattagctgggtgtcacattaccacctgcacattctgacccaccgcatcttaatatgttttgtcctcttggagaaactaggagtagaagtcaggatatggtaggtaagggggaaaaaggaaagacggcttgatagctatgaatgcatgaggagcgaaatgttgactcagttatctagatcatggtctccaaacctgatgctatttccttacaaaaatatttgttgagcatgtgtccataattatatgtattgaacaatgaaaatatgtgtcaacaaatgtactgctacactaatgtgaacattatggaacaaaatttgaaagagtgaaataaaaggtttacactttaaaaaaaaac

SEQ ID NO: 327692 - DNA, 2480 bp, Homo sapiens
agcgggagtcgagcgagagcctgtggaggagtccgcctgctgtagcgtgcgtaagcaaggcagctacgccgggcggctacgctgcggaatcggcgtaggcgcctttggagaatcggcgggctgcgctccgctggggctggtcgcggagggggggaggggatgtcggtcagtgcgagatccgctgctgctgaggagaggagcgtcaacagcagcaccatggtagctcaacagaagaaccttgaaggctatgtgggatttgccaatctcccaaatcaagtatacagaaaatcggtgaagagaggttttgaattcacgcttatggtagtgggtgaatctggattgggaaagtcgacattaatcaactcattattcctcacagatttgtattctccagagtatccaggtccttctcatagaattaaaaagactgtacaggtggaacaatccaaagttttaatcaaagaaggtggtgttcagttgctgctcacaatagttgataccccaggatttggagatgcagtggataatagtaattgctggcagcctgttatcgactacattgatagtaaatttgaggactacctaaatgcagaatcacgagtgaacagacgtcagatgcctgataacagggtgcagtgttgtttatacttcattgctccttcaggacatggacttaaaccattggatattgagtttatgaagcgtttgcatgaaaaagtgaatatcatcccacttattgccaaagcagacacactcacaccagaggaatgccaacagtttaaaaaacagataatgaaagaaatccaagaacataaaattaaaatatacgaatttccagaaacagatgatgaagaagaaaataaacttgttaaaaagataaaggaccgtttacctcttgctgtggtaggtagtaatactatcattgaagttaatggcaaaagggtcagaggaaggcagtatccttggggtgttgctgaagttgaaaatggtgaacattgtgattttacaatcctaagaaatatgttgataagaacacacatgcaggacttgaaagatgttactaataatgtccactatgagaactacagaagcagaaaacttgcagctgtgacttataatggagttgataacaacaagaataaagggcagctgactaagagccctctggcacaaatggaagaagaaagaagggagcatgtagctaaaatgaagaagatggagatggagatggagcaggtgtttgagatgaaggtcaaagaaaaagttcaaaaactgaaggactctgaagctgagctccagcggcgccatgagcaaatgaaaaagaatttggaagcacagcacaaagaattggaggaaaaacgtcgtcagttcgaggatgagaaagcaaactgggaagctcaacaacgtattttagaacaacagaactcttcaagaaccttggaaaagaacaagaagaaagggaagatcttttaaactctctattgaccaccagttaacgtattagttgccaatatgccagcttggacatcagtgtttgttggatccgtttgaccaatttgcaccagttttatccataatgatggatttaacagcatgacaaaaattattttttttttggttcttgatggagattaagatgccttgaattgtctagggtgttctgtacttagaaagtaagagctctaagtacctttcctacattttctttttttattaaacagatatcttcagtttaatgcaagagaacattttactgttgtacaatcatgttctggtggtttgattgtttacaggatattccaaaataaaaggactctggaagattttcattgaggataaattgccataatatgatgcaaactgtgcttctctatgataattacaatacaaaggttccattcagtgcagcatatacaataatgtaatttagtctaacacagttgaccctattttttgacacttccattgtttaaaaatacacatggaaaaaaaaaaaccctatatgcttactgtgcacctagagcttttttataacaacgtctttttgtttgtttgttttggattctttaaatatatattattctcatttagtgccctctttagccagaatctcattactgcttcatttttgtaataacatttaatttagatattttccatatattggcactgctaaaatagaatatagcatctttcatatggtaggaaccaacaaggaaactttcctttaactccctttttacactttatggtaagtagcagggggggaaatgcatttatagatcatttctaggcaaaattgtgaagctaatgaccaacctgtttctacctatatgcagtctctttattttactagaaatgggaatcatggcctcttgaagagaaaaaagtcaccattctgcatttagctgtattcatatattgcatttctgtattttttgtttgtattgtaaaaaattcacataataaacgatgttgtg

SEQ ID NO: 327693 - DNA, 4235 bp, Homo sapiens
agcgggagtcgagcgagagcctgtggaggagtccgcctgctgtagcgtgcgtaagcaaggcagctacgccgggcggctacgctgcggaatcggcgtaggcgcctttggagaatcggcgggctgcgctccgctggggctggtcgcggagggggggaggggatgtcggtcagtgcgagatccgctgctgctgaggagaggagcgtcaacagcagcaccatggtagctcaacagaagaaccttgaaggctatgtgggatttgccaatctcccaaatcaagtatacagaaaatcggtgaagagaggttttgaattcacgcttatggtagtgggtgaatctggattgggaaagtcgacattaatcaactcattattcctcacagatttgtattctccagagtatccaggtccttctcatagaattaaaaagactgtacaggtggaacaatccaaagttttaatcaaagaaggtggtgttcagttgctgctcacaatagttgataccccaggatttggagatgcagtggataatagtaattgctggcagcctgttatcgactacattgatagtaaatttgaggactacctaaatgcagaatcacgagtgaacagacgtcagatgcctgataacagggtgcagtgttgtttatacttcattgctccttcaggacatggacttaaaccattggatattgagtttatgaagcgtttgcatgaaaaagtgaatatcatcccacttattgccaaagcagacacactcacaccagaggaatgccaacagtttaaaaaacagataatgaaagaaatccaagaacataaaattaaaatatacgaatttccagaaacagatgatgaagaagaaaataaacttgttaaaaagataaaggaccgtttacctcttgctgtggtaggtagtaatactatcattgaagttaatggcaaaagggtcagaggaaggcagtatccttggggtgttgctgaagttgaaaatggtgaacattgtgattttacaatcctaagaaatatgttgataagaacacacatgcaggacttgaaagatgttactaataatgtccactatgagaactacagaagcagaaaacttgcagctgtgacttataatggagttgataacaacaagaataaagggcagctgactaagagccctctggcacaaatggaagaagaaagaagggagcatgtagctaaaatgaagaagatggagatggagatggagcaggtgtttgagatgaaggtcaaagaaaaagttcaaaaactgaaggactctgaagctgagctccagcggcgccatgagcaaatgaaaaagaatttggaagcacagcacaaagaattggaggaaaaacgtcgtcagttcgaggatgagaaagcaaactgggaagctcaacaacgtattttagaacaacagaactcttcaagaaccttggaaaagaacaagaagaaagggaagatcttttaaactctctattgaccaccagttaacgtattagttgccaatatgccagcttggacatcagtgtttgttggatccgtttgaccaatttgcaccagttttatccataatgatggatttaacagcatgacaaaaattattttttttttggttcttgatggagattaagatgccttgaattgtctagggtgttctgtacttagaaagtaagagctctaagtacctttcctacattttctttttttattaaacagatatcttcagtttaatgcaagagaacattttactgttgtacaatcatgttctggtggtttgattgtttacaggatattccaaaataaaaggactctggaagattttcattgaggataaattgccataatatgatgcaaactgtgcttctctatgataattacaatacaaaggttccattcagtgcagcatatacaataatgtaatttagtctaacacagttgaccctattttttgacacttccattgtttaaaaatacacatggaaagtttgtttgttttggattctttaaatatatattattctcatttagtgccctctttagccagaatctcattactgcttcatttttgtaataacatttaatttagatattttccatatattggcactgctaaaatagaatatagcatctttcatatggtaggaaccaacaaggaaactttcctttaactccctttttacactttatggtaagtagcagggggggaaatgcatttatagatcatttctaggcaaaattgtgaagctaatgaccaacctgtttctacctatatgcagtctctttattttactagaaatgggaatcatggcctcttgaagagaaaaaagtcaccattctgcatttagctgtattcatatattgcatttctgtattttttgtttgtattgtaaaaaattcacataataaacgatgttgtgatgtaatattgtgtgaggtcttaaatatcctacagtcgatgtacaagagtagagtatgtttgggaagaaacttttcagcttaagtttgcctcctctacaatgacatcttttatatgcttgtctcatttagaatgcatatgtgctgattttctaatttaagagataccatatctctctattcatttctatctctcatttgtatgcttatttttctgagaacattttttttttcccccagacagggtcttgcttcattgcccaggctggagtgcggtggcacaaacacgactcgactgcagcctcaaccctctgggctcaagcagtcctcctgcctcagccccctgagtatctgggattgcaggcgtgcaccaccacgcctggctaatttttgtattttttgcagcctcccaaagttctgggattacaggcatgagccgtcatgcctggcctctgagaacagtttctgactcattcagattaggtatactctcaagtccctggaaactgaaattttttttaactgtaaagagggtagtgtcatttcttttcttaaggtcaagtgacatagattttaatgtaatgcataatttaggtaagaaattaattaatgtagcctagtttattatcttgaaatgttttaccctatttactttttaaaattaatgacctaagcggagggaataattataagtcaatagcagagagattgttgtttgggtgtttatttttttcagtttttgttttgagagattgggttaacacctctagccaaaattgtttggttttagggaggctaacaataacctactgaatttggaaaatgcaaaggtaaaaaatgtatatagactgcctgctgaactggttaagtactactgcttctgggaaatactatttcaaaattctatgtattataataataaatttgtaagacattcattattctaccatcctaatgaaaactttcagaagtctttctttatccatggcatgcccagggttttacctgaatctgatacaggatctatataactttactaggacttttgattgttgactccaggcttaggtatatcagaaggttctttttgccatttggcctgtggatgtctgagaagatcattcacaatacatgtaaaattcaggtaggcctaaggaaaggccagcctgtagaaagcaaaatggcagtgtctgttctccactgttggaggcattatgtaatttaagtatcctgttagccactgtctttctgctaattaagtggggctgaacaagtaagcactaataataccagtgaaccacttgggcaccttgtgggtagagttttgctgccacctagtggaatgggatatcattgcttccatatcaggttcacaagcaagttaagtgggcacagtttatttctgtgtagctcaggctgtaatcttgaaagctgaggagatacccatgcctctcagactcattagctgggtgtcacattaccacctgcacattctgacccaccgcatcttaatatgttttgtcctcttggagaaactaggagtagaagtcaggatatggtaggtaagggggaaaaaggaaagacggcttgatagctatgaatgcatgaggagcgaaatgttgactcagttatctagatcatggtctccaaacctgatgctatttccttacaaaaatatttgttgagcatgtgtccataattatatgtattgaacaatgaaaatatgtgtcaacaaatgtactgctacactaatgtgaacattatggaacaaaatttgaaagagtgaaataaaaggtttacactttaaaaaaaaac

SEQ ID NO: 327694 - DNA, 2536 bp, Homo sapiens
  misc_feature (2504)..(2504): n is a, c, g, or t
agcgggagtcgagcgagagcctgtggaggagtccgcctgctgtagcgtgcgtaagcaaggcagctacgccgggcggctacgctgcggaatcggcgtaggcgcctttggagaatcggcgggctgcgctccgctggggctggtcgcggagggggggaggggatgtcggtcagtgcgagatccgctgctgctgaggagaggagcgtcaacagcagcaccatggtagctcaacagaagaaccttgaaggctatgtgggatttgccaatctcccaaatcaagtatacagaaaatcggtgaagagaggttttgaattcacgcttatggtagtgggtgaatctggattgggaaagtcgacattaatcaactcattattcctcacagatttgtattctccagagtatccaggtccttctcatagaattaaaaagactgtacaggtggaacaatccaaagttttaatcaaagaaggtggtgttcagttgctgctcacaatagttgataccccaggatttggagatgcagtggataatagtaattgctggcagcctgttatcgactacattgatagtaaatttgaggactacctaaatgcagaatcacgagtgaacagacgtcagatgcctgataacagggtgcagtgttgtttatacttcattgctccttcaggacatggacttaaaccattggatattgagtttatgaagcgtttgcatgaaaaagtgaatatcatcccacttattgccaaagcagacacactcacaccagaggaatgccaacagtttaaaaaacagataatgaaagaaatccaagaacataaaattaaaatatacgaatttccagaaacagatgatgaagaagaaaataaacttgttaaaaagataaaggaccgtttacctcttgctgtggtaggtagtaatactatcattgaagttaatggcaaaagggtcagaggaaggcagtatccttggggtgttgctgaagttgaaaatggtgaacattgtgattttacaatcctaagaaatatgttgataagaacacacatgcaggacttgaaagatgttactaataatgtccactatgagaactacagaagcagaaaacttgcagctgtgacttataatggagttgataacaacaagaataaagggcagctgactaagagccctctggcacaaatggaagaagaaagaagggagcatgtagctaaaatgaagaagatggagatggagatggagcaggtgtttgagatgaaggtcaaagaaaaagttcaaaaactgaaggactctgaagctgagctccagcggcgccatgagcaaatgaaaaagaatttggaagcacagcacaaagaattggaggaaaaacgtcgtcagttcgaggatgagaaagcaaactgggaagctcaacaacgtattttagaacaacagaactcttcaagaaccttggaaaagaacaagaagaaagggaagatcttttaaactctctattgaccaccagttaacgtattagttgccaatatgccagcttggacatcagtgtttgttggatccgtttgaccaatttgcaccagttttatccataatgatggatttaacagcatgacaaaaattattttttttttggttcttgatggagattaagatgccttgaattgtctagggtgttctgtacttagaaagtaagagctctaagtacctttcctacattttctttttttattaaacagatatcttcagtttaatgcaagagaacattttactgttgtacaatcatgttctggtggtttgattgtttacaggatattccaaaataaaaggactctggaagattttcattgaggataaattgccataatatgatgcaaactgtgcttctctatgataattacaatacaaaggttccattcagtgcagcatatacaataatgtaatttagtctaacacagttgaccctattttttgacacttccattgtttaaaaatacacatggaaaaaaaaaaaccctatatgcttactgtgcacctagagcttttttataacaacgtctttttgtttgtttgttttggattctttaaatatatattattctcatttagtgccctctttagccagaatctcattactgcttcatttttgtaataacatttaatttagatattttccatatattggcactgctaaaatagaatatagcatctttcatatggtaggaaccaacaaggaaactttcctttaactccctttttacactttatggtaagtagcagggggggaaatgcatttatagatcatttctaggcaaaattgtgaagctaatgaccaacctgtttctacctatatgcagtctctttattttactagaaatgggaatcatggcctcttgaagagaaaaaagtcaccattctgcatttagctgtattcatatattgcatttctgtattttttgtttgtattgtaaaaaattcacataataaacgatgttgtgctgatgcggccgacccccccactnctccattaccacaatccccccccccccctcac

SEQ ID NO: 327695 - DNA, 2544 bp, Homo sapiens
agcgggagtcgagcgagagcctgtggaggagtccgcctgctgtagcgtgcgtaagcaaggcagctacgccgggcggctacgctgcggaatcggcgtaggcgcctttggagaatcggcgggctgcgctccgctggggctggtcgcggagggggggaggggatgtcggtcagtgcgagatccgctgctgctgaggagaggagcgtcaacagcagcaccatggtagctcaacagaagaaccttgaaggctatgtgggatttgccaatctcccaaatcaagtatacagaaaatcggtgaagagaggttttgaattcacgcttatggtagtgggtgaatctggattgggaaagtcgacattaatcaactcattattcctcacagatttgtattctccagagtatccaggtccttctcatagaattaaaaagactgtacaggtggaacaatccaaagttttaatcaaagaaggtggtgttcagttgctgctcacaatagttgataccccaggatttggagatgcagtggataatagtaattgctggcagcctgttatcgactacattgatagtaaatttgaggactacctaaatgcagaatcacgagtgaacagacgtcagatgcctgataacagggtgcagtgttgtttatacttcattgctccttcaggacatggacttaaaccattggatattgagtttatgaagcgtttgcatgaaaaagtgaatatcatcccacttattgccaaagcagacacactcacaccagaggaatgccaacagtttaaaaaacagataatgaaagaaatccaagaacataaaattaaaatatacgaatttccagaaacagatgatgaagaagaaaataaacttgttaaaaagataaaggaccgtttacctcttgctgtggtaggtagtaatactatcattgaagttaatggcaaaagggtcagaggaaggcagtatccttggggtgttgctgaagttgaaaatggtgaacattgtgattttacaatcctaagaaatatgttgataagaacacacatgcaggacttgaaagatgttactaataatgtccactatgagaactacagaagcagaaaacttgcagctgtgacttataatggagttgataacaacaagaataaagggcagctgactaagagccctctggcacaaatggaagaagaaagaagggagcatgtagctaaaatgaagaagatggagatggagatggagcaggtgtttgagatgaaggtcaaagaaaaagttcaaaaactgaaggactctgaagctgagctccagcggcgccatgagcaaatgaaaaagaatttggaagcacagcacaaagaattggaggaaaaacgtcgtcagttcgaggatgagaaagcaaactgggaagctcaacaacgtattttagaacaacagaactcttcaagaaccttggaaaagaacaagaagaaagggaagatcttttaaactctctattgaccaccagttaacgtattagttgccaatatgccagcttggacatcagtgtttgttggatccgtttgaccaatttgcaccagttttatccataatgatggatttaacagcatgacaaaaattattttttttttggttcttgatggagattaagatgccttgaattgtctagggtgttctgtacttagaaagtaagagctctaagtacctttcctacattttctttttttattaaacagatatcttcagtttaatgcaagagaacattttactgttgtacaatcatgttctggtggtttgattgtttacaggatattccaaaataaaaggactctggaagattttcattgaggataaattgccataatatgatgcaaactgtgcttctctatgataattacaatacaaaggttccattcagtgcagcatatacaataatgtaatttagtctaacacagttgaccctattttttgacacttccattgtttaaaaatacacatggaaaaaaaaaaaccctatatgcttactgtgcacctagagcttttttataacaacgtctttttgtttgtttgttttggattctttaaatatatattattctcatttagtgccctctttagccagaatctcattactgcttcatttttgtaataacatttaatttagatattttccatatattggcactgctaaaatagaatatagcatctttcatatggtaggaaccaacaaggaaactttcctttaactccctttttacactttatggtaagtagcagggggggaaatgcatttatagatcatttctaggcaaaattgtgaagctaatgaccaacctgtttctacctatatgcagtctctttattttactagaaatgggaatcatggcctcttgaagagaaaaaagtcaccattctgcatttagctgtattcatatattgcatttctgtattttttgtttgtattgtaaaaaattcacataataaacgatgttgtggaattttttacaatacaaacaaaaaatacagaaatgcaatatatgaatacagctaaagtcgacg

SEQ ID NO: 327696 - DNA, 4884 bp, Homo sapiens
ttatgctgttcctgagtgatccccttcgacggtgtctgaggaccgagagagtgaagaatggggaggggaagagagtggcacatggggttgagcagaggagaaagtcagaaaggtggcttggagaatccgctggggctggtcgcggagggggggaggggatgtcggtcagtgcgagatccgctgctgctgaggagaggagcgtcaacagcagcaccatggtagctctgttggaatctggaacactggaatgatggaaatgtgttctttacaaagtagctgtgagtatactacataatttatagagtttttttcagtctcagttaacttaaatttaatttatagttggatgaaatatgagccaaggaaaccttaggtttaatgcatatttctaactccactcatagcagactttcaaatatttgacttaaaaatgttagattctgattagtctcctaattattatgtttatagttagcttttcattttaatgggcttcgtttttaaaatttggcttaagaattagttttatgaaatgaacaaaagagccaaagattatggatggaatatttagctacatgactagtaaacattgtagacttctgttctttgttaaatccaaatgtattgaattgatgttttgatcccatgattgctttttaaatgagaatttaaatgtggcagaaacttttaagagaatgtgtgcctctttttgctattttttaatgttgagataagactgcctccaaagtaaaattaaccaatgagactctgcttattcaaatagtcttaactacggacagcatttctcacccatggcaacagaagaaccttgaaggctatgtgggatttgccaatctcccaaatcaagtatacagaaaatcggtgaagagaggttttgaattcacgcttatggtagtgggtgaatctggattgggaaagtcgacattaatcaactcattattcctcacagatttgtattctccagagtatccaggtccttctcatagaattaaaaagactgtacaggtggaacaatccaaagttttaatcaaagaaggtggtgttcagttgctgctcacaatagttgataccccaggatttggagatgcagtggataatagtaattgctggcagcctgttatcgactacattgatagtaaatttgaggactacctaaatgcagaatcacgagtgaacagacgtcagatgcctgataacagggtgcagtgttgtttatacttcattgctccttcaggacatggacttaaaccattggatattgagtttatgaagcgtttgcatgaaaaagtgaatatcatcccacttattgccaaagcagacacactcacaccagaggaatgccaacagtttaaaaaacagataatgaaagaaatccaagaacataaaattaaaatatacgaatttccagaaacagatgatgaagaagaaaataaacttgttaaaaagataaaggaccgtttacctcttgctgtggtaggtagtaatactatcattgaagttaatggcaaaagggtcagaggaaggcagtatccttggggtgttgctgaagttgaaaatggtgaacattgtgattttacaatcctaagaaatatgttgataagaacacacatgcaggacttgaaagatgttactaataatgtccactatgagaactacagaagcagaaaacttgcagctgtgacttataatggagttgataacaacaagaataaagggcagctgactaagagccctctggcacaaatggaagaagaaagaagggagcatgtagctaaaatgaagaagatggagatggagatggagcaggtgtttgagatgaaggtcaaagaaaaagttcaaaaactgaaggactctgaagctgagctccagcggcgccatgagcaaatgaaaaagaatttggaagcacagcacaaagaattggaggaaaaacgtcgtcagttcgaggatgagaaagcaaactgggaagctcaacaacgtattttagaacaacagaactcttcaagaaccttggaaaagaacaagaagaaagggaagatcttttaaactctctattgaccaccagttaacgtattagttgccaatatgccagcttggacatcagtgtttgttggatccgtttgaccaatttgcaccagttttatccataatgatggatttaacagcatgacaaaaattattttttttttggttcttgatggagattaagatgccttgaattgtctagggtgttctgtacttagaaagtaagagctctaagtacctttcctacattttctttttttattaaacagatatcttcagtttaatgcaagagaacattttactgttgtacaatcatgttctggtggtttgattgtttacaggatattccaaaataaaaggactctggaagattttcattgaggataaattgccataatatgatgcaaactgtgcttctctatgataattacaatacaaaggttccattcagtgcagcatatacaataatgtaatttagtctaacacagttgaccctattttttgacacttccattgtttaaaaatacacatggaaaaaaaaaaaccctatatgcttactgtgcacctagagcttttttataacaacgtctttttgtttgtttgttttggattctttaaatatatattattctcatttagtgccctctttagccagaatctcattactgcttcatttttgtaataacatttaatttagatattttccatatattggcactgctaaaatagaatatagcatctttcatatggtaggaaccaacaaggaaactttcctttaactccctttttacactttatggtaagtagcagggggggaaatgcatttatagatcatttctaggcaaaattgtgaagctaatgaccaacctgtttctacctatatgcagtctctttattttactagaaatgggaatcatggcctcttgaagagaaaaaagtcaccattctgcatttagctgtattcatatattgcatttctgtattttttgtttgtattgtaaaaaattcacataataaacgatgttgtgatgtaatattgtgtgaggtcttaaatatcctacagtcgatgtacaagagtagagtatgtttgggaagaaacttttcagcttaagtttgcctcctctacaatgacatcttttatatgcttgtctcatttagaatgcatatgtgctgattttctaatttaagagataccatatctctctattcatttctatctctcatttgtatgcttatttttctgagaacattttttttttcccccagacagggtcttgcttcattgcccaggctggagtgcggtggcacaaacacgactcgactgcagcctcaaccctctgggctcaagcagtcctcctgcctcagccccctgagtatctgggattgcaggcgtgcaccaccacgcctggctaatttttgtattttttgcagcctcccaaagttctgggattacaggcatgagccgtcatgcctggcctctgagaacagtttctgactcattcagattaggtatactctcaagtccctggaaactgaaattttttttaactgtaaagagggtagtgtcatttcttttcttaaggtcaagtgacatagattttaatgtaatgcataatttaggtaagaaattaattaatgtagcctagtttattatcttgaaatgttttaccctatttactttttaaaattaatgacctaagcggagggaataattataagtcaatagcagagagattgttgtttgggtgtttatttttttcagtttttgttttgagagattgggttaacacctctagccaaaattgtttggttttagggaggctaacaataacctactgaatttggaaaatgcaaaggtaaaaaatgtatatagactgcctgctgaactggttaagtactactgcttctgggaaatactatttcaaaattctatgtattataataataaatttgtaagacattcattattctaccatcctaatgaaaactttcagaagtctttctttatccatggcatgcccagggttttacctgaatctgatacaggatctatataactttactaggacttttgattgttgactccaggcttaggtatatcagaaggttctttttgccatttggcctgtggatgtctgagaagatcattcacaatacatgtaaaattcaggtaggcctaaggaaaggccagcctgtagaaagcaaaatggcagtgtctgttctccactgttggaggcattatgtaatttaagtatcctgttagccactgtctttctgctaattaagtggggctgaacaagtaagcactaataataccagtgaaccacttgggcaccttgtgggtagagttttgctgccacctagtggaatgggatatcattgcttccatatcaggttcacaagcaagttaagtgggcacagtttatttctgtgtagctcaggctgtaatcttgaaagctgaggagatacccatgcctctcagactcattagctgggtgtcacattaccacctgcacattctgacccaccgcatcttaatatgttttgtcctcttggagaaactaggagtagaagtcaggatatggtaggtaagggggaaaaaggaaagacggcttgatagctatgaatgcatgaggagcgaaatgttgactcagttatctagatcatggtctccaaacctgatgctatttccttacaaaaatatttgttgagcatgtgtccataattatatgtattgaacaatgaaaatatgtgtcaacaaatgtactgctacactaatgtgaacattatggaacaaaatttgaaagagtgaaataaaaggtttacactttaaaaaaaaac

SEQ ID NO: 327697 - DNA, 4250 bp, Homo sapiens
ttatgctgttcctgagtgatccccttcgacggtgtctgaggaccgagagagtgaagaatggggaggggaagagagtggcacatggggttgagcagaggagaaagtcagaaaggtggcttggagaatccgctggggctggtcgcggagggggggaggggatgtcggtcagtgcgagatccgctgctgctgaggagaggagcgtcaacagcagcaccatggtagctcaacagaagaaccttgaaggctatgtgggatttgccaatctcccaaatcaagtatacagaaaatcggtgaagagaggttttgaattcacgcttatggtagtgggtgaatctggattgggaaagtcgacattaatcaactcattattcctcacagatttgtattctccagagtatccaggtccttctcatagaattaaaaagactgtacagttgctgctcacaatagttgataccccaggatttggagatgcagtggataatagtaattgctggcagcctgttatcgactacattgatagtaaatttgaggactacctaaatgcagaatcacgagtgaacagacgtcagatgcctgataacagggtgcagtgttgtttatacttcattgctccttcaggacatggacttaaaccattggatattgagtttatgaagcgtttgcatgaaaaagtgaatatcatcccacttattgccaaagcagacacactcacaccagaggaatgccaacagtttaaaaaacagataatgaaagaaatccaagaacataaaattaaaatatacgaatttccagaaacagatgatgaagaagaaaataaacttgttaaaaagataaaggaccgtttacctcttgctgtggtaggtagtaatactatcattgaagttaatggcaaaagggtcagaggaaggcagtatccttggggtgttgctgaagttgaaaatggtgaacattgtgattttacaatcctaagaaatatgttgataagaacacacatgcaggacttgaaagatgttactaataatgtccactatgagaactacagaagcagaaaacttgcagctgtgacttataatggagttgataacaacaagaataaagggcagctgactaagagccctctggcacaaatggaagaagaaagaagggagcatgtagctaaaatgaagaagatggagatggagatggagcaggtgtttgagatgaaggtcaaagaaaaagttcaaaaactgaaggactctgaagctgagctccagcggcgccatgagcaaatgaaaaagaatttggaagcacagcacaaagaattggaggaaaaacgtcgtcagttcgaggatgagaaagcaaactgggaagctcaacaacgtattttagaacaacagaactcttcaagaaccttggaaaagaacaagaagaaagggaagatcttttaaactctctattgaccaccagttaacgtattagttgccaatatgccagcttggacatcagtgtttgttggatccgtttgaccaatttgcaccagttttatccataatgatggatttaacagcatgacaaaaattattttttttttggttcttgatggagattaagatgccttgaattgtctagggtgttctgtacttagaaagtaagagctctaagtacctttcctacattttctttttttattaaacagatatcttcagtttaatgcaagagaacattttactgttgtacaatcatgttctggtggtttgattgtttacaggatattccaaaataaaaggactctggaagattttcattgaggataaattgccataatatgatgcaaactgtgcttctctatgataattacaatacaaaggttccattcagtgcagcatatacaataatgtaatttagtctaacacagttgaccctattttttgacacttccattgtttaaaaatacacatggaaaaaaaaaaaccctatatgcttactgtgcacctagagcttttttataacaacgtctttttgtttgtttgttttggattctttaaatatatattattctcatttagtgccctctttagccagaatctcattactgcttcatttttgtaataacatttaatttagatattttccatatattggcactgctaaaatagaatatagcatctttcatatggtaggaaccaacaaggaaactttcctttaactccctttttacactttatggtaagtagcagggggggaaatgcatttatagatcatttctaggcaaaattgtgaagctaatgaccaacctgtttctacctatatgcagtctctttattttactagaaatgggaatcatggcctcttgaagagaaaaaagtcaccattctgcatttagctgtattcatatattgcatttctgtattttttgtttgtattgtaaaaaattcacataataaacgatgttgtgatgtaatattgtgtgaggtcttaaatatcctacagtcgatgtacaagagtagagtatgtttgggaagaaacttttcagcttaagtttgcctcctctacaatgacatcttttatatgcttgtctcatttagaatgcatatgtgctgattttctaatttaagagataccatatctctctattcatttctatctctcatttgtatgcttatttttctgagaacattttttttttcccccagacagggtcttgcttcattgcccaggctggagtgcggtggcacaaacacgactcgactgcagcctcaaccctctgggctcaagcagtcctcctgcctcagccccctgagtatctgggattgcaggcgtgcaccaccacgcctggctaatttttgtattttttgcagcctcccaaagttctgggattacaggcatgagccgtcatgcctggcctctgagaacagtttctgactcattcagattaggtatactctcaagtccctggaaactgaaattttttttaactgtaaagagggtagtgtcatttcttttcttaaggtcaagtgacatagattttaatgtaatgcataatttaggtaagaaattaattaatgtagcctagtttattatcttgaaatgttttaccctatttactttttaaaattaatgacctaagcggagggaataattataagtcaatagcagagagattgttgtttgggtgtttatttttttcagtttttgttttgagagattgggttaacacctctagccaaaattgtttggttttagggaggctaacaataacctactgaatttggaaaatgcaaaggtaaaaaatgtatatagactgcctgctgaactggttaagtactactgcttctgggaaatactatttcaaaattctatgtattataataataaatttgtaagacattcattattctaccatcctaatgaaaactttcagaagtctttctttatccatggcatgcccagggttttacctgaatctgatacaggatctatataactttactaggacttttgattgttgactccaggcttaggtatatcagaaggttctttttgccatttggcctgtggatgtctgagaagatcattcacaatacatgtaaaattcaggtaggcctaaggaaaggccagcctgtagaaagcaaaatggcagtgtctgttctccactgttggaggcattatgtaatttaagtatcctgttagccactgtctttctgctaattaagtggggctgaacaagtaagcactaataataccagtgaaccacttgggcaccttgtgggtagagttttgctgccacctagtggaatgggatatcattgcttccatatcaggttcacaagcaagttaagtgggcacagtttatttctgtgtagctcaggctgtaatcttgaaagctgaggagatacccatgcctctcagactcattagctgggtgtcacattaccacctgcacattctgacccaccgcatcttaatatgttttgtcctcttggagaaactaggagtagaagtcaggatatggtaggtaagggggaaaaaggaaagacggcttgatagctatgaatgcatgaggagcgaaatgttgactcagttatctagatcatggtctccaaacctgatgctatttccttacaaaaatatttgttgagcatgtgtccataattatatgtattgaacaatgaaaatatgtgtcaacaaatgtactgctacactaatgtgaacattatggaacaaaatttgaaagagtgaaataaaaggtttacactttaaaaaaaaac

SEQ ID NO: 327698 - DNA, 3924 bp, Homo sapiens
atctccttatgagcaatctttaaaagtaaaatcagttcagagctgctcaacacacaagttttcagtgggttggttaaataattcctggtcagtgggctatattcatgccacaaaacagtatggtactggatattttccttcttcgggccaaactgctaagcatcacatcacaaagacatctctgtgaagctgagttttaaaatgctcagtaaatgctgaggtagatggttttcaaatgaagatcttctatactctgattcgattgggactagcttctttgtgtatcctccttcaggacatggacttaaaccattggatattgagtttatgaagcgtttgcatgaaaaagtgaatatcatcccacttattgccaaagcagacacactcacaccagaggaatgccaacagtttaaaaaacagataatgaaagaaatccaagaacataaaattaaaatatacgaatttccagaaacagatgatgaagaagaaaataaacttgttaaaaagataaaggaccgtttacctcttgctgtggtaggtagtaatactatcattgaagttaatggcaaaagggtcagaggaaggcagtatccttggggtgttgctgaagttgaaaatggtgaacattgtgattttacaatcctaagaaatatgttgataagaacacacatgcaggacttgaaagatgttactaataatgtccactatgagaactacagaagcagaaaacttgcagctgtgacttataatggagttgataacaacaagaataaagggcagctgactaagagccctctggcacaaatggaagaagaaagaagggagcatgtagctaaaatgaagaagatggagatggagatggagcaggtgtttgagatgaaggtcaaagaaaaagttcaaaaactgaaggactctgaagctgagctccagcggcgccatgagcaaatgaaaaagaatttggaagcacagcacaaagaattggaggaaaaacgtcgtcagttcgaggatgagaaagcaaactgggaagctcaacaacgtattttagaacaacagaactcttcaagaaccttggaaaagaacaagaagaaagggaagatcttttaaactctctattgaccaccagttaacgtattagttgccaatatgccagcttggacatcagtgtttgttggatccgtttgaccaatttgcaccagttttatccataatgatggatttaacagcatgacaaaaattattttttttttggttcttgatggagattaagatgccttgaattgtctagggtgttctgtacttagaaagtaagagctctaagtacctttcctacattttctttttttattaaacagatatcttcagtttaatgcaagagaacattttactgttgtacaatcatgttctggtggtttgattgtttacaggatattccaaaataaaaggactctggaagattttcattgaggataaattgccataatatgatgcaaactgtgcttctctatgataattacaatacaaaggttccattcagtgcagcatatacaataatgtaatttagtctaacacagttgaccctattttttgacacttccattgtttaaaaatacacatggaaaaaaaaaaaccctatatgcttactgtgcacctagagcttttttataacaacgtctttttgtttgtttgttttggattctttaaatatatattattctcatttagtgccctctttagccagaatctcattactgcttcatttttgtaataacatttaatttagatattttccatatattggcactgctaaaatagaatatagcatctttcatatggtaggaaccaacaaggaaactttcctttaactccctttttacactttatggtaagtagcagggggggaaatgcatttatagatcatttctaggcaaaattgtgaagctaatgaccaacctgtttctacctatatgcagtctctttattttactagaaatgggaatcatggcctcttgaagagaaaaaagtcaccattctgcatttagctgtattcatatattgcatttctgtattttttgtttgtattgtaaaaaattcacataataaacgatgttgtgatgtaatattgtgtgaggtcttaaatatcctacagtcgatgtacaagagtagagtatgtttgggaagaaacttttcagcttaagtttgcctcctctacaatgacatcttttatatgcttgtctcatttagaatgcatatgtgctgattttctaatttaagagataccatatctctctattcatttctatctctcatttgtatgcttatttttctgagaacattttttttttcccccagacagggtcttgcttcattgcccaggctggagtgcggtggcacaaacacgactcgactgcagcctcaaccctctgggctcaagcagtcctcctgcctcagccccctgagtatctgggattgcaggcgtgcaccaccacgcctggctaatttttgtattttttgcagcctcccaaagttctgggattacaggcatgagccgtcatgcctggcctctgagaacagtttctgactcattcagattaggtatactctcaagtccctggaaactgaaattttttttaactgtaaagagggtagtgtcatttcttttcttaaggtcaagtgacatagattttaatgtaatgcataatttaggtaagaaattaattaatgtagcctagtttattatcttgaaatgttttaccctatttactttttaaaattaatgacctaagcggagggaataattataagtcaatagcagagagattgttgtttgggtgtttatttttttcagtttttgttttgagagattgggttaacacctctagccaaaattgtttggttttagggaggctaacaataacctactgaatttggaaaatgcaaaggtaaaaaatgtatatagactgcctgctgaactggttaagtactactgcttctgggaaatactatttcaaaattctatgtattataataataaatttgtaagacattcattattctaccatcctaatgaaaactttcagaagtctttctttatccatggcatgcccagggttttacctgaatctgatacaggatctatataactttactaggacttttgattgttgactccaggcttaggtatatcagaaggttctttttgccatttggcctgtggatgtctgagaagatcattcacaatacatgtaaaattcaggtaggcctaaggaaaggccagcctgtagaaagcaaaatggcagtgtctgttctccactgttggaggcattatgtaatttaagtatcctgttagccactgtctttctgctaattaagtggggctgaacaagtaagcactaataataccagtgaaccacttgggcaccttgtgggtagagttttgctgccacctagtggaatgggatatcattgcttccatatcaggttcacaagcaagttaagtgggcacagtttatttctgtgtagctcaggctgtaatcttgaaagctgaggagatacccatgcctctcagactcattagctgggtgtcacattaccacctgcacattctgacccaccgcatcttaatatgttttgtcctcttggagaaactaggagtagaagtcaggatatggtaggtaagggggaaaaaggaaagacggcttgatagctatgaatgcatgaggagcgaaatgttgactcagttatctagatcatggtctccaaacctgatgctatttccttacaaaaatatttgttgagcatgtgtccataattatatgtattgaacaatgaaaatatgtgtcaacaaatgtactgctacactaatgtgaacattatggaacaaaatttgaaagagtgaaataaaaggtttacactttaaaaaaaaac

SEQ ID NO: 327699 - DNA, 1814 bp, Homo sapiens
agcgggagtcgagcgagagcctgtggaggagtccgcctgctgtagcgtgcgtaagcaaggcagctacgccgggcggctacgctgcggaatcggcgtaggcgcctttggagaatcggcgggctgcgctccgctggggctggtcgcggagggggggaggggatgtcggtcagtgcgagatccgctgctgctgaggagaggagcgtcaacagcagcaccatggtagctcaacagaagaaccttgaaggctatgtgggatttgccaatctcccaaatcaagtatacagaaaatcggtgaagagaggttttgaattcacgcttatggtagtgggtgaatctggattgggaaagtcgacattaatcaactcattattcctcacagatttgtattctccagagtatccaggtccttctcatagaattaaaaagactgtacaggtggaacaatccaaagttttaatcaaagaaggtggtgttcagttgctgctcacaatagttgataccccaggatttggagatgcagtggataatagtaattgctggcagcctgttatcgactacattgatagtaaatttgaggactacctaaatgcagaatcacgagtgaacagacgtcagatgcctgataacagggtgcagtgttgtttatacttcattgctccttcaggacatggacttaaaccattggatattgagtttatgaagcgtttgcatgaaaaagtgaatatcatcccacttattgccaaagcagacacactcacaccagaggaatgccaacagtttaaaaaacagataatgaaagaaatccaagaacataaaattaaaatatacgaatttccagaaacagatgatgaagaagaaaataaacttgttaaaaagataaaggaccgtttacctcttgctgtggtaggtagtaatactatcattgaagttaatggcaaaagggtcagaggaaggcagtatccttggggtgttgctgaagttgaaaatggtgaacattgtgattttacaatcctaagaaatatgttgataagaacacacatgcaggacttgaaagatgttactaataatgtccactatgagaactacagaagcagaaaacttgcagctgtgacttataatggagttgataacaacaagaataaagggcagctgactaagagccctctggcacaaatggaagaagaaagaagggagcatgtagctaaaatgaagaagatggagatggagatggagcaggtgtttgagatgaaggtcaaagaaaaagttcaaaaactgaaggactctgaagctgagctccagcggcgccatgagcaaatgaaaaagaatttggaagcacagcacaaagaattggaggaaaaacgtcgtcagttcgaggatgagaaagcaaactgggaagctcaacaacgtattttagaacaacagaactcttcaagaaccttggaaaagaacaagaagaaagggaagatcttttaaactctctattgaccaccagttaacgtattagttgccaatatgccagcttggacatcagtgtttgttggatccgtttgaccaatttgcaccagttttatccataatgatggatttaacagcatgacaaaaattattttttttttggttcttgatggagattaagatgccttgagctattgtttgtggccttgtgttgtccctcagtgtcaaatctctagcgctgacctccgggtgacctcctccattgttaattgccctcacgcccctccgctattgtgctttgtggccagcactcttgataagatcttggtgtttaaacaggcatagttagaacctaattt

SEQ ID NO: 327700 - DNA, 1714 bp, Homo sapiens
agcgggagtcgagcgagagcctgtggaggagtccgcctgctgtagcgtgcgtaagcaaggcagctacgccgggcggctacgctgcggaatcggcgtaggcgcctttggagaatcggcgggctgcgctccgctggggctggtcgcggagggggggaggggatgtcggtcagtgcgagatccgctgctgctgaggagaggagcgtcaacagcagcaccatggtagctcaacagaagaaccttgaaggctatgtgggatttgccaatctcccaaatcaagtatacagaaaatcggtgaagagaggttttgaattcacgcttatggtagtgggtgaatctggattgggaaagtcgacattaatcaactcattattcctcacagatttgtattctccagagtatccaggtccttctcatagaattaaaaagactgtacaggtggaacaatccaaagttttaatcaaagaaggtggtgttcagttgctgctcacaatagttgataccccaggatttggagatgcagtggataatagtaattgctggcagcctgttatcgactacattgatagtaaatttgaggactacctaaatgcagaatcacgagtgaacagacgtcagatgcctgataacagggtgcagtgttgtttatacttcattgctccttcaggacatggacttaaaccattggatattgagtttatgaagcgtttgcatgaaaaagtgaatatcatcccacttattgccaaagcagacacactcacaccagaggaatgccaacagtttaaaaaacagataatgaaagaaatccaagaacataaaattaaaatatacgaatttccagaaacagatgatgaagaagaaaataaacttgttaaaaagataaaggaccgtttacctcttgctgtggtaggtagtaatactatcattgaagttaatggcaaaagggtcagaggaaggcagtatccttggggtgttgctgaagttgaaaatggtgaacattgtgattttacaatcctaagaaatatgttgataagaacacacatgcaggacttgaaagatgttactaataatgtccactatgagaactacagaagcagaaaacttgcagctgtgacttataatggagttgataacaacaagaataaagggcagctgactaagagccctctggcacaaatggaagaagaaagaagggagcatgtagctaaaatgaagaagatggagatggagatggagcaggtgtttgagatgaaggtcaaagaaaaagttcaaaaactgaaggactctgaagctgagctccagcggcgccatgagcaaatgaaaaagaatttggaagcacagcacaaagaattggaggaaaaacgtcgtcagttcgaggatgagaaagcaaactgggaagctcaacaacgtattttagaacaacagaactcttcaagaaccttggaaaagaacaagaagaaagggaagatcttttaaactctctattgaccaccagttaacgtattagttgccaatatgccagcttggacatcagtgtttgttggatccgtttgaccaatttgcaccagttttatccataatgatggatttaacagcatgacaaaaattattttttttttggttcttgatggagattaagatgccttgatgtctagagggggggggttcccctctggggggggggggtggacacccccctttttctttttttttatat

SEQ ID NO: 327701 - DNA, 2121 bp, Homo sapiens
agcgggagtcgagcgagagcctgtggaggagtccgcctgctgtagcgtgcgtaagcaaggcagctacgccgggcggctacgctgcggaatcggcgtaggcgcctttggagaatcggcgggctgcgctccgctggggctggtcgcggagggggggaggggatgtcggtcagtgcgagatccgctgctgctgaggagaggagcgtcaacagcagcaccatggtagctcaacagaagaaccttgaaggctatgtgggatttgccaatctcccaaatcaagtatacagaaaatcggtgaagagaggttttgaattcacgcttatggtagtgggtgaatctggattgggaaagtcgacattaatcaactcattattcctcacagatttgtattctccagagtatccaggtccttctcatagaattaaaaagactgtacaggtggaacaatccaaagttttaatcaaagaaggtggtgttcagttgctgctcacaatagttgataccccaggatttggagatgcagtggataatagtaattgctggcagcctgttatcgactacattgatagtaaatttgaggactacctaaatgcagaatcacgagtgaacagacgtcagatgcctgataacagggtgcagtgttgtttatacttcattgctccttcaggacatggacttaaaccattggatattgagtttatgaagcgtttgcatgaaaaagtgaatatcatcccacttattgccaaagcagacacactcacaccagaggaatgccaacagtttaaaaaacagataatgaaagaaatccaagaacataaaattaaaatatacgaatttccagaaacagatgatgaagaagatggagatggagatggagcaggtgtttgagatgaaggtcaaagaaaaagttcaaaaactgaaggactctgaagctgagctccagcggcgccatgagcaaatgaaaaagaatttggaagcacagcacaaagaattggaggaaaaacgtcgtcagttcgaggatgagaaagcaaactgggaagctcaacaacgtattttagaacaacagaactcttcaagaaccttggaaaagaacaagaagaaagggaagatcttttaaactctctattgaccaccagttaacgtattagttgccaatatgccagcttggacatcagtgtttgttggatccgtttgaccaatttgcaccagttttatccataatgatggatttaacagcatgacaaaaattattttttttttggttcttgatggagattaagatgccttgaattgtctagggtgttctgtacttagaaagtaagagctctaagtacctttcctacattttctttttttattaaacagatatcttcagtttaatgcaagagaacattttactgttgtacaatcatgttctggtggtttgattgtttacaggatattccaaaataaaaggactctggaagattttcattgaggataaattgccataatatgatgcaaactgtgcttctctatgataattacaatacaaaggttccattcagtgcagcatatacaataatgtaatttagtctaacacagttgaccctattttttgacacttccattgtttaaaaatacacatggaaaaaaaaaaaccctatatgcttactgtgcacctagagcttttttataacaacgtctttttgtttgtttgttttggattctttaaatatatattattctcatttagtgccctctttagccagaatctcattactgcttcatttttgtaataacatttaatttagatattttccatatattggcactgctaaaatagaatatagcatctttcatatggtaggaaccaacaaggaaactttcctttaactccctttttacactttatggtaagtagcagggggggaaatgcatttatagatcatttctaggcaaaattgtgaagctaatgaccaacctgtttctacctatatgcagtctctttattttactagaaatgggaatcatggcctcttgaagagaaaaaagtcaccattctgcatttagctgtattcatatattgcatttctgtattttttgtttgtattgtaaaaaattcacataataaacgatgttgtg

SEQ ID NO: 327702 - DNA, 3137 bp, Homo sapiens
  misc_feature (56)..(56): n is a, c, g, or t
ttacatgataccaatatcgtgagtgcgcgcaggtgctctgataagttaacggtcanacataggtcagtttgcatgtatctcgtagggacatctcgtggttctgtagatcagtgcttgcgccttgtccccatgtaaaaaaagtccggaggcacacccgacgcgtgacatgagggaagagatccagagtggatctgctcggagtcttgtaacatggcctctctgagaagcgtcgtccaacgctgatgctcagatactcaccagtaactgctccaggagcaaccttggaaaagaacaagaagaaagggaagatcttttaaactctctattgaccaccagttaacgtattagttgccaatatgccagcttggacatcagtgtttgttggatccgtttgaccaatttgcaccagttttatccataatgatggatttaacagcatgacaaaaattattttttttttggttcttgatggagattaagatgccttgaattgtctagggtgttctgtacttagaaagtaagagctctaagtacctttcctacattttctttttttattaaacagatatcttcagtttaatgcaagagaacattttactgttgtacaatcatgttctggtggtttgattgtttacaggatattccaaaataaaaggactctggaagattttcattgaggataaattgccataatatgatgcaaactgtgcttctctatgataattacaatacaaaggttccattcagtgcagcatatacaataatgtaatttagtctaacacagttgaccctattttttgacacttccattgtttaaaaatacacatggaaaaaaaaaaaccctatatgcttactgtgcacctagagcttttttataacaacgtctttttgtttgtttgttttggattctttaaatatatattattctcatttagtgccctctttagccagaatctcattactgcttcatttttgtaataacatttaatttagatattttccatatattggcactgctaaaatagaatatagcatctttcatatggtaggaaccaacaaggaaactttcctttaactccctttttacactttatggtaagtagcagggggggaaatgcatttatagatcatttctaggcaaaattgtgaagctaatgaccaacctgtttctacctatatgcagtctctttattttactagaaatgggaatcatggcctcttgaagagaaaaaagtcaccattctgcatttagctgtattcatatattgcatttctgtattttttgtttgtattgtaaaaaattcacataataaacgatgttgtgatgtaatattgtgtgaggtcttaaatatcctacagtcgatgtacaagagtagagtatgtttgggaagaaacttttcagcttaagtttgcctcctctacaatgacatcttttatatgcttgtctcatttagaatgcatatgtgctgattttctaatttaagagataccatatctctctattcatttctatctctcatttgtatgcttatttttctgagaacattttttttttcccccagacagggtcttgcttcattgcccaggctggagtgcggtggcacaaacacgactcgactgcagcctcaaccctctgggctcaagcagtcctcctgcctcagccccctgagtatctgggattgcaggcgtgcaccaccacgcctggctaatttttgtattttttgcagcctcccaaagttctgggattacaggcatgagccgtcatgcctggcctctgagaacagtttctgactcattcagattaggtatactctcaagtccctggaaactgaaattttttttaactgtaaagagggtagtgtcatttcttttcttaaggtcaagtgacatagattttaatgtaatgcataatttaggtaagaaattaattaatgtagcctagtttattatcttgaaatgttttaccctatttactttttaaaattaatgacctaagcggagggaataattataagtcaatagcagagagattgttgtttgggtgtttatttttttcagtttttgttttgagagattgggttaacacctctagccaaaattgtttggttttagggaggctaacaataacctactgaatttggaaaatgcaaaggtaaaaaatgtatatagactgcctgctgaactggttaagtactactgcttctgggaaatactatttcaaaattctatgtattataataataaatttgtaagacattcattattctaccatcctaatgaaaactttcagaagtctttctttatccatggcatgcccagggttttacctgaatctgatacaggatctatataactttactaggacttttgattgttgactccaggcttaggtatatcagaaggttctttttgccatttggcctgtggatgtctgagaagatcattcacaatacatgtaaaattcaggtaggcctaaggaaaggccagcctgtagaaagcaaaatggcagtgtctgttctccactgttggaggcattatgtaatttaagtatcctgttagccactgtctttctgctaattaagtggggctgaacaagtaagcactaataataccagtgaaccacttgggcaccttgtgggtagagttttgctgccacctagtggaatgggatatcattgcttccatatcaggttcacaagcaagttaagtgggcacagtttatttctgtgtagctcaggctgtaatcttgaaagctgaggagatacccatgcctctcagactcattagctgggtgtcacattaccacctgcacattctgacccaccgcatcttaatatgttttgtcctcttggagaaactaggagtagaagtcaggatatggtaggtaagggggaaaaaggaaagacggcttgatagctatgaatgcatgaggagcgaaatgttgactcagttatctagatcatggtctccaaacctgatgctatttccttacaaaaatatttgttgagcatgtgtccataattatatgtattgaacaatgaaaatatgtgtcaacaaatgtactgctacactaatgtgaacattatggaacaaaatttgaaagagtgaaataaaaggtttacactttaaaaaaaaac

SEQ ID NO: 327703 - DNA, 1747 bp, Homo sapiens
agcgggagtcgagcgagagcctgtggaggagtccgcctgctgtagcgtgcgtaagcaaggcagctacgccgggcggctacgctgcggaatcggcgtaggcgcctttggagaatcggcgggctgcgctccgctggggctggtcgcggagggggggaggggatgtcggtcagtgcgagatccgctgctgctgaggagaggagcgtcaacagcagcaccatggtagctcaacagaagaaccttgaaggctatgtgggatttgccaatctcccaaatcaagtatacagaaaatcggtgaagagaggttttgaattcacgcttatggtagtgggtgaatctggattgggaaagtcgacattaatcaactcattattcctcacagatttgtattctccagagtatccaggtccttctcatagaattaaaaagactgtacaggtggaacaatccaaagttttaatcaaagaaggtggtgttcagttgctgctcacaatagttgataccccaggatttggagatgcagtggataatagtaattgctggcagcctgttatcgactacattgatagtaaatttgaggactacctaaatgcagaatcacgagtgaacagacgtcagatgcctgataacagggtgcagtgttgtttatacttcattgctccttcaggacatggacttaaaccattggatattgagtttatgaagcgtttgcatgaaaaagtgaatatcatcccacttattgccaaagcagacacactcacaccagaggaatgccaacagtttaaaaaacagataatgaaagaaatccaagaacataaaattaaaatatacgaatttccagaaacagatgatgaagaagaaaataaacttgttaaaaagataaaggaccgtttacctcttgctgtggtaggtagtaatactatcattgaagttaatggcaaaagggtcagaggaaggcagtatccttggggtgttgctgaagttgaaaatggtgaacattgtgattttacaatcctaagaaatatgttgataagaacacacatgcaggacttgaaagatgttactaataatgtccactatgagaactacagaagcagaaaacttgcagctgtgacttataatggagttgataacaacaagaataaagggcagctgactaaacatttaatgattacccttaatattcgtgacaggagccctctggcacaaatggaagaagaaagaagggagcatgtagctaaaatgaagaagatggagatggagatggagcaggtgtttgagatgaaggtcaaagaaaaagttcaaaaactgaaggactctgaagctgagctccagcggcgccatgagcaaatgaaaaagaatttggaagcacagcacaaagaattggaggaaaaacgtcgtcagttcgaggatgagaaagcaaactgggaagctcaacaacgtattttagaacaacagaactcttcaagaaccttggaaaagaacaagaagaaagggaagatcttttaaactctctattgaccaccagttaacgtattagttgccaatatgccagcttggacatcagtgtttgttggatccgtttgaccaatttgcaccagttttatccataatgatggatttaacagcatgacaaaaattattttttttttggttcttgatggagattaagatgccttgaattgtgctaaggtgggtttcttggttaaacccccctctttttttttttttttaaacagggcgccccccc

SEQ ID NO: 327704 - DNA, 1119 bp, Homo sapiens
agcgggagtcgagcgagagcctgtggaggagtccgcctgctgtagcgtgcgtaagcaaggcagctacgccgggcggctacgctgcggaatcggcgtaggcgcctttggagaatcggcgggctgcgctccgctggggctggtcgcggagggggggaggggatgtcggtcagtgcgagatccgctgctgctgaggagaggagcgtcaacagcagcaccatggtagctcaacagaagaaccttgaaggctatgtgggatttgccaatctcccaaatcaagtatacagaaaatcggtgaagagaggttttgaattcacgcttatggtagtgggtgaatctggattgggaaagtcgacattaatcaactcattattcctcacagatttgtattctccagagtatccaggtccttctcatagaattaaaaagactgtacaggtggaacaatccaaagttttaatcaaagaaggtggtgttcagttgctgctcacaatagttgataccccaggatttggagatgcagtggataatagtaattgctggcagcctgttatcgactacattgatagtaaatttgaggactacctaaatgcagaatcacgagtgaacagacgtcagatgcctgataacagggtgcagtgttgtttatacttcattgctccttcaggacatggacttaaaccattggatattgagtttatgaagcgtttgcatgaaaaagtgaatatcatcccacttattgccaaagcagacacactcacaccagaggaatgccaacagtttaaaaaacagataatgaaagaaatccaagaacataaaatagaatatagcatctttcatatggtaggaaccaacaaggaaactttcctttaactccctttttacactttatggtaagtagcagggggggaaatgcatttatagatcatttctaggcaaaattgtgaagctaatgaccaacctgtttctacctatatgcagtctctttattttactagaaatgggaatcatggcctcttgaagagaaaaaagtcaccattctgcatttagctgtattcatatattgcatttctgtattttttgtttgtattgtaaaaaattcacataataaacgatgttgtg

SEQ ID NO: 327705 - DNA, 1284 bp, Homo sapiens
ttatgctgttcctgagtgatccccttcgacggtgtctgaggaccgagagagtgaagaatggggaggggaagagagtggcacatggggttgagcagaggagaaagtcagaaaggtggcttggagaatccgctggggctggtcgcggagggggggaggggatgtcggtcagtgcgagatccgctgctgctgaggagaggagcgtcaacagcagcaccatggtagctcaacagaagaaccttgaaggctatgtgggatttgccaatctcccaaatcaagtatacagaaaatcggtgaagagaggttttgaattcacgcttatggtagtgggtgaatctggattgggaaagtcgacattaatcaactcattattcctcacagatttgtattctccagagtatccaggtccttctcatagaattaaaaagactgtacaggtggaacaatccaaagttttaatcaaagaaggtggtgttcagttgctgctcacaatagttgataccccaggatttggagatgcagtggataatagtaattgctggcagcctgttatcgactacattgatagtaaatttgaggactacctaaatgcagaatcacgagtgaacagacgtcagatgcctgataacagggtgcagtgttgtttatacttcattgctccttcaggacatgggtcagtaccttgatacttctgattccttttttgttgttgttgcttactgttacctttatgtgcatactttagtaatctttaagtttgtgaagtacacacaactatagccattatgaagtactaaatttcatgtagaaatgtcttagttgaaaagccattttaagtcctatataagctaacagtgattttactccttagttcttcattcataaggattttccctgcttcatgaaataaacagtgttgccaccatggtttgaggtctcaatgtggcaaatttagctttcatgttgaccactctgctactaatagaaataccaaataaagagaagcagccataccagttagacatattcaaaataaatccaaagatgctatttattataagtttcatagaaatgattatcaaaaacacttgcatgccaatgttttcttgtgccatttctttctacaataaatctatttggcttctgtttcaccttagctgtcatagacgtgttgttcaggtatcatattgtcagtactaatcttttgtttattaggacttaagacctaagaatctagacattaatctaatctgattgttctgtttgttatagttagcctgtactccc

SEQ ID NO: 327706 - DNA, 422 bp, Homo sapiens
tttcttaacttttgaagttctttatttagaatgtatctaagtgcttgcatttttttcttaatctcttttgtcccaaaatagactctttttaatctaaaaatgcacgactttcctcaattcggggaaacattcttctttccatctgtgagcatttcctttcttctaatctctttcctcctctgtctcactctcttctggtaaaactccacaacccaggcatctagacgaatgattcagtgtttggccattctgctactcagacatatctcaggtattttaaaaatttccaagaactctgataatttttattccttatgttttttttctttttctttttacttctcaggttgtaacctgtgaatttatcctgaatacccccaggttggcagctttcttgaagacagcagagggcccctcccttc

SEQ ID NO: 327707 - DNA, 411 bp, Homo sapiens
ctcatggggccagtactgttatccttgctttattgatgtggaaacagggtcttagggaggttaagtgacttgcccaagatgacccagtcttgaactcagatgtaccgtagaggaacttccacttgctatcctcaggccccggagaggcccacgggcagaggaagagtctcagtcaccctcttggaccagcccgtccccacctttccaaggggagctagaggctacagatccctgggcctctgatgccccagtcgggggtgggcgtatgaggtctccagctgtgaagagtcagcctcttgaccctagaccatagttgctgggctcagggcatcacctggcatcttctagaagtccatgggacaggacaagaggtgccagcagggaactcgtccaggcaggggctttgggttc

SEQ ID NO: 327708 - DNA, 4284 bp, Homo sapiens
agagccagccgagcagcagaggcagtggcagcgggagaggcgggagcagcggggcagcagagctggattggggtgttgagtccaggctgagtagggggcagcccactgctcttggtccctgtgcctgctgggggtgccctgccctgaactccaggcagcggggacagggcgaggtgccaccttagtctggctggggaggcggacgatgaggagtgatggggcaggcatgcggccactccatcctctgcaggagccagcagtacccggcagcgcgaccggctgagccgcggggccagcaggtcttcctcaagccggacgagccgccgccgccgccgcagccatgcgccgacagcctgcaggacgccttgctgagtctgggctctgtcatcgacatttcaggcctgcaacgtgctgtcaaggaggccctgtcagctgtgctcccccgagtggaaactgtctacacctacctactggatggtgagtcccagctggtgtgtgaggaccccccacatgagctgccccaggaggggaaagtccgggaggctatcatctcccagaagcggctgggctgcaatgggctgggcttctcagacctgccagggaagcccttggccaggctggtggctccactggctcctgatacccaagtgctggtcatgccgctagcggacaaggaggctggggccgtggcagctgtcatcttggtgcactgtggccagctgagtgataatgaggaatggagcctgcaggcggtggagaagcataccctggtcgccctgcggagggtgcaggtcctgcagcagcgcgggcccagggaggctccccgagccgtccagaaccccccggaggggacggcggaagaccagaagggcggggcggcgtacaccgaccgcgaccgcaagatcctccaactgtgcggggaactctacgacctggatgcctcttccctgcagctcaaagtgctccaatacctgcagcaggagacccgggcatcccgctgctgcctcctgctggtgtcggaggacaatctccagctttcttgcaaggtcatcggagacaaagtgctcggggaagaggtcagctttcccttgacaggatgcctgggccaggtggtggaagacaagaagtccatccagctgaaggacctcacctccgaggatgtacaacagctgcagagcatgttgggctgtgagctgcaggccatgctctgtgtccctgtcatcagccgggccactgaccaggtggtggccttggcctgcgccttcaacaagctagaaggagacttgttcaccgacgaggacgagcatgtgatccagcactgcttccactacaccagcaccgtgctcaccagcaccctggccttccagaaggaacagaaactcaagtgtgagtgccaggctcttctccaagtggcaaagaacctcttcacccacctggatgacgtctctgtcctgctccaggagatcatcacggaggccagaaacctcagcaacgcagagatctgctctgtgttcctgctggatcagaatgagctggtggccaaggtgttcgacgggggcgtggtggatgatgagagctatgagatccgcatcccggccgatcagggcatcgcgggacacgtggcgaccacgggccagatcctgaacatccctgacgcatatgcccatccgcttttctaccgcggcgtggacgacagcaccggcttccgcacgcgcaacatcctctgcttccccatcaagaacgagaaccaggaggtcatcggtgtggccgagctggtgaacaagatcaatgggccatggttcagcaagttcgacgaggacctggcgacggccttctccatctactgcggcatcagcatcgcccattctctcctatacaaaaaagtgaatgaggctcagtatcgcagccacctggccaatgagatgatgatgtaccacatgaaggtctccgacgatgagtataccaaacttctccatgatgggatccagcctgtggctgccattgactccaattttgcaagtttcacctatacccctcgttccctgcccgaggatgacacgtccatggccatcctgagcatgctgcaggacatgaatttcatcaacaactacaaaattgactgcccgaccctggcccggttctgtttgatggtgaagaagggctaccgggatcccccctaccacaactggatgcacgccttttctgtctcccacttctgctacctgctctacaagaacctggagctcaccaactacctcgaggacatcgagatctttgccttgtttatttcctgcatgtgtcatgacctggaccacagaggcacaaacaactctttccaggtggcctcgaaatctgtgctggctgcgctctacagctctgagggctccgtcatggagaggcaccactttgctcaggccatcgccatcctcaacacccacggctgcaacatctttgatcatttctcccggaaggactatcagcgcatgctggatctgatgcgggacatcatcttggccacagacctggcccaccatctccgcatcttcaaggacctccagaagatggctgaggtgggctacgaccgaaacaacaagcagcaccacagacttctcctctgcctcctcatgacctcctgtgacctctctgaccagaccaagggctggaagactacgagaaagatcgcggagctgatctacaaagaattcttctcccagggagacctggagaaggccatgggcaacaggccgatggagatgatggaccgggagaaggcctatatccctgagctgcaaatcagcttcatggagcacattgcgatgcccatctacaagctgttgcaggacctgttccccaaagcggcagagctgtacgagcgcgtggcctccaaccgtgagcactggaccaaggtgtcccacaagttcaccatccgcggcctcccaagtaacaactcgctggacttcctggatgaggagtacgaggtgcctgatctggatggcactagggcccccatcaatggctgctgcagccttgatgctgagtgatcccctccagggacacttccctgcccaggccacctcccacagccctccactggtctggccagatgcactgggaacagagccacgggtcctgggtcctagaccaggacttcctgtgtgaccctggacaagtactaccttcctgggcctcagctttctcgtctgtataatggaagcaagacttccaacctcacggagactttgtaatttgttctctgagagcacaggggtgaccaatgagcagtgggccctactctgcacctctgaccacaccttggcaagtctttcccaagccattctttgtctgagcagcttgatggtttctccttgccccatttctgccccaccagatctttgctcctttccctttgaggactcccaccctttggggtctccaggatcctcatggaaggggaaggtgagacatctgagtgagcagagtgtggcatcttggaaacagtccttagttctgtgggaggactagaaacagccgcggggcgaaggccccctgaggaccactactatactgatggtgggattgggacctgggggatacaggggccccaggaagaagctgccagaggggcagctcagtgctctgcagagaggggccctggggagaagcaggatgggattgatgggcaggagggatccccgcactgggagacaggcccaggtatgaatgagccagccatgcttcctcctgcctgtgtgacgctgggcgagtctcttcccctgtctgggccaaacagggagcgggtaagacaatccatgctctaagatccattttagatcaatgtctaaaatagctctatcgctctgcggagtcccagcagaggctatggaatgtttctgcaaccctaaggcacagagagcccaaccctgagtgtctcagaggccccctgagtgttccccttggcctgagccccttacccattcctgcagccagtgagagacctggcctcagccctggcagggctctctcttcaaggccatatccacctgtgccctggggcttgggagaccccatagggccgggactcttgggtcagcccggccactggcttctctctttttctccgtttcattctgtgtgcgttgtggggtgggggagggggtccacctgccttacctttctgagttgcctttagagagatgcgtttttctaggactctgtgcaactgtcgtatatggtcccgtgggctgaccgctttgtacatgagaataaatctatttctttctacca

SEQ ID NO: 327709 - DNA, 4308 bp, Homo sapiens
ctcccggagcgcgggtcccaccgcggaactgcggaccgtgtggccctggggcctgcaccctctccggctccggggacggcgacagagacctgcccacccaggcctgggggccccagtcagtggcggccgccgtgtgtgcgctcggtgtctgcggggccagcaggtcttcctcaagccggacgagccgccgccgccgccgcagccatgcgccgacagcctgcagcagccagcctggacccccttgcaaaggagccaggacccccagggagtagagacgaccgactggaggacgccttgctgagtctgggctctgtcatcgacatttcaggcctgcaacgtgctgtcaaggaggccctgtcagctgtgctcccccgagtggaaactgtctacacctacctactggatggtgagtcccagctggtgtgtgaggaccccccacatgagctgccccaggaggggaaagtccggcagttcctacaagcacaattaagtggaggcagcatgagggatgaagaacccaggacaattaatcatcaaggagtgacatttggtgcaaactcagggaggctatcatctcccagaagcggctgggctgcaatgggctgggcttctcagacctgccagggaagcccttggccaggctggtggctccactggctcctgatacccaagtgctggtcatgccgctagcggacaaggaggctggggccgtggcagctgtcatcttggtgcactgtggccagctgagtgataatgaggaatggagcctgcaggcggtggagaagcataccctggtcgccctgcggagggtgcaggtcctgcagcagcgcgggcccagggaggctccccgagccgtccagaaccccccggaggggacggcggaagaccagaagggcggggcggcgtacaccgaccgcgaccgcaagatcctccaactgtgcggggaactctacgacctggatgcctcttccctgcagctcaaagtgctccaatacctgcagcaggagacccgggcatcccgctgctgcctcctgctggtgtcggaggacaatctccagctttcttgcaaggtcatcggagacaaagtgctcggggaagaggtcagctttcccttgacaggatgcctgggccaggtggtggaagacaagaagtccatccagctgaaggacctcacctccgaggatgtacaacagctgcagagcatgttgggctgtgagctgcaggccatgctctgtgtccctgtcatcagccgggccactgaccaggtggtggccttggcctgcgccttcaacaagctagaaggagacttgttcaccgacgaggacgagcatgtgatccagcactgcttccactacaccagcaccgtgctcaccagcaccctggccttccagaaggaacagaaactcaagtgtgagtgccaggctcttctccaagtggcaaagaacctcttcacccacctggatgacgtctctgtcctgctccaggagatcatcacggaggccagaaacctcagcaacgcagagatctgctctgtgttcctgctggatcagaatgagctggtggccaaggtgttcgacgggggcgtggtggatgatgagagctatgagatccgcatcccggccgatcagggcatcgcgggacacgtggcgaccacgggccagatcctgaacatccctgacgcatatgcccatccgcttttctaccgcggcgtggacgacagcaccggcttccgcacgcgcaacatcctctgcttccccatcaagaacgagaaccaggaggtcatcggtgtggccgagctggtgaacaagatcaatgggccatggttcagcaagttcgacgaggacctggcgacggccttctccatctactgcggcatcagcatcgcccattctctcctatacaaaaaagtgaatgaggctcagtatcgcagccacctggccaatgagatgatgatgtaccacatgaaggtctccgacgatgagtataccaaacttctccatgatgggatccagcctgtggctgccattgactccaattttgcaagtttcacctatacccctcgttccctgcccgaggatgacacgtccatggccatcctgagcatgctgcaggacatgaatttcatcaacaactacaaaattgactgcccgaccctggcccggttctgtttgatggtgaagaagggctaccgggatcccccctaccacaactggatgcacgccttttctgtctcccacttctgctacctgctctacaagaacctggagctcaccaactacctcgaggacatcgagatctttgccttgtttatttcctgcatgtgtcatgacctggaccacagaggcacaaacaactctttccaggtggcctcgaaatctgtgctggctgcgctctacagctctgagggctccgtcatggagaggcaccactttgctcaggccatcgccatcctcaacacccacggctgcaacatctttgatcatttctcccggaaggactatcagcgcatgctggatctgatgcgggacatcatcttggccacagacctggcccaccatctccgcatcttcaaggacctccagaagatggctgaggtgggctacgaccgaaacaacaagcagcaccacagacttctcctctgcctcctcatgacctcctgtgacctctctgaccagaccaagggctggaagactacgagaaagatcgcggagctgatctacaaagaattcttctcccagggagacctggagaaggccatgggcaacaggccgatggagatgatggaccgggagaaggcctatatccctgagctgcaaatcagcttcatggagcacattgcgatgcccatctacaagctgttgcaggacctgttccccaaagcggcagagctgtacgagcgcgtggcctccaaccgtgagcactggaccaaggtgtcccacaagttcaccatccgcggcctcccaagtaacaactcgctggacttcctggatgaggagtacgaggtgcctgatctggatggcactagggcccccatcaatggctgctgcagccttgatgctgagtgatcccctccagggacacttccctgcccaggccacctcccacagccctccactggtctggccagatgcactgggaacagagccacgggtcctgggtcctagaccaggacttcctgtgtgaccctggacaagtactaccttcctgggcctcagctttctcgtctgtataatggaagcaagacttccaacctcacggagactttgtaatttgttctctgagagcacaggggtgaccaatgagcagtgggccctactctgcacctctgaccacaccttggcaagtctttcccaagccattctttgtctgagcagcttgatggtttctccttgccccatttctgccccaccagatctttgctcctttccctttgaggactcccaccctttggggtctccaggatcctcatggaaggggaaggtgagacatctgagtgagcagagtgtggcatcttggaaacagtccttagttctgtgggaggactagaaacagccgcggggcgaaggccccctgaggaccactactatactgatggtgggattgggacctgggggatacaggggccccaggaagaagctgccagaggggcagctcagtgctctgcagagaggggccctggggagaagcaggatgggattgatgggcaggagggatccccgcactgggagacaggcccaggtatgaatgagccagccatgcttcctcctgcctgtgtgacgctgggcgagtctcttcccctgtctgggccaaacagggagcgggtaagacaatccatgctctaagatccattttagatcaatgtctaaaatagctctatcgctctgcggagtcccagcagaggctatggaatgtttctgcaaccctaaggcacagagagcccaaccctgagtgtctcagaggccccctgagtgttccccttggcctgagccccttacccattcctgcagccagtgagagacctggcctcagccctggcagggctctctcttcaaggccatatccacctgtgccctggggcttgggagaccccatagggccgggactcttgggtcagcccggccactggcttctctctttttctccgtttcattctgtgtgcgttgtggggtgggggagggggtccacctgccttacctttctgagttgcctttagagagatgcgtttttctaggactctgtgcaactgtcgtatatggtcccgtgggctgaccgctttgtacatgagaataaatctatttctttctacca

SEQ ID NO: 327710 - DNA, 2443 bp, Homo sapiens
ttagaggatcccctgcactgtagatctctcctatacaaaaaagtgaatgaggctcagtatcgcagccacctggccaatgagatgatgatgtaccacatgaaggtctccgacgatgagtataccaaacttctccatgatgggatccagcctgtggctgccattgactccaattttgcaagtttcacctatacccctcgttccctgcccgaggatgacacgtccatggccatcctgagcatgctgcaggacatgaatttcatcaacaactacaaaattgactgcccgaccctggcccggttctgtttgatggtgaagaagggctaccgggatcccccctaccacaactggatgcacgccttttctgtctcccacttctgctacctgctctacaagaacctggagctcaccaactacctcgaggacatcgagatctttgccttgtttatttcctgcatgtgtcatgacctggaccacagaggcacaaacaactctttccaggtggcctcgaaatctgtgctggctgcgctctacagctctgagggctccgtcatggagaggcaccactttgctcaggccatcgccatcctcaacacccacggctgcaacatctttgatcatttctcccggaaggactatcagcgcatgctggatctgatgcgggacatcatcttggccacagacctggcccaccatctccgcatcttcaaggacctccagaagatggctgaggtgggctacgaccgaaacaacaagcagcaccacagacttctcctctgcctcctcatgacctcctgtgacctctctgaccagaccaagggctggaagactacgagaaagatcgcggagctgatctacaaagaattcttctcccagggagacctggagaaggccatgggcaacaggccgatggagatgatggaccgggagaaggcctatatccctgagctgcaaatcagcttcatggagcacattgcgatgcccatctacaagctgttgcaggacctgttccccaaagcggcagagctgtacgagcgcgtggcctccaaccgtgagcactggaccaaggtgtcccacaagttcaccatccgcggcctcccaagtaacaactcgctggacttcctggatgaggagtacgaggtgcctgatctggatggcactagggcccccatcaatggctgctgcagccttgatgctgagtgatcccctccagggacacttccctgcccaggccacctcccacagccctccactggtctggccagatgcactgggaacagagccacgggtcctgggtcctagaccaggacttcctgtgtgaccctggacaagtactaccttcctgggcctcagctttctcgtctgtataatggaagcaagacttccaacctcacggagactttgtaatttgttctctgagagcacaggggtgaccaatgagcagtgggccctactctgcacctctgaccacaccttggcaagtctttcccaagccattctttgtctgagcagcttgatggtttctccttgccccatttctgccccaccagatctttgctcctttccctttgaggactcccaccctttggggtctccaggatcctcatggaaggggaaggtgagacatctgagtgagcagagtgtggcatcttggaaacagtccttagttctgtgggaggactagaaacagccgcggggcgaaggccccctgaggaccactactatactgatggtgggattgggacctgggggatacaggggccccaggaagaagctgccagaggggcagctcagtgctctgcagagaggggccctggggagaagcaggatgggattgatgggcaggagggatccccgcactgggagacaggcccaggtatgaatgagccagccatgcttcctcctgcctgtgtgacgctgggcgagtctcttcccctgtctgggccaaacagggagcgggtaagacaatccatgctctaagatccattttagatcaatgtctaaaatagctctatcgctctgcggagtcccagcagaggctatggaatgtttctgcaaccctaaggcacagagagcccaaccctgagtgtctcagaggccccctgagtgttccccttggcctgagccccttacccattcctgcagccagtgagagacctggcctcagccctggcagggctctctcttcaaggccatatccacctgtgccctggggcttgggagaccccatagggccgggactcttgggtcagcccggccactggcttctctctttttctccgtttcattctgtgtgcgttgtggggtgggggagggggtccacctgccttacctttctgagttgcctttagagagatgcgtttttctaggactctgtgcaactgtcgtatatggtcccgtgggctgaccgctttgtacatgagaataaatctatttctttctacca

SEQ ID NO: 327711 - DNA, 4581 bp, Homo sapiens
agagccagccgagcagcagaggcagtggcagcgggagaggcgggagcagcggggcagcagagctggattggggtgttgagtccaggctgagtagggggcagcccactgctcttggtccctgtgcctgctgggggtgccctgccctgaactccaggcagcggggacagggcgaggtgccaccttagtctggctggggaggcggacgatgaggagtgatggggcaggcatgcggccactccatcctctgcaggagccagcagtacccggcagcgcgaccggctgagccgcggggccagcaggtcttcctcaagccggacgagccgccgccgccgccgcagccatgcgccgacagcctgcaggacgccttgctgagtctgggctctgtcatcgacatttcaggcctgcaacgtgctgtcaaggaggccctgtcagctgtgctcccccgagtggaaactgtctacacctacctactggatggtgagtcccagctggtgtgtgaggaccccccacatgagctgccccaggaggggaaagtccgggaggctatcatctcccagaagcggctgggctgcaatgggctgggcttctcagacctgccagggaagcccttggccaggctggtggctccactggctcctgatacccaagtgctggtcatgccgctagcggacaaggaggctggggccgtggcagctgtcatcttggtgcactgtggccagctgagtgataatgaggaatggagcctgcaggcggtggagaagcataccctggtcgccctgcggagggtgcaggtcctgcagcagcgcgggcccagggaggctccccgagccgtccagaaccccccggaggggacggcggaagaccagaagggcggggcggcgtacaccgaccgcgaccgcaagatcctccaactgtgcggggaactctacgacctggatgcctcttccctgcagctcaaagtgctccaatacctgcagcaggagacccgggcatcccgctgctgcctcctgctggtgtcggaggacaatctccagctttcttgcaaggtcatcggagacaaagtgctcggggaagaggtcagctttcccttgacaggatgcctgggccaggtggtggaagacaagaagtccatccagctgaaggacctcacctccgaggatgtacaacagctgcagagcatgttgggctgtgagctgcaggccatgctctgtgtccctgtcatcagccgggccactgaccaggtggtggccttggcctgcgccttcaacaagctagaaggagacttgttcaccgacgaggacgagcatgtgatccagcactgcttccactacaccagcaccgtgctcaccagcaccctggccttccagaaggaacagaaactcaagtgtgagtgccaggctcttctccaagtggcaaagaacctcttcacccacctggatgacgtctctgtcctgctccaggagatcatcacggaggccagaaacctcagcaacgcagagatctgctctgtgttcctgctggatcagaatgagctggtggccaaggtgttcgacgggggcgtggtggatgatgagagctatgagatccgcatcccggccgatcagggcatcgcgggacacgtggcgaccacgggccagatcctgaacatccctgacgcatatgcccatccgcttttctaccgcggcgtggacgacagcaccggcttccgcacgcgcaacatcctctgcttccccatcaagaacgagaaccaggaggtcatcggtgtggccgagctggtgaacaagatcaatgggccatggttcagcaagttcgacgaggacctggcgacggccttctccatctactgcggcatcagcatcgcccattctctcctatacaaaaaagtgaatgaggctcagtatcgcagccacctggccaatgagatgatgatgtaccacatgaaggtctccgacgatgagtataccaaacttctccatgatgggatccagcctgtggctgccattgactccaattttgcaagtttcacctatacccctcgttccctgcccgaggatgacacgtccatggccatcctgagcatgctgcaggacatgaatttcatcaacaactacaaaattgactgcccgaccctggcccggttctgtttgatggtgaagaagggctaccgggatcccccctaccacaactggatgcacgccttttctgtctcccacttctgctacctgctctacaagaacctggagctcaccaactacctcgaggacatcgagatctttgccttgtttatttcctgcatgtgtcatgacctggaccacagaggcacaaacaactctttccaggtggcctcgaaatctgtgctggctgcgctctacagctctgagggctccgtcatggagaggcaccactttgctcaggccatcgccatcctcaacacccacggctgcaacatctttgatcatttctcccggaaggactatcagcgcatgctggatctgatgcgggacatcatcttggccacagacctggcccaccatctccgcatcttcaaggacctccagaagatggctgaggtgggctacgaccgaaacaacaagcagcaccacagacttctcctctgcctcctcatgacctcctgtgacctctctgaccagaccaagggctggaagactacgagaaagatcgcggagctgatctacaaagaattcttctcccagggagacctggagaaggccatgggcaacaggccgatggagatgatggaccgggagaaggcctatatccctgagctgcaaatcagcttcatggagcacattgcgatgcccatctacaagctgttgcaggacctgttccccaaagcggcagagctgtacgagcgcgtggcctccaaccgtgagcactggaccaaggtgtcccacaagttcaccatccgcggcctcccaagtaacaactcgctggacttcctggatgaggagtacgaggtgcctgatctggatggcactagggcccccatcaatggctgctgcagccttgatgctgagtgatcccctccagggacacttccctgcccaggccacctcccacagccctccactggtctggccagatgcactgggaacagagccacgggtcctgggtcctagaccaggacttcctgtgtgaccctggacaagtactaccttcctgggcctcagctttctcgtctgtataatggaagcaagacttccaacctcacggagactttgtaatttgttctctgagagcacaggggtgaccaatgagcagtgggccctactctgcacctctgaccacaccttggcaagtctttcccaagccattctttgtctgagcagcttgatggtttctccttgccccatttctgccccaccagatctttgctcctttccctttgaggactcccaccctttggggtctccaggatcctcatggaaggggaaggtgagacatctgagtgagcagagtgtggcatcttggaaacagtccttagttctgtgggaggactagaaacagccgcggggcgaaggccccctgaggaccactactatactgatggtgggattgggacctgggggatacaggggccccaggaagaagctgccagaggggcagctcagtgctctgcagagaggggccctggggagaagcaggatgggattgatgggcaggagggatccccgcactgggagacaggcccaggtatgaatgagccagccatgcttcctcctgcctgtgtgacgctgggcgagtctcttcccctgtctgggccaaacagggagcgggtaagacaatccatgctctaagatccattttagatcaatgtctaaaatagctctatcgctctgcggagtcccagcagaggctatggaatgtttctgcaaccctaaggcacagagagcccaaccctgagtgtctcagaggccccctgagtgttccccttggcctgagccccttacccattcctgcagccagtgagagacctggcctcagccctggcagggctctctcttcaaggccatatccacctgtgccctggggcttgggagaccccatagggccgggactcttgggtcagcccggccactggcttctctctttttctccgtttcattctgtgtgcgttgtggggtgggggagggggtccacctgccttacctttctgagttgcctttagagagatgcgtttttctaggactctgtgcaactgtcgtatatggtcccgtgggctgaccgctttgtacatgagaataaatctatttctttctaccaaaaaaaacaaccatacccacacagacacacaaaggcgcggcacgcgacacagaagagaaccaccacgaggggcgccaaggtaaccgcgttcccacaggcctgcgcacaatcggggcccctaagaaggacgcgagatacaagacgccgagacacagggcgaggcgtatcacagacgccggagaggcgagacaccgggaccccggcgcaccccgggaagaaaccctcaacccgcgggcgccaccacactgggcgccacacacacgtgaacagccactaaacaacccacggcacgaccac

SEQ ID NO: 327712 - DNA, 4354 bp, Homo sapiens
agagccagccgagcagcagaggcagtggcagcgggagaggcgggagcagcggggcagcagagctggattggggtgttgagtccaggctgagtagggggcagcccactgctcttggtccctgtgcctgctgggggtgccctgccctgaactccaggcagcggggacagggcgaggtgccaccttagtctggctggggaggcggacgatgaggagtgatggggcaggcatgcggccactccatcctctgcaggagccagcagtacccggcagcgcgaccggctgagccgcggggccagcaggtcttcctcaagccggacgagccgccgccgccgccgcagccatgcgccgacagcctgcaggacgccttgctgagtctgggctctgtcatcgacatttcaggcctgcaacgtgctgtcaaggaggccctgtcagctgtgctcccccgagtggaaactgtctacacctacctactggatggtgagtcccagctggtgtgtgaggaccccccacatgagctgccccaggaggggaaagtccgggaggctatcatctcccagaagcggctgggctgcaatgggctgggcttctcagacctgccagggaagcccttggccaggctggtggctccactggctcctgatacccaagtgctggtcatgccgctagcggacaaggaggctggggccgtggcagctgtcatcttggtgcactgtggccagctgagtgataatgaggaatggagcctgcaggcggtggagaagcataccctggtcgccctgcggagggtgcaggtcctgcagcagcgcgggcccagggaggctccccgagccgtccagaaccccccggaggggacggcggaagaccagaagggcggggcggcgtacaccgaccgcgaccgcaagatcctccaactgtgcggggaactctacgacctggatgcctcttccctgcagctcaaagtgctccaatacctgcagcaggagacccgggcatcccgctgctgcctcctgctggtgtcggaggacaatctccagctttcttgcaaggtcatcggagacaaagtgctcggggaagaggtcagctttcccttgacaggatgcctgggccaggtggtggaagacaagaagtccatccagctgaaggacctcacctccgaggatgtacaacagctgcagagcatgttgggctgtgagctgcaggccatgctctgtgtccctgtcatcagccgggccactgaccaggtggtggccttggcctgcgccttcaacaagctagaaggagacttgttcaccgacgaggacgagcatgtgatccagcactgcttccactacaccagcaccgtgctcaccagcaccctggccttccagaaggaacagaaactcaagtgtgagtgccaggctcttctccaagtggcaaagaacctcttcacccacctggatgacgtctctgtcctgctccaggagatcatcacggaggccagaaacctcagcaacgcagagatctgctctgtgttcctgctggatcagaatgagctggtggccaaggtgttcgacgggggcgtggtggatgatgagagctatgagatccgcatcccggccgatcagggcatcgcgggacacgtggcgaccacgggccagatcctgaacatccctgacgcatatgcccatccgcttttctaccgcggcgtggacgacagcaccggcttccgcacgcgcaacatcctctgcttccccatcaagaacgagaaccaggaggtcatcggtgtggccgagctggtgaacaagatcaatgggccatggttcagcaagttcgacgaggacctggcgacggccttctccatctactgcggcatcagcatcgcccattctctcctatacaaaaaagtgaatgaggctcagtatcgcagccacctggccaatgagatgatgatgtaccacatgaaggtctccgacgatgagtataccaaacttctccatgatgggatccagcctgtggctgccattgactccaattttgcaagtttcacctatacccctcgttccctgcccgaggatgacacgtccatggccatcctgagcatgctgcaggacatgaatttcatcaacaactacaaaattgactgcccgaccctggcccggttctgtttgatggtgaagaagggctaccgggatcccccctaccacaactggatgcacgccttttctgtctcccacttctgctacctgctctacaagaacctggagctcaccaactacctcgaggacatcgagatctttgccttgtttatttcctgcatgtgtcatgacctggaccacagaggcacaaacaactctttccaggtggcctcgaaatctgtgctggctgcgctctacagctctgagggctccgtcatggagaggcaccactttgctcaggccatcgccatcctcaacacccacggctgcaacatctttgatcatttctcccggaaggactatcagcgcatgctggatctgatgcgggacatcatcttggccacagacctggcccaccatctccgcatcttcaaggacctccagaagatggctgaggtgggctacgaccgaaacaacaagcagcaccacagacttctcctctgcctcctcatgacctcctgtgacctctctgaccagaccaagggctggaagactacgagaaagatcgcggagctgatctacaaagaattcttctcccagggagacctggagaaggccatgggcaacaggccgatggagatgatggaccgggagaaggcctatatccctgagctgcaaatcagcttcatggagcacattgcgatgcccatctacaagctgttgcaggacctgttccccaaagcggcagagctgtacgagcgcgtggcctccaaccgtgagcactggaccaaggtgtcccacaagttcaccatccgcggcctcccaagtaacaactcgctggacttcctggatgaggagtacgaggtgcctgatctggatggcactagggcccccatcaatggctgctgcagccttgatgctgagtgatcccctccagggacacttccctgcccaggccacctcccacagccctccactggtctggccagatgcactgggaacagagccacgggtcctgggtcctagaccaggacttcctgtgtgaccctggacaagtactaccttcctgggcctcagctttctcgtctgtataatggaagcaagacttccaacctcacggagactttgtaatttgttctctgagagcacaggggtgaccaatgagcagtgggccctactctgcacctctgaccacaccttggcaagtctttcccaagccattctttgtctgagcagcttgatggtttctccttgccccatttctgccccaccagatctttgctcctttccctttgaggactcccaccctttggggtctccaggatcctcatggaaggggaaggtgagacatctgagtgagcagagtgtggcatcttggaaacagtccttagttctgtgggaggactagaaacagccgcggggcgaaggccccctgaggaccactactatactgatggtgggattgggacctgggggatacaggggccccaggaagaagctgccagaggggcagctcagtgctctgcagagaggggccctggggagaagcaggatgggattgatgggcaggagggatccccgcactgggagacaggcccaggtatgaatgagccagccatgcttcctcctgcctgtgtgacgctgggcgagtctcttcccctgtctgggccaaacagggagcgggtaagacaatccatgctctaagatccattttagatcaatgtctaaaatagctctatcgctctgcggagtcccagcagaggctatggaatgtttctgcaaccctaaggcacagagagcccaaccctgagtgtctcagaggccccctgagtgttccccttggcctgagccccttacccattcctgcagccagtgagagacctggcctcagccctggcagggctctctcttcaaggccatatccacctgtgccctggggcttgggagaccccatagggccgggactcttgggtcagcccggccactggcttctctctttttctccgtttcattctgtgtgcgttgtggggtgacccatgattatcggaaaaccattagttctgattttgtgggttgctatactttggagaccaacagtttcttgacactgagtcagggcaatccgtttagaaacctatcttaatcgttctagagttgatatgcttttgatcactgccttaagggggggtcaggtccctaatattcgctttcctgaagtttttcccaatcagttgggcgag

SEQ ID NO: 327713 - DNA, 975 bp, Homo sapiens
  misc_feature (25)..(27): n is a, c, g, or t
  misc_feature (32)..(32): n is a, c, g, or t
gcggcccctactactactaaattcnnngccgntcgacgcagcttgatggtttctccttgccccatttctgccccaccagatctttgctcctttccctttgaggactcccaccctttggggtctccaggatcctcatggaaggggaaggtgagacatctgagtgagcagagtgtggcatcttggaaacagtccttagttctgtgggaggactagaaacagccgcggggcgaaggccccctgaggaccactactatactgatggtgggattgggacctgggggatacaggggccccaggaagaagctgccagaggggcagctcagtgctctgcagagaggggccctggggagaagcaggatgggattgatgggcaggagggatccccgcactgggagacaggcccaggtatgaatgagccagccatgcttcctcctgcctgtgtgacgctgggcgagtctcttcccctgtctgggccaaacagggagcgggtaagacaatccatgctctaagatccattttagatcaatgtctaaaatagctctatcgctctgcggagtcccagcagaggctatggaatgtttctgcaaccctaaggcacagagagcccaaccctgagtgtctcagaggccccctgagtgttccccttggcctgagccccttacccattcctgcagccagtgagagacctggcctcagccctggcagggctctctcttcaaggccatatccacctgtgccctggggcttgggagaccccatagggccgggactcttgggtcagcccggccactggcttctctctttttctccgtttcattctgtgtgcgttgtggggtgggggagggggtccacctgccttacctttctgagttgcctttagagagatgcgtttttctaggactctgtgcaactgtcgtatatggtcccgtgggctgaccgctttgtacatgagaataaatctatttctttctacca

SEQ ID NO: 327714 - DNA, 1152 bp, Homo sapiens
ctcccggagcgcgggtcccaccgcggaactgcggaccgtgtggccctggggcctgcaccctctccggctccggggacggcgacagagacctgcccacccaggcctgggggccccagtcagtggcggccgccgtgtgtgcgctcggtgtctgcggggccagcaggtcttcctcaagccggacgagccgccgccgccgccgcagccatgcgccgacagcctgcagcagccagcctggacccccttgcaaaggagccaggacccccagggagtagagacgaccgactggaggacgccttgctgagtctgggctctgtcatcgacatttcaggcctgcaacgtgctgtcaaggaggccctgtcagctgtgctcccccgagtggaaactgtctacacctacctactggatggtgagtcccagctggtgtgtgaggaccccccacatgagctgccccaggaggggaaagtccggcagttcctacaagcacaattaagtggaggcagcatgagggatgaagaacccaggacaattaatcatcaaggagtgacatttggtgcaaactcagggaggctatcatctcccagaagcggctgggctgcaatgggctgggcttctcagacctgccagggaagcccttggccaggctggtggctccactggctcctgatacccaagtgctggtcatgccgctagcggacaaggaggctggggccgtggcagctgtcatcttggtgcactgtggccagctgagtgataatgaggaatggagcctgcaggcggtggagaagcatgtgagtgggagtggggccatgtgcaatgaggctgaagacccttatcacagctggtgggaagatggcctggccagggagctggacagacctgggtttcagcttcggctttgctgcttttgagctgtgtgaccttgagcaagtcactaaacgtctctgggcctcagtttcacacctgaaaatggggataatgatagcaccgactgacctagggcagtggtgaaacaaaactggtcaaatatcttgtaaatacacacggttgccaacttacaattttcgactttttgatggatttatggggaagcaaccctatcctaagtccaggagcatctgtacttagaaagaaccctccacataatgatactga

SEQ ID NO: 327715 - DNA, 605 bp, Homo sapiens
aagtgctcggggaagaggtcagctttcccgtgagtcccgcgtctgtcttctcgttggagtctgcaggggcggttgaggccgggtagacactcctgggatctgcctggagtatttggatcttctagactcttggaatccgatggaattatctggatcttgggactacttagaaatgctgcagggatcacaacctgtgatcagcaggctctattaggaagaatctcttagcatctacagaaaggcttacctgggacctgttcacttctgttggagtatttctggatatggatctgctagaatctgttgacgagaatccttggagtctgcttatctctctcgtagttagggaagactctagagtcctttatagcgaattctgccagactcccctccatctctgctcatcaatgctgaccctgtccaccatttggactgactgaagggttctttgaaacttccagatttgagggtggggacaggttgagatcccctgacctggggagtactgggccctgactcagtctctcctcaccccctagttgacaggatgcctgggccaggtggtggaagacaagaagtccatccagctgaaggacctcacctcc

SEQ ID NO: 327716 - DNA, 321 bp, Homo sapiens
tgaggagtctgaggctcagagtggtctagggactcaccctgggtcacacagagggttgaaacagagctcagaaagggaactggggcccctgactccccctttctgactgctctgctgacctgggggctggagctggacgaggcccctgcttcctctcttggggtcaatggtaagggagcccatctgccccagctgggcccccatcactcctctccccccagaggcaccactttgctcaggccatcgccatcctcaacacccacggctgcaacatctttgatcatttctcccggaaggtgatggggttgggggtggggtggg

SEQ ID NO: 327717 - DNA, 321 bp, Homo sapiens
agccgctctgcggagaaacgcgctcccggagcgcgggtcccaccgcggaactgcggaccgtgtggccctggggcctgcaccctctccggctccggggacggcgacagagacctgcccacccaggcctgggggccccagtcagtggcggccgccgtgtgtgcgctcggtgtctgtgcgcacgtgtctccctcgcagatgggcgactgctccagggcctgtccgtctcacagcgacctccaacattctcccgacttccccctgcctcctaggctgagggagaggagcaagcccgaggctcctgcggtgtccgcggcccctgcc

SEQ ID NO: 327718 - DNA, 4062 bp, Homo sapiens
tcgagctccgtacccccccgaccagcccgacagctccccgactagcccgacagccccgactagcccgacagccagccagcctggacccccttgcaaaggagccaggacccccagggagtagagacgaccgactggaggacgccttgctgagtctgggctctgtcatcgacatttcaggcctgcaacgtgctgtcaaggaggccctgtcagctgtgctcccccgagtggaaactgtctacacctacctactggatggtgagtcccagctggtgtgtgaggaccccccacatgagctgccccaggaggggaaagtccgggaggctatcatctcccagaagcggctgggctgcaatgggctgggcttctcagacctgccagggaagcccttggccaggctggtggctccactggctcctgatacccaagtgctggtcatgccgctagcggacaaggaggctggggccgtggcagctgtcatcttggtgcactgtggccagctgagtgataatgaggaatggagcctgcaggcggtggagaagcataccctggtcgccctgcggagggtgcaggtcctgcagcagcgcgggcccagggaggctccccgagccgtccagaaccccccggaggggacggcggaagaccagaagggcggggcggcgtacaccgaccgcgaccgcaagatcctccaactgtgcggggaactctacgacctggatgcctcttccctgcagctcaaagtgctccaatacctgcagcaggagacccgggcatcccgctgctgcctcctgctggtgtcggaggacaatctccagctttcttgcaaggtcatcggagacaaagtgctcggggaagaggtcagctttcccttgacaggatgcctgggccaggtggtggaagacaagaagtccatccagctgaaggacctcacctccgaggatgtacaacagctgcagagcatgttgggctgtgagctgcaggccatgctctgtgtccctgtcatcagccgggccactgaccaggtggtggccttggcctgcgccttcaacaagctagaaggagacttgttcaccgacgaggacgagcatgtgatccagcactgcttccactacaccagcaccgtgctcaccagcaccctggccttccagaaggaacagaaactcaagtgtgagtgccaggctcttctccaagtggcaaagaacctcttcacccacctggatgacgtctctgtcctgctccaggagatcatcacggaggccagaaacctcagcaacgcagagatctgctctgtgttcctgctggatcagaatgagctggtggccaaggtgttcgacgggggcgtggtggatgatgagagctatgagatccgcatcccggccgatcagggcatcgcgggacacgtggcgaccacgggccagatcctgaacatccctgacgcatatgcccatccgcttttctaccgcggcgtggacgacagcaccggcttccgcacgcgcaacatcctctgcttccccatcaagaacgagaaccaggaggtcatcggtgtggccgagctggtgaacaagatcaatgggccatggttcagcaagttcgacgaggacctggcgacggccttctccatctactgcggcatcagcatcgcccattctctcctatacaaaaaagtgaatgaggctcagtatcgcagccacctggccaatgagatgatgatgtaccacatgaaggtctccgacgatgagtataccaaacttctccatgatgggatccagcctgtggctgccattgactccaattttgcaagtttcacctatacccctcgttccctgcccgaggatgacacgtccatggccatcctgagcatgctgcaggacatgaatttcatcaacaactacaaaattgactgcccgaccctggcccggttctgtttgatggtgaagaagggctaccgggatcccccctaccacaactggatgcacgccttttctgtctcccacttctgctacctgctctacaagaacctggagctcaccaactacctcgaggacatcgagatctttgccttgtttatttcctgcatgtgtcatgacctggaccacagaggcacaaacaactctttccaggtggcctcgaaatctgtgctggctgcgctctacagctctgagggctccgtcatggagaggcaccactttgctcaggccatcgccatcctcaacacccacggctgcaacatctttgatcatttctcccggaaggactatcagcgcatgctggatctgatgcgggacatcatcttggccacagacctggcccaccatctccgcatcttcaaggacctccagaagatggctgaggtgggctacgaccgaaacaacaagcagcaccacagacttctcctctgcctcctcatgacctcctgtgacctctctgaccagaccaagggctggaagactacgagaaagatcgcggagctgatctacaaagaattcttctcccagggagacctggagaaggccatgggcaacaggccgatggagatgatggaccgggagaaggcctatatccctgagctgcaaatcagcttcatggagcacattgcgatgcccatctacaagctgttgcaggacctgttccccaaagcggcagagctgtacgagcgcgtggcctccaaccgtgagcactggaccaaggtgtcccacaagttcaccatccgcggcctcccaagtaacaactcgctggacttcctggatgaggagtacgaggtgcctgatctggatggcactagggcccccatcaatggctgctgcagccttgatgctgagtgatcccctccagggacacttccctgcccaggccacctcccacagccctccactggtctggccagatgcactgggaacagagccacgggtcctgggtcctagaccaggacttcctgtgtgaccctggacaagtactaccttcctgggcctcagctttctcgtctgtataatggaagcaagacttccaacctcacggagactttgtaatttgttctctgagagcacaggggtgaccaatgagcagtgggccctactctgcacctctgaccacaccttggcaagtctttcccaagccattctttgtctgagcagcttgatggtttctccttgccccatttctgccccaccagatctttgctcctttccctttgaggactcccaccctttggggtctccaggatcctcatggaaggggaaggtgagacatctgagtgagcagagtgtggcatcttggaaacagtccttagttctgtgggaggactagaaacagccgcggggcgaaggccccctgaggaccactactatactgatggtgggattgggacctgggggatacaggggccccaggaagaagctgccagaggggcagctcagtgctctgcagagaggggccctggggagaagcaggatgggattgatgggcaggagggatccccgcactgggagacaggcccaggtatgaatgagccagccatgcttcctcctgcctgtgtgacgctgggcgagtctcttcccctgtctgggccaaacagggagcgggtaagacaatccatgctctaagatccattttagatcaatgtctaaaatagctctatcgctctgcggagtcccagcagaggctatggaatgtttctgcaaccctaaggcacagagagcccaaccctgagtgtctcagaggccccctgagtgttccccttggcctgagccccttacccattcctgcagccagtgagagacctggcctcagccctggcagggctctctcttcaaggccatatccacctgtgccctggggcttgggagaccccatagggccgggactcttgggtcagcccggccactggcttctctctttttctccgtttcattctgtgtgcgttgtggggtgggggagggggtccacctgccttacctttctgagttgcctttagagagatgcgtttttctaggactctgtgcaactgtcgtatatggtcccgtgggctgaccgctttgtacatgagaataaatctatttctttctacca

SEQ ID NO: 327719 - DNA, 521 bp, Homo sapiens
catcgagctcgtacccgacttccaccggagcccggccactggcttctctctttttctccgtttcattctgtgtgcgttgtggggtgggggagggggtccacctgccttacctttctgagttgcctttagagagatgcgtttttctaggactctgtgcaactgtcgtatatggtcccgtgggctgaccgctttgtacatgagaataaatctatttctttctaccaaaaaaaacaaccatacccacacagacacacaaaggcgcggcacgcgacacagaagagaaccaccacgaggggcgccaaggtaaccgcgttcccacaggcctgcgcacaatcggggcccctaagaaggacgcgagatacaagacgccgagacacagggcgaggcgtatcacagacgccggagaggcgagacaccgggaccccggcgcaccccgggaagaaaccctcaacccgcgggcgccaccacactgggcgccacacacacgtgaacagccactaaacaacccacggcacgaccac

SEQ ID NO: 327720 - DNA, 543 bp, Homo sapiens
tttttccagttaacttcatgacatgtagacattcaaaacttgagccttggatgttcctgtggacctgacagttaaaaatataaagaacctaagattcaaatccaactttctctgtttgccttgggttgaataacttatcttttggagaatagttttaagtgccttggacactgataaaattcagctatattgttgacactcatctcttttgtcttatgcttagccatatttaaatcttaaatttaatagagtctagtgaaaaaatgagtgggaagaatgaatataaaagtaataatataaggaaaaagggaaagtaaactatttagaatgtagttttgttatattcccagcatttcaatatttattagttacttgtaaattactgtggctgtgtagcttataaatgtctgtgcactatattaattagaagaccatagaacatgccagcaggttggctaatgctatgggggattttaccacagttgccattgtggaagaaattatttggtacattaataaaaaaagttggtaaaacatggtttt

SEQ ID NO: 327721 - DNA, 245 bp, Homo sapiens
agccctagatcccttaaaccttaattccatacaacacatgtttctgtgagcacaaggctggagaaaagttacagattaacagcatctcaaggcaaaaccattgttcagggtacagatcaaaatggagtttcttaagtcttccttttctaaatagacacacttgtgataccctaacttgtattaacctgattgactctctcttagctgagaaacctgaacggactccatttggctccttcatttgc

SEQ ID NO: 327722 - DNA, 2186 bp, Homo sapiens
aacgtgatctcgggtttgtcgggctgaaatgtggcgggtctcggaaggttccgacctcagtaaagagagctaacgtgtattcttctttttcttagatgctgagatgaatcgtcacctgtgtgtttggctttttagacatccatctcttaatggttacctccagtgtcacatccagctccattctcatcaatttagacagatacatcttgatacaaggctgcaagtttttagacaaaacaggaattgcattcttcatctgttaagtaagaattggtccaggagatattgccatcaagacaccaagatgctctggaagcataaagcactacagaaatatatggagaacctgagtaaggagtaccaaacacttgagcaatgtctgcagcatatccctgtgaatgaggaaaaccgaaggtccttgaacagaaggcatgctgagttggcacctcttgcagccatttaccaagaaattcaggagactgaacaagcaattgaagaattagaatcaatgtgtaaaagcctaaataaacaagatgaaaagcagttacaagaacttgcactggaagaaaggcaaaccattgatcaaaaaatcaacatgttgtacaatgagcttttccagagccttgtgccaaaggagaaatatgacaaaaatgatgttattttagaggtgacagctggaaggactactggaggtgacatctgccaacaatttacccgagaaatatttgacatgtaccagaattattcgtgctataaacactggcaatttgaacttctgaattatacaccagcagattatggtggactacatcatgcagccgcccgaatttccggtgacggtgtctataagcatttgaagtatgagggtgggattcaccgagttcagcgcatccccgaggtgggcctgtcctcaaggatgcagcgcattcacacaggaacgatgtcggttattgtccttcctcagccagatgaggtggatgtgaaattggaccccaaggatttgcgaatagatacatttcgagccaaaggagcaggagggcagcatgttaataaaactgatagtgccgtcagacttgtccacatccccacagggctagtagtagaatgccaacaagaaagatcacagataaaaaataaagaaatagcctttcgtgtgttgagagctagactctaccagcagattattgagaaagacaagcgtcagcaacaaagtgctagaaaactgcaggtgggaacaagagcccagtcagagcgaattcggacatataatttcacccaggatagagtcagtgaccacaggatagcatatgaagttcgtgatattaaggaatttttatgtggtgggaagggcctggatcagctaattcagagactgcttcaatcagcagatgaagaagccattgctgaacttttggatgaacaccttaaatcagcaaaataaatactaacttattattatttatgattatataaatgaaatggacctatatcaagaggcagactgaagcttggaaatcattatgaatatttgtaaattacagctttaagaacacattacacataaatatatgttttgtaattaatcgaagtcacatttcctgacctaagaatttattttaggtttcctgtaaagtacaatccaactcatcaagtagaaaataagcatgcatcattgaaaagagaaagtattgagaattgattgtgtcatttaggacaagtcacttgttctctttatatgccttttttccccagccatctatgaattaatttaaatatatttttaatctactacttcaggaaaatatggtaaaatttagtaaaatatgaattttagacttccttataaaccttttatttaaatacaaagtaccttggcctatagtggatgcttatgcctgtaatcccagtgctttgaagggccaaagggggaagatctcttgaggtaagaatttgagaccagcctgggcaaaatagaccccatgtctacaaaaaaactcaaaacataaagaaaaaccataatactgttaatcatgttaaagttaagacttagactgcaacttttaaataaaaattatgaagaatatgagtcattcaataacaatgagcatctgggtacagacagtaaagccctttgattgctgtatgaattccacactatataaacaataagctgatattttaaatag

SEQ ID NO: 327723 - DNA, 944 bp, Homo sapiens
aacgtgatctcgggtttgtcgggctgaaatgtggcgggtctcggaaggttccgacctcagtaaagagagctaacgtgtattcttctttttcttagcgtgttgctttgtcgcccacgctggttgcagtggtgcgatctcagttcactgcaaccttcgcctcccaggttcaagcgattatcctgcctcagcttcccgagcagctaggactacaggtgtgtgccatcacgctcagctaatttttttggtatttttagtagagatggggttttcccatgttggccaggctggtctcgaactcctgacctcagatgatctgcccgcctcggcctcccaaagtggtaggattacaggcgtgagccactgtgctcggcacattttggtatgtttcttatttaactttctttttaaaaaatactctatgtgcttttttttttttacatgtataccttatattgtagaatattttttaaatgtaattgagattctattttgttccttgcctttcttgcttaatataattgtcaccatttaatataactgtagagcttttcaccagccctactttcttggtctattaatacttgaacttttcttcctttaggatctcagctaaacgggaagcatttttgaaaagtgattgcacaattgagagtgaaaattactgagtcctgaacaggcaacttacattctaataccagctctgtctccatccagccgactgaatagtcgtgattaagttacttgacttccttggatatctagatccttaaagttaaagaattatacaagataataatattttcttcaaactttagaaaatgactttatgaaccgccttaagtttgtatgttttcatagctttcaagagcttgtttacacactcaattctagattctagatactttctagaaaataactgacttaactcattcaattgatatatt

SEQ ID NO: 327724 - DNA, 2308 bp, Homo sapiens
aacgtgatctcgggtttgtcgggctgaaatgtggcgggtctcggaaggttccgacctcagtaaagagagctaacgtgtattcttctttttcttagatgctgagatgaatcgtcacctgtgtgtttggctttttagacatccatctcttaatggttacctccagtgtcacatccagctccattctcatcaatttagacagatacatcttgatacaaggctgcaagtttttagacaaaacaggaattgcattcttcatctgttaagtaagaattggtccaggagatattgccatcaagacaccaagatgctctggaagcataaagcactacagaaatatatggagaacctgagtaaggagtaccaaacacttgagcaatgtctgcagcatatccctgtgaatgaggaaaaccgaaggtccttgaacagaaggcatgctgagttggcacctcttgcagccatttaccaagaaattcaggagactgaacaagcaattgaagaattagaatcaatgtgtaaaaacagagtcttgctctgtggcccaggctggaatgcagtagtgtaatcatagctcactttaaccttgaactcctggactcaagcaatcctccaacctcagcctcccaagtagctgggactacaggcctaaataaacaagatgaaaagcagttacaagaacttgcactggaagaaaggcaaaccattgatcaaaaaatcaacatgttgtacaatgagcttttccagagccttgtgccaaaggagaaatatgacaaaaatgatgttattttagaggtgacagctggaaggactactggaggtgacatctgccaacaatttacccgagaaatatttgacatgtaccagaattattcgtgctataaacactggcaatttgaacttctgaattatacaccagcagattatggtggactacatcatgcagccgcccgaatttccggtgacggtgtctataagcatttgaagtatgagggtgggattcaccgagttcagcgcatccccgaggtgggcctgtcctcaaggatgcagcgcattcacacaggaacgatgtcggttattgtccttcctcagccagatgaggtggatgtgaaattggaccccaaggatttgcgaatagatacatttcgagccaaaggagcaggagggcagcatgttaataaaactgatagtgccgtcagacttgtccacatccccacagggctagtagtagaatgccaacaagaaagatcacagataaaaaataaagaaatagcctttcgtgtgttgagagctagactctaccagcagattattgagaaagacaagcgtcagcaacaaagtgctagaaaactgcaggtgggaacaagagcccagtcagagcgaattcggacatataatttcacccaggatagagtcagtgaccacaggatagcatatgaagttcgtgatattaaggaatttttatgtggtgggaagggcctggatcagctaattcagagactgcttcaatcagcagatgaagaagccattgctgaacttttggatgaacaccttaaatcagcaaaataaatactaacttattattatttatgattatataaatgaaatggacctatatcaagaggcagactgaagcttggaaatcattatgaatatttgtaaattacagctttaagaacacattacacataaatatatgttttgtaattaatcgaagtcacatttcctgacctaagaatttattttaggtttcctgtaaagtacaatccaactcatcaagtagaaaataagcatgcatcattgaaaagagaaagtattgagaattgattgtgtcatttaggacaagtcacttgttctctttatatgccttttttccccagccatctatgaattaatttaaatatatttttaatctactacttcaggaaaatatggtaaaatttagtaaaatatgaattttagacttccttataaaccttttatttaaatacaaagtaccttggcctatagtggatgcttatgcctgtaatcccagtgctttgaagggccaaagggggaagatctcttgaggtaagaatttgagaccagcctgggcaaaatagaccccatgtctacaaaaaaactcaaaacataaagaaaaaccataatactgttaatcatgttaaagttaagacttagactgcaacttttaaataaaaattatgaagaatatgagtcattcaataacaatgagcatctgggtacagacagtaaagccctttgattgctgtatgaattccacactatataaacaataagctgatattttaaatag

SEQ ID NO: 327725 - DNA, 2470 bp, Homo sapiens
aacgtgatctcgggtttgtcgggctgaaatgtggcgggtctcggaaggttccgacctcagtaaagagagctaacgtgtattcttctttttcttagcgtgttgctttgtcgcccacgctggttgcagtggtgcgatctcagttcactgcaaccttcgcctcccaggttcaagcgattatcctgcctcagcttcccgagcagctaggactacaggtgtgtgccatcacgctcagctaatttttttggtatttttagtagagatggggttttcccatgttggccaggctggtctcgaactcctgacctcagatgatctgcccgcctcggcctcccaaagtggtaggattacaggcgtgagccactgtgctcggcacattttgatgctgagatgaatcgtcacctgtgtgtttggctttttagacatccatctcttaatggttacctccagtgtcacatccagctccattctcatcaatttagacagatacatcttgatacaaggctgcaagtttttagacaaaacaggaattgcattcttcatctgttaagtaagaattggtccaggagatattgccatcaagacaccaagatgctctggaagcataaagcactacagaaatatatggagaacctgagtaaggagtaccaaacacttgagcaatgtctgcagcatatccctgtgaatgaggaaaaccgaaggtccttgaacagaaggcatgctgagttggcacctcttgcagccatttaccaagaaattcaggagactgaacaagcaattgaagaattagaatcaatgtgtaaaagcctaaataaacaagatgaaaagcagttacaagaacttgcactggaagaaaggcaaaccattgatcaaaaaatcaacatgttgtacaatgagcttttccagagccttgtgccaaaggagaaatatgacaaaaatgatgttattttagaggtgacagctggaaggactactggaggtgacatctgccaacaatttacccgagaaatatttgacatgtaccagaattattcgtgctataaacactggcaatttgaacttctgaattatacaccagcagattatggtggactacatcatgcagccgcccgaatttccggtgacggtgtctataagcatttgaagtatgagggtgggattcaccgagttcagcgcatccccgaggtgggcctgtcctcaaggatgcagcgcattcacacaggaacgatgtcggttattgtccttcctcagccagatgaggtggatgtgaaattggaccccaaggatttgcgaatagatacatttcgagccaaaggagcaggagggcagcatgttaataaaactgatagtgccgtcagacttgtccacatccccacagggctagtagtagaatgccaacaagaaagatcacagataaaaaataaagaaatagcctttcgtgtgttgagagctagactctaccagcagattattgagaaagacaagcgtcagcaacaaagtgctagaaaactgcaggtgggaacaagagcccagtcagagcgaattcggacatataatttcacccaggatagagtcagtgaccacaggatagcatatgaagttcgtgatattaaggaatttttatgtggtgggaagggcctggatcagctaattcagagactgcttcaatcagcagatgaagaagccattgctgaacttttggatgaacaccttaaatcagcaaaataaatactaacttattattatttatgattatataaatgaaatggacctatatcaagaggcagactgaagcttggaaatcattatgaatatttgtaaattacagctttaagaacacattacacataaatatatgttttgtaattaatcgaagtcacatttcctgacctaagaatttattttaggtttcctgtaaagtacaatccaactcatcaagtagaaaataagcatgcatcattgaaaagagaaagtattgagaattgattgtgtcatttaggacaagtcacttgttctctttatatgccttttttccccagccatctatgaattaatttaaatatatttttaatctactacttcaggaaaatatggtaaaatttagtaaaatatgaattttagacttccttataaaccttttatttaaatacaaagtaccttggcctatagtggatgcttatgcctgtaatcccagtgctttgaagggccaaagggggaagatctcttgaggtaagaatttgagaccagcctgggcaaaatagaccccatgtctacaaaaaaactcaaaacataaagaaaaaccataatactgttaatcatgttaaagttaagacttagactgcaacttttaaataaaaattatgaagaatatgagtcattcaataacaatgagcatctgggtacagacagtaaagccctttgattgctgtatgaattccacactatataaacaataagctgatattttaaatag

SEQ ID NO: 327726 - DNA, 2415 bp, Homo sapiens
aacgtgatctcgggtttgtcgggctgaaatgtggcgggtctcggaaggttccgacctcagtaaagagagctaacgtgtattcttctttttcttagatgctgagatgaatcgtcacctgtgtgtttggctttttagacatccatctcttaatggttacctccagtgtcacatccagctccattctcatcaatttagacagatacatcttgatacaaggctgcaagtttttagacaaaacaggaattgcattcttcatctgttaagtaagaattggtccaggagatattgccatcaagacaccaagatgctctggaagcataaagcactacagaaatatatggagaacctgagtaaggagtaccaaacacttgagcaatgtctgcagcatatccctgtgaatgaggaaaaccgaaggtccttgaacagaaggcatgctgagttggcacctcttgcagccatttaccaagaaattcaggagactgaacaagcaattgaagaattagaatcaatgtgtaaaaacagagtcttgctctgtggcccaggctggaatgcagtagtgtaatcatagctcactttaaccttgaactcctggactcaagcaatcctccaacctcagcctcccaagtagctgggactacaggcctaaataaacaagatgaaaagcagttacaagaacttgcactggaagaaaggcaaaccattgatcaaaaaatcaacatgttgtacaatgagcttttccagagccttgtgccaaaggagaaatatgacaaaaatgatgttattttagaggtgacagctggaaggactactggaggtgacatctgccaacaatttacccgagaaatatttgacatgtaccagaattattcgtgctataaacactggcaatttgaacttctgaattatacaccagcagattatggtggactacatcatgcagccgcccgaatttccggtgacggtgtctataagcatttgaagtatgagggtgggattcaccgagttcagcgcatccccgaggtgggcctgtcctcaaggatgcagcgcattcacacaggaacgatgtcggttattgtccttcctcagccagatgaggtggatgtgaaattggaccccaaggatttgcgaatagatacatttcgagccaaaggagcaggagggcagcatgttaataaaactgatagtgccgtcagacttgtccacatccccacagggctagtagtagaatgccaacaagaaagatcacagataaaaaataaagaaatagcctttcgtgtgttgagagctagactctaccagcagattattgagaaagacaagcgtcagcaacaaagtgctagaaaactgcaggtgggaacaagagcccagtcagagcgaattcggacatataatttcacccaggatagagtcagtgaccacaggatagcatatgaagttcgtgatattaaggctcagtctcattccacgggtggtagtcgtgaccctgcacattccacattcctatccttggattctgtgagatcacctggtattctcattatgacttcttctgttaggaatttttatgtggtgggaagggcctggatcagctaattcagagactgcttcaatcagcagatgaagaagccattgctgaacttttggatgaacaccttaaatcagcaaaataaatactaacttattattatttatgattatataaatgaaatggacctatatcaagaggcagactgaagcttggaaatcattatgaatatttgtaaattacagctttaagaacacattacacataaatatatgttttgtaattaatcgaagtcacatttcctgacctaagaatttattttaggtttcctgtaaagtacaatccaactcatcaagtagaaaataagcatgcatcattgaaaagagaaagtattgagaattgattgtgtcatttaggacaagtcacttgttctctttatatgccttttttccccagccatctatgaattaatttaaatatatttttaatctactacttcaggaaaatatggtaaaatttagtaaaatatgaattttagacttccttataaaccttttatttaaatacaaagtaccttggcctatagtggatgcttatgcctgtaatcccagtgctttgaagggccaaagggggaagatctcttgaggtaagaatttgagaccagcctgggcaaaatagaccccatgtctacaaaaaaactcaaaacataaagaaaaaccataatactgttaatcatgttaaagttaagacttagactgcaacttttaaataaaaattatgaagaatatgagtcattcaataacaatgagcatctgggtacagacagtaaagccctttgattgctgtatgaattccacactatataaacaataagctgatattttaaatag

SEQ ID NO: 327727 - DNA, 1199 bp, Homo sapiens
  misc_feature (548)..(548): n is a, c, g, or t
  misc_feature (593)..(593): n is a, c, g, or t
  misc_feature (714)..(714): n is a, c, g, or t
  misc_feature (761)..(761): n is a, c, g, or t
  misc_feature (764)..(764): n is a, c, g, or t
  misc_feature (782)..(782): n is a, c, g, or t
  misc_feature (818)..(818): n is a, c, g, or t
  misc_feature (919)..(919): n is a, c, g, or t
aacgtgatctcgggtttgtcgggctgaaatgtggcgggtctcggaaggttccgacctcagtaaagagagctaacgtgtattcttctttttcttagcgtgttgctttgtcgcccacgctggttgcagtggtgcgatctcagttcactgcaaccttcgcctcccaggttcaagcgattatcctgcctcagcttcccgagcagctaggactacaggcactctcagcctaaacgggcaagcacttctttgacaaaggtgacttgcacacacctcgacgcagctgacacaacttacctgacctccctgaacacggcaaccttacacttactaacataccagccctctgctactccactcacagcccgcacctgacactacgctcgcatgactctacacgcttaccttgcaccctatcccttgcgcactactcctacagcatccccttcaacacgcttcaacaccaactctactaacccacacgaactaccactacacttacttctctcctctccaaccactctctacgcacaaactgcaccttctactcgaancacgcccacttacagcgctttactgacatgcacgcaactgcacanctccgctacacccctgactggctcgctctctgcgccatctctctctaccgaacactcacactccatcctcataacctgcgctctacccacatcccacgcatcgctacaccactcacaacgnctccacactctccttccactccacactctctcaagcaccgacgtatnacnactcgtctgcactaccanaccggccctcgccaacgctatcctctaccgcacccnacacagcaagcgcacatttcagcccactttcctatccactacctcgacttcaacagttcacacgatatctcggcctccacgcgcacgcatcactctcgccncactccaaacgcaacacccagacgactgcctcctgcgcacacgcgattcacaacgcaccgaccacgcaacatactcattgcgcacgaaccctcgcacgtaaacggagctaccgaacaccacctctgcagcgcaattgctcctcgccagccatattcccctgctgcacatcgaagcaacaacccggcaacggttccttgaaacagcaaggccatgcctcgagcttggcaccctctttgccagcccatattccgagcacacatccagcgagaactgaaccag

SEQ ID NO: 327728 - DNA, 767 bp, Homo sapiens
aacgtgatctcgggtttgtcgggctgaaatgtggcgggtctcggaaggttccgacctcagtaaagagagctaacgtgtattcttctttttcttaggtactcacagttctttcctgatcttccccgccgcctcctgtattgcctctttatggaatcactccatatactgagttacacagcatggtttgcccgtgctgctgccccgcgggctgtcgcttctgacctgcctacactcagaactttccccaaagcatcagagtaatactgttactgtgatgggtaatggagaagtcgtgctgttctcaggtcgtgttgctttgtcgcccacgctggttgcagtggtgcgatctcagttcactgcaaccttcgcctcccaggttcaagcgattatcctgcctcagcttcccgagcagctaggactacaggatctcagctaaacgggaagcatttttgaaaagtgattgcacaattgagagtgaaaattactgagtcctgaacaggcaacttacattctaataccagctctgtctccatccagccgactgaatagtcgtgattaagttacttgacttccttggatatctagatccttaaagttaaagaattatacaagataataatattttcttcaaactttagaaaatgactttatgaaccgccttaagtttgtatgttttcatagctttcaagagcttgtttacacactcaattctagattctagatactttctagaaaataactgacttaactcattcaattgatatatt

SEQ ID NO: 327729 - DNA, 204 bp, Homo sapiens
gtaggttttcagaggtcgactagtttcaatagtgctgtataaaggaatgctgtttttgctagactctgcttcggtgctcatagtggtttccaaacactgttttaagtgttctcttatgataagtgatcaagctggtctcctgtaatttgctgcagaatgagaatgaagaaattacgatgtcaaataataaagactcccagggta

SEQ ID NO: 327730 - DNA, 2257 bp, Homo sapiens
aacgtgatctcgggtttgtcgggctgaaatgtggcgggtctcggaaggttccgacctcagtaaagagagctaacgtgtattcttctttttcttaggaaagtattccatgctacatgtgcaagaaacttggaaaacactgaaaagtagaaaaaatagcaagcaaaagatgctgagatgaatcgtcacctgtgtgtttggctttttagacatccatctcttaatggttacctccagtgtcacatccagctccattctcatcaatttagacagatacatcttgatacaaggctgcaagtttttagacaaaacaggaattgcattcttcatctgttaagtaagaattggtccaggagatattgccatcaagacaccaagatgctctggaagcataaagcactacagaaatatatggagaacctgagtaaggagtaccaaacacttgagcaatgtctgcagcatatccctgtgaatgaggaaaaccgaaggtccttgaacagaaggcatgctgagttggcacctcttgcagccatttaccaagaaattcaggagactgaacaagcaattgaagaattagaatcaatgtgtaaaagcctaaataaacaagatgaaaagcagttacaagaacttgcactggaagaaaggcaaaccattgatcaaaaaatcaacatgttgtacaatgagcttttccagagccttgtgccaaaggagaaatatgacaaaaatgatgttattttagaggtgacagctggaaggactactggaggtgacatctgccaacaatttacccgagaaatatttgacatgtaccagaattattcgtgctataaacactggcaatttgaacttctgaattatacaccagcagattatggtggactacatcatgcagccgcccgaatttccggtgacggtgtctataagcatttgaagtatgagggtgggattcaccgagttcagcgcatccccgaggtgggcctgtcctcaaggatgcagcgcattcacacaggaacgatgtcggttattgtccttcctcagccagatgaggtggatgtgaaattggaccccaaggatttgcgaatagatacatttcgagccaaaggagcaggagggcagcatgttaataaaactgatagtgccgtcagacttgtccacatccccacagggctagtagtagaatgccaacaagaaagatcacagataaaaaataaagaaatagcctttcgtgtgttgagagctagactctaccagcagattattgagaaagacaagcgtcagcaacaaagtgctagaaaactgcaggtgggaacaagagcccagtcagagcgaattcggacatataatttcacccaggatagagtcagtgaccacaggatagcatatgaagttcgtgatattaaggaatttttatgtggtgggaagggcctggatcagctaattcagagactgcttcaatcagcagatgaagaagccattgctgaacttttggatgaacaccttaaatcagcaaaataaatactaacttattattatttatgattatataaatgaaatggacctatatcaagaggcagactgaagcttggaaatcattatgaatatttgtaaattacagctttaagaacacattacacataaatatatgttttgtaattaatcgaagtcacatttcctgacctaagaatttattttaggtttcctgtaaagtacaatccaactcatcaagtagaaaataagcatgcatcattgaaaagagaaagtattgagaattgattgtgtcatttaggacaagtcacttgttctctttatatgccttttttccccagccatctatgaattaatttaaatatatttttaatctactacttcaggaaaatatggtaaaatttagtaaaatatgaattttagacttccttataaaccttttatttaaatacaaagtaccttggcctatagtggatgcttatgcctgtaatcccagtgctttgaagggccaaagggggaagatctcttgaggtaagaatttgagaccagcctgggcaaaatagaccccatgtctacaaaaaaactcaaaacataaagaaaaaccataatactgttaatcatgttaaagttaagacttagactgcaacttttaaataaaaattatgaagaatatgagtcattcaataacaatgagcatctgggtacagacagtaaagccctttgattgctgtatgaattccacactatataaacaataagctgatattttaaatag

SEQ ID NO: 327731 - DNA, 1293 bp, Homo sapiens
gtatccatgtgcgtggagtacgttctgctctggaaggtttaccagaaaaccccagctctagctgtgaaagctggtcttaaagaagaggaaactgaattgaaacagctgaatttacaccaagatactgagccaaaggagcaggagggcagcatgttaataaaactgatagtgccgtcagacttgtccacatccccacagggctagtagtagaatgccaacaagaaagatcacagataaaaaataaagaaatagcctttcgtgtgttgagagctagactctaccagcagattattgagaaagacaagcgtcagcaacaaagtgctagaaaactgcaggtgggaacaagagcccagtcagagcgaattcggacatataatttcacccaggatagagtcagtgaccacaggatagcatatgaagttcgtgatattaaggaatttttatgtggtgggaagggcctggatcagctaattcagagactgcttcaatcagcagatgaagaagccattgctgaacttttggatgaacaccttaaatcagcaaaataaatactaacttattattatttatgattatataaatgaaatggacctatatcaagaggcagactgaagcttggaaatcattatgaatatttgtaaattacagctttaagaacacattacacataaatatatgttttgtaattaatcgaagtcacatttcctgacctaagaatttattttaggtttcctgtaaagtacaatccaactcatcaagtagaaaataagcatgcatcattgaaaagagaaagtattgagaattgattgtgtcatttaggacaagtcacttgttctctttatatgccttttttccccagccatctatgaattaatttaaatatatttttaatctactacttcaggaaaatatggtaaaatttagtaaaatatgaattttagacttccttataaaccttttatttaaatacaaagtaccttggcctatagtggatgcttatgcctgtaatcccagtgctttgaagggccaaagggggaagatctcttgaggtaagaatttgagaccagcctgggcaaaatagaccccatgtctacaaaaaaactcaaaacataaagaaaaaccataatactgttaatcatgttaaagttaagacttagactgcaacttttaaataaaaattatgaagaatatgagtcattcaataacaatgagcatctgggtacagacagtaaagccctttgattgctgtatgaattccacactatataaacaataagctgatattttaaatag

SEQ ID NO: 327732 - DNA, 1294 bp, Homo sapiens
aacgtgatctcgggtttgtcgggctgaaatgtggcgggtctcggaaggttccgacctcagtaaagagagctaacgtgtattcttctttttcttagatgctgagatgaatcgtcacctgtgtgtttggctttttagacatccatctcttaatggttacctccagtgtcacatccagctccattctcatcaatttagacagatacatcttgatacaaggctgcaagtttttagacaaaacaggaattgcattcttcatctgttaagtaagaattggtccaggagatattgccatcaagacaccaagatgctctggaagcataaagcactacagaaatatatggagaacctgagtaaggagtaccaaacacttgagcaatgtctgcagcatatccctgtgaatgaggaaaaccgaaggtccttgaacagaaggcatgctgagttggcacctcttgcagccatttaccaagaaattcaggagactgaacaagcaattgaagaattagaatcaatgtgtaaaaacagagtcttgctctgtggcccaggctggaatgcagtagtgtaatcatagctcactttaaccttgaactcctggactcaagcaatcctccaacctcagcctcccaagtagctgggactacaggcctaaataaacaagatgaaaagcagttacaagaacttgcactggaagaaaggcaaaccattgatcaaaaaatcaacatgttgtacaatgagcttttccagagccttgtgccaaaggagaaatatgacaaaaatgatgttattttagaggtgacagctggaaggactactggaggtgacatctgccaacaatttacccgagaaatatttgacatgtaccagaattattcgtgctataaacactggcaatttgaacttctgaattatacaccagcagattatggtaggcatattgaggaatttgcctgtaggagatactgaaaattattttacctctgatcttgattagaaccatattgtcccatttttttttgaaacttttggtgtatatctactaaacactgtggcataggctcatcaatcacagtggcttactattatagcagagttgttagctaggagaagacagtagaaaggagggaagcatttgcttagggagaaatatgtgaattagagaaaattcccctgaggaacttagatacgtatcttgcctcaaaatcatttttctctattattgaaagcaaaggtatattaaggtttttactttaaataactttataaaataatataagtattactaattagaaaaagtggc

SEQ ID NO: 327733 - DNA, 359 bp, Homo sapiens
atctcttccccatttgtgggctatacaggcattgtggtgagataggtgagaaggccagagtgtgggagaggcaagagctgagattggagaatctgaattacagcatccaaaggtgtgtggtgagcacaggccagtgcctgcagggctccccttcctggtagccaagcaagagcaggatcctgcatagcgaagcaggtggccacattgtcctccccacaagatccatgcccatcagaaggaaattccagccaagggctgggcaaggactcagttctagccaggcaggctaaggattggattaaggatccatgcccatgaaggggcagagggtagggagaactgtagccagcctcaggaaa

SEQ ID NO: 327734 - DNA, 5506 bp, Homo sapiens
ggggtgagagagagagagtggccagtgctggcagaaagcacagccacctcggggctctgcatcgtggtggggccaggcgggtcggcaggtgctggcttgcgaggttgtcctgcatgcggtcactcgggtatcgaatgagtgcgaaagtggatttaatacagtcactgagaaaaactacagcttcacgagactgaccagcctggtgagataaacatttaccgtcagacactctttagctgtctgggcattgtgtgagttctttggcacatgcgcccagcctccttccccacagggtctcgcctggggcattagaagctggattgtaacatttgttttaaaagatactttgttaggctgttggttctccttacaatcccggctttccttagcatgtggttcccttcattgtatctgggtttttctatctcagtctgtcctttatacaagctttttcctctagcactaattatattccccttcccctttttccagaattccaaattctgacctgtgcatgcatgcctgtgttgagtacatgctgtttgtcggatatttggtggtggggggaggggatcacatttctgttactctcgcattgtttccttaggatgaattcttagaagtggaacttctggattcagggaatgaacacgtttgctagttactgtcaaaaatgcctcttggagaagttatgccgaaccacccaactgtcctggtcacagagcaggcttctctcggcttggggctagggttctttctggggtcgtcctttttttttttttttttgagacagagtttcgctcttgttgctgaggctggagtgcagtggcaccatctcgtctcactgcaacctctgcctcctgggttcaggtgattctcctgtcccagccttccgagtagctgggattacagggatgtagcaccatgcctggctaattttgtgtttttagtggagacggggtttctccatgttggtcaggctggtctcgaactcccagcctcaggtgatctgcccgcctcggtctcccaaagtgctgggattacaggtgtgagccactgtgcgtggcctcccagggtccttcctaatgcaggctgctttctctcatgtaaccaagagacatacattcatcccctaccacgtgccaggctgcactgcgtgcagatgcccctgcgctcacggggactggagggagccaggtgacatggagcccaggaagtggccagagctcgggaggaaggcaaagaggggaagagggcatgcagtcttaggcttggggtcccaggaggcctagggaagccttgtagatacccaggtacagcatttctgggatcaggagccatgatcccaaggcctctaatacttcagatatggcagggaggccaggtggagagacctggaggagtgaggccacagagttggggggccatggccgagacttcggcttctatccagagtcagatgggagctgttggagggttgtcagcaggtgagtgccgtgctctgacttgggtgttaataggatcatggtagctggctgcaggtgtcctgggccaaggagcagggagacaggaggcagagaagagggcgctgggttggacctgggacgcctggggtggtgagaggtggtcgatgctggtcatgctgtgaagcagtctcagtgagttccaggcgaatgagcagattcgttttagggagtgcctgtgaagagcaaacgctcttttttggtgttgctgccagatccaaggattaatgtcgtgcttgctggtggccacgttgtgccccgagatgagatccggaagctgatggaaagccaagacatcttcaccgggactcagactgagctgattgctggaggccagctcctttcctgcctctcacctcagcctgctccaggggtggacaatgtcccagaaggaagcctgccagtgcacggtgaacaggcgctgcccaaggaccagcaaatcactgccttggggagagaggaacctgtggcaatagagagccccggacaggatcttctgggagaaagcaggtctgaaccagtggatgtgaagccatttgcttcctgcgaagattctgaagctccagtcccagctgaggatgggggcagtgatgctggcatgtgtggcctgtgtcagaaggcccagctagagcggatgggagtcagtggtcccagcggttcagacctttgggctggggctgccgtggccaagccccaggccaagggtcagctggcggggggcagcctcctgatgcactgcccttgctatgggagtgaatggggcttgtggtggcgaagccaggacttggcccccagcccctctgggatggcaggcctctcgtttgggacacctactctagatgagccgtggctgggagtggaaaacgaccgagaagagctgcagacctgcttgattaaggagcagctgtcccagttgagccttgcaggagccctggatgtcccccacgccgaactcgttccgacagagtgccaggctgtcaccgctcctgtgtcgtcctgcgatctgggaggcagagacctgtgcggtggctgcacgggcagctcctcagcctgctatgccttggccacggacctccctgggggcctggaagcagtggaggcccaggaggttgatgtgaattcgttttcctggaacctcaaggaactctttttcagtgaccagacagaccaaacgtcatcaaattgttcctgtgctacgtctgaactcagagagacaccctcttccttggcagtgggctccgatccagatgtaggcagtctccaggaacaggggtcgtgtgtcctggatgacagggagctgttactactgaccggcacctgtgttgaccttggccaaggccgacggttccgggagagctgtgtgggacatgatccaacagaaccgcttgaggtttgtttggtgtcctctgagcattatgcagcaagcgacagagaaagcccaggacacgttccttccacgttggatgctggccctgaggacacgtgcccatcagcagaggagccaaggctgaacgtccaggtcacctccacgcccgtgatcgtgatgcgcggggctgctggcctgcagcgggagatccaggagggtgcctactccgggagctgctaccatcgagatggcttacggctgagtatacagtttgaggtgaggcgggtggagctccagggccccacacctctgttctgctgctggctggtgaaagacctcctccacagccaacgcgactcagccgccaggacccgcctgttccttgccagcctgcccggctccacccactctaccgctgctgagctcaccggacccagcctggtggaagtgctcagagccagaccctggtttgaggagccccccaaggctgtggaactggaggggttggcggcctgtgagggcgagtactcccaaaagtacagtaccatgagcccgctgggcagtggggccttcggcttcgtgtggactgctgtggacaaggaaaaaaacaaggaggtggtggtgaagtttattaagaaggagaaggtcttggaggattgttggattgaggatcccaaacttgggaaagttactttagagatcgcaattctatccagggtggagcacgccaatatcatcaaggtattggatatatttgaaaaccaagggttcttccagcttgtgatggagaagcacggctccggcctagacctcttcgctttcatcgaccgccaccccaggctggatgagcccctggcgagctacatcttccgacaagtgagagcaggccagagccgtgttagtgtgaacgcaggcctgggtgcctgggtccggtggctgcaaagatcagtgatccatactcggttctctctctgagctggatctagccttctgtgtggggatttcatggagtaggatatatattttgagaagaaaattctatgattgaagtagagaaagtgaggttgggaaggaaggatgaggccagatacagtcctggaatgactgagaaagtatgtttaatggttaaggtttatttacatacataaaatatccacaacaatcataaaaattaaccagtaagggttaggatgcagccagagagcgtctcaaaggcatgtgtgcggcacagcggcctgcaggttgtaagtgcccactaaatggtggctgttgaggtaattaaccagcaaaactgagatcctgacattctcacttttcagtaagtatttgtcttgatctgtttcgtgtctaattacatattgaacttcggccattattttattggaatgggagagtgatgatccaaataggaaggcaccctagcagagggacagggggaagaaacggtaactcgtgttgggttttaaggagagggtggcggttccatcctgtactgctcccagctcccccagaagaactggagaaataccagcaaagggctgtgtagacaactcacatttgctcttggattgtttgctggggacaactcgatttctaatgacagcttccgtgaatcaacatttcttccttaaagctacacactctcgggttgttgggtttccgaagtttagtttctcaggctcctacttgtaagtttcagatattatggttctgcaaaaaagggtcacctctctccctcttcctgtgttggaaggtgacgtcctccctttagtttgtggccaacacttgtttctgaaactttttacagcaaacagagtatctgtatgaggttatgttgagggtcgcttgttaaaagctgctgcctgacagctgttaattctggggctagtgagacacataattatggtgtttatactctaaaatttttgccaaaagaatctctaccccttttgtaaatatatagacataaatgttattctatgtaaatacagatgcacaattttataaagtatatgatcgcacatcaatgtatgtaggaatcatgctggttctcagggcattgcctgtcagctccagattcatcaggacctgctcagcagcggggtcggggagctgggcctgggaacagccctggcttggttcaggccgctccagggcagcatggccagtccagggcacagaagcatctgcaggaagagcagctttcttcaagtcgctctttagccctttgtggttaatctctcagtactagttaataaatcttaatgaaactttccatgttcaagttcatgtgtgatttctgtctcctgattggatcctgactgatttgtatatatctacatatatatgtaagtatgtatgcatgcatgcttgtatatgtgtatttatgtgtgtacctatgtacaagtatatgttatgtgtataggtatgcacacgtgtgtatgcaggtgtgtatatatgtgcacatgtatgtatctaaatgtatgtataaatatgcaggtatgtatatataaatatgcaggtatgtatatataaatatgcaggtatgtatatgtttgtatatatgtgtataaatatgcgtatatttattaaatgtaagttaatcgggcttagctaa

SEQ ID NO: 327735 - DNA, 4362 bp, Homo sapiens
ggaagggctcctttccgtggtgtgtagccggcttggcgtgaccctcgcctgatccagttgttagagttggaagcttggcagttggcctcccttcttcccatggaggacgggggcttaacagcctttgaagaggaccagagatgcctttcccagagcctccccttgccagtgtcagcagagggcccagctgcacagaccactgctgagcccagcaggtcgttttcctcagcccacagacacctgagcagaaggaatgggctttccagactctgccagagcaggacagcgctctctgaagacagatggagctcctattgtctatcatcactggctgcccagaatatttgtacaagtaaactgcactgccctgctgcccctgagcacacggacccgtccgaaccgcggggcagtgtgtcctgctgctccctgctgcggggactgtcctcagggtggtcctcacctctgcttccggcccctgtgtgcaaccctaacaaggccatcttcacggtggatgccaagaccacagagatcctggttgctaacgacaaagcttgcgggctcctggggtacagcagccaggacctgattggccagaagctcacgcagttctttctgaggtcagattctgatgtggtggaggccctcagcgaggagcacatggaggccgacggccacgctgcggtggtgtttggcacggtggtggacatcatcagccgtagtggggagaagattccagtgtctgtgtggatgaagaggatgcggcaggagcgccgcctatgctgcgtggtggtcctggagcccgtggagagggtctcgacctgggtcgctttccagagcgatggcaccgtcacgtcatgtgacagtctctttgctcatcttcacgggtacgtgtctggggaggacgtggctgggcagcatatcacagacctgatcccttctgtgcagctccctccttctggccagcacatcccaaagaatctcaagattcagaggtctgttggaagagccagggacggtaccaccttccctctgagcttaaagctgaaatcccaacccagcagcgaggaggcgaccaccggtgaggcggcccctgtgagcggctaccgggcatctgtctgggtgttctgcaccatcagtggcctcatcaccctcctgccggatgggaccatccacggcatcaaccacagcttcgcgctgacactgtttggttacggaaagacggagctcctgggcaagaatatcactttcctgattcctggtttctacagctacatggaccttgcgtacaacagctcattacagctcccagacctggccagctgcctggacgtcggcaatgagagtgggtgtggggagagaaccttggacccgtggcagggccaggacccagctgaggggggccaggatccaaggattaatgtcgtgcttgctggtggccacgttgtgccccgagatgagatccggaagctgatggaaagccaagacatcttcaccgggactcagactgagctgattgctggaggccagctcctttcctgcctctcacctcagcctgctccaggggtggacaatgtcccagaaggaagcctgccagtgcacggtgaacaggcgctgcccaaggaccagcaaatcactgccttggggagagaggaacctgtggcaatagagagccccggacaggatcttctgggagaaagcaggtctgaaccagtggatgtgaagccatttgcttcctgcgaagattctgaagctccagtcccagctgaggatgggggcagtgatgctggcatgtgtggcctgtgtcagaaggcccagctagagcggatgggagtcagtggtcccagcggttcagacctttgggctggggctgccgtggccaagccccaggccaagggtcagctggcggggggcagcctcctgatgcactgcccttgctatgggagtgaatggggcttgtggtggcgaagccaggacttggcccccagcccctctgggatggcaggcctctcgtttgggacacctactctagatgagccgtggctgggagtggaaaacgaccgagaagagctgcagacctgcttgattaaggagcagctgtcccagttgagccttgcaggagccctggatgtcccccacgccgaactcgttccgacagagtgccaggctgtcaccgctcctgtgtcgtcctgcgatctgggaggcagagacctgtgcggtggctgcacgggcagctcctcagcctgctatgccttggccacggacctccctgggggcctggaagcagtggaggcccaggaggttgatgtgaattcgttttcctggaacctcaaggaactctttttcagtgaccagacagaccaaacgtcatcaaattgttcctgtgctacgtctgaactcagagagacaccctcttccttggcagtgggctccgatccagatgtaggcagtctccaggaacaggggtcgtgtgtcctggatgacagggagctgttactactgaccggcacctgtgttgaccttggccaaggccgacggttccgggagagctgtgtgggacatgatccaacagaaccgcttgaggtttgtttggtgtcctctgagcattatgcagcaagcgacagagaaagcccaggacacgttccttccacgttggatgctggccctgaggacacgtgcccatcagcagaggagccaaggctgaacgtccaggtcacctccacgcccgtgatcgtgatgcgcggggctgctggcctgcagcgggagatccaggagggtgcctactccgggagctgctaccatcgagatggcttacggctgagtatacagtttgaggtgaggcgggtggagctccagggccccacacctctgttctgctgctggctggtgaaagacctcctccacagccaacgcgactcagccgccaggacccgcctgttccttgccagcctgcccggctccacccactctaccgctgctgagctcaccggacccagcctggtggaagtgctcagagccagaccctggtttgaggagccccccaaggctgtggaactggaggggttggcggcctgtgagggcgagtactcccaaaagtacagtaccatgagcccgctgggcagtggggccttcggcttcgtgtggactgctgtggacaaggaaaaaaacaaggaggtggtggtgaagtttattaagaaggagaaggtcttggaggattgttggattgaggatcccaaacttgggaaagttactttagagatcgcaattctatccagggtggagcacgccaatatcatcaaggtattggatatatttgaaaaccaagggttcttccagcttgtgatggagaagcacggctccggcctagacctcttcgctttcatcgaccgccaccccaggctggatgagcccctggcgagctacatcttccgacaagtgagagcaggccagagccgtctagtgtcagcagtgggatacctgcgcttgaaggacatcatccaccgtgacatcaaggatgagaacatcgtgatcgccgaggacttcacaatcaagctgatagactttggctcggccgcctacttggaaaggggaaaattattttatactttttgtgggaccatcgagtactgtgcaccggaagttctcatggggaatccctacagagggccggagctggagatgtggtctctgggagtcactctgtacacgctggtctttgaggagaaccccttctgtgagctggaggagaccgtggaggctgccatacacccgccatacctggtgtccaaagaactcatgagccttgtgtctgggctgctgcagccagtccctgagagacgcaccaccttggagaagctggtgacagacccgtgggtaacacagcctgtgaatcttgctgactatacatgggaagaggtgtttcgagtaaacaagccagaaagtggagttctgtccgctgcgagcctggagatggggaacaggagcctgagtgatgtggcccaggctcaggagctttgtgggggccccgttccaggcgaggctcctaatggccaaggctgtttgcatcccggggatccccgtctgctgaccagctaaacaccaatttcttcctgcttttctccacttggtttggaaaatcacacagttttcaggctccatctgtttggagaaaatacattctgaagcatccccaattcaccttctaaaaactcatgtgcaggtttgataaacaccagaacagaagacagtgatgctgtattattttagatttattacatagatttggaattcacttttttcatgacctagaaaaaaacattccagtgttcaactgttttatattattaaagggcttttaatttgtga

SEQ ID NO: 327736 - DNA, 2221 bp, Homo sapiens
  misc_feature (18)..(18): n is a, c, g, or t
  misc_feature (218)..(218): n is a, c, g, or t
  misc_feature (238)..(238): n is a, c, g, or t
  misc_feature (303)..(303): n is a, c, g, or t
  misc_feature (306)..(306): n is a, c, g, or t
  misc_feature (308)..(308): n is a, c, g, or t
  misc_feature (324)..(324): n is a, c, g, or t
  misc_feature (335)..(335): n is a, c, g, or t
  misc_feature (357)..(357): n is a, c, g, or t
tctaaacatcttgaaatntctctaaaaaacagaaacaacacaaaaacaaaaactgctgaaactgattttcttgctctagcccctacagctctcatccgtccgctcagcttccctgcggtctgtgctagccaccccaccaccctgctgactcagcctgggggcccgactttcacccacgctgctgctctggcctctgtgatctgccctcttgagccctnccctcccctcccctcccctncctcccagcccctcttctccgagtccagcccggggctctgtccgtgccactcttctcactgctgnggntnctcttggctcccttgnctaattctggntctgagaacaggctgctgcttnccagacctcttctggggacagacccccagctgcggacctggagacgcatggccttggccagtgcaggggcagggctgtgggtgctggtgacctggctctggtgcgtgcttggcagcaacttcacctcaccaagccttgctcttctgtgcaaaatgaaagtcatatttatcttgctaggttgttgtgaggatttgggttaagccatgtaaaatgctggtacagcattggcatctctaggtacccaatagatggtagcatggatgaggatgtttacggtgacaggaaataaatggtagcatggatgaggatgtttacggtgacaggaaataaatggtagcgtggatgaggatgtttacggcgacaggaaataaatggtagcgtggatgaggatgtttacggtgacaggaaataaatggtagcgtggatgaggatgtttacggtgacaggaaataaatggtagcgtggatgaggatgtttacggcgacaggaagtaacaatagtcctttgggtgtcttctccctgaagcttgctcctccatttggcccactgtgtgaacacccaccttcaccacgtccttcttgtttgctttcatccttcggtgtttttccctgttcagtctcgtcctgcagcacccttcacatcgtcgccacagccatcttcctaaagggcatgtgtgtccatggtcacaccaagcccgttcacaccaagatcgtgaacatgcctgatcacgtctgaagggcacgtgaccctgttctgaagtggcctgcagctcccgtggccctcagcaaagccaatggacgtgtactctgcttcctccaggaagccctccccccgctcccccctctggtagacacgtcttgtggttggtgtccacaaggaagttcctgattagcctcggagctgcccgatggcctctccactcctggcacatggcctgctggctggcctggggcagaactacagagggccggagctggagatgtggtctctgggagtcactctgtacacgctggtctttgaggagaaccccttctgtgagctggaggagaccgtggaggctgccatacacccgccatacctggtgtccaaagaactcatgagccttgtgtctgggctgctgcagccagtccctgagagacgcaccaccttggagaagctggtgacagacccgtgggtaacacagcctgtgaatcttgctgactatacatgggaagaggtgtttcgagtaaacaagccagaaagtggagttctgtccgctgcgagcctggagatggggaacaggagcctgagtgatgtggcccaggctcaggagctttgtgggggccccgttccaggcgaggctcctaatggccaaggctgtttgcatcccggggatccccgtctgctgaccagctaaacaccaatttcttcctgcttttctccacttggtttggaaaatcacacagttttcaggctccatctgtttggagaaaatacattctgaagcatccccaattcaccttctaaaaactcatgtgcaggtttgataaacaccagaacagaagacagtgatgctgtattattttagatttattacatagatttggaattcacttttttcatgacctagaaaaaaacattccagtgttcaactgttttatattattaaagggcttttaatttgtgaacttctgaaggcatgagtgttttctctttctacttttgtatatgtgcatgttttgtttcctctgacttggtatatgctcatctgagtgacggatatgtgaaatttgtagaactggttagtcaaatggccagactatttcattaatttatttcctcaaatgcttttcaaattaaagcacctttgttagtaaacagttat

SEQ ID NO: 327737 - DNA, 941 bp, Homo sapiens
tctttttagttaggtttatttattttgatgacaggaataatatctatttcaataaaataccgcggggctgaccatacaagaaatcaagcactagagaaagtcccgaggcagaggattcgtgctgaaggtggagcccttggctggaggggctgtcgctgaccagccagactccatgtcactggagtgggccagctgagcctctgctctgctgtggggagaagcggcgtccttgggtgtgtggctgagtttgcatctctgcagtctggggagcctgtgagtcgggggccggcctgggcagggcctcctctcgggggaaaagtggagttctgtccgctgcgagcctggagatggggaacaggagcctgagtgatgtggcccaggctcaggagctttgtgggggccccgttccaggcgaggctcctaatggccaaggctgtttgcatcccggggatccccgtctgctgaccagctaaacaccaatttcttcctgcttttctccacttggtttggaaaatcacacagttttcaggctccatctgtttggagaaaatacattctgaagcatccccaattcaccttctaaaaactcatgtgcaggtttgataaacaccagaacagaagacagtgatgctgtattattttagatttattacatagatttggaattcacttttttcatgacctagaaaaaaacattccagtgttcaactgttttatattattaaagggcttttaatttgtgaacttctgaaggcatgagtgttttctctttctacttttgtatatgtgcatgttttgtttcctctgacttggtatatgctcatctgagtgacggatatgtgaaatttgtagaactggttagtcaaatggccagactatttcattaatttatttcctcaaatgcttttcaaattaaagcacctttgttagtaaacagttat

SEQ ID NO: 327738 - DNA, 399 bp, Homo sapiens
acctggtggttgcctaagtggattctggggaccatgttcagacacgcagtgagagtgtgtgttagctgtgcagactgacttaatccttagatctttttgcaggagttgagggcaagggctgtgtgctttgcctgtttcagaaggtggactctggcagctgtgtgaagtctaaagcttcgcttcgcttctcttttcagaagacagatggagctcctattgtctatcatcactggctgcccagaatatttgtacaagtaaactgcactgccctgctgcccctgagcacacggacccgtccgaaccgcggggcagtgtgtcctgctgctccctgctgcggggactgtcctcagggtggtcctcacctctgcttccggcccctgtgtgcaaccctaacaaggc

SEQ ID NO: 327739 - DNA, 4539 bp, Homo sapiens
ggaagggctcctttccgtggtgtgtagccggcttggcgtgaccctcgcctgatccagttgttagagttggaagcttggcagttggcctcccttcttcccatggaggacgggggcttaacagcctttgaagaggaccagagatgcctttcccagagcctccccttgccagtgtcagcagagggcccagctgcacagaccactgctgagcccagcaggtcgttttcctcagcccacagacacctgagcagaaggaatgggctttccagactctgccagagcaggacagcgctctctgaagacagatggagctcctattgtctatcatcactggctgcccagaatatttgtacaagtaaactgcactgccctgctgcccctgagcacacggacccgtccgaaccgcggggcagtgtgtcctgctgctccctgctgcggggactgtcctcagggtggtcctcacctctgcttccggcccctgtgtgcaaccctaacaaggccatcttcacggtggatgccaagaccacagagatcctggttgctaacgacaaagcttgcgggctcctggggtacagcagccaggacctgattggccagaagctcacgcagttctttctgaggtcagattctgatgtggtggaggccctcagcgaggagcacatggaggccgacggccacgctgcggtggtgtttggcacggtggtggacatcatcagccgtagtggggagaagattccagtgtctgtgtggatgaagaggatgcggcaggagcgccgcctatgctgcgtggtggtcctggagcccgtggagagggtctcgacctgggtcgctttccagagcgatggcaccgtcacgtcatgtgacagtctctttgctcatcttcacgggtacgtgtctggggaggacgtggctgggcagcatatcacagacctgatcccttctgtgcagctccctccttctggccagcacatcccaaagaatctcaagattcagaggtctgttggaagagccagggacggtaccaccttccctctgagcttaaagctgaaatcccaacccagcagcgaggaggcgaccaccggtgaggcggcccctgtgagcggctaccgggcatctgtctgggtgttctgcaccatcagtggcctcatcaccctcctgccggatgggaccatccacggcatcaaccacagcttcgcgctgacactgtttggttacggaaagacggagctcctgggcaagaatatcactttcctgattcctggtttctacagctacatggaccttgcgtacaacagctcattacagctcccagacctggccagctgcctggacgtcggcaatgagagtgggtgtggggagagaaccttggacccgtggcagggccaggacccagctgaggggggccaggatccaaggattaatgtcgtgcttgctggtggccacgttgtgccccgagatgagatccggaagctgatggaaagccaagacatcttcaccgggactcagactgagctgattgctggaggccagctcctttcctgcctctcacctcagcctgctccaggggtggacaatgtcccagaaggaagcctgccagtgcacggtgaacaggcgctgcccaaggaccagcaaatcactgccttggggagagaggaacctgtggcaatagagagccccggacaggatcttctgggagaaagcaggtctgaaccagtggatgtgaagccatttgcttcctgcgaagattctgaagctccagtcccagctgaggatgggggcagtgatgctggcatgtgtggcctgtgtcagaaggcccagctagagcggatgggagtcagtggtcccagcggttcagacctttgggctggggctgccgtggccaagccccaggccaagggtcagctggcggggggcagcctcctgatgcactgcccttgctatgggagtgaatggggcttgtggtggcgaagccaggacttggcccccagcccctctgggatggcaggcctctcgtttgggacacctactctagatgagccgtggctgggagtggaaaacgaccgagaagagctgcagacctgcttgattaaggagcagctgtcccagttgagccttgcaggagccctggatgtcccccacgccgaactcgttccgacagagtgccaggctgtcaccgctcctgtgtcgtcctgcgatctgggaggcagagacctgtgcggtggctgcacgggcagctcctcagcctgctatgccttggccacggacctccctgggggcctggaagcagtggaggcccaggaggttgatgtgaattcgttttcctggaacctcaaggaactctttttcagtgaccagacagaccaaacgtcatcaaattgttcctgtgctacgtctgaactcagagagacaccctcttccttggcagtgggctccgatccagatgtaggcagtctccaggaacaggggtcgtgtgtcctggatgacagggagctgttactactgaccggcacctgtgttgaccttggccaaggccgacggttccgggagagctgtgtgggacatgatccaacagaaccgcttgaggtttgtttggtgtcctctgagcattatgcagcaagcgacagagaaagcccaggacacgttccttccacgttggatgctggccctgaggacacgtgcccatcagcagaggagccaaggctgaacgtccaggtcacctccacgcccgtgatcgtgatgcgcggggctgctggcctgcagcgggagatccaggagggtgcctactccgggagctgctaccatcgagatggcttacggctgagtatacagtttgaggtgaggcgggtggagctccagggccccacacctctgttctgctgctggctggtgaaagacctcctccacagccaacgcgactcagccgccaggacccgcctgttccttgccagcctgcccggctccacccactctaccgctgctgagctcaccggacccagcctggtggaagtgctcagagccagaccctggtttgaggagccccccaaggctgtggaactggaggggttggcggcctgtgagggcgagtactcccaaaagtacagtaccatgagcccgctgggcagtggggccttcggcttcgtgtggactgctgtggacaaggaaaaaaacaaggaggtggtggtgaagtttattaagaaggagaaggtcttggaggattgttggattgaggatcccaaacttgggaaagttactttagagatcgcaattctatccagggtggagcacgccaatatcatcaaggtattggatatatttgaaaaccaagggttcttccagcttgtgatggagaagcacggctccggcctagacctcttcgctttcatcgaccgccaccccaggctggatgagcccctggcgagctacatcttccgacaactagtgtcagcagtgggatacctgcgcttgaaggacatcatccaccgtgacatcaaggatgagaacatcgtgatcgccgaggacttcacaatcaagctgatagactttggctcggccgcctacttggaaaggggaaaattattttatactttttgtgggaccatcgagtactgtgcaccggaagttctcatggggaatccctacagagggccggagctggagatgtggtctctgggagtcactctgtacacgctggtctttgaggagaaccccttctgtgagctggaggagaccgtggaggctgccatacacccgccatacctggtgtccaaagaactcatgagccttgtgtctgggctgctgcagccagtccctgagagacgcaccaccttggagaagctggtgacagacccgtgggtaacacagcctgtgaatcttgctgactatacatgggaagaggtgtttcgagtaaacaagccagaaagtggagttctgtccgctgcgagcctggagatggggaacaggagcctgagtgatgtggcccaggctcaggagctttgtgggggccccgttccaggcgaggctcctaatggccaaggctgtttgcatcccggggatccccgtctgctgaccagctaaacaccaatttcttcctgcttttctccacttggtttggaaaatcacacagttttcaggctccatctgtttggagaaaatacattctgaagcatccccaattcaccttctaaaaactcatgtgcaggtttgataaacaccagaacagaagacagtgatgctgtattattttagatttattacatagatttggaattcacttttttcatgacctagaaaaaaacattccagtgttcaactgttttatattattaaagggcttttaatttgtgaacttctgaaggcatgagtgttttctctttctacttttgtatatgtgcatgttttgtttcctctgacttggtatatgctcatctgagtgacggatatgtgaaatttgtagaactggttagtcaaatggccagactatttcattaatttatttcctcaaatgcttttcaaattaaagcacctttgttagtaaacagttat

SEQ ID NO: 327740 - DNA, 4135 bp, Homo sapiens
ggaagggctcctttccgtggtgtgtagccggcttggcgtgaccctcgcctgatccagttgttagagttggaagcttggcagttggcctcccttcttcccatggaggacgggggcttaacagcctttgaagaggaccagagatgcctttcccagagcctccccttgccagtgtcagcagagggcccagctgcacagaccactgctgagcccagcaggtcgttttcctcagcccacagacacctgagcagaaggaatgggctttccagactctgccagagcaggacagcgctctctggtggacatcatcagccgtagtggggagaagattccagtgtctgtgtggatgaagaggatgcggcaggagcgccgcctatgctgcgtggtggtcctggagcccgtggagagggtctcgacctgggtcgctttccagagcgatggcaccgtcacgtcatgtgacagtctctttgctcatcttcacgggtacgtgtctggggaggacgtggctgggcagcatatcacagacctgatcccttctgtgcagctccctccttctggccagcacatcccaaagaatctcaagattcagaggtctgttggaagagccagggacggtaccaccttccctctgagcttaaagctgaaatcccaacccagcagcgaggaggcgaccaccggtgaggcggcccctgtgagcggctaccgggcatctgtctgggtgttctgcaccatcagtggcctcatcaccctcctgccggatgggaccatccacggcatcaaccacagcttcgcgctgacactgtttggttacggaaagacggagctcctgggcaagaatatcactttcctgattcctggtttctacagctacatggaccttgcgtacaacagctcattacagctcccagacctggccagctgcctggacgtcggcaatgagagtgggtgtggggagagaaccttggacccgtggcagggccaggacccagctgaggggggccaggatccaaggattaatgtcgtgcttgctggtggccacgttgtgccccgagatgagatccggaagctgatggaaagccaagacatcttcaccgggactcagactgagctgattgctggaggccagctcctttcctgcctctcacctcagcctgctccaggggtggacaatgtcccagaaggaagcctgccagtgcacggtgaacaggcgctgcccaaggaccagcaaatcactgccttggggagagaggaacctgtggcaatagagagccccggacaggatcttctgggagaaagcaggtctgaaccagtggatgtgaagccatttgcttcctgcgaagattctgaagctccagtcccagctgaggatgggggcagtgatgctggcatgtgtggcctgtgtcagaaggcccagctagagcggatgggagtcagtggtcccagcggttcagacctttgggctggggctgccgtggccaagccccaggccaagggtcagctggcggggggcagcctcctgatgcactgcccttgctatgggagtgaatggggcttgtggtggcgaagccaggacttggcccccagcccctctgggatggcaggcctctcgtttgggacacctactctagatgagccgtggctgggagtggaaaacgaccgagaagagctgcagacctgcttgattaaggagcagctgtcccagttgagccttgcaggagccctggatgtcccccacgccgaactcgttccgacagagtgccaggctgtcaccgctcctgtgtcgtcctgcgatctgggaggcagagacctgtgcggtggctgcacgggcagctcctcagcctgctatgccttggccacggacctccctgggggcctggaagcagtggaggcccaggaggttgatgtgaattcgttttcctggaacctcaaggaactctttttcagtgaccagacagaccaaacgtcatcaaattgttcctgtgctacgtctgaactcagagagacaccctcttccttggcagtgggctccgatccagatgtaggcagtctccaggaacaggggtcgtgtgtcctggatgacagggagctgttactactgaccggcacctgtgttgaccttggccaaggccgacggttccgggagagctgtgtgggacatgatccaacagaaccgcttgaggtttgtttggtgtcctctgagcattatgcagcaagcgacagagaaagcccaggacacgttccttccacgttggatgctggccctgaggacacgtgcccatcagcagaggagccaaggctgaacgtccaggtcacctccacgcccgtgatcgtgatgcgcggggctgctggcctgcagcgggagatccaggagggtgcctactccgggagctgctaccatcgagatggcttacggctgagtatacagtttgaggtgaggcgggtggagctccagggccccacacctctgttctgctgctggctggtgaaagacctcctccacagccaacgcgactcagccgccaggacccgcctgttccttgccagcctgcccggctccacccactctaccgctgctgagctcaccggacccagcctggtggaagtgctcagagccagaccctggtttgaggagccccccaaggctgtggaactggaggggttggcggcctgtgagggcgagtactcccaaaagtacagtaccatgagcccgctgggcagtggggccttcggcttcgtgtggactgctgtggacaaggaaaaaaacaaggaggtggtggtgaagtttattaagaaggagaaggtcttggaggattgttggattgaggatcccaaacttgggaaagttactttagagatcgcaattctatccagggtggagcacgccaatatcatcaaggtattggatatatttgaaaaccaagggttcttccagcttgtgatggagaagcacggctccggcctagacctcttcgctttcatcgaccgccaccccaggctggatgagcccctggcgagctacatcttccgacaactagtgtcagcagtgggatacctgcgcttgaaggacatcatccaccgtgacatcaaggatgagaacatcgtgatcgccgaggacttcacaatcaagctgatagactttggctcggccgcctacttggaaaggggaaaattattttatactttttgtgggaccatcgagtactgtgcaccggaagttctcatggggaatccctacagagggccggagctggagatgtggtctctgggagtcactctgtacacgctggtctttgaggagaaccccttctgtgagctggaggagaccgtggaggctgccatacacccgccatacctggtgtccaaagaactcatgagccttgtgtctgggctgctgcagccagtccctgagagacgcaccaccttggagaagctggtgacagacccgtgggtaacacagcctgtgaatcttgctgactatacatgggaagaggtgtttcgagtaaacaagccagaaagtggagttctgtccgctgcgagcctggagatggggaacaggagcctgagtgatgtggcccaggctcaggagctttgtgggggccccgttccaggcgaggctcctaatggccaaggctgtttgcatcccggggatccccgtctgctgaccagctaaacaccaatttcttcctgcttttctccacttggtttggaaaatcacacagttttcaggctccatctgtttggagaaaatacattctgaagcatccccaattcaccttctaaaaactcatgtgcaggtttgataaacaccagaacagaagacagtgatgctgtattattttagatttattacatagatttggaattcacttttttcatgacctagaaaaaaacattccagtgttcaactgttttatattattaaagggcttttaatttgtgaacttctgaaggcatgagtgttttctctttctacttttgtatatgtgcatgttttgtttcctctgacttggtatatgctcatctgagtgacggatatgtgaaatttgtagaactggttagtcaaatggccagactatttcattaatttatttcctcaaatgcttttcaaattaaagcacctttgttagtaaacagttat

SEQ ID NO: 327741 - DNA, 4901 bp, Homo sapiens
ggaagggctcctttccgtggtgtgtagccggcttggcgtgaccctcgcctgatccagttgttagagttggaagcttggcagttggcctcccttcttcccatggaggacgggggcttaacagcctttgaagaggaccagagatgcctttcccagagcctccccttgccagtgtcagcagagggcccagctgcacagaccactgctgagcccagcaggtcgttttcctcagcccacagacacctgagcagaaggaatgggctttccagactctgccagagcaggacagcgctctctgaagacagatggagctcctattgtctatcatcactggctgcccagaatatttgtacaagtaaactgcactgccctgctgcccctgagcacacggacccgtccgaaccgcggggcagtgtgtcctgctgctccctgctgcggggactgtcctcagggtggtcctcacctctgcttccggcccctgtgtgcaaccctaacaaggccatcttcacggtggatgccaagaccacagagatcctggttgctaacgacaaagcttgcgggctcctggggtacagcagccaggacctgattggccagaagctcacgcagttctttctgaggtcagattctgatgtggtggaggccctcagcgaggagcacatggaggccgacggccacgctgcggtggtgtttggcacggtggtggacatcatcagccgtagtggggagaagattccagtgtctgtgtggatgaagaggatgcggcaggagcgccgcctatgctgcgtggtggtcctggagcccgtggagagggtctcgacctgggtcgctttccagagcgatggcaccgtcacgtcatgtgacagtctctttgctcatcttcacgggtacgtgtctggggaggacgtggctgggcagcatatcacagacctgatcccttctgtgcagctccctccttctggccagcacatcccaaagaatctcaagattcagaggtctgttggaagagccagggacggtaccaccttccctctgagcttaaagctgaaatcccaacccagcagcgaggaggcgaccaccggtgaggcggcccctgtgagcggctaccgggcatctgtctgggtgttctgcaccatcagtggcctcatcaccctcctgccggatgggaccatccacggcatcaaccacagcttcgcgctgacactgtttggttacggaaagacggagctcctgggcaagaatatcactttcctgattcctggtttctacagctacatggaccttgcgtacaacagctcattacagctcccagacctggccagctgcctggacgtcggcaatgagagtgggtgtggggagagaaccttggacccgtggcagggccaggacccagctgaggggggccaggatccaaggattaatgtcgtgcttgctggtggccacgttgtgccccgagatgagatccggaagctgatggaaagccaagacatcttcaccgggactcagactgagctgattgctggaggccagctcctttcctgcctctcacctcagcctgctccaggggtggacaatgtcccagaaggaagcctgccagtgcacggtgaacaggcgctgcccaaggaccagcaaatcactgccttggggagagaggaacctgtggcaatagagagccccggacaggatcttctgggagaaagcaggtctgaaccagtggatgtgaagccatttgcttcctgcgaagattctgaagctccagtcccagctgaggatgggggcagtgatgctggcatgtgtggcctgtgtcagaaggcccagctagagcggatgggagtcagtggtcccagcggttcagacctttgggctggggctgccgtggccaagccccaggccaagggtcagctggcggggggcagcctcctgatgcactgcccttgctatgggagtgaatggggcttgtggtggcgaagccaggacttggcccccagcccctctgggatggcaggcctctcgtttgggacacctactctagatgagccgtggctgggagtggaaaacgaccgagaagagctgcagacctgcttgattaaggagcagctgtcccagttgagccttgcaggagccctggatgtcccccacgccgaactcgttccgacagagtgccaggctgtcaccgctcctgtgtcgtcctgcgatctgggaggcagagacctgtgcggtggctgcacgggcagctcctcagcctgctatgccttggccacggacctccctgggggcctggaagcagtggaggcccaggaggttgatgtgaattcgttttcctggaacctcaaggaactctttttcagtgaccagacagaccaaacgtcatcaaattgttcctgtgctacgtctgaactcagagagacaccctcttccttggcagtgggctccgatccagatgtaggcagtctccaggaacaggggtcgtgtgtcctggatgacagggagctgttactactgaccggcacctgtgttgaccttggccaaggccgacggttccgggagagctgtgtgggacatgatccaacagaaccgcttgaggtttgtttggtgtcctctgagcattatgcagcaagcgacagagaaagcccaggacacgttccttccacgttggatgctggccctgaggacacgtgcccatcagcagaggagccaaggctgaacgtccaggtcacctccacgcccgtgatcgtgatgcgcggggctgctggcctgcagcgggagatccaggagggtgcctactccgggagctgctaccatcgagatggcttacggctgagtatacagtttgaggtgaggcgggtggagctccagggccccacacctctgttctgctgctggctggtgaaagacctcctccacagccaacgcgactcagccgccaggacccgcctgttccttgccagcctgcccggctccacccactctaccgctgctgagctcaccggacccagcctggtggaagtgctcagagccagaccctggtttgaggagccccccaaggctgtggaactggaggggttggcggcctgtgagggcgagtactcccaaaagtacagtaccatgagcccgctgggcagtggggccttcggcttcgtgtggactgctgtggacaaggaaaaaaacaaggaggtggtggtgaagtttattaagaaggagaaggtcttggaggattgttggattgaggatcccaaacttgggaaagttactttagagatcgcaattctatccagggtggagcacgccaatatcatcaaggtattggatatatttgaaaaccaagggttcttccagcttgtgatggagaagcacggctccggcctagacctcttcgctttcatcgaccgccaccccaggctggatgagcccctggcgagctacatcttccgacaagtgagagcaggccagagccgtctagtgtcagcagtgggatacctgcgcttgaaggacatcatccaccgtgacatcaaggatgagaacatcgtgatcgccgaggacttcacaatcaagctgatagactttggctcggccgcctacttggaaaggggaaaattattttatactttttgtgggaccatcgagtactgtgcaccggaagttctcatggggaatcctctcgtcctgcagcacccttcacatcgtcgccacagccatcttcctaaagggcatgtgtgtccatggtcacaccaagcccgttcacaccaagatcgtgaacatgcctgatcacgtctgaagggcacgtgaccctgttctgaagtggcctgcagctcccgtggccctcagcaaagccaatggacgtgtactctgcttcctccaggaagccctccccccgctcccccctctggtagacacgtcttgtggttggtgtccacaaggaagttcctgattagcctcggagctgcccgatggcctctccactcctggcacatggcctgctggctggcctggggcagaactacagagggccggagctggagatgtggtctctgggagtcactctgtacacgctggtctttgaggagaaccccttctgtgagctggaggagaccgtggaggctgccatacacccgccatacctggtgtccaaagaactcatgagccttgtgtctgggctgctgcagccagtccctgagagacgcaccaccttggagaagctggtgacagacccgtgggtaacacagcctgtgaatcttgctgactatacatgggaagaggtgtttcgagtaaacaagccagaaagtggagttctgtccgctgcgagcctggagatggggaacaggagcctgagtgatgtggcccaggctcaggagctttgtgggggccccgttccaggcgaggctcctaatggccaaggctgtttgcatcccggggatccccgtctgctgaccagctaaacaccaatttcttcctgcttttctccacttggtttggaaaatcacacagttttcaggctccatctgtttggagaaaatacattctgaagcatccccaattcaccttctaaaaactcatgtgcaggtttgataaacaccagaacagaagacagtgatgctgtattattttagatttattacatagatttggaattcacttttttcatgacctagaaaaaaacattccagtgttcaactgttttatattattaaagggcttttaatttgtgaacttctgaaggcatgagtgttttctctttctacttttgtatatgtgcatgttttgtttcctctgacttggtatatgctcatctgagtgacggatatgtgaaatttgtagaactggttagtcaaatggccagactatttcattaatttatttcctcaaatgcttttcaaattaaagcacctttgttagtaaacagttat

SEQ ID NO: 327742 - DNA, 1435 bp, Homo sapiens
tacgcgaaagctaacagaatctgcggtgctctgctggcgactggcaggacgcggtgcagagagcggacttccgcgacgcgggtttttttttttacttgaatgtaaataccaatcaagatacattgaaataagaaggtcctacagtgtaggggaagcaatggaagaacttctacctgatggacaaatatgggctaatatggatccagaagaacgaatgttggcagctgctacagcttttacccacatctgtgcagggcagggtgaaggagatgtcaggagagaagcccaatctatccaatatgatccctacagtaaagcttcagtagccccagggaagcgacctgctcttcctgtgcaactacagtacccacatgtagaaagtaatgtcccttcagaaacagtctctgaggcctcccaaagactccgaaagccagtgatgaagagaaaggtgctgcgcagaaagccagatggggaagtattagtaacagatgagtcgattatcagtgaatcagaatctggtacagaaaatgatcaggatctctgggacttaagacaaaggctgatgaatgtacagttccaggaagacaaggaatcttcatttgatgtttcacaaaaatttaacctaccacatgaataccaaggaatttctcaagatcagctcatttgctctctacaaagagaaggaatgggctctccagcttacgaacaagacctgattgttgccagcagacccaagtcctttattctcccaaagctggaccagttaagccgaaaccggggcaagacagaccgggtagcccggtattttgagtacaaacgggactgggactcaatacgtttacctggtgaagatcatagaaaggaattacgctggggtgtccgagagcagatgctttgtcgagcagaaccccaatccaaacctcagcatatatatgtcccaaacaattatctagtaccaacagagaagaaaaggtctgcactccgttggggtgttcgttgtgaccttgcaaatggtgtcatacccaggaagcttcccttccctctttctccttcttaaatctttttaaacttctttcacaggattgtttgagataacctagctctttatatcttcccttttaaatagaaacaactgtcttgagaagctcttcgaaacattttatggtaaggacttcacctatcattggtctttcctagctatatatcacattggtatcagatgatacttccaaattgccactcaaatccagcaattgcaagataaatcatatcagagaaagaacaacagacctggtctttctattttgtcaaattagtaagggccctttgtgtcctgtaactttttttacctatcaatatgagttgctgtgcttcagtgtgtgttttttaagttgctgggcattacacttaccaattaaagaattttggaaattca

SEQ ID NO: 327743 - DNA, 1772 bp, Homo sapiens
tacgcgaaagctaacagaatctgcggtgctctgctggcgactggcaggacgcggtgcagagagcggacttccgcgacgcgggtttttttttttacttgaatgtaaataccaatcaagatacattgaaataagaaggtcctacagtgtaggggaagcaatggaagaacttctacctgatggacaaatatgggctaatatggatccagaagaacgaatgttggcagctgctacagcttttacccacatctgtgcagggcagggtgaaggagatgtcaggagagaagcccaatctatccaatatgatccctacagtaaagcttcagtagccccagggaagcgacctgctcttcctgtgcaactacagtacccacatgtagaaagtaatgtcccttcagaaacagtctctgaggcctcccaaagactccgaaagccagtgatgaagagaaaggtgctgcgcagaaagccagatggggaagtattagtaacagatgagtcgattatcagtgaatcagaatctggtacagaaaatgatcaggatctctgggacttaagacaaaggctgatgaatgtacagttccaggaagacaaggaatcttcatttgatgtttcacaaaaatttaacctaccacatgaataccaaggaatttctcaagatcagctcatttgctctctacaaagagaaggaatgggctctccagcttacgaacaagacctgattgttgccagcagacccaagtcctttattctcccaaagctggaccagttaagccgaaaccggggcaagacagaccgggtagcccggtattttgagtacaaacgggactgggactcaatacgtttacctggtgaagatcatagaaaggaattacgctggggtgtccgagagcagatgctttgtcgagcagaaccccaatccaaacctcagcatatatatgtcccaaacaattatctagtaccaacagagaagaaaaggtctgcactccgttggggtgttcgttgtgaccttgcaaatggtgtcatacccaggaagcttcccttccctctttctccttcttaaatctttttaaacttctttcacaggattgtttgagataacctagctctttatatcttcccttttaaatagaaacaactgtcttgagaagctcttcgaaacattttatggtaaggacttcacctatcattggtctttcctagctatatatcacattggtatcagatgatacttccaaattgccactcaaatccagcaattgcaagataaatcatatcagagaaagaacaacagacctggtctttctattttgtcaaattagtaagggccctttgtgtcctgtaactttttttacctatcaatatgagttgctgtgcttcagtgtgtgttttttaagttgctgggcattacacttaccaattaaagaattttggaaattcaaaaaaacaaaaaaaaggccggccgccaagtcttctaccaccacgatggtcacctatggagccagggatacttgttcgatgggatctcgcctgggcaaaatgcattcctcctcaagtaaccggagaccttgcctggagcccacgacaagtgttggtccagtcatggttgcgaaaaggtaagagcctccctcaatgcaaaaatcgagtggctgcaacgcaggatgaaaactcggggtaaataggatccacacgaagaacgtgacacatatcgaactgtagacagaagagacaacaacgaaccattgcaactatcaattagacttatagataccatcacc

SEQ ID NO: 327744 - DNA, 1739 bp, Homo sapiens
ggaggccaaggcgggcagatcacctgaggttaggagttcaagatcagcctggccaacatggcgaaaccctgtctctattaaaaataccaaaattagctgggcatggtggcacgcgcctgtaataccagctactcaggaggctgaggcaggagagtcacttgaacccgggaggcggaggctgcagtgagtcgagatcgtgccactgcactccagcctgggcgacaagagcgagactctgtctcaaaaaaaaaagagtggttaacaagcatgatgatacaaccagttgaaagcaatatttgagttcataaagaagttgatgagttgataaaccaacaacacctaattggggaaagcataaggaagagagctgtgttgcaatcaaaaggtttttttttttacttgaatgtaaataccaatcaagatacattgaaataagaaggtcctacagtgtaggggaagcaatggaagaacttctacctgatggacaaatatgggctaatatggatccagaagaacgaatgttggcagctgctacagcttttacccacatctgtgcagggcagggtgaaggagatgtcaggagagaagcccaatctatccaatatgatccctacagtaaagcttcagtagccccagggaagcgacctgctcttcctgtgcaactacagtacccacatgtagaaagtaatgtcccttcagaaacagtctctgaggcctcccaaagactccgaaagccagtgatgaagagaaaggtgctgcgcagaaagccagatggggaagtattagtaacagatgagtcgattatcagtgaatcagaatctggtacagaaaatgatcaggatctctgggacttaagacaaaggctgatgaatgtacagttccaggaagacaaggaatcttcatttgatgtttcacaaaaatttaacctaccacatgaataccaaggaatttctcaagatcagctcatttgctctctacaaagagaaggaatgggctctccagcttacgaacaagacctgattgttgccagcagacccaagtcctttattctcccaaagctggaccagttaagccgaaaccggggcaagacagaccgggtagcccggtattttgagtacaaacgggactgggactcaatacgtttacctggtgaagatcatagaaaggaattacgctggggtgtccgagagcagatgctttgtcgagcagaaccccaatccaaacctcagcatatatatgtcccaaacaattatctagtaccaacagagaagaaaaggtctgcactccgttggggtgttcgttgtgaccttgcaaatggtgtcatacccaggaagcttcccttccctctttctccttcttaaatctttttaaacttctttcacaggattgtttgagataacctagctctttatatcttcccttttaaatagaaacaactgtcttgagaagctcttcgaaacattttatggtaaggacttcacctatcattggtctttcctagctatatatcacattggtatcagatgatacttccaaattgccactcaaatccagcaattgcaagataaatcatatcagagaaagaacaacagacctggtctttctattttgtcaaattagtaagggccctttgtgtcctgtaactttttttacctatcaatatgagttgctgtgcttcagtgtgtgttttttaagttgctgggcattacacttaccaattaaagaattttggaaattca

SEQ ID NO: 327745 - DNA, 1808 bp, Homo sapiens
tggtggctgccggcccactgcggcgggagccctcgctccttttcccaccgtcgggacggtgcagagtggcagcttccctccgtggattccaggtcctgcctggcgagccgtccccaacgtctgcgttcctgagggaggcggccggggcagcgtgagctacaggcgatgtgcgcggcgggccgcagcccctggaggtcacggtgtgcgctggccgccgccgcggtctttgccccggtggcctttctgagctcctgggccgcgcccctgggaccaggcggaggccggggacggccccagggctggaggggagtcccgaaggccgctagcgacctgggtccaagccacgcccacggccaggcggggcgactgcgagctttgccgttgaaaggcggagcgtgtcttgtcgccttctagctgcaccttttgtggactgcagcatggaaccgtccaaggtgtttttttttttacttgaatgtaaataccaatcaagatacattgaaataagaaggtcctacagtgtaggggaagcaatggaagaacttctacctgatggacaaatatgggctaatatggatccagaagaacgaatgttggcagctgctacagcttttacccacatctgtgcagggcagggtgaaggagatgtcaggagagaagcccaatctatccaatatgatccctacagtaaagcttcagtagccccagggaagcgacctgctcttcctgtgcaactacagtacccacatgtagaaagtaatgtcccttcagaaacagtctctgaggcctcccaaagactccgaaagccagtgatgaagagaaaggtgctgcgcagaaagccagatggggaagtattagtaacagatgagtcgattatcagtgaatcagaatctggtacagaaaatgatcaggatctctgggacttaagacaaaggctgatgaatgtacagttccaggaagacaaggaatcttcatttgatgtttcacaaaaatttaacctaccacatgaataccaaggaatttctcaagatcagctcatttgctctctacaaagagaaggaatgggctctccagcttacgaacaagacctgattgttgccagcagacccaagtcctttattctcccaaagctggaccagttaagccgaaaccggggcaagacagaccgggtagcccggtattttgagtacaaacgggactgggactcaatacgtttacctggtgaagatcatagaaaggaattacgctggggtgtccgagagcagatgctttgtcgagcagaaccccaatccaaacctcagcatatatatgtcccaaacaattatctagtaccaacagagaagaaaaggtctgcactccgttggggtgttcgttgtgaccttgcaaatggtgtcatacccaggaagcttcccttccctctttctccttcttaaatctttttaaacttctttcacaggattgtttgagataacctagctctttatatcttcccttttaaatagaaacaactgtcttgagaagctcttcgaaacattttatggtaaggacttcacctatcattggtctttcctagctatatatcacattggtatcagatgatacttccaaattgccactcaaatccagcaattgcaagataaatcatatcagagaaagaacaacagacctggtctttctattttgtcaaattagtaagggccctttgtgtcctgtaactttttttacctatcaatatgagttgctgtgcttcagtgtgtgttttttaagttgctgggcattacacttaccaattaaagaattttggaaattca

SEQ ID NO: 327746 - DNA, 1384 bp, Homo sapiens
tacgcgaaagctaacagaatctgcggtgctctgctggcgactggcaggacgcggtgcagagagcggacttccgcgacgcggaaggtcctacagtgtaggggaagcaatggaagaacttctacctgatggacaaatatgggctaatatggatccagaagaacgaatgttggcagctgctacagcttttacccacatctgtgcagggcagggtgaaggagatgtcaggagagaagcccaatctatccaatatgatccctacagtaaagcttcagtagccccagggaagcgacctgctcttcctgtgcaactacagtacccacatgtagaaagtaatgtcccttcagaaacagtctctgaggcctcccaaagactccgaaagccagtgatgaagagaaaggtgctgcgcagaaagccagatggggaagtattagtaacagatgagtcgattatcagtgaatcagaatctggtacagaaaatgatcaggatctctgggacttaagacaaaggctgatgaatgtacagttccaggaagacaaggaatcttcatttgatgtttcacaaaaatttaacctaccacatgaataccaaggaatttctcaagatcagctcatttgctctctacaaagagaaggaatgggctctccagcttacgaacaagacctgattgttgccagcagacccaagtcctttattctcccaaagctggaccagttaagccgaaaccggggcaagacagaccgggtagcccggtattttgagtacaaacgggactgggactcaatacgtttacctggtgaagatcatagaaaggaattacgctggggtgtccgagagcagatgctttgtcgagcagaaccccaatccaaacctcagcatatatatgtcccaaacaattatctagtaccaacagagaagaaaaggtctgcactccgttggggtgttcgttgtgaccttgcaaatggtgtcatacccaggaagcttcccttccctctttctccttcttaaatctttttaaacttctttcacaggattgtttgagataacctagctctttatatcttcccttttaaatagaaacaactgtcttgagaagctcttcgaaacattttatggtaaggacttcacctatcattggtctttcctagctatatatcacattggtatcagatgatacttccaaattgccactcaaatccagcaattgcaagataaatcatatcagagaaagaacaacagacctggtctttctattttgtcaaattagtaagggccctttgtgtcctgtaactttttttacctatcaatatgagttgctgtgcttcagtgtgtgttttttaagttgctgggcattacacttaccaattaaagaattttggaaattca

SEQ ID NO: 327747 - DNA, 645 bp, Homo sapiens
tcccttttttacaatgataatacatttttgttttaccttagtttaattgtctggcagtactcttaaaacccgcaattatttttctctgattctcttcatttatattgggtgctataatggatgtcttcaaaggctaaattatacaccttaaaaaccatacttcagcagctttcccccttcttttcagcttcatctcttttttcttctctactagatctttctcgacagcataccaacatgctattacttctcccatcttaaaaaaaaaaactcttttaatctactatacttttcatcttatcaccccatttccctctgtctctttagagcaaaaattcctcagaagaatagtccaagccgggcacagtggctcttgcttgtaatcccaacactttgggaggctgatgcgtatagattacctcagctcaggagttccagaccaatccaggcaacctggtgaaaccccatctctacaaaaaatacaaaaaacaaaaaaattagctgggcgtggtggtacatgcctgtaatcccggctactgtggatgctgaagtgggagaatcacttgagcctgggatgttgaggctgcagtgagccatgagcatgccactgcactccagcctgggcaacagagtgagaccttgtct

SEQ ID NO: 327748 - DNA, 1380 bp, Homo sapiens
atatatggtagccactgtgtggagcaagatgagtgagtcatggatcacatttggaaggggcaaccttcagattatggtggtgacactactaggaagacaggaagtggaggttgggttgcctgcttgtgtacctggtgatggtattgtacttcagaaaacaggtgagggaggtaaatggccatgaagggagaatatatctggtagcctagtttggcaggtgacataggcttccaaggaatgaatagacatgagatgcaagcagaagcataggagtagctgagggaagatgacactcagcctggaccttgtgctaattcgccactctgtggccacaccacgatattgagatgacttttgtggggcctggggtgtttcattcagcctggtggatatggaggcaaataaggtcaccttgtgagagtcactaggcccgagattgacggccaatgggtctaggctttgaatggagttaggtggacagaagaaagtcataatttctgaagataacaaatgcagcacagaagtggaatagggccatgaatacctgaaaacactaacgttcttttttcctgtggatttatgcatggagggcttcgtataatgacttggtactaccactgctattaggaaccattggaattctgtgataattttggattgctttttaattcaccaagactactgtggatgatgtcagccacattatggtgtgagccctaaatttaaggtcaatatcatgtgctaccttcatatctggtgatactagtattacctcaaatggtctgagtacaaatcccccttcccactctgctcttttgtataatgtgtcctagcctaactacccttttaatcaagaggactaagcagagttcctgtttattatttatttgtagcaagtttgaatttcatttctacacacagagttaattcaaacaagccagttacagctgggtgtggtgtcgcacacctatggtcccagccactcgggaggctgaggtaggaggatccctgaaacctggaaagttcaggctgcagtgagctgtaattgcaccactacgctccagcaggagtgacagagcgagaccctgtctcaaaaattaaaaacaagccagttgcatcctttcaagggaatcaggggctatcacaccttcttgattcagaaaagcttacataccacagtccctggttgctctctcttatgcatagtgcaacccccatgtggctatctgtggtgagtggtgtcctcttctctcaagttgtgagcatatttgattaattaactttcttgatgacttatgttcagcatcaggtgttgtgtgtttggccatcactataaccctagggtaagactcctacccttatcagtagaagaaaggggga

SEQ ID NO: 327749 - DNA, 644 bp, Homo sapiens
cttcaagagacaggatcatcccctctgggtgattctcaagagctgcagatgttcatgctcggtacattgaactacttacaagatctggagactattacaggttcttaagtgagatgctgaagagtttggaagatctgaaggcacaatgatatacatactggctgttgtggtgactatgaccccattgatgtgtgtgaaattggaagcaaggtatgtgcaagaggtgaaataattggcgtggaagttctaggcatattggctatgattgacgaaggggaaaccgactggaaagtcattgccattaatgtggatgatcctgatgcagccaattataatgatatcaatgatgtcaaacggctgaaacctggctacttagaagctactgtggactggtttacaaggtataaggttcctgatggttaaccagaacaactgaggttgcgtctcacccgcagaatggcaagataaggactttgccattgatattattaaaagcactcatgaccattggaaagcattagtgactaagacaacgaatggcaaaggaatcagtagcatgaataccactttttctgagagcccctctcaagtgtgatcctgactcccgccagagtccacttgtggatgctatacgcaccatcctc

SEQ ID NO: 327750 - DNA, 8563 bp, Homo sapiens
cagttggaggaggagtatgaaaacctgctgaaagcgtcctttgagaggatggatcacctgcgacagctgcagaacatcattcaggccacgtccagggagatcatgtggatcaatgactgcgaggaggaggagctgctgtacgactggagcgacaagaacaccaacatcgctcagaaacaggaggccttctccatacgcatgagtcaactggaagttaaagaaaaagagctcaataagctgaaacaagaaagtgaccaacttgtcctcaatcagcatccagcttcagacaaaattgaggcctatatggacactctgcagacgcagtggagttggattcttcagatcaccaagtgcattgatgttcatctgaaagaaaatgctgcctactttcagttttttgaagaggcgcagtctactgaagcatacctgaaggggctccaggactccatcaggaagaagtacccctgcgacaagaacatgcccctgcagcacctgctggaacagatcaaggagctggagaaagaacgagagaaaatccttgaatacaagcgtcaggtgcagaacttggtaaacaagtctaagaagattgtacagctgaagcctcgtaacccagactacagaagcaataaacccattattctcagagctctctgtgactacaaacaagatcagaaaatcgtgcataagggggatgagtgtatcctgaaggacaacaacgagcgcagcaagtggtacgtgacgggcccgggaggcgttgacatgcttgttccctctgtggggctgatcatccctcctccgaacccactggccgtggacctctcttgcaagattgagcagtactacgaagccatcttggctctgtggaaccagctctacatcaacatgaagagcctggtgtcctggcactactgcatgattgacatagagaagatcagggccatgacaatcgccaagctgaaaacaatgcggcaggaagattacatgaagacgatagccgaccttgagttacattaccaagagttcatcagaaatagccaaggctcagagatgtttggagatgatgacaagcggaaaatacagtctcagttcaccgatgcccagaagcattaccagaccctggtcattcagctccctggctatccccagcaccagacagtgaccacaactgaaatcactcatcatggaacctgccaagatgtcaaccataataaagtaattgaaaccaacagagaaaatgacaagcaagaaacatggatgctgatggagctgcagaagattcgcaggcagatagagcactgcgagggcaggatgactctcaaaaacctccctctagcagaccaggggtcttctcaccacatcacagtgaaaattaacgagcttaagagtgtgcagaatgattcacaagcaattgctgaggttctcaaccagcttaaagatatgcttgccaacttcagaggttctgaaaagtactgctatttacagaatgaagtatttggactatttcagaaactggaaaatatcaatggtgttacagatggctacttaaatagcttatgcacagtaagggcactgctccaggctattctccaaacagaagacatgttaaaggtttatgaagccaggctcactgaggaggaaactgtctgcctggacctggataaagtggaagcttaccgctgtggactgaagaaaataaaaaatgacttgaacttgaagaagtcgttgttggccactatgaagacagaactacagaaagcccagcagatccactctcagacttcacagcagtatccactttatgatctggacttgggcaagttcggtgaaaaagtcacacagctgacagaccgctggcaaaggatagataaacagatcgactttagattatgggacctggagaaacaaatcaagcaattgaggaattatcgtgataactatcaggctttctgcaagtggctctatgatgctaaacgccgccaggattccttagaatccatgaaatttggagattccaacacagtcatgcggtttttgaatgagcagaagaacttgcacagtgaaatatctggcaaacgagacaaatcagaggaagtacaaaaaattgctgaactttgcgccaattcaattaaggattatgagctccagctggcctcatacacctcaggactggaaactctgctgaacatacctatcaagaggaccatgattcagtccccttctggggtgattctgcaagaggctgcagatgttcatgctcggtacattgaactacttacaagatctggagactattacaggttcttaagtgagatgctgaagagtttggaagatctgaagctgaaaaataccaagatcgaagttttggaagaggagctcagactggcccgagatgccaactcggaaaactgtaataagaacaaattcctggatcagaacctgcagaaataccaggcagagtgttcccagttcaaagcgaagcttgcgagcctggaggagctgaagagacaggctgagctggatgggaagtcggctaagcaaaatctagacaagtgctacggccaaataaaagaactcaatgagaagatcacccgactgacttatgagattgaagatgaaaagagaagaagaaaatctgtggaagacagatttgaccaacagaagaatgactatgaccaactgcagaaagcaaggcaatgtgaaaaggagaaccttggttggcagaaattagagtctgagaaagccatcaaggagaaggagtacgagattgaaaggttgagggttctactgcaggaagaaggcacccggaagagagaatatgaaaatgagctggcaaaggtaagaaaccactataatgaggagatgagtaatttaaggaacaagtatgaaacagagattaacattacgaagaccaccatcaaggagatatccatgcaaaaagaggatgattccaaaaatcttagaaaccagcttgatagactttcaagggaaaatcgagatctgaaggatgaaattgtcaggctcaatgacagcatcttgcaggccactgagcagcgaaggcgagctgaagaaaacgcccttcagcaaaaggcctgtggctctgagataatgcagaagaagcagcatctggagatagaactgaagcaggtcatgcagcagcgctctgaggacaatgcccggcacaagcagtccctggaggaggctgccaagaccattcaggacaaaaataaggagatcgagagactcaaagctgagtttcaggaggaggccaagcgccgctgggaatatgaaaatgaactgagtaaggtaagaaacaattatgatgaggagatcattagcttaaaaaatcagtttgagaccgagatcaacatcaccaagaccaccatccaccagctcaccatgcagaaggaagaggataccagtggctaccgggctcagatagacaatctcacccgagaaaacaggagcttatctgaagaaataaagaggctgaagaacactctaacccagaccacagagaatctcaggagggtggaagaagacatccaacagcaaaaggccactggctctgaggtgtctcagaggaaacagcagctggaggttgagctgagacaagtcactcagatgcgaacagaggagagcgtaagatataagcaatctcttgatgatgctgccaaaaccatccaggataaaaacaaggagatagaaaggttaaaacaactgatcgacaaagaaacaaatgaccggaaatgcctggaagatgaaaacgcgagattacaaagggtccagtatgacctgcagaaagcaaacagtagtgcgacggagacaataaacaaactgaaggttcaggagcaagaactgacacgcctgaggatcgactatgaaagggtttcccaggagaggactgtgaaggaccaggatatcacgcggttccagaactctctgaaagagctgcagctgcagaagcagaaggtggaagaggagctgaatcggctgaagaggaccgcgtcagaagactcctgcaagaggaagaagctggaggaagagctggaaggcatgaggaggtcgctgaaggagcaagccatcaaaatcaccaacctgacccagcagctggagcaggcatccattgttaagaagaggagtgaggatgacctccggcagcagagggacgtgctggatggccacctgagggaaaagcagaggacccaggaagagctgaggaggctctcttctgaggtcgaggccctgaggcggcagttactccaggaacaggaaagtgtcaaacaagctcacttgaggaatgagcatttccagaaggcgatagaagataaaagcagaagcttaaatgaaagcaaaatagaaattgagaggctgcagtctctcacagagaacctgaccaaggagcacttgatgttagaagaagaactgcggaacctgaggctggagtacgatgacctgaggagaggacgaagcgaagcggacagtgataaaaatgcaaccatcttggaactaaggagccagctgcagatcagcaacaaccggaccctggaactgcaggggctgattaatgatttacagagagagagggaaaatttgagacaggaaattgagaaattccaaaagcaggctttagaggcatctaataggattcaggaatcaaagaatcagtgtactcaggtggtacaggaaagagagagccttctggtgaaaatcaaagtcctggagcaagacaaggcaaggctgcagaggctggaggatgagctgaatcgtgcaaaatcaactctagaggcagaaaccagggtgaaacagcgcctggagtgtgagaaacagcaaattcagaatgacctgaatcagtggaagactcaatattcccgcaaggaggaggctattaggaagatagaatcggaaagagaaaagagtgagagagagaagaacagtcttaggagtgagatcgaaagactccaagcagagatcaagagaattgaagagaggtgcaggcgtaagctggaggattctaccagggagacacagtcacagttagaaacagaacgctcccgatatcagagggagattgataaactcagacagcgcccatatgggtcccatcgagagacccagactgagtgtgagtggaccgttgacacctccaagctggtgtttgatgggctgaggaagaaggtgacagcaatgcagctctatgagtgtcagctgatcgacaaaacaaccttggacaaactattgaaggggaagaagtcagtggaagaagttgcttctgaaatccagccattccttcggggtgcaggatctatcgctggagcatctgcttctcctaaggaaaaatactctttggtagaggccaagagaaagaaattaatcagcccagaatccacagtcatgcttctggaggcccaggcagctacaggtggtataattgatccccatcggaatgagaagctgactgtcgacagtgccatagctcgggacctcattgacttcgatgaccgtcagcagatatatgcagcagaaaaagctatcactggttttgatgatccattttcaggcaagacagtatctgtttcagaagccatcaagaaaaatttgattgatagagaaaccggaatgcgcctgctggaagcccagattgcttcagggggtgtagtagaccctgtgaacagtgtctttttgccaaaagatgtcgccttggcccgggggctgattgatagagatttgtatcgatccctgaatgatccccgagatagtcagaaaaactttgtggatccagtcaccaaaaagaaggtcagttacgtgcagctgaaggaacggtgcagaatcgaaccacatactggtctgctcttgctttcagtacagaagagaagcatgtccttccaaggaatcagacaacctgtgaccgtcactgagctagtagattctggtatattgagaccgtccactgtcaatgaactggaatctggtcagatttcttatgacgaggttggtgagagaattaaggacttcctccagggttcaagctgcatagcaggcatatacaatgagaccacaaaacagaagcttggcatttatgaggccatgaaaattggcttagtccgacctggtactgctctggagttgctggaagcccaagcagctactggctttatagtggatcctgttagcaacttgaggttaccagtggaggaagcctacaagagaggtctggtgggcattgagttcaaagagaagctcctgtctgcagaacgagctgtcactgggtataatgatcctgaaacaggaaacatcatctctttgttccaagccatgaataaggaactcatcgaaaagggccacggtattcgcttattagaagcacagatcgcaaccggggggatcattgacccaaaggagagccatcgtttaccagttgacatagcatataagaggggctatttcaatgaggaactcagtgagattctctcagatccaagtgatgataccaaaggattttttgaccccaacactgaagaaaatcttacctatctgcaactaaaagaaagatgcattaaggatgaggaaacagggctctgtcttctgcctctgaaagaaaagaagaaacaggtgcagacatcacaaaagaataccctcaggaagcgtagagtggtcatagttgacccagaaaccaataaagaaatgtctgttcaggaggcctacaagaagggcctaattgattatgaaaccttcaaagaactgtgtgagcaggaatgtgaatgggaagaaataaccatcacgggatcagatggctccaccagggtggtcctggtagatagaaagacaggcagtcagtatgatattcaagatgctattgacaagggccttgttgacaggaagttctttgatcagtaccgatccggcagcctcagcctcactcaatttgctgacatgatctccttgaaaaatggtgtcggcaccagcagcagcatgggcagtggtgtcagcgatgatgtttttagcagctcccgacatgaatcagtaagtaagatttccaccatatccagcgtcaggaatttaaccataaggagcagctctttttcagacaccctggaagaatcgagccccattgcagccatctttgacacagaaaacctggagaaaatctccattacagaaggtatagagcggggcatcgttgacagcatcacgggtcagaggcttctggaggctcaggcctgcacaggtggcatcatccacccaaccacgggccagaagctgtcacttcaggacgcagtctcccagggtgtgattgaccaagacatggccaccaggctgaagcctgctcagaaagccttcataggcttcgagggtgtgaagggaaagaagaagatgtcagcagcagaggcagtgaaagaaaaatggctcccgtatgaggctggccagcgcttcctggagttccagtacctcacgggaggtcttgttgacccggaagtgcatgggaggataagcaccgaagaagccatccggaaggggttcatagatggccgcgccgcacagaggctgcaagacaccagcagctatgccaaaatcctgacctgccccaaaaccaaattaaaaatatcctataaggatgccataaatcgctccatggtagaagatatcactgggctgcgccttctggaagccgcctccgtgtcgtccaagggcttacccagcccttacaacatgtcttcggctccgggctcccgctccggctcccgctcgggatctcgctccggatctcgctccgggtcccgcagtgggtcccggagaggaagctttgacgccacagggaattcttcctactcttattcctactcatttagcagtagttctattgggcactagtagtcagttgggagtggttgctataccttgacttcatttatatgaatttccactttattaaataatagaaaagaaaatcccggtgcttgcagtagagtgataggacattctatgcttacagaaaatatagccatgattgaaatcaaatagtaaaggctgttctggctttttatcttcttagctcatcttaaataagcagtacacttggatgcagtgcgtctgaagtgctaatcagttgtaacaatagcacaaatcgaacttaggatttgtttcttctcttctgtgtttcgatttttgatcaattctttaattttggaagcctataatacagttttctattcttggagataaaaattaaatggatcactgatattttagtcattctgcttctcatctaaatatttccatattctgtattaggagaaaattaccctcccagcaccagcccccctctcaaacccccaacccaaaaccaagcattttggaatgagtctcctttagtttcagagtgtggattgtataacccatatactcttcgatgtacttgtttggtttggtattaatttgactgtgcatgacagcggcaatcttttctttggtcaaagttttctgtttattttgcttgtcatattcgatgtactttaaggtgtctttatgaagtttgctattctggcaataaacttttagacttttg

SEQ ID NO: 327751 - DNA, 8714 bp, Homo sapiens
cagttggaggaggagtatgaaaacctgctgaaagcgtcctttgagaggatggatcacctgcgacagctgcagaacatcattcaggccacgtccagggagatcatgtggatcaatgactgcgaggaggaggagctgctgtacgactggagcgacaagaacaccaacatcgctcagaaacaggaggccttctccatacgcatgagtcaactggaagttaaagaaaaagagctcaataagctgaaacaagaaagtgaccaacttgtcctcaatcagcatccagcttcagacaaaattgaggcctatatggacactctgcagacgcagtggagttggattcttcagatcaccaagtgcattgatgttcatctgaaagaaaatgctgcctactttcagttttttgaagaggcgcagtctactgaagcatacctgaaggggctccaggactccatcaggaagaagtacccctgcgacaagaacatgcccctgcagcacctgctggaacagatcaaggagctggagaaagaacgagagaaaatccttgaatacaagcgtcaggtgcagaacttggtaaacaagtctaagaagattgtacagctgaagcctcgtaacccagactacagaagcaataaacccattattctcagagctctctgtgactacaaacaagatcagaaaatcgtgcataagggggatgagtgtatcctgaaggacaacaacgagcgcagcaagtggtacgtgacgggcccgggaggcgttgacatgcttgttccctctgtggggctgatcatccctcctccgaacccactggccgtggacctctcttgcaagattgagcagtactacgaagccatcttggctctgtggaaccagctctacatcaacatgaagagcctggtgtcctggcactactgcatgattgacatagagaagatcagggccatgacaatcgccaagctgaaaacaatgcggcaggaagattacatgaagacgatagccgaccttgagttacattaccaagagttcatcagaaatagccaaggctcagagatgtttggagatgatgacaagcggaaaatacagtctcagttcaccgatgcccagaagcattaccagaccctggtcattcagctccctggctatccccagcaccagacagtgaccacaactgaaatcactcatcatggaacctgccaagatgtcaaccataataaagtaattgaaaccaacagagaaaatgacaagcaagaaacatggatgctgatggagctgcagaagattcgcaggcagatagagcactgcgagggcaggatgactctcaaaaacctccctctagcagaccaggggtcttctcaccacatcacagtgaaaattaacgagcttaagagtgtgcagaatgattcacaagcaattgctgaggttctcaaccagcttaaagatatgcttgccaacttcagaggttctgaaaagtactgctatttacagaatgaagtatttggactatttcagaaactggaaaatatcaatggtgttacagatggctacttaaatagcttatgcacagtaagggcactgctccaggctattctccaaacagaagacatgttaaaggtttatgaagccaggctcactgaggaggaaactgtctgcctggacctggataaagtggaagcttaccgctgtggactgaagaaaataaaaaatgacttgaacttgaagaagtcgttgttggccactatgaagacagaactacagaaagcccagcagatccactctcagacttcacagcagtatccactttatgatctggacttgggcaagttcggtgaaaaagtcacacagctgacagaccgctggcaaaggatagataaacagatcgactttagattatgggacctggagaaacaaatcaagcaattgaggaattatcgtgataactatcaggctttctgcaagtggctctatgatgctaaacgccgccaggattccttagaatccatgaaatttggagattccaacacagtcatgcggtttttgaatgagcagaagaacttgcacagtgaaatatctggcaaacgagacaaatcagaggaagtacaaaaaattgctgaactttgcgccaattcaattaaggattatgagctccagctggcctcatacacctcaggactggaaactctgctgaacatacctatcaagaggaccatgattcagtccccttctggggtgattctgcaagaggctgcagatgttcatgctcggtacattgaactacttacaagatctggagactattacaggttcttaagtgagatgctgaagagtttggaagatctgaagctgaaaaataccaagatcgaagttttggaagaggagctcagactggcccgagatgccaactcggaaaactgtaataagaacaaattcctggatcagaacctgcagaaataccaggcagagtgttcccagttcaaagcgaagcttgcgagcctggaggagctgaagagacaggctgagctggatgggaagtcggctaagcaaaatctagacaagtgctacggccaaataaaagaactcaatgagaagatcacccgactgacttatgagattgaagatgaaaagagaagaagaaaatctgtggaagacagatttgaccaacagaagaatgactatgaccaactgcagaaagcaaggcaatgtgaaaaggagaaccttggttggcagaaattagagtctgagaaagccatcaaggagaaggagtacgagattgaaaggttgagggttctactgcaggaagaaggcacccggaagagagaatatgaaaatgagctggcaaaggtaagaaaccactataatgaggagatgagtaatttaaggaacaagtatgaaacagagattaacattacgaagaccaccatcaaggagatatccatgcaaaaagaggatgattccaaaaatcttagaaaccagcttgatagactttcaagggaaaatcgagatctgaaggatgaaattgtcaggctcaatgacagcatcttgcaggccactgagcagcgaaggcgagctgaagaaaacgcccttcagcaaaaggcctgtggctctgagataatgcagaagaagcagcatctggagatagaactgaagcaggtcatgcagcagcgctctgaggacaatgcccggcacaagcagtccctggaggaggctgccaagaccattcaggacaaaaataaggagatcgagagactcaaagctgagtttcaggaggaggccaagcgccgctgggaatatgaaaatgaactgagtaaggtaagaaacaattatgatgaggagatcattagcttaaaaaatcagtttgagaccgagatcaacatcaccaagaccaccatccaccagctcaccatgcagaaggaagaggataccagtggctaccgggctcagatagacaatctcacccgagaaaacaggagcttatctgaagaaataaagaggctgaagaacactctaacccagaccacagagaatctcaggagggtggaagaagacatccaacagcaaaaggccactggctctgaggtgtctcagaggaaacagcagctggaggttgagctgagacaagtcactcagatgcgaacagaggagagcgtaagatataagcaatctcttgatgatgctgccaaaaccatccaggataaaaacaaggagatagaaaggttaaaacaactgatcgacaaagaaacaaatgaccggaaatgcctggaagatgaaaacgcgagattacaaagggtccagtatgacctgcagaaagcaaacagtagtgcgacggagacaataaacaaactgaaggttcaggagcaagaactgacacgcctgaggatcgactatgaaagggtttcccaggagaggactgtgaaggaccaggatatcacgcggttccagaactctctgaaagagctgcagctgcagaagcagaaggtggaagaggagctgaatcggctgaagaggaccgcgtcagaagactcctgcaagaggaagaagctggaggaagagctggaaggcatgaggaggtcgctgaaggagcaagccatcaaaatcaccaacctgacccagcagctggagcaggcatccattgttaagaagaggagtgaggatgacctccggcagcagagggacgtgctggatggccacctgagggaaaagcagaggacccaggaagagctgaggaggctctcttctgaggtcgaggccctgaggcggcagttactccaggaacaggaaagtgtcaaacaagctcacttgaggaatgagcatttccagaaggcgatagaagataaaagcagaagcttaaatgaaagcaaaatagaaattgagaggctgcagtctctcacagagaacctgaccaaggagcacttgatgttagaagaagaactgcggaacctgaggctggagtacgatgacctgaggagaggacgaagcgaagcggacagtgataaaaatgcaaccatcttggaactaaggagccagctgcagatcagcaacaaccggaccctggaactgcaggggctgattaatgatttacagagagagagggaaaatttgagacaggaaattgagaaattccaaaagcaggctttagaggcatctaataggattcaggaatcaaagaatcagtgtactcaggtggtacaggaaagagagagccttctggtgaaaatcaaagtcctggagcaagacaaggcaaggctgcagaggctggaggatgagctgaatcgtgcaaaatcaactctagaggcagaaaccagggtgaaacagcgcctggagtgtgagaaacagcaaattcagaatgacctgaatcagtggaagactcaatattcccgcaaggaggaggctattaggaagatagaatcggaaagagaaaagagtgagagagagaagaacagtcttaggagtgagatcgaaagactccaagcagagatcaagagaattgaagagaggtgcaggcgtaagctggaggattctaccagggagacacagtcacagttagaaacagaacgctcccgatatcagagggagattgataaactcagacagcgcccatatgggtcccatcgagagacccagactgagtgtgagtggaccgttgacacctccaagctggtgtttgatgggctgaggaagaaggtgacagcaatgcagctctatgagtgtcagctgatcgacaaaacaaccttggacaaactattgaaggggaagaagtcagtggaagaagttgcttctgaaatccagccattccttcggggtgcaggatctatcgctggagcatctgcttctcctaaggaaaaatactctttggtagaggccaagagaaagaaattaatcagcccagaatccacagtcatgcttctggaggcccaggcagctacaggtggtataattgatccccatcggaatgagaagctgactgtcgacagtgccatagctcgggacctcattgacttcgatgaccgtcagcagatatatgcagcagaaaaagctatcactggttttgatgatccattttcaggcaagacagtatctgtttcagaagccatcaagaaaaatttgattgatagagaaaccggaatgcgcctgctggaagcccagattgcttcagggggtgtagtagaccctgtgaacagtgtctttttgccaaaagatgtcgccttggcccgggggctgattgatagagatttgtatcgatccctgaatgatccccgagatagtcagaaaaactttgtggatccagtcaccaaaaagaaggtcagttacgtgcagctgaaggaacggtgcagaatcgaaccacatactggtctgctcttgctttcagtacagaagagaagcatgtccttccaaggaatcagacaacctgtgaccgtcactgagctagtagattctggtatattgagaccgtccactgtcaatgaactggaatctggtcagatttcttatgacgaggttggtgagagaattaaggacttcctccagggttcaagctgcatagcaggcatatacaatgagaccacaaaacagaagcttggcatttatgaggccatgaaaattggcttagtccgacctggtactgctctggagttgctggaagcccaagcagctactggctttatagtggatcctgttagcaacttgaggttaccagtggaggaagcctacaagagaggtctggtgggcattgagttcaaagagaagctcctgtctgcagaacgagctgtcactgggtataatgatcctgaaacaggaaacatcatctctttgttccaagccatgaataaggaactcatcgaaaagggccacggtattcgcttattagaagcacagatcgcaaccggggggatcattgacccaaaggagagccatcgtttaccagttgacatagcatataagaggggctatttcaatgaggaactcagtgagattctctcagatccaagtgatgataccaaaggattttttgaccccaacactgaagaaaatcttacctatctgcaactaaaagaaagatgcattaaggatgaggaaacagggctctgtcttctgcctctgaaagaaaagaagaaacaggtgcagacatcacaaaagaataccctcaggaagcgtagagtggtcatagttgacccagaaaccaataaagaaatgtctgttcaggaggcctacaagaagggcctaattgattatgaaaccttcaaagaactgtgtgagcaggaatgtgaatgggaagaaataaccatcacgggatcagatggctccaccagggtggtcctggtagatagaaagacaggcagtcagtatgatattcaagatgctattgacaagggccttgttgacaggaagttctttgatcagtaccgatccggcagcctcagcctcactcaatttgctgacatgatctccttgaaaaatggtgtcggcaccagcagcagcatgggcagtggtgtcagcgatgatgtttttagcagctcccgacatgaatcagtaagtaagatttccaccatatccagcgtcaggaatttaaccataaggagcagctctttttcagacaccctggaagaatcgagccccattgcagccatctttgacacagaaaacctggagaaaatctccattacagaaggtatagagcggggcatcgttgacagcatcacgggtcagaggcttctggaggctcaggcctgcacaggtggcatcatccacccaaccacgggccagaagctgtcacttcaggacgcagtctcccagggtgtgattgaccaagacatggccaccaggctgaagcctgctcagaaagccttcataggcttcgagggtgtgaagggaaagaagaagatgtcagcagcagaggcagtgaaagaaaaatggctcccgtatgaggctggccagcgcttcctggagttccagtacctcacgggaggtcttgttgacccggaagtgcatgggaggataagcaccgaagaagccatccggaaggggttcatagatggccgcgccgcacagaggctgcaagacaccagcagctatgccaaaatcctgacctgccccaaaaccaaattaaaaatatcctataaggatgccataaatcgctccatggtagaagatatcactgggctgcgccttctggaagccgcctccgtgtcgtccaagggcttacccagcccttacaacatgtcttcggctccgggctcccgctccggctcccgctcgggatctcgctccggatctcgctccgggtcccgcagtgggtcccggagaggaagctttgacgccacagggaattcttcctactcttattcctactcatttagcagtagttctattgggcactagtagtcagttgggagtggttgctataccttgacttcatttatatgaatttccactttattaaataatagaaaagaaaatcccggtgcttgcagtagagtgataggacattctatgcttacagaaaatatagccatgattgaaatcaaatagtaaaggctgttctggctttttatcttcttagctcatcttaaataagcagtacacttggatgcagtgcgtctgaagtgctaatcagttgtaacaatagcacaaatcgaacttaggatttgtttcttctcttctgtgtttcgatttttgatcaattctttaattttggaagcctataatacagttttctattcttggagataaaaattaaatggatcactgatattttagtcattctgcttctcatctaaatatttccatattctgtattaggagaaaattaccctcccagcaccagcccccctctcaaacccccaacccaaaaccaagcattttggaatgagtctcctttagtttcagagtgtggattgtataacccatatactcttcgatgtacttgtttggtttggtattaatttgactgtgcatgacagcggcaatcttttctttggtcaaagttttctgtttattttgcttgtcatattcgatgtactttaaggtgtctttatgaagtttgctattctggcaataaacttttagacttttgaagtgtttgtgttttaatttaatatgtttataagcatgtataaacatttagcatatttttatcataggtctaaaaatatttgtttactaaatacctgtgaagaaataccattaaaaaactatttggttctgaattcttactagaaggtggt

SEQ ID NO: 327752 - DNA, 6128 bp, Homo sapiens
  misc_feature (12)..(12): n is a, c, g, or t
tcatggtcctcntgataggtatgttcagcagagtttccagtcctgaggtgtatgaggccagctgaagagacaggctgagctggatgggaagtcggctaagcaaaatctagacaagtgctacggccaaataaaagaactcaatgagaagatcacccgactgacttatgagattgaagatgaaaagagaagaagaaaatctgtggaagacagatttgaccaacagaagaatgactatgaccaactgcagaaagcaaggcaatgtgaaaaggagaaccttggttggcagaaattagagtctgagaaagccatcaaggagaaggagtacgagattgaaaggttgagggttctactgcaggaagaaggcacccggaagagagaatatgaaaatgagctggcaaaggtaagaaaccactataatgaggagatgagtaatttaaggaacaagtatgaaacagagattaacattacgaagaccaccatcaaggagatatccatgcaaaaagaggatgattccaaaaatcttagaaaccagcttgatagactttcaagggaaaatcgagatctgaaggatgaaattgtcaggctcaatgacagcatcttgcaggccactgagcagcgaaggcgagctgaagaaaacgcccttcagcaaaaggcctgtggctctgagataatgcagaagaagcagcatctggagatagaactgaagcaggtcatgcagcagcgctctgaggacaatgcccggcacaagcagtccctggaggaggctgccaagaccattcaggacaaaaataaggagatcgagagactcaaagctgagtttcaggaggaggccaagcgccgctgggaatatgaaaatgaactgagtaaggtaagaaacaattatgatgaggagatcattagcttaaaaaatcagtttgagaccgagatcaacatcaccaagaccaccatccaccagctcaccatgcagaaggaagaggataccagtggctaccgggctcagatagacaatctcacccgagaaaacaggagcttatctgaagaaataaagaggctgaagaacactctaacccagaccacagagaatctcaggagggtggaagaagacatccaacagcaaaaggccactggctctgaggtgtctcagaggaaacagcagctggaggttgagctgagacaagtcactcagatgcgaacagaggagagcgtaagatataagcaatctcttgatgatgctgccaaaaccatccaggataaaaacaaggagatagaaaggttaaaacaactgatcgacaaagaaacaaatgaccggaaatgcctggaagatgaaaacgcgagattacaaagggtccagtatgacctgcagaaagcaaacagtagtgcgacggagacaataaacaaactgaaggttcaggagcaagaactgacacgcctgaggatcgactatgaaagggtttcccaggagaggactgtgaaggaccaggatatcacgcggttccagaactctctgaaagagctgcagctgcagaagcagaaggtggaagaggagctgaatcggctgaagaggaccgcgtcagaagactcctgcaagaggaagaagctggaggaagagctggaaggcatgaggaggtcgctgaaggagcaagccatcaaaatcaccaacctgacccagcagctggagcaggcatccattgttaagaagaggagtgaggatgacctccggcagcagagggacgtgctggatggccacctgagggaaaagcagaggacccaggaagagctgaggaggctctcttctgaggtcgaggccctgaggcggcagttactccaggaacaggaaagtgtcaaacaagctcacttgaggaatgagcatttccagaaggcgatagaagataaaagcagaagcttaaatgaaagcaaaatagaaattgagaggctgcagtctctcacagagaacctgaccaaggagcacttgatgttagaagaagaactgcggaacctgaggctggagtacgatgacctgaggagaggacgaagcgaagcggacagtgataaaaatgcaaccatcttggaactaaggagccagctgcagatcagcaacaaccggaccctggaactgcaggggctgattaatgatttacagagagagagggaaaatttgagacaggaaattgagaaattccaaaagcaggctttagaggcatctaataggattcaggaatcaaagaatcagtgtactcaggtggtacaggaaagagagagccttctggtgaaaatcaaagtcctggagcaagacaaggcaaggctgcagaggctggaggatgagctgaatcgtgcaaaatcaactctagaggcagaaaccagggtgaaacagcgcctggagtgtgagaaacagcaaattcagaatgacctgaatcagtggaagactcaatattcccgcaaggaggaggctattaggaagatagaatcggaaagagaaaagagtgagagagagaagaacagtcttaggagtgagatcgaaagactccaagcagagatcaagagaattgaagagaggtgcaggcgtaagctggaggattctaccagggagacacagtcacagttagaaacagaacgctcccgatatcagagggagattgataaactcagacagcgcccatatgggtcccatcgagagacccagactgagtgtgagtggaccgttgacacctccaagctggtgtttgatgggctgaggaagaaggtgacagcaatgcagctctatgagtgtcagctgatcgacaaaacaaccttggacaaactattgaaggggaagaagtcagtggaagaagttgcttctgaaatccagccattccttcggggtgcaggatctatcgctggagcatctgcttctcctaaggaaaaatactctttggtagaggccaagagaaagaaattaatcagcccagaatccacagtcatgcttctggaggcccaggcagctacaggtggtataattgatccccatcggaatgagaagctgactgtcgacagtgccatagctcgggacctcattgacttcgatgaccgtcagcagatatatgcagcagaaaaagctatcactggttttgatgatccattttcaggcaagacagtatctgtttcagaagccatcaagaaaaatttgattgatagagaaaccggaatgcgcctgctggaagcccagattgcttcagggggtgtagtagaccctgtgaacagtgtctttttgccaaaagatgtcgccttggcccgggggctgattgatagagatttgtatcgatccctgaatgatccccgagatagtcagaaaaactttgtggatccagtcaccaaaaagaaggtcagttacgtgcagctgaaggaacggtgcagaatcgaaccacatactggtctgctcttgctttcagtacagaagagaagcatgtccttccaaggaatcagacaacctgtgaccgtcactgagctagtagattctggtatattgagaccgtccactgtcaatgaactggaatctggtcagatttcttatgacgaggttggtgagagaattaaggacttcctccagggttcaagctgcatagcaggcatatacaatgagaccacaaaacagaagcttggcatttatgaggccatgaaaattggcttagtccgacctggtactgctctggagttgctggaagcccaagcagctactggctttatagtggatcctgttagcaacttgaggttaccagtggaggaagcctacaagagaggtctggtgggcattgagttcaaagagaagctcctgtctgcagaacgagctgtcactgggtataatgatcctgaaacaggaaacatcatctctttgttccaagccatgaataaggaactcatcgaaaagggccacggtattcgcttattagaagcacagatcgcaaccggggggatcattgacccaaaggagagccatcgtttaccagttgacatagcatataagaggggctatttcaatgaggaactcagtgagattctctcagatccaagtgatgataccaaaggattttttgaccccaacactgaagaaaatcttacctatctgcaactaaaagaaagatgcattaaggatgaggaaacagggctctgtcttctgcctctgaaagaaaagaagaaacaggtgcagacatcacaaaagaataccctcaggaagcgtagagtggtcatagttgacccagaaaccaataaagaaatgtctgttcaggaggcctacaagaagggcctaattgattatgaaaccttcaaagaactgtgtgagcaggaatgtgaatgggaagaaataaccatcacgggatcagatggctccaccagggtggtcctggtagatagaaagacaggcagtcagtatgatattcaagatgctattgacaagggccttgttgacaggaagttctttgatcagtaccgatccggcagcctcagcctcactcaatttgctgacatgatctccttgaaaaatggtgtcggcaccagcagcagcatgggcagtggtgtcagcgatgatgtttttagcagctcccgacatgaatcagtaagtaagatttccaccatatccagcgtcaggaatttaaccataaggagcagctctttttcagacaccctggaagaatcgagccccattgcagccatctttgacacagaaaacctggagaaaatctccattacagaaggtatagagcggggcatcgttgacagcatcacgggtcagaggcttctggaggctcaggcctgcacaggtggcatcatccacccaaccacgggccagaagctgtcacttcaggacgcagtctcccagggtgtgattgaccaagacatggccaccaggctgaagcctgctcagaaagccttcataggcttcgagggtgtgaagggaaagaagaagatgtcagcagcagaggcagtgaaagaaaaatggctcccgtatgaggctggccagcgcttcctggagttccagtacctcacgggaggtcttgttgacccggaagtgcatgggaggataagcaccgaagaagccatccggaaggggttcatagatggccgcgccgcacagaggctgcaagacaccagcagctatgccaaaatcctgacctgccccaaaaccaaattaaaaatatcctataaggatgccataaatcgctccatggtagaagatatcactgggctgcgccttctggaagccgcctccgtgtcgtccaagggcttacccagcccttacaacatgtcttcggctccgggctcccgctccggctcccgctcgggatctcgctccggatctcgctccgggtcccgcagtgggtcccggagaggaagctttgacgccacagggaattcttcctactcttattcctactcatttagcagtagttctattgggcactagtagtcagttgggagtggttgctataccttgacttcatttatatgaatttccactttattaaataatagaaaagaaaatcccggtgcttgcagtagagtgataggacattctatgcttacagaaaatatagccatgattgaaatcaaatagtaaaggctgttctggctttttatcttcttagctcatcttaaataagcagtacacttggatgcagtgcgtctgaagtgctaatcagttgtaacaatagcacaaatcgaacttaggatttgtttcttctcttctgtgtttcgatttttgatcaattctttaattttggaagcctataatacagttttctattcttggagataaaaattaaatggatcactgatattttagtcattctgcttctcatctaaatatttccatattctgtattaggagaaaattaccctcccagcaccagcccccctctcaaacccccaacccaaaaccaagcattttggaatgagtctcctttagtttcagagtgtggattgtataacccatatactcttcgatgtacttgtttggtttggtattaatttgactgtgcatgacagcggcaatcttttctttggtcaaagttttctgtttattttgcttgtcatattcgatgtactttaaggtgtctttatgaagtttgctattctggcaataaacttttagacttttg

SEQ ID NO: 327753 - DNA, 6760 bp, Homo sapiens
cagttggaggaggagtatgaaaacctgctgaaagcgtcctttgagaggatggatcacctgcgacagctgcagaacatcattcaggccacgtccagggagatcatgtggatcaatgactgcgaggaggaggagctgctgtacgactggagcgacaagaacaccaacatcgctcagaaacaggaggccttctccatacgcatgagtcaactggaagttaaagaaaaagagctcaataagctgaaacaagaaagtgaccaacttgtcctcaatcagcatccagcttcagacaaaattgaggcctatatggacactctgcagacgcagtggagttggattcttcagatcaccaagtgcattgatgttcatctgaaagaaaatgctgcctactttcagttttttgaagaggcgcagtctactgaagcatacctgaaggggctccaggactccatcaggaagaagtacccctgcgacaagaacatgcccctgcagcacctgctggaacagatcaaggagctggagaaagaacgagagaaaatccttgaatacaagcgtcaggtgcagaacttggtaaacaagtctaagaagattgtacagctgaagcctcgtaacccagactacagaagcaataaacccattattctcagagctctctgtgactacaaacaagatcagaaaatcgtgcataagggggatgagtgtatcctgaaggacaacaacgagcgcagcaagtggtacgtgacgggcccgggaggcgttgacatgcttgttccctctgtggggctgatcatccctcctccgaacccactggccgtggacctctcttgcaagattgagcagtactacgaagccatcttggctctgtggaaccagctctacatcaacatgaagagcctggtgtcctggcactactgcatgattgacatagagaagatcagggccatgacaatcgccaagctgaaaacaatgcggcaggaagattacatgaagacgatagccgaccttgagttacattaccaagagttcatcagaaatagccaaggctcagagatgtttggagatgatgacaagcggaaaatacagtctcagttcaccgatgcccagaagcattaccagaccctggtcattcagctccctggctatccccagcaccagacagtgaccacaactgaaatcactcatcatggaacctgccaagatgtcaaccataataaagtaattgaaaccaacagagaaaatgacaagcaagaaacatggatgctgatggagctgcagaagattcgcaggcagatagagcactgcgagggcaggatgactctcaaaaacctccctctagcagaccaggggtcttctcaccacatcacagtgaaaattaacgagcttaagagtgtgcagaatgattcacaagcaattgctgaggttctcaaccagcttaaagatatgcttgccaacttcagaggttctgaaaagtactgctatttacagaatgaagtatttggactatttcagaaactggaaaatatcaatggtgttacagatggctacttaaatagcttatgcacagtaagggcactgctccaggctattctccaaacagaagacatgttaaaggtttatgaagccaggctcactgaggaggaaactgtctgcctggacctggataaagtggaagcttaccgctgtggactgaagaaaataaaaaatgacttgaacttgaagaagtcgttgttggccactatgaagacagaactacagaaagcccagcagatccactctcagacttcacagcagtatccactttatgatctggacttgggcaagttcggtgaaaaagtcacacagctgacagaccgctggcaaaggatagataaacagatcgactttagattatgggacctggagaaacaaatcaagcaattgaggaattatcgtgataactatcaggctttctgcaagtggctctatgatgctaaacgccgccaggattccttagaatccatgaaatttggagattccaacacagtcatgcggtttttgaatgagcagaagaacttgcacagtgaaatatctggcaaacgagacaaatcagaggaagtacaaaaaattgctgaactttgcgccaattcaattaaggattatgagctccagctggcctcatacacctcaggactggaaactctgctgaacatacctatcaagaggaccatgattcagtccccttctggggtgattctgcaagaggctgcagatgttcatgctcggtacattgaactacttacaagatctggagactattacaggttcttaagtgagatgctgaagagtttggaagatctgaagctgaaaaataccaagatcgaagttttggaagaggagctcagactggcccgagatgccaactcggaaaactgtaataagaacaaattcctggatcagaacctgcagaaataccaggcagagtgttcccagttcaaagcgaagcttgcgagcctggaggagctgaagagacaggctgagctggatgggaagtcggctaagcaaaatctagacaagtgctacggccaaataaaagaactcaatgagaagatcacccgactgacttatgagattgaagatgaaaagagaagaagaaaatctgtggaagacagatttgaccaacagaagaatgactatgaccaactgcagaaagcaaggcaatgtgaaaaggagaaccttggttggcagaaattagagtctgagaaagccatcaaggagaaggagtacgagattgaaaggttgagggttctactgcaggaagaaggcacccggaagagagaatatgaaaatgagctggcatctaataggattcaggaatcaaagaatcagtgtactcaggtggtacaggaaagagagagccttctggtgaaaatcaaagtcctggagcaagacaaggcaaggctgcagaggctggaggatgagctgaatcgtgcaaaatcaactctagaggcagaaaccagggtgaaacagcgcctggagtgtgagaaacagcaaattcagaatgacctgaatcagtggaagactcaatattcccgcaaggaggaggctattaggaagatagaatcggaaagagaaaagagtgagagagagaagaacagtcttaggagtgagatcgaaagactccaagcagagatcaagagaattgaagagaggtgcaggcgtaagctggaggattctaccagggagacacagtcacagttagaaacagaacgctcccgatatcagagggagattgataaactcagacagcgcccatatgggtcccatcgagagacccagactgagtgtgagtggaccgttgacacctccaagctggtgtttgatgggctgaggaagaaggtgacagcaatgcagctctatgagtgtcagctgatcgacaaaacaaccttggacaaactattgaaggggaagaagtcagtggaagaagttgcttctgaaatccagccattccttcggggtgcaggatctatcgctggagcatctgcttctcctaaggaaaaatactctttggtagaggccaagagaaagaaattaatcagcccagaatccacagtcatgcttctggaggcccaggcagctacaggtggtataattgatccccatcggaatgagaagctgactgtcgacagtgccatagctcgggacctcattgacttcgatgaccgtcagcagatatatgcagcagaaaaagctatcactggttttgatgatccattttcaggcaagacagtatctgtttcagaagccatcaagaaaaatttgattgatagagaaaccggaatgcgcctgctggaagcccagattgcttcagggggtgtagtagaccctgtgaacagtgtctttttgccaaaagatgtcgccttggcccgggggctgattgatagagatttgtatcgatccctgaatgatccccgagatagtcagaaaaactttgtggatccagtcaccaaaaagaaggtcagttacgtgcagctgaaggaacggtgcagaatcgaaccacatactggtctgctcttgctttcagtacagaagagaagcatgtccttccaaggaatcagacaacctgtgaccgtcactgagctagtagattctggtatattgagaccgtccactgtcaatgaactggaatctggtcagatttcttatgacgaggttggtgagagaattaaggacttcctccagggttcaagctgcatagcaggcatatacaatgagaccacaaaacagaagcttggcatttatgaggccatgaaaattggcttagtccgacctggtactgctctggagttgctggaagcccaagcagctactggctttatagtggatcctgttagcaacttgaggttaccagtggaggaagcctacaagagaggtctggtgggcattgagttcaaagagaagctcctgtctgcagaacgagctgtcactgggtataatgatcctgaaacaggaaacatcatctctttgttccaagccatgaataaggaactcatcgaaaagggccacggtattcgcttattagaagcacagatcgcaaccggggggatcattgacccaaaggagagccatcgtttaccagttgacatagcatataagaggggctatttcaatgaggaactcagtgagattctctcagatccaagtgatgataccaaaggattttttgaccccaacactgaagaaaatcttacctatctgcaactaaaagaaagatgcattaaggatgaggaaacagggctctgtcttctgcctctgaaagaaaagaagaaacaggtgcagacatcacaaaagaataccctcaggaagcgtagagtggtcatagttgacccagaaaccaataaagaaatgtctgttcaggaggcctacaagaagggcctaattgattatgaaaccttcaaagaactgtgtgagcaggaatgtgaatgggaagaaataaccatcacgggatcagatggctccaccagggtggtcctggtagatagaaagacaggcagtcagtatgatattcaagatgctattgacaagggccttgttgacaggaagttctttgatcagtaccgatccggcagcctcagcctcactcaatttgctgacatgatctccttgaaaaatggtgtcggcaccagcagcagcatgggcagtggtgtcagcgatgatgtttttagcagctcccgacatgaatcagtaagtaagatttccaccatatccagcgtcaggaatttaaccataaggagcagctctttttcagacaccctggaagaatcgagccccattgcagccatctttgacacagaaaacctggagaaaatctccattacagaaggtatagagcggggcatcgttgacagcatcacgggtcagaggcttctggaggctcaggcctgcacaggtggcatcatccacccaaccacgggccagaagctgtcacttcaggacgcagtctcccagggtgtgattgaccaagacatggccaccaggctgaagcctgctcagaaagccttcataggcttcgagggtgtgaagggaaagaagaagatgtcagcagcagaggcagtgaaagaaaaatggctcccgtatgaggctggccagcgcttcctggagttccagtacctcacgggaggtcttgttgacccggaagtgcatgggaggataagcaccgaagaagccatccggaaggggttcatagatggccgcgccgcacagaggctgcaagacaccagcagctatgccaaaatcctgacctgccccaaaaccaaattaaaaatatcctataaggatgccataaatcgctccatggtagaagatatcactgggctgcgccttctggaagccgcctccgtgtcgtccaagggcttacccagcccttacaacatgtcttcggctccgggctcccgctccggctcccgctcgggatctcgctccggatctcgctccgggtcccgcagtgggtcccggagaggaagctttgacgccacagggaattcttcctactcttattcctactcatttagcagtagttctattgggcactagtagtcagttgggagtggttgctataccttgacttcatttatatgaatttccactttattaaataatagaaaagaaaatcccggtgcttgcagtagagtgataggacattctatgcttacagaaaatatagccatgattgaaatcaaatagtaaaggctgttctggctttttatcttcttagctcatcttaaataagcagtacacttggatgcagtgcgtctgaagtgctaatcagttgtaacaatagcacaaatcgaacttaggatttgtttcttctcttctgtgtttcgatttttgatcaattctttaattttggaagcctataatacagttttctattcttggagataaaaattaaatggatcactgatattttagtcattctgcttctcatctaaatatttccatattctgtattaggagaaaattaccctcccagcaccagcccccctctcaaacccccaacccaaaaccaagcattttggaatgagtctcctttagtttcagagtgtggattgtataacccatatactcttcgatgtacttgtttggtttggtattaatttgactgtgcatgacagcggcaatcttttctttggtcaaagttttctgtttattttgcttgtcatattcgatgtactttaaggtgtctttatgaagtttgctattctggcaataaacttttagacttttg

SEQ ID NO: 327754 - DNA, 5399 bp, Homo sapiens
atgacaattggtggaaaccttaaaaggggaaacttagacaccccccctcaagcgcaggaccaagtgcagagtggactctttctggatgtggtagtcagacagggtgcgccgctgggaatatgaaaatgaactgagtaaggtaagaaacaattatgatgaggagatcattagcttaaaaaatcagtttgagaccgagatcaacatcaccaagaccaccatccaccagctcaccatgcagaaggaagaggataccagtggctaccgggctcagatagacaatctcacccgagaaaacaggagcttatctgaagaaataaagaggctgaagaacactctaacccagaccacagagaatctcaggagggtggaagaagacatccaacagcaaaaggccactggctctgaggtgtctcagaggaaacagcagctggaggttgagctgagacaagtcactcagatgcgaacagaggagagcgtaagatataagcaatctcttgatgatgctgccaaaaccatccaggataaaaacaaggagatagaaaggttaaaacaactgatcgacaaagaaacaaatgaccggaaatgcctggaagatgaaaacgcgagattacaaagggtccagtatgacctgcagaaagcaaacagtagtgcgacggagacaataaacaaactgaaggttcaggagcaagaactgacacgcctgaggatcgactatgaaagggtttcccaggagaggactgtgaaggaccaggatatcacgcggttccagaactctctgaaagagctgcagctgcagaagcagaaggtggaagaggagctgaatcggctgaagaggaccgcgtcagaagactcctgcaagaggaagaagctggaggaagagctggaaggcatgaggaggtcgctgaaggagcaagccatcaaaatcaccaacctgacccagcagctggagcaggcatccattgttaagaagaggagtgaggatgacctccggcagcagagggacgtgctggatggccacctgagggaaaagcagaggacccaggaagagctgaggaggctctcttctgaggtcgaggccctgaggcggcagttactccaggaacaggaaagtgtcaaacaagctcacttgaggaatgagcatttccagaaggcgatagaagataaaagcagaagcttaaatgaaagcaaaatagaaattgagaggctgcagtctctcacagagaacctgaccaaggagcacttgatgttagaagaagaactgcggaacctgaggctggagtacgatgacctgaggagaggacgaagcgaagcggacagtgataaaaatgcaaccatcttggaactaaggagccagctgcagatcagcaacaaccggaccctggaactgcaggggctgattaatgatttacagagagagagggaaaatttgagacaggaaattgagaaattccaaaagcaggctttagaggcatctaataggattcaggaatcaaagaatcagtgtactcaggtggtacaggaaagagagagccttctggtgaaaatcaaagtcctggagcaagacaaggcaaggctgcagaggctggaggatgagctgaatcgtgcaaaatcaactctagaggcagaaaccagggtgaaacagcgcctggagtgtgagaaacagcaaattcagaatgacctgaatcagtggaagactcaatattcccgcaaggaggaggctattaggaagatagaatcggaaagagaaaagagtgagagagagaagaacagtcttaggagtgagatcgaaagactccaagcagagatcaagagaattgaagagaggtgcaggcgtaagctggaggattctaccagggagacacagtcacagttagaaacagaacgctcccgatatcagagggagattgataaactcagacagcgcccatatgggtcccatcgagagacccagactgagtgtgagtggaccgttgacacctccaagctggtgtttgatgggctgaggaagaaggtgacagcaatgcagctctatgagtgtcagctgatcgacaaaacaaccttggacaaactattgaaggggaagaagtcagtggaagaagttgcttctgaaatccagccattccttcggggtgcaggatctatcgctggagcatctgcttctcctaaggaaaaatactctttggtagaggccaagagaaagaaattaatcagcccagaatccacagtcatgcttctggaggcccaggcagctacaggtggtataattgatccccatcggaatgagaagctgactgtcgacagtgccatagctcgggacctcattgacttcgatgaccgtcagcagatatatgcagcagaaaaagctatcactggttttgatgatccattttcaggcaagacagtatctgtttcagaagccatcaagaaaaatttgattgatagagaaaccggaatgcgcctgctggaagcccagattgcttcagggggtgtagtagaccctgtgaacagtgtctttttgccaaaagatgtcgccttggcccgggggctgattgatagagatttgtatcgatccctgaatgatccccgagatagtcagaaaaactttgtggatccagtcaccaaaaagaaggtcagttacgtgcagctgaaggaacggtgcagaatcgaaccacatactggtctgctcttgctttcagtacagaagagaagcatgtccttccaaggaatcagacaacctgtgaccgtcactgagctagtagattctggtatattgagaccgtccactgtcaatgaactggaatctggtcagatttcttatgacgaggttggtgagagaattaaggacttcctccagggttcaagctgcatagcaggcatatacaatgagaccacaaaacagaagcttggcatttatgaggccatgaaaattggcttagtccgacctggtactgctctggagttgctggaagcccaagcagctactggctttatagtggatcctgttagcaacttgaggttaccagtggaggaagcctacaagagaggtctggtgggcattgagttcaaagagaagctcctgtctgcagaacgagctgtcactgggtataatgatcctgaaacaggaaacatcatctctttgttccaagccatgaataaggaactcatcgaaaagggccacggtattcgcttattagaagcacagatcgcaaccggggggatcattgacccaaaggagagccatcgtttaccagttgacatagcatataagaggggctatttcaatgaggaactcagtgagattctctcagatccaagtgatgataccaaaggattttttgaccccaacactgaagaaaatcttacctatctgcaactaaaagaaagatgcattaaggatgaggaaacagggctctgtcttctgcctctgaaagaaaagaagaaacaggtgcagacatcacaaaagaataccctcaggaagcgtagagtggtcatagttgacccagaaaccaataaagaaatgtctgttcaggaggcctacaagaagggcctaattgattatgaaaccttcaaagaactgtgtgagcaggaatgtgaatgggaagaaataaccatcacgggatcagatggctccaccagggtggtcctggtagatagaaagacaggcagtcagtatgatattcaagatgctattgacaagggccttgttgacaggaagttctttgatcagtaccgatccggcagcctcagcctcactcaatttgctgacatgatctccttgaaaaatggtgtcggcaccagcagcagcatgggcagtggtgtcagcgatgatgtttttagcagctcccgacatgaatcagtaagtaagatttccaccatatccagcgtcaggaatttaaccataaggagcagctctttttcagacaccctggaagaatcgagccccattgcagccatctttgacacagaaaacctggagaaaatctccattacagaaggtatagagcggggcatcgttgacagcatcacgggtcagaggcttctggaggctcaggcctgcacaggtggcatcatccacccaaccacgggccagaagctgtcacttcaggacgcagtctcccagggtgtgattgaccaagacatggccaccaggctgaagcctgctcagaaagccttcataggcttcgagggtgtgaagggaaagaagaagatgtcagcagcagaggcagtgaaagaaaaatggctcccgtatgaggctggccagcgcttcctggagttccagtacctcacgggaggtcttgttgacccggaagtgcatgggaggataagcaccgaagaagccatccggaaggggttcatagatggccgcgccgcacagaggctgcaagacaccagcagctatgccaaaatcctgacctgccccaaaaccaaattaaaaatatcctataaggatgccataaatcgctccatggtagaagatatcactgggctgcgccttctggaagccgcctccgtgtcgtccaagggcttacccagcccttacaacatgtcttcggctccgggctcccgctccggctcccgctcgggatctcgctccggatctcgctccgggtcccgcagtgggtcccggagaggaagctttgacgccacagggaattcttcctactcttattcctactcatttagcagtagttctattgggcactagtagtcagttgggagtggttgctataccttgacttcatttatatgaatttccactttattaaataatagaaaagaaaatcccggtgcttgcagtagagtgataggacattctatgcttacagaaaatatagccatgattgaaatcaaatagtaaaggctgttctggctttttatcttcttagctcatcttaaataagcagtacacttggatgcagtgcgtctgaagtgctaatcagttgtaacaatagcacaaatcgaacttaggatttgtttcttctcttctgtgtttcgatttttgatcaattctttaattttggaagcctataatacagttttctattcttggagataaaaattaaatggatcactgatattttagtcattctgcttctcatctaaatatttccatattctgtattaggagaaaattaccctcccagcaccagcccccctctcaaacccccaacccaaaaccaagcattttggaatgagtctcctttagtttcagagtgtggattgtataacccatatactcttcgatgtacttgtttggtttggtattaatttgactgtgcatgacagcggcaatcttttctttggtcaaagttttctgtttattttgcttgtcatattcgatgtactttaaggtgtctttatgaagtttgctattctggcaataaacttttagacttttg

SEQ ID NO: 327755 - DNA, 2475 bp, Homo sapiens
tggtgtttgagtcctaaaaattgtataccagtgctaattgggatataccaaactttttgtctcttagtaattagttttgttttgttttgttttgttttaatgttgtgcttatcttaaggtgtaaatgcagacaaagttggaattgaagctgccgaaatgctattagcaaatcttagacatggtggtactgtggatgagtatctgcaagaccaggtaatgacacatttaggttaaaaaccctctaacctgttagatttgaatatgtggtagattgaatatcaatttaaataattgactttcagacactaattagcaagtcctacttcaataatttaaaaaaatattctgggatttgcattcctcaaatttcagccctcattttactttacctgtctacagtgttgggcgataacatccccaacactgaagaaaatcttacctatctgcaactaaaagaaagatgcattaaggatgaggaaacagggctctgtcttctgcctctgaaagaaaagaagaaacaggtgcagacatcacaaaagaataccctcaggaagcgtagagtggtcatagttgacccagaaaccaataaagaaatgtctgttcaggaggcctacaagaagggcctaattgattatgaaaccttcaaagaactgtgtgagcaggaatgtgaatgggaagaaataaccatcacgggatcagatggctccaccagggtggtcctggtagatagaaagacaggcagtcagtatgatattcaagatgctattgacaagggccttgttgacaggaagttctttgatcagtaccgatccggcagcctcagcctcactcaatttgctgacatgatctccttgaaaaatggtgtcggcaccagcagcagcatgggcagtggtgtcagcgatgatgtttttagcagctcccgacatgaatcagtaagtaagatttccaccatatccagcgtcaggaatttaaccataaggagcagctctttttcagacaccctggaagaatcgagccccattgcagccatctttgacacagaaaacctggagaaaatctccattacagaaggtatagagcggggcatcgttgacagcatcacgggtcagaggcttctggaggctcaggcctgcacaggtggcatcatccacccaaccacgggccagaagctgtcacttcaggacgcagtctcccagggtgtgattgaccaagacatggccaccaggctgaagcctgctcagaaagccttcataggcttcgagggtgtgaagggaaagaagaagatgtcagcagcagaggcagtgaaagaaaaatggctcccgtatgaggctggccagcgcttcctggagttccagtacctcacgggaggtcttgttgacccggaagtgcatgggaggataagcaccgaagaagccatccggaaggggttcatagatggccgcgccgcacagaggctgcaagacaccagcagctatgccaaaatcctgacctgccccaaaaccaaattaaaaatatcctataaggatgccataaatcgctccatggtagaagatatcactgggctgcgccttctggaagccgcctccgtgtcgtccaagggcttacccagcccttacaacatgtcttcggctccgggctcccgctccggctcccgctcgggatctcgctccggatctcgctccgggtcccgcagtgggtcccggagaggaagctttgacgccacagggaattcttcctactcttattcctactcatttagcagtagttctattgggcactagtagtcagttgggagtggttgctataccttgacttcatttatatgaatttccactttattaaataatagaaaagaaaatcccggtgcttgcagtagagtgataggacattctatgcttacagaaaatatagccatgattgaaatcaaatagtaaaggctgttctggctttttatcttcttagctcatcttaaataagcagtacacttggatgcagtgcgtctgaagtgctaatcagttgtaacaatagcacaaatcgaacttaggatttgtttcttctcttctgtgtttcgatttttgatcaattctttaattttggaagcctataatacagttttctattcttggagataaaaattaaatggatcactgatattttagtcattctgcttctcatctaaatatttccatattctgtattaggagaaaattaccctcccagcaccagcccccctctcaaacccccaacccaaaaccaagcattttggaatgagtctcctttagtttcagagtgtggattgtataacccatatactcttcgatgtacttgtttggtttggtattaatttgactgtgcatgacagcggcaatcttttctttggtcaaagttttctgtttattttgcttgtcatattcgatgtactttaaggtgtctttatgaagtttgctattctggcaataaacttttagacttttg

SEQ ID NO: 327756 - DNA, 7574 bp, Homo sapiens
cagttggaggaggagtatgaaaacctgctgaaagcgtcctttgagaggatggatcacctgcgacagctgcagaacatcattcaggccacgtccagggagatcatgtggatcaatgactgcgaggaggaggagctgctgtacgactggagcgacaagaacaccaacatcgctcagaaacaggaggccttctccatacgcatgagtcaactggaagttaaagaaaaagagctcaataagctgaaacaagaaagtgaccaacttgtcctcaatcagcatccagcttcagacaaaattgaggcctatatggacactctgcagacgcagtggagttggattcttcagatcaccaagtgcattgatgttcatctgaaagaaaatgctgcctactttcagttttttgaagaggcgcagtctactgaagcatacctgaaggggctccaggactccatcaggaagaagtacccctgcgacaagaacatgcccctgcagcacctgctggaacagatcaaggagctggagaaagaacgagagaaaatccttgaatacaagcgtcaggtgcagaacttggtaaacaagtctaagaagattgtacagctgaagcctcgtaacccagactacagaagcaataaacccattattctcagagctctctgtgactacaaacaagatcagaaaatcgtgcataagggggatgagtgtatcctgaaggacaacaacgagcgcagcaagtggtacgtgacgggcccgggaggcgttgacatgcttgttccctctgtggggctgatcatccctcctccgaacccactggccgtggacctctcttgcaagattgagcagtactacgaagccatcttggctctgtggaaccagctctacatcaacatgaagagcctggtgtcctggcactactgcatgattgacatagagaagatcagggccatgacaatcgccaagctgaaaacaatgcggcaggaagattacatgaagacgatagccgaccttgagttacattaccaagagttcatcagaaatagccaaggctcagagatgtttggagatgatgacaagcggaaaatacagtctcagttcaccgatgcccagaagcattaccagaccctggtcattcagctccctggctatccccagcaccagacagtgaccacaactgaaatcactcatcatggaacctgccaagatgtcaaccataataaagtaattgaaaccaacagagaaaatgacaagcaagaaacatggatgctgatggagctgcagaagattcgcaggcagatagagcactgcgagggcaggatgactctcaaaaacctccctctagcagaccaggggtcttctcaccacatcacagtgaaaattaacgagcttaagagtgtgcagaatgattcacaagcaattgctgaggttctcaaccagcttaaagatatgcttgccaacttcagaggttctgaaaagtactgctatttacagaatgaagtatttggactatttcagaaactggaaaatatcaatggtgttacagatggctacttaaatagcttatgcacagtaagggcactgctccaggctattctccaaacagaagacatgttaaaggtttatgaagccaggctcactgaggaggaaactgtctgcctggacctggataaagtggaagcttaccgctgtggactgaagaaaataaaaaatgacttgaacttgaagaagtcgttgttggccactatgaagacagaactacagaaagcccagcagatccactctcagacttcacagcagtatccactttatgatctggacttgggcaagttcggtgaaaaagtcacacagctgacagaccgctggcaaaggatagataaacagatcgactttagattatgggacctggagaaacaaatcaagcaattgaggaattatcgtgataactatcaggctttctgcaagtggctctatgatgctaaacgccgccaggattccttagaatccatgaaatttggagattccaacacagtcatgcggtttttgaatgagcagaagaacttgcacagtgaaatatctggcaaacgagacaaatcagaggaagtacaaaaaattgctgaactttgcgccaattcaattaaggattatgagctccagctggcctcatacacctcaggactggaaactctgctgaacatacctatcaagaggaccatgattcagtccccttctggggtgattctgcaagaggctgcagatgttcatgctcggtacattgaactacttacaagatctggagactattacaggttcttaagtgagatgctgaagagtttggaagatctgaagctgaaaaataccaagatcgaagttttggaagaggagctcagactggcccgagatgccaactcggaaaactgtaataagaacaaattcctggatcagaacctgcagaaataccaggcagagtgttcccagttcaaagcgaagcttgcgagcctggaggagctgaagagacaggctgagctggatgggaagtcggctaagcaaaatctagacaagtgctacggccaaataaaagaactcaatgagaagatcacccgactgacttatgagattgaagatgaaaagagaagaagaaaatctgtggaagacagatttgaccaacagaagaatgactatgaccaactgcagaaagcaaggcaatgtgaaaaggagaaccttggttggcagaaattagagtctgagaaagccatcaaggagaaggagtacgagattgaaaggttgagggttctactgcaggaagaaggcacccggaagagagaatatgaaaatgagctggcaaaggtaagaaaccactataatgaggagatgagtaatttaaggaacaagtatgaaacagagattaacattacgaagaccaccatcaaggagatatccatgcaaaaagaggatgattccaaaaatcttagaaaccagcttgatagactttcaagggaaaatcgagatctgaaggatgaaattgtcaggctcaatgacagcatcttgcaggccactgagcagcgaaggcgagctgaagaaaacgcccttcagcaaaaggcctgtggctctgagataatgcagaagaagcagcatctggagatagaactgaagcaggtcatgcagcagcgctctgaggacaatgcccggcacaagcagtccctggaggaggctgccaagaccattcaggacaaaaataaggagatcgagagactcaaagctgagtttcaggaggaggccaagcgccgctgggaatatgaaaatgaactgagtaaggtaagaaacaattatgatgaggagatcattagcttaaaaaatcagtttgagaccgagatcaacatcaccaagaccaccatccaccagctcaccatgcagaaggaagaggataccagtggctaccgggctcagatagacaatctcacccgagaaaacaggagcttatctgaagaaataaagaggctgaagaacactctaacccagaccacagagaatctcaggagggtggaagaagacatccaacagcaaaaggccactggctctgaggtgtctcagaggaaacagcagctggaggttgagctgagacaagtcactcagatgcgaacagaggagagcgtaagatataagcaatctcttgatgatgctgccaaaaccatccaggataaaaacaaggagatagaaaggttaaaacaactgatcgacaaagaaacaaatgaccggaaatgcctggaagatgaaaacgcgagattacaaagggtccagtatgacctgcagaaagcaaacagtagtgcgacggagacaataaacaaactgaaggttcaggagcaagaactgacacgcctgaggatcgactatgaaagggtttcccaggagaggactgtgaaggaccaggatatcacgcggttccagaactctctgaaagagctgcagctgcagaagcagaaggtggaagaggagctgaatcggctgaagaggaccgcgtcagaagactcctgcaagaggaagaagctggaggaagagctggaaggcatgaggaggtcgctgaaggagcaagccatcaaaatcaccaacctgacccagcagctggagcaggcatccattgttaagaagaggagtgaggatgacctccggcagcagagggacgtgctggatggccacctgagggaaaagcagaggacccaggaagagctgaggaggctctcttctgaggtcgaggccctgaggcggcagttactccaggaacaggaaagtgtcaaacaagctcacttgaggaatgagcatttccagaaggcgatagaagataaaagcagaagcttaaatgaaagcaaaatagaaattgagaggctgcagtctctcacagagaacctgaccaaggagcacttgatgttagaagaagaactgcggaacctgaggctggagtacgatgacctgaggagaggacgaagcgaagcggacagtgataaaaatgcaaccatcttggaactaaggagccagctgcagatcagcaacaaccggaccctggaactgcaggggctgattaatgatttacagagagagagggaaaatttgagacaggaaattgagaaattccaaaagcaggctttagaggcatctaataggattcaggaatcaaagaatcagtgtactcaggtggtacaggaaagagagagccttctggtgaaaatcaaagtcctggagcaagacaaggcaaggctgcagaggctggaggatgagctgaatcgtgcaaaatcaactctagaggcagaaaccagggtgaaacagcgcctggagtgtgagaaacagcaaattcagaatgacctgaatcagtggaagactcaatattcccgcaaggaggaggctattaggaagatagaatcggaaagagaaaagagtgagagagagaagaacagtcttaggagtgagatcgaaagactccaagcagagatcaagagaattgaagagaggtgcaggcgtaagctggaggattctaccagggagacacagtcacagttagaaacagaacgctcccgatatcagagggagattgataaactcagacagcgcccatatgggtcccatcgagagacccagactgagtgtgagtggaccgttgacacctccaagctggtgtttgatgggctgaggaagaaggtgacagcaatgcagctctatgagtgtcagctgatcgacaaaacaaccttggacaaactattgaaggggaagaagtcagtggaagaagttgcttctgaaatccagccattccttcggggtgcaggatctatcgctggagcatctgcttctcctaaggaaaaatactctttggtagaggccaagagaaagaaattaatcagcccagaatccacagtcatgcttctggaggcccaggcagctacaggtggtataattgatccccatcggaatgagaagctgactgtcgacagtgccatagctcgggacctcattgacttcgatgaccgtcagcagatatatgcagcagaaaaagctatcactggttttgatgatccattttcaggcaagacagtatctgtttcagaagccatcaagaaaaatttgattgatagagaaaccggaatgcgcctgctggaagcccagattgcttcagggggtgtagtagaccctgtgaacagtgtctttttgccaaaagatgtcgccttggcccgggggctgattgatagagatttgtatcgatccctgaatgatccccgagatagtcagaaaaactttgtggatccagtcaccaaaaagaaggtcagttacgtgcagctgaaggaacggtgcagaatcgaaccacatactggtctgctcttgctttcagtacagaagagaagcatgtccttccaaggaatcagacaacctgtgaccgtcactgagctagtagattctggtatattgagaccgtccactgtcaatgaactggaatctggtcagatttcttatgacgaggttggtgagagaattaaggacttcctccagggttcaagctgcatagcaggcatatacaatgagaccacaaaacagaagcttggcatttatgaggccatgaaaattggcttagtccgacctggtactgctctggagttgctggaagcccaagcagctactggctttatagtggatcctgttagcaacttgaggttaccagtggaggaagcctacaagagaggtctggtgggcattgagttcaaagagaagctcctgtctgcagaacgagctgtcactgggtataatgatcctgaaacaggaaacatcatctctttgttccaagccatgaataaggaactcatcgaaaagggccacggtattcgcttattagaagcacagatcgcaaccggggggatcattgacccaaaggagagccatcgtttaccagttgacatagcatataagaggggctatttcaatgaggaactcagtgagattctctcagatccaagtgatgataccaaaggattttttgaccccaacactgaagaaaatcttacctatctgcaactaaaagaaagatgcattaaggatgaggaaacagggctctgtcttctgcctctgaaagaaaagaagaaacaggtgcagacatcacaaaagaataccctcaggaagcgtagagtggtcatagttgacccagaaaccaataaagaaatgtctgttcaggaggcctacaagaagggcctaattgattatgaaaccttcaaagaactgtgtgagcaggaatgtgaatgggaagaaataaccatcacgggatcagatggctccaccagggtggtcctggtagatagaaagacaggcagtcagtatgatattcaagatgctattgacaagggccttgttgacaggaagttctttgatcagtaccgatccggcagcctcagcctcactcaatttgctgacatgatctccttgaaaaatggtgtcggcaccagcagcagcatgggcagtggtgtcagcgatgatgtttttagcagctcccgacatgaatcagtaagtaagatttccaccatatccagcgtcaggaatttaaccataaggagcagctctttttcagacaccctggaagaatcgagccccattgcagccatctttgacacagaaaacctggagaaaatctccattacagaaggtatagagcggggcatcgttgacagcatcacgggtcagaggcttctggaggctcaggcctgcacaggtggcatcatccacccaaccacgggccagaagctgtcacttcaggacgcagtctcccagggtgtgattgaccaagacatggccaccaggctgaagcctgctcagaaagccttcataggcttcgagggtgtgaagggaaagaagaagatgtcagcagcagaggcagtgaaagaaaaatggctcccgtatgaggctggccagcgcttcctggagttccagtacctcacgggaggtcttgcagcctctgtgcggcgcggccatctatgaaccccttccggatggcttcttcggtgcttatcctcccatgcacttccgggtcaacaagacctcccgtgaggtactggtcgacg

SEQ ID NO: 327757 - DNA, 6387 bp, Homo sapiens
  misc_feature (6380)..(6380): n is a, c, g, or t
  misc_feature (6383)..(6383): n is a, c, g, or t
cagttggaggaggagtatgaaaacctgctgaaagcgtcctttgagaggatggatcacctgcgacagctgcagaacatcattcaggccacgtccagggagatcatgtggatcaatgactgcgaggaggaggagctgctgtacgactggagcgacaagaacaccaacatcgctcagaaacaggaggccttctccatacgcatgagtcaactggaagttaaagaaaaagagctcaataagctgaaacaagaaagtgaccaacttgtcctcaatcagcatccagcttcagacaaaattgaggcctatatggacactctgcagacgcagtggagttggattcttcagatcaccaagtgcattgatgttcatctgaaagaaaatgctgcctactttcagttttttgaagaggcgcagtctactgaagcatacctgaaggggctccaggactccatcaggaagaagtacccctgcgacaagaacatgcccctgcagcacctgctggaacagatcaaggagctggagaaagaacgagagaaaatccttgaatacaagcgtcaggtgcagaacttggtaaacaagtctaagaagattgtacagctgaagcctcgtaacccagactacagaagcaataaacccattattctcagagctctctgtgactacaaacaagatcagaaaatcgtgcataagggggatgagtgtatcctgaaggacaacaacgagcgcagcaagtggtacgtgacgggcccgggaggcgttgacatgcttgttccctctgtggggctgatcatccctcctccgaacccactggccgtggacctctcttgcaagattgagcagtactacgaagccatcttggctctgtggaaccagctctacatcaacatgaagagcctggtgtcctggcactactgcatgattgacatagagaagatcagggccatgacaatcgccaagctgaaaacaatgcggcaggaagattacatgaagacgatagccgaccttgagttacattaccaagagttcatcagaaatagccaaggctcagagatgtttggagatgatgacaagcggaaaatacagtctcagttcaccgatgcccagaagcattaccagaccctggtcattcagctccctggctatccccagcaccagacagtgaccacaactgaaatcactcatcatggaacctgccaagatgtcaaccataataaagtaattgaaaccaacagagaaaatgacaagcaagaaacatggatgctgatggagctgcagaagattcgcaggcagatagagcactgcgagggcaggatgactctcaaaaacctccctctagcagaccaggggtcttctcaccacatcacagtgaaaattaacgagcttaagagtgtgcagaatgattcacaagcaattgctgaggttctcaaccagcttaaagatatgcttgccaacttcagaggttctgaaaagtactgctatttacagaatgaagtatttggactatttcagaaactggaaaatatcaatggtgttacagatggctacttaaatagcttatgcacagtaagggcactgctccaggctattctccaaacagaagacatgttaaaggtttatgaagccaggctcactgaggaggaaactgtctgcctggacctggataaagtggaagcttaccgctgtggactgaagaaaataaaaaatgacttgaacttgaagaagtcgttgttggccactatgaagacagaactacagaaagcccagcagatccactctcagacttcacagcagtatccactttatgatctggacttgggcaagttcggtgaaaaagtcacacagctgacagaccgctggcaaaggatagataaacagatcgactttagattatgggacctggagaaacaaatcaagcaattgaggaattatcgtgataactatcaggctttctgcaagtggctctatgatgctaaacgccgccaggattccttagaatccatgaaatttggagattccaacacagtcatgcggtttttgaatgagcagaagaacttgcacagtgaaatatctggcaaacgagacaaatcagaggaagtacaaaaaattgctgaactttgcgccaattcaattaaggattatgagctccagctggcctcatacacctcaggactggaaactctgctgaacatacctatcaagaggaccatgattcagtccccttctggggtgattctgcaagaggctgcagatgttcatgctcggtacattgaactacttacaagatctggagactattacaggttcttaagtgagatgctgaagagtttggaagatctgaagctgaaaaataccaagatcgaagttttggaagaggagctcagactggcccgagatgccaactcggaaaactgtaataagaacaaattcctggatcagaacctgcagaaataccaggcagagtgttcccagttcaaagcgaagcttgcgagcctggaggagctgaagagacaggctgagctggatgggaagtcggctaagcaaaatctagacaagtgctacggccaaataaaagaactcaatgagaagatcacccgactgacttatgagattgaagatgaaaagagaagaagaaaatctgtggaagacagatttgaccaacagaagaatgactatgaccaactgcagaaagcaaggcaatgtgaaaaggagaaccttggttggcagaaattagagtctgagaaagccatcaaggagaaggagtacgagattgaaaggttgagggttctactgcaggaagaaggcacccggaagagagaatatgaaaatgagctggcaaaggtaagaaaccactataatgaggagatgagtaatttaaggaacaagtatgaaacagagattaacattacgaagaccaccatcaaggagatatccatgcaaaaagaggatgattccaaaaatcttagaaaccagcttgatagactttcaagggaaaatcgagatctgaaggatgaaattgtcaggctcaatgacagcatcttgcaggccactgagcagcgaaggcgagctgaagaaaacgcccttcagcaaaaggcctgtggctctgagataatgcagaagaagcagcatctggagatagaactgaagcaggtcatgcagcagcgctctgaggacaatgcccggcacaagcagtccctggaggaggctgccaagaccattcaggacaaaaataaggagatcgagagactcaaagctgagtttcaggaggaggccaagcgccgctgggaatatgaaaatgaactgagtaaggtaagaaacaattatgatgaggagatcattagcttaaaaaatcagtttgagaccgagatcaacatcaccaagaccaccatccaccagctcaccatgcagaaggaagaggataccagtggctaccgggctcagatagacaatctcacccgagaaaacaggagcttatctgaagaaataaagaggctgaagaacactctaacccagaccacagagaatctcaggagggtggaagaagacatccaacagcaaaaggccactggctctgaggtgtctcagaggaaacagcagctggaggttgagctgagacaagtcactcagatgcgaacagaggagagcgtaagatataagcaatctcttgatgatgctgccaaaaccatccaggataaaaacaaggagatagaaaggttaaaacaactgatcgacaaagaaacaaatgaccggaaatgcctggaagatgaaaacgcgagattacaaagggtccagtatgacctgcagaaagcaaacagtagtgcgacggagacaataaacaaactgaaggttcaggagcaagaactgacacgcctgaggatcgactatgaaagggtttcccaggagaggactgtgaaggaccaggatatcacgcggttccagaactctctgaaagagctgcagctgcagaagcagaaggtggaagaggagctgaatcggctgaagaggaccgcgtcagaagactcctgcaagaggaagaagctggaggaagagctggaaggcatgaggaggtcgctgaaggagcaagccatcaaaatcaccaacctgacccagcagctggagcaggcatccattgttaagaagaggagtgaggatgacctccggcagcagagggacgtgctggatggccacctgagggaaaagcagaggacccaggaagagctgaggaggctctcttctgaggtcgaggccctgaggcggcagttactccaggaacaggaaagtgtcaaacaagctcacttgaggaatgagcatttccagaaggcgatagaagataaaagcagaagcttaaatgaaagcaaaatagaaattgagaggctgcagtctctcacagagaacctgaccaaggagcacttgatgttagaagaagaactgcggaacctgaggctggagtacgatgacctgaggagaggacgaagcgaagcggacagtgataaaaatgcaaccatcttggaactaaggagccagctgcagatcagcaacaaccggaccctggaactgcaggggctgattaatgatttacagagagagagggaaaatttgagacaggaaattgagaaattccaaaagcaggctttagaggcatctaataggattcaggaatcaaagaatcagtgtactcaggtggtacaggaaagagagagccttctggtgaaaatcaaagtcctggagcaagacaaggcaaggctgcagaggctggaggatgagctgaatcgtgcaaaatcaactctagaggcagaaaccagggtgaaacagcgcctggagtgtgagaaacagcaaattcagaatgacctgaatcagtggaagactcaatattcccgcaaggaggaggctattaggaagatagaatcggaaagagaaaagagtgagagagagaagaacagtcttaggagtgagatcgaaagactccaagcagagatcaagagaattgaagagaggtgcaggcgtaagctggaggattctaccagggagacacagtcacagttagaaacagaacgctcccgatatcagagggagattgataaactcagacagcgcccatatgggtcccatcgagagacccagactgagtgtgagtggaccgttgacacctccaagctggtgtttgatgggctgaggaagaaggtgacagcaatgcagctctatgagtgtcagctgatcgacaaaacaaccttggacaaactattgaaggggaagaagtcagtggaagaagttgcttctgaaatccagccattccttcggggtgcaggatctatcgctggagcatctgcttctcctaaggaaaaatactctttggtagaggccaagagaaagaaattaatcagcccagaatccacagtcatgcttctggaggcccaggcagctacaggtggtataattgatccccatcggaatgagaagctgactgtcgacagtgccatagctcgggacctcattgacttcgatgaccgtcagcagatatatgcagcagaaaaagctatcactggttttgatgatccattttcaggcaagacagtatctgtttcagaagccatcaagaaaaatttgattgatagagaaaccggaatgcgcctgctggaagcccagattgcttcagggggtgtagtagaccctgtgaacagtgtctttttgccaaaagatgtcgccttggcccgggggctgattgatagagatttgtatcgatccctgaatgatccccgagatagtcagaaaaactttgtggatccagtcaccaaaaagaaggtcagttacgtgcagctgaaggaacggtgcagaatcgaaccacatactggtctgctcttgctttcagtacagaagagaagcatgtccttccaaggaatcagacaacctgtgaccgtcactgagctagtagattctggtatattgagaccgtccactgtcaatgaactggaatctggtcagatttcttatgacgaggttggtgagagaattaaggacttcctccagggttcaagctgcatagcaggcatatacaatgagaccacaaaacagaagcttggcatttatgaggccatgaaaattggcttagtccgacctggtactgctctggagttgctggaagcccaagcagctactggctttatagtggatcctgttagcaacttgaggttaccagtggaggaagcctacaagagaggtctggtgggcattgagttcaaagagaagctcctgtctgcagaacgagctgtcactgggtataatgatcctgaaacaggaaacatcatctctttgttccaagccatgaataaggaactcatcgaaaagggccagcagagggtcgacgcggccgcgaatttagtagtagtagncgnccgc

SEQ ID NO: 327758 - DNA, 757 bp, Homo sapiens
cttttggggtctttgctctttggggtctttgctcttttggggtctttgctcttttggggtctttgctcttttggggtctttgctcttttggggtctttgtttatatgaatttccactttattaaataatagaaaagaaaatcccggtgcttgcagtagagtgataggacattctatgcttacagaaaatatagccatgattgaaatcaaatagtaaaggctgttctggctttttatcttcttagctcatcttaaataagcagtacacttggatgcagtgcgtctgaagtgctaatcagttgtaacaatagcacaaatcgaacttaggatttgtttcttctcttctgtgtttcgatttttgatcaattctttaattttggaagcctataatacagttttctattcttggagataaaaattaaatggatcactgatattttagtcattctgcttctcatctaaatatttccatattctgtattaggagaaaattaccctcccagcaccagcccccctctcaaacccccaacccaaaaccaagcattttggaatgagtctcctttagtttcagagtgtggattgtataacccatatactcttcgatgtacttgtttggtttggtattaatttgactgtgcatgacagcggcaatcttttctttggtcaaagttttctgtttattttgcttgtcatattcgatgtactttaaggtgtctttatgaagtttgctattctggcaataaacttttagacttttg

SEQ ID NO: 327759 - DNA, 685 bp, Homo sapiens
  misc_feature (13)..(13): n is a, c, g, or t
  misc_feature (21)..(21): n is a, c, g, or t
tctacaggatctnctgacttnggacgctttatatgaatttccactttattaaataatagaaaagaaaatcccggtgcttgcagtagagtgataggacattctatgcttacagaaaatatagccatgattgaaatcaaatagtaaaggctgttctggctttttatcttcttagctcatcttaaataagcagtacacttggatgcagtgcgtctgaagtgctaatcagttgtaacaatagcacaaatcgaacttaggatttgtttcttctcttctgtgtttcgatttttgatcaattctttaattttggaagcctataatacagttttctattcttggagataaaaattaaatggatcactgatattttagtcattctgcttctcatctaaatatttccatattctgtattaggagaaaattaccctcccagcaccagcccccctctcaaacccccaacccaaaaccaagcattttggaatgagtctcctttagtttcagagtgtggattgtataacccatatactcttcgatgtacttgtttggtttggtattaatttgactgtgcatgacagcggcaatcttttctttggtcaaagttttctgtttattttgcttgtcatattcgatgtactttaaggtgtctttatgaagtttgctattctggcaataaacttttagacttttg

SEQ ID NO: 327760 - DNA, 3893 bp, Homo sapiens
  misc_feature (3886)..(3886): n is a, c, g, or t
  misc_feature (3889)..(3889): n is a, c, g, or t
cagttggaggaggagtatgaaaacctgctgaaagcgtcctttgagaggatggatcacctgcgacagctgcagaacatcattcaggccacgtccagggagatcatgtggatcaatgactgcgaggaggaggagctgctgtacgactggagcgacaagaacaccaacatcgctcagaaacaggaggccttctccatacgcatgagtcaactggaagttaaagaaaaagagctcaataagctgaaacaagaaagtgaccaacttgtcctcaatcagcatccagcttcagacaaaattgaggcctatatggacactctgcagacgcagtggagttggattcttcagatcaccaagtgcattgatgttcatctgaaagaaaatgctgcctactttcagttttttgaagaggcgcagtctactgaagcatacctgaaggggctccaggactccatcaggaagaagtacccctgcgacaagaacatgcccctgcagcacctgctggaacagatcaaggagctggagaaagaacgagagaaaatccttgaatacaagcgtcaggtgcagaacttggtaaacaagtctaagaagattgtacagctgaagcctcgtaacccagactacagaagcaataaacccattattctcagagctctctgtgactacaaacaagatcagaaaatcgtgcataagggggatgagtgtatcctgaaggacaacaacgagcgcagcaagtggtacgtgacgggcccgggaggcgttgacatgcttgttccctctgtggggctgatcatccctcctccgaacccactggccgtggacctctcttgcaagattgagcagtactacgaagccatcttggctctgtggaaccagctctacatcaacatgaagagcctggtgtcctggcactactgcatgattgacatagagaagatcagggccatgacaatcgccaagctgaaaacaatgcggcaggaagattacatgaagacgatagccgaccttgagttacattaccaagagttcatcagaaatagccaaggctcagagatgtttggagatgatgacaagcggaaaatacagtctcagttcaccgatgcccagaagcattaccagaccctggtcattcagctccctggctatccccagcaccagacagtgaccacaactgaaatcactcatcatggaacctgccaagatgtcaaccataataaagtaattgaaaccaacagagaaaatgacaagcaagaaacatggatgctgatggagctgcagaagattcgcaggcagatagagcactgcgagggcaggatgactctcaaaaacctccctctagcagaccaggggtcttctcaccacatcacagtgaaaattaacgagcttaagagtgtgcagaatgattcacaagcaattgctgaggttctcaaccagcttaaagatatgcttgccaacttcagaggttctgaaaagtactgctatttacagaatgaagtatttggactatttcagaaactggaaaatatcaatggtgttacagatggctacttaaatagcttatgcacagtaagggcactgctccaggctattctccaaacagaagacatgttaaaggtttatgaagccaggctcactgaggaggaaactgtctgcctggacctggataaagtggaagcttaccgctgtggactgaagaaaataaaaaatgacttgaacttgaagaagtcgttgttggccactatgaagacagaactacagaaagcccagcagatccactctcagacttcacagcagtatccactttatgatctggacttgggcaagttcggtgaaaaagtcacacagctgacagaccgctggcaaaggatagataaacagatcgactttagattatgggacctggagaaacaaatcaagcaattgaggaattatcgtgataactatcaggctttctgcaagtggctctatgatgctaaacgccgccaggattccttagaatccatgaaatttggagattccaacacagtcatgcggtttttgaatgagcagaagaacttgcacagtgaaatatctggcaaacgagacaaatcagaggaagtacaaaaaattgctgaactttgcgccaattcaattaaggattatgagctccagctggcctcatacacctcaggactggaaactctgctgaacatacctatcaagaggaccatgattcagtccccttctggggtgattctgcaagaggctgcagatgttcatgctcggtacattgaactacttacaagatctggagactattacaggttcttaagtgagatgctgaagagtttggaagatctgaagctgaaaaataccaagatcgaagttttggaagaggagctcagactggcccgagatgccaactcggaaaactgtaataagaacaaattcctggatcagaacctgcagaaataccaggcagagtgttcccagttcaaagcgaagcttgcgagcctggaggagctgaagagacaggctgagctggatgggaagtcggctaagcaaaatctagacaagtgctacggccaaataaaagaactcaatgagaagatcacccgactgacttatgagattgaagatgaaaagagaagaagaaaatctgtggaagacagatttgaccaacagaagaatgactatgaccaactgcagaaagcaaggcaatgtgaaaaggagaaccttggttggcagaaattagagtctgagaaagccatcaaggagaaggagtacgagattgaaaggttgagggttctactgcaggaagaaggcacccggaagagagaatatgaaaatgagctggcaaaggtaagaaaccactataatgaggagatgagtaatttaaggaacaagtatgaaacagagattaacattacgaagaccaccatcaaggagatatccatgcaaaaagaggatgattccaaaaatcttagaaaccagcttgatagactttcaagggaaaatcgagatctgaaggatgaaattgtcaggctcaatgacagcatcttgcaggccactgagcagcgaaggcgagctgaagaaaacgcccttcagcaaaaggcctgtggctctgagataatgcagaagaagcagcatctggagatagaactgaagcaggtcatgcagcagcgctctgaggacaatgcccggcacaagcagtccctggaggaggctgccaagaccattcaggacaaaaataaggagatcgagagactcaaagctgagtttcaggaggaggccaagcgccgctgggaatatgaaaatgaactgagtaaggtaagaaacaattatgatgaggagatcattagcttaaaaaatcagtttgagaccgagatcaacatcaccaagaccaccatccaccagctcaccatgcagaaggaagaggataccagtggctaccgggctcagatagacaatctcacccgagaaaacaggagcttatctgaagaaataaagaggctgaagaacactctaacccagaccacagagaatctcaggagggtggaagaagacatccaacagcaaaaggccactggctctgaggtgtctcagaggaaacagcagctggaggttgagctgagacaagtcactcagatgcgaacagaggagagcgtaagatataagcaatctcttgatgatgctgccaaaaccatccaggataaaaacaaggagatagaaaggttaaaacaactgatcgacaaagaaacaaatgaccggaaatgcctggaagatgaaaacgcgagattacaaagggtccagtatgacctgcagaaagcaaacagtagtgcgacggagacaataaacaaactgaaggttcagggcagagggtcgacgcggccgcgaatttagtagtagtagncgnccgc

SEQ ID NO: 327761 - DNA, 370 bp, Homo sapiens
aaaaaaaaaaaaaaaaaatacatgtaaaacccaaaaccacccaagaacccaagaaggcctgatctgtagtgtgaggatccagggcgcagctccgggggggggccgtggctggggggaggggcccccctctcaaacccccaacccaaaaccaagcattttggaatgagtctcctttagtttcagagtgtggattgtataacccatatactcttcgatgtacttgtttggtttggtattaatttgactgtgcatgacagcggcaatcttttctttggtcaaagttttctgtttattttgcttgtcatattcgatgtactttaaggtgtctttatgaagtttgctattctggcaataaacttttagacttttg

SEQ ID NO: 327762 - DNA, 129 bp, Homo sapiens
tgaactttgcgccaattcaattaaggtatgttggtttcataaagaatgttggtatttcaccaagattattattaactgcatgacttgctgatttgttgtaaagcgtatacacttcctgaggatagcaat

SEQ ID NO: 327763 - DNA, 374 bp, Homo sapiens
gtattcacaaatacttgatcacagcttcactgtttctcaaattattcatcacattattatctcatctgaactgtgctctttctgcttaaatagatgcttatagaaaatctaatttttctttttattgctctactacttcctgtcataatccaggtaactgctttaaaataatttcaatgctgtgtgccctgctgttctttaattgcatcaaatgctgatctctgggtagcctgtgtttggccctgcttttaagaacactaatacatgtataacttcctccgaatgttccattctacttcttagaagttagctcttatttagtgagctatgacatacatttgtaatgaaaattttcttaaatagaagccatacta

SEQ ID NO: 327764 - DNA, 503 bp, Homo sapiens
ccactggccgtggacctctcttgcaagtaagtcatccaagttcccaaagccacgcatgcacgcatgaatgtgagggcagaggaagagggcaggtgtttatacctgaagcttagacacacgatgccttgccataataaacaccttctaaaaaaaggaaccttgtgaaggtcaccttcactttgtcttgcaattttatgttgaatagacagtcgttattgaagaataaaagggaatatctggccgggtgtggtggcttatgcctgtaatcccagcacttggggagaccgaggtgggcggatcacctgaggttaggagtttgagaccagcctgaccaacatggagaaactctgtctctactaaaaatataaaattagccaggtgtggtggtacatgcctgtaatcccagctactcgggaggttgaggcaggagaattgcttgaacctgggagggggaggttgcagtgagctgagatcgtgccactgcactccagcctgggcaacga

SEQ ID NO: 327765 - DNA, 8820 bp, Homo sapiens
cagttggaggaggagtatgaaaacctgctgaaagcgtcctttgagaggatggatcacctgcgacagctgcagaacatcattcaggccacgtccagggagatcatgtggatcaatgactgcgaggaggaggagctgctgtacgactggagcgacaagaacaccaacatcgctcagaaacaggaggccttctccatacgcatgagtcaactggaagttaaagaaaaagagctcaataagctgaaacaagaaagtgaccaacttgtcctcaatcagcatccagcttcagacaaaattgaggcctatatggacactctgcagacgcagtggagttggattcttcagatcaccaagtgcattgatgttcatctgaaagaaaatgctgcctactttcagttttttgaagaggcgcagtctactgaagcatacctgaaggggctccaggactccatcaggaagaagtacccctgcgacaagaacatgcccctgcagcacctgctggaacagatcaaggagctggagaaagaacgagagaaaatccttgaatacaagcgtcaggtgcagaacttggtaaacaagtctaagaagattgtacagctgaagcctcgtaacccagactacagaagcaataaacccattattctcagagctctctgtgactacaaacaagatcagaaaatcgtgcataagggggatgagtgtatcctgaaggacaacaacgagcgcagcaagtggtacgtgacgggcccgggaggcgttgacatgcttgttccctctgtggggctgatcatccctcctccgaacccactggccgtggacctctcttgcaagattgagcagtactacgaagccatcttggctctgtggaaccagctctacatcaacatgaagagcctggtgtcctggcactactgcatgattgacatagagaagatcagggccatgacaatcgccaagctgaaaacaatgcggcaggaagattacatgaagacgatagccgaccttgagttacattaccaagagttcatcagaaatagccaaggctcagagatgtttggagatgatgacaagcggaaaatacagtctcagttcaccgatgcccagaagcattaccagaccctggtcattcagctccctggctatccccagcaccagacaggtcggcttgggacatctttctctttgtatcaaccatccataccattttaaaaagaaaggagtttgcataaaactggtttcagaaccatttctctgaatgctatatagccagtgttcttcgtgcactaaattttcagaattgattctgaaattcaaaggaagaaggtatacttttaggtagtatggatgttttttgaggcctagcaccttgatacctaggtattctctgatttttgtggccctaacttctttttacagtgaccacaactgaaatcactcatcatggaacctgccaagatgtcaaccataataaagtaattgaaaccaacagagaaaatgacaagcaagaaacatggatgctgatggagctgcagaagattcgcaggcagatagagcactgcgagggcaggatgactctcaaaaacctccctctagcagaccaggggtcttctcaccacatcacagtgaaaattaacgagcttaagagtgtgcagaatgattcacaagcaattgctgaggttctcaaccagcttaaagatatgcttgccaacttcagaggttctgaaaagtactgctatttacagaatgaagtatttggactatttcagaaactggaaaatatcaatggtgttacagatggctacttaaatagcttatgcacagtaagggcactgctccaggctattctccaaacagaagacatgttaaaggtttatgaagccaggctcactgaggaggaaactgtctgcctggacctggataaagtggaagcttaccgctgtggactgaagaaaataaaaaatgacttgaacttgaagaagtcgttgttggccactatgaagacagaactacagaaagcccagcagatccactctcagacttcacagcagtatccactttatgatctggacttgggcaagttcggtgaaaaagtcacacagctgacagaccgctggcaaaggatagataaacagatcgactttagattatgggacctggagaaacaaatcaagcaattgaggaattatcgtgataactatcaggctttctgcaagtggctctatgatgctaaacgccgccaggattccttagaatccatgaaatttggagattccaacacagtcatgcggtttttgaatgagcagaagaacttgcacagtgaaatatctggcaaacgagacaaatcagaggaagtacaaaaaattgctgaactttgcgccaattcaattaaggattatgagctccagctggcctcatacacctcaggactggaaactctgctgaacatacctatcaagaggaccatgattcagtccccttctggggtgattctgcaagaggctgcagatgttcatgctcggtacattgaactacttacaagatctggagactattacaggttcttaagtgagatgctgaagagtttggaagatctgaagctgaaaaataccaagatcgaagttttggaagaggagctcagactggcccgagatgccaactcggaaaactgtaataagaacaaattcctggatcagaacctgcagaaataccaggcagagtgttcccagttcaaagcgaagcttgcgagcctggaggagctgaagagacaggctgagctggatgggaagtcggctaagcaaaatctagacaagtgctacggccaaataaaagaactcaatgagaagatcacccgactgacttatgagattgaagatgaaaagagaagaagaaaatctgtggaagacagatttgaccaacagaagaatgactatgaccaactgcagaaagcaaggcaatgtgaaaaggagaaccttggttggcagaaattagagtctgagaaagccatcaaggagaaggagtacgagattgaaaggttgagggttctactgcaggaagaaggcacccggaagagagaatatgaaaatgagctggcaaaggtaagaaaccactataatgaggagatgagtaatttaaggaacaagtatgaaacagagattaacattacgaagaccaccatcaaggagatatccatgcaaaaagaggatgattccaaaaatcttagaaaccagcttgatagactttcaagggaaaatcgagatctgaaggatgaaattgtcaggctcaatgacagcatcttgcaggccactgagcagcgaaggcgagctgaagaaaacgcccttcagcaaaaggcctgtggctctgagataatgcagaagaagcagcatctggagatagaactgaagcaggtcatgcagcagcgctctgaggacaatgcccggcacaagcagtccctggaggaggctgccaagaccattcaggacaaaaataaggagatcgagagactcaaagctgagtttcaggaggaggccaagcgccgctgggaatatgaaaatgaactgagtaaggtaagaaacaattatgatgaggagatcattagcttaaaaaatcagtttgagaccgagatcaacatcaccaagaccaccatccaccagctcaccatgcagaaggaagaggataccagtggctaccgggctcagatagacaatctcacccgagaaaacaggagcttatctgaagaaataaagaggctgaagaacactctaacccagaccacagagaatctcaggagggtggaagaagacatccaacagcaaaaggccactggctctgaggtgtctcagaggaaacagcagctggaggttgagctgagacaagtcactcagatgcgaacagaggagagcgtaagatataagcaatctcttgatgatgctgccaaaaccatccaggataaaaacaaggagatagaaaggttaaaacaactgatcgacaaagaaacaaatgaccggaaatgcctggaagatgaaaacgcgagattacaaagggtccagtatgacctgcagaaagcaaacagtagtgcgacggagacaataaacaaactgaaggttcaggagcaagaactgacacgcctgaggatcgactatgaaagggtttcccaggagaggactgtgaaggaccaggatatcacgcggttccagaactctctgaaagagctgcagctgcagaagcagaaggtggaagaggagctgaatcggctgaagaggaccgcgtcagaagactcctgcaagaggaagaagctggaggaagagctggaaggcatgaggaggtcgctgaaggagcaagccatcaaaatcaccaacctgacccagcagctggagcaggcatccattgttaagaagaggagtgaggatgacctccggcagcagagggacgtgctggatggccacctgagggaaaagcagaggacccaggaagagctgaggaggctctcttctgaggtcgaggccctgaggcggcagttactccaggaacaggaaagtgtcaaacaagctcacttgaggaatgagcatttccagaaggcgatagaagataaaagcagaagcttaaatgaaagcaaaatagaaattgagaggctgcagtctctcacagagaacctgaccaaggagcacttgatgttagaagaagaactgcggaacctgaggctggagtacgatgacctgaggagaggacgaagcgaagcggacagtgataaaaatgcaaccatcttggaactaaggagccagctgcagatcagcaacaaccggaccctggaactgcaggggctgattaatgatttacagagagagagggaaaatttgagacaggaaattgagaaattccaaaagcaggctttagaggcatctaataggattcaggaatcaaagaatcagtgtactcaggtggtacaggaaagagagagccttctggtgaaaatcaaagtcctggagcaagacaaggcaaggctgcagaggctggaggatgagctgaatcgtgcaaaatcaactctagaggcagaaaccagggtgaaacagcgcctggagtgtgagaaacagcaaattcagaatgacctgaatcagtggaagactcaatattcccgcaaggaggaggctattaggaagatagaatcggaaagagaaaagagtgagagagagaagaacagtcttaggagtgagatcgaaagactccaagcagagatcaagagaattgaagagaggtgcaggcgtaagctggaggattctaccagggagacacagtcacagttagaaacagaacgctcccgatatcagagggagattgataaactcagacagcgcccatatgggtcccatcgagagacccagactgagtgtgagtggaccgttgacacctccaagctggtgtttgatgggctgaggaagaaggtgacagcaatgcagctctatgagtgtcagctgatcgacaaaacaaccttggacaaactattgaaggggaagaagtcagtggaagaagttgcttctgaaatccagccattccttcggggtgcaggatctatcgctggagcatctgcttctcctaaggaaaaatactctttggtagaggccaagagaaagaaattaatcagcccagaatccacagtcatgcttctggaggcccaggcagctacaggtggtataattgatccccatcggaatgagaagctgactgtcgacagtgccatagctcgggacctcattgacttcgatgaccgtcagcagatatatgcagcagaaaaagctatcactggttttgatgatccattttcaggcaagacagtatctgtttcagaagccatcaagaaaaatttgattgatagagaaaccggaatgcgcctgctggaagcccagattgcttcagggggtgtagtagaccctgtgaacagtgtctttttgccaaaagatgtcgccttggcccgggggctgattgatagagatttgtatcgatccctgaatgatccccgagatagtcagaaaaactttgtggatccagtcaccaaaaagaaggtcagttacgtgcagctgaaggaacggtgcagaatcgaaccacatactggtctgctcttgctttcagtacagaagagaagcatgtccttccaaggaatcagacaacctgtgaccgtcactgagctagtagattctggtatattgagaccgtccactgtcaatgaactggaatctggtcagatttcttatgacgaggttggtgagagaattaaggacttcctccagggttcaagctgcatagcaggcatatacaatgagaccacaaaacagaagcttggcatttatgaggccatgaaaattggcttagtccgacctggtactgctctggagttgctggaagcccaagcagctactggctttatagtggatcctgttagcaacttgaggttaccagtggaggaagcctacaagagaggtctggtgggcattgagttcaaagagaagctcctgtctgcagaacgagctgtcactgggtataatgatcctgaaacaggaaacatcatctctttgttccaagccatgaataaggaactcatcgaaaagggccacggtattcgcttattagaagcacagatcgcaaccggggggatcattgacccaaaggagagccatcgtttaccagttgacatagcatataagaggggctatttcaatgaggaactcagtgagattctctcagatccaagtgatgataccaaaggattttttgaccccaacactgaagaaaatcttacctatctgcaactaaaagaaagatgcattaaggatgaggaaacagggctctgtcttctgcctctgaaagaaaagaagaaacaggtgcagacatcacaaaagaataccctcaggaagcgtagagtggtcatagttgacccagaaaccaataaagaaatgtctgttcaggaggcctacaagaagggcctaattgattatgaaaccttcaaagaactgtgtgagcaggaatgtgaatgggaagaaataaccatcacgggatcagatggctccaccagggtggtcctggtagatagaaagacaggcagtcagtatgatattcaagatgctattgacaagggccttgttgacaggaagttctttgatcagtaccgatccggcagcctcagcctcactcaatttgctgacatgatctccttgaaaaatggtgtcggcaccagcagcagcatgggcagtggtgtcagcgatgatgtttttagcagctcccgacatgaatcagtaagtaagatttccaccatatccagcgtcaggaatttaaccataaggagcagctctttttcagacaccctggaagaatcgagccccattgcagccatctttgacacagaaaacctggagaaaatctccattacagaaggtatagagcggggcatcgttgacagcatcacgggtcagaggcttctggaggctcaggcctgcacaggtggcatcatccacccaaccacgggccagaagctgtcacttcaggacgcagtctcccagggtgtgattgaccaagacatggccaccaggctgaagcctgctcagaaagccttcataggcttcgagggtgtgaagggaaagaagaagatgtcagcagcagaggcagtgaaagaaaaatggctcccgtatgaggctggccagcgcttcctggagttccagtacctcacgggaggtcttgttgacccggaagtgcatgggaggataagcaccgaagaagccatccggaaggggttcatagatggccgcgccgcacagaggctgcaagacaccagcagctatgccaaaatcctgacctgccccaaaaccaaattaaaaatatcctataaggatgccataaatcgctccatggtagaagatatcactgggctgcgccttctggaagccgcctccgtgtcgtccaagggcttacccagcccttacaacatgtcttcggctccgggctcccgctccggctcccgctcgggatctcgctccggatctcgctccgggtcccgcagtgggtcccggagaggaagctttgacgccacagggaattcttcctactcttattcctactcatttagcagtagttctattgggcactagtagtcagttgggagtggttgctataccttgacttcatttatatgaatttccactttattaaataatagaaaagaaaatcccggtgcttgcagtagagtgataggacattctatgcttacagaaaatatagccatgattgaaatcaaatagtaaaggctgttctggctttttatcttcttagctcatcttaaataagcagtacacttggatgcagtgcgtctgaagtgctaatcagttgtaacaatagcacaaatcgaacttaggatttgtttcttctcttctgtgtttcgatttttgatcaattctttaattttggaagcctataatacagttttctattcttggagataaaaattaaatggatcactgatattttagtcattctgcttctcatctaaatatttccatattctgtattaggagaaaattaccctcccagcaccagcccccctctcaaacccccaacccaaaaccaagcattttggaatgagtctcctttagtttcagagtgtggattgtataacccatatactcttcgatgtacttgtttggtttggtattaatttgactgtgcatgacagcggcaatcttttctttggtcaaagttttctgtttattttgcttgtcatattcgatgtactttaaggtgtctttatgaagtttgctattctggcaataaacttttagacttttg

SEQ ID NO: 327766 - DNA, 6268 bp, Homo sapiens
tctccatgactggcaccacgatcggcagagcgggaacgggtgactgcttgcgcctcttcactctggcagggcggatgtgctgcaccttgacaggcctggtggcctcactggagctgccgtcttaaattcctggatcagaacctgcagaaataccaggcagagtgttcccagttcaaagcgaagcttgcgagcctggaggagctgaagagacaggctgagctggatgggaagtcggctaagcaaaatctagacaagtgctacggccaaataaaagaactcaatgagaagatcacccgactgacttatgagattgaagatgaaaagagaagaagaaaatctgtggaagacagatttgaccaacagaagaatgactatgaccaactgcagaaagcaaggcaatgtgaaaaggagaaccttggttggcagaaattagagtctgagaaagccatcaaggagaaggagtacgagattgaaaggttgagggttctactgcaggaagaaggcacccggaagagagaatatgaaaatgagctggcaaaggtaagaaaccactataatgaggagatgagtaatttaaggaacaagtatgaaacagagattaacattacgaagaccaccatcaaggagatatccatgcaaaaagaggatgattccaaaaatcttagaaaccagcttgatagactttcaagggaaaatcgagatctgaaggatgaaattgtcaggctcaatgacagcatcttgcaggccactgagcagcgaaggcgagctgaagaaaacgcccttcagcaaaaggcctgtggctctgagataatgcagaagaagcagcatctggagatagaactgaagcaggtcatgcagcagcgctctgaggacaatgcccggcacaagcagtccctggaggaggctgccaagaccattcaggacaaaaataaggagatcgagagactcaaagctgagtttcaggaggaggccaagcgccgctgggaatatgaaaatgaactgagtaaggtaagaaacaattatgatgaggagatcattagcttaaaaaatcagtttgagaccgagatcaacatcaccaagaccaccatccaccagctcaccatgcagaaggaagaggataccagtggctaccgggctcagatagacaatctcacccgagaaaacaggagcttatctgaagaaataaagaggctgaagaacactctaacccagaccacagagaatctcaggagggtggaagaagacatccaacagcaaaaggccactggctctgaggtgtctcagaggaaacagcagctggaggttgagctgagacaagtcactcagatgcgaacagaggagagcgtaagatataagcaatctcttgatgatgctgccaaaaccatccaggataaaaacaaggagatagaaaggttaaaacaactgatcgacaaagaaacaaatgaccggaaatgcctggaagatgaaaacgcgagattacaaagggtccagtatgacctgcagaaagcaaacagtagtgcgacggagacaataaacaaactgaaggttcaggagcaagaactgacacgcctgaggatcgactatgaaagggtttcccaggagaggactgtgaaggaccaggatatcacgcggttccagaactctctgaaagagctgcagctgcagaagcagaaggtggaagaggagctgaatcggctgaagaggaccgcgtcagaagactcctgcaagaggaagaagctggaggaagagctggaaggcatgaggaggtcgctgaaggagcaagccatcaaaatcaccaacctgacccagcagctggagcaggcatccattgttaagaagaggagtgaggatgacctccggcagcagagggacgtgctggatggccacctgagggaaaagcagaggacccaggaagagctgaggaggctctcttctgaggtcgaggccctgaggcggcagttactccaggaacaggaaagtgtcaaacaagctcacttgaggaatgagcatttccagaaggcgatagaagataaaagcagaagcttaaatgaaagcaaaatagaaattgagaggctgcagtctctcacagagaacctgaccaaggagcacttgatgttagaagaagaactgcggaacctgaggctggagtacgatgacctgaggagaggacgaagcgaagcggacagtgataaaaatgcaaccatcttggaactaaggagccagctgcagatcagcaacaaccggaccctggaactgcaggggctgattaatgatttacagagagagagggaaaatttgagacaggaaattgagaaattccaaaagcaggctttagaggcatctaataggattcaggaatcaaagaatcagtgtactcaggtggtacaggaaagagagagccttctggtgaaaatcaaagtcctggagcaagacaaggcaaggctgcagaggctggaggatgagctgaatcgtgcaaaatcaactctagaggcagaaaccagggtgaaacagcgcctggagtgtgagaaacagcaaattcagaatgacctgaatcagtggaagactcaatattcccgcaaggaggaggctattaggaagatagaatcggaaagagaaaagagtgagagagagaagaacagtcttaggagtgagatcgaaagactccaagcagagatcaagagaattgaagagaggtgcaggcgtaagctggaggattctaccagggagacacagtcacagttagaaacagaacgctcccgatatcagagggagattgataaactcagacagcgcccatatgggtcccatcgagagacccagactgagtgtgagtggaccgttgacacctccaagctggtgtttgatgggctgaggaagaaggtgacagcaatgcagctctatgagtgtcagctgatcgacaaaacaaccttggacaaactattgaaggggaagaagtcagtggaagaagttgcttctgaaatccagccattccttcggggtgcaggatctatcgctggagcatctgcttctcctaaggaaaaatactctttggtagaggccaagagaaagaaattaatcagcccagaatccacagtcatgcttctggaggcccaggcagctacaggtggtataattgatccccatcggaatgagaagctgactgtcgacagtgccatagctcgggacctcattgacttcgatgaccgtcagcagatatatgcagcagaaaaagctatcactggttttgatgatccattttcaggcaagacagtatctgtttcagaagccatcaagaaaaatttgattgatagagaaaccggaatgcgcctgctggaagcccagattgcttcagggggtgtagtagaccctgtgaacagtgtctttttgccaaaagatgtcgccttggcccgggggctgattgatagagatttgtatcgatccctgaatgatccccgagatagtcagaaaaactttgtggatccagtcaccaaaaagaaggtcagttacgtgcagctgaaggaacggtgcagaatcgaaccacatactggtctgctcttgctttcagtacagaagagaagcatgtccttccaaggaatcagacaacctgtgaccgtcactgagctagtagattctggtatattgagaccgtccactgtcaatgaactggaatctggtcagatttcttatgacgaggttggtgagagaattaaggacttcctccagggttcaagctgcatagcaggcatatacaatgagaccacaaaacagaagcttggcatttatgaggccatgaaaattggcttagtccgacctggtactgctctggagttgctggaagcccaagcagctactggctttatagtggatcctgttagcaacttgaggttaccagtggaggaagcctacaagagaggtctggtgggcattgagttcaaagagaagctcctgtctgcagaacgagctgtcactgggtataatgatcctgaaacaggaaacatcatctctttgttccaagccatgaataaggaactcatcgaaaagggccacggtattcgcttattagaagcacagatcgcaaccggggggatcattgacccaaaggagagccatcgtttaccagttgacatagcatataagaggggctatttcaatgaggaactcagtgagattctctcagatccaagtgatgataccaaaggattttttgaccccaacactgaagaaaatcttacctatctgcaactaaaagaaagatgcattaaggatgaggaaacagggctctgtcttctgcctctgaaagaaaagaagaaacaggtgcagacatcacaaaagaataccctcaggaagcgtagagtggtcatagttgacccagaaaccaataaagaaatgtctgttcaggaggcctacaagaagggcctaattgattatgaaaccttcaaagaactgtgtgagcaggaatgtgaatgggaagaaataaccatcacgggatcagatggctccaccagggtggtcctggtagatagaaagacaggcagtcagtatgatattcaagatgctattgacaagggccttgttgacaggaagttctttgatcagtaccgatccggcagcctcagcctcactcaatttgctgacatgatctccttgaaaaatggtgtcggcaccagcagcagcatgggcagtggtgtcagcgatgatgtttttagcagctcccgacatgaatcagtaagtaagatttccaccatatccagcgtcaggaatttaaccataaggagcagctctttttcagacaccctggaagaatcgagccccattgcagccatctttgacacagaaaacctggagaaaatctccattacagaaggtatagagcggggcatcgttgacagcatcacgggtcagaggcttctggaggctcaggcctgcacaggtggcatcatccacccaaccacgggccagaagctgtcacttcaggacgcagtctcccagggtgtgattgaccaagacatggccaccaggctgaagcctgctcagaaagccttcataggcttcgagggtgtgaagggaaagaagaagatgtcagcagcagaggcagtgaaagaaaaatggctcccgtatgaggctggccagcgcttcctggagttccagtacctcacgggaggtcttgttgacccggaagtgcatgggaggataagcaccgaagaagccatccggaaggggttcatagatggccgcgccgcacagaggctgcaagacaccagcagctatgccaaaatcctgacctgccccaaaaccaaattaaaaatatcctataaggatgccataaatcgctccatggtagaagatatcactgggctgcgccttctggaagccgcctccgtgtcgtccaagggcttacccagcccttacaacatgtcttcggctccgggctcccgctccggctcccgctcgggatctcgctccggatctcgctccgggtcccgcagtgggtcccggagaggaagctttgacgccacagggaattcttcctactcttattcctactcatttagcagtagttctattgggcactagtagtcagttgggagtggttgctataccttgacttcatttatatgaatttccactttattaaataatagaaaagaaaatcccggtgcttgcagtagagtgataggacattctatgcttacagaaaatatagccatgattgaaatcaaatagtaaaggctgttctggctttttatcttcttagctcatcttaaataagcagtacacttggatgcagtgcgtctgaagtgctaatcagttgtaacaatagcacaaatcgaacttaggatttgtttcttctcttctgtgtttcgatttttgatcaattctttaattttggaagcctataatacagttttctattcttggagataaaaattaaatggatcactgatattttagtcattctgcttctcatctaaatatttccatattctgtattaggagaaaattaccctcccagcaccagcccccctctcaaacccccaacccaaaaccaagcattttggaatgagtctcctttagtttcagagtgtggattgtataacccatatactcttcgatgtacttgtttggtttggtattaatttgactgtgcatgacagcggcaatcttttctttggtcaaagttttctgtttattttgcttgtcatattcgatgtactttaaggtgtctttatgaagtttgctattctggcaataaacttttagacttttg

SEQ ID NO: 327767 - DNA, 8311 bp, Homo sapiens
cagttggaggaggagtatgaaaacctgctgaaagcgtcctttgagaggatggatcacctgcgacagctgcagaacatcattcaggccacgtccagggagatcatgtggatcaatgactgcgaggaggaggagctgctgtacgactggagcgacaagaacaccaacatcgctcagaaacaggaggccttctccatacgcatgagtcaactggaagttaaagaaaaagagctcaataagctgaaacaagaaagtgaccaacttgtcctcaatcagcatccagcttcagacaaaattgaggcctatatggacactctgcagacgcagtggagttggattcttcagatcaccaagtgcattgatgttcatctgaaagaaaatgctgcctactttcagttttttgaagaggcgcagtctactgaagcatacctgaaggggctccaggactccatcaggaagaagtacccctgcgacaagaacatgcccctgcagcacctgctggaacagatcaaggagctggagaaagaacgagagaaaatccttgaatacaagcgtcaggtgcagaacttggtaaacaagtctaagaagattgtacagctgaagcctcgtaacccagactacagaagcaataaacccattattctcagagctctctgtgactacaaacaagatcagaaaatcgtgcataagggggatgagtgtatcctgaaggacaacaacgagcgcagcaagtggtacgtgacgggcccgggaggcgttgacatgcttgttccctctgtggggctgatcatccctcctccgaacccactggccgtggacctctcttgcaagattgagcagtactacgaagccatcttggctctgtggaaccagctctacatcaacatgaagagcctggtgtcctggcactactgcatgattgacatagagaagatcagggccatgacaatcgccaagctgaaaacaatgcggcaggaagattacatgaagacgatagccgaccttgagttacattaccaagagttcatcagaaatagccaaggctcagagatgtttggagatgatgacaagcggaaaatacagtctcagttcaccgatgcccagaagcattaccagaccctggtcattcagctccctggctatccccagcaccagacagtgaccacaactgaaatcactcatcatggaacctgccaagatgtcaaccataataaagtaattgaaaccaacagagaaaatgacaagcaagaaacatggatgctgatggagctgcagaagattcgcaggcagatagagcactgcgagggcaggatgactctcaaaaacctccctctagcagaccaggggtcttctcaccacatcacagtgaaaattaacgagcttaagagtgtgcagaatgattcacaagcaattgctgaggttctcaaccagcttaaagatatgcttgccaacttcagaggttctgaaaagtactgctatttacagaatgaagtatttggactatttcagaaactggaaaatatcaatggtgttacagatggctacttaaatagcttatgcacagtaagggcactgctccaggctattctccaaacagaagacatgttaaaggtttatgaagccaggctcactgaggaggaaactgtctgcctggacctggataaagtggaagcttaccgctgtggactgaagaaaataaaaaatgacttgaacttgaagaagtcgttgttggccactatgaagacagaactacagaaagcccagcagatccactctcagacttcacagcagtatccactttatgatctggacttgggcaagttcggtgaaaaagtcacacagctgacagaccgctggcaaaggatagataaacagatcgactttagattatgggacctggagaaacaaatcaagcaattgaggaattatcgtgataactatcaggctttctgcaagtggctctatgatgctaaacgccgccaggattccttagaatccatgaaatttggagattccaacacagtcatgcggtttttgaatgagcagaagaacttgcacagtgaaatatctggcaaacgagacaaatcagaggaagtacaaaaaattgctgaactttgcgccaattcaattaaggattatgagctccagctggcctcatacacctcaggactggaaactctgctgaacatacctatcaagaggaccatgattcagtccccttctggggtgattctgcaagaggctgcagatgttcatgctcggtacattgaactacttacaagatctggagactattacaggttcttaagtgagatgctgaagagtttggaagatctgaagctgaaaaataccaagatcgaagttttggaagaggagctcagactggcccgagatgccaactcggaaaactgtaataagaacaaattcctggatcagaacctgcagaaataccaggcagagtgttcccagttcaaagcgaagcttgcgagcctggaggagctgaagagacaggctgagctggatgggaagtcggctaagcaaaatctagacaagtgctacggccaaataaaagaactcaatgagaagatcacccgactgacttatgagattgaagatgaaaagagaagaagaaaatctgtggaagacagatttgaccaacagaagaatgactatgaccaactgcagaaagcaaggcaatgtgaaaaggagaaccttggttggcagaaattagagtctgagaaagccatcaaggagaaggagtacgagattgaaaggttgagggttctactgcaggaagaaggcacccggaagagagaatatgaaaatgagctggcaaaggtaagaaaccactataatgaggagatgagtaatttaaggaacaagtatgaaacagagattaacattacgaagaccaccatcaaggagatatccatgcaaaaagaggatgattccaaaaatcttagaaaccagcttgatagactttcaagggaaaatcgagatctgaaggatgaaattgtcaggctcaatgacagcatcttgcaggccactgagcagcgaaggcgagctgaagaaaacgcccttcagcaaaaggcctgtggctctgagataatgcagaagaagcagcatctggagatagaactgaagcaggtcatgcagcagcgctctgaggacaatgcccggcacaagcagtccctggaggaggctgccaagaccattcaggacaaaaataaggagatcgagagactcaaagctgagtttcaggaggaggccaagcgccgctgggaatatgaaaatgaactgagtaaggtaagaaacaattatgatgaggagatcattagcttaaaaaatcagtttgagaccgagatcaacatcaccaagaccaccatccaccagctcaccatgcagaaggaagaggataccagtggctaccgggctcagatagacaatctcacccgagaaaacaggagcttatctgaagaaataaagaggctgaagaacactctaacccagaccacagagaatctcaggagggtggaagaagacatccaacagcaaaaggccactggctctgaggtgtctcagaggaaacagcagctggaggttgagctgagacaagtcactcagatgcgaacagaggagagcgtaagatataagcaatctcttgatgatgctgccaaaaccatccaggataaaaacaaggagatagaaaggttaaaacaactgatcgacaaagaaacaaatgaccggaaatgcctggaagatgaaaacgcgagattacaaagggtccagtatgacctgcagaaagcaaacagtagtgcgacggagacaataaacaaactgaaggttcaggagcaagaactgacacgcctgaggatcgactatgaaagggtttcccaggagaggactgtgaaggaccaggatatcacgcggttccagaactctctgaaagagctgcagctgcagaagcagaaggtggaagaggagctgaatcggctgaagaggaccgcgtcagaagactcctgcaagaggaagaagctggaggaagagctggaaggcatgaggaggtcgctgaaggagcaagccatcaaaatcaccaacctgacccagcagctggagcaggcatccattgttaagaagaggagtgaggatgacctccggcagcagagggacgtgctggatggccacctgagggaaaagcagaggacccaggaaggacgaagcgaagcggacagtgataaaaatgcaaccatcttggaactaaggagccagctgcagatcagcaacaaccggaccctggaactgcaggggctgattaatgatttacagagagagagggaaaatttgagacaggaaattgagaaattccaaaagcaggctttagaggcatctaataggattcaggaatcaaagaatcagtgtactcaggtggtacaggaaagagagagccttctggtgaaaatcaaagtcctggagcaagacaaggcaaggctgcagaggctggaggatgagctgaatcgtgcaaaatcaactctagaggcagaaaccagggtgaaacagcgcctggagtgtgagaaacagcaaattcagaatgacctgaatcagtggaagactcaatattcccgcaaggaggaggctattaggaagatagaatcggaaagagaaaagagtgagagagagaagaacagtcttaggagtgagatcgaaagactccaagcagagatcaagagaattgaagagaggtgcaggcgtaagctggaggattctaccagggagacacagtcacagttagaaacagaacgctcccgatatcagagggagattgataaactcagacagcgcccatatgggtcccatcgagagacccagactgagtgtgagtggaccgttgacacctccaagctggtgtttgatgggctgaggaagaaggtgacagcaatgcagctctatgagtgtcagctgatcgacaaaacaaccttggacaaactattgaaggggaagaagtcagtggaagaagttgcttctgaaatccagccattccttcggggtgcaggatctatcgctggagcatctgcttctcctaaggaaaaatactctttggtagaggccaagagaaagaaattaatcagcccagaatccacagtcatgcttctggaggcccaggcagctacaggtggtataattgatccccatcggaatgagaagctgactgtcgacagtgccatagctcgggacctcattgacttcgatgaccgtcagcagatatatgcagcagaaaaagctatcactggttttgatgatccattttcaggcaagacagtatctgtttcagaagccatcaagaaaaatttgattgatagagaaaccggaatgcgcctgctggaagcccagattgcttcagggggtgtagtagaccctgtgaacagtgtctttttgccaaaagatgtcgccttggcccgggggctgattgatagagatttgtatcgatccctgaatgatccccgagatagtcagaaaaactttgtggatccagtcaccaaaaagaaggtcagttacgtgcagctgaaggaacggtgcagaatcgaaccacatactggtctgctcttgctttcagtacagaagagaagcatgtccttccaaggaatcagacaacctgtgaccgtcactgagctagtagattctggtatattgagaccgtccactgtcaatgaactggaatctggtcagatttcttatgacgaggttggtgagagaattaaggacttcctccagggttcaagctgcatagcaggcatatacaatgagaccacaaaacagaagcttggcatttatgaggccatgaaaattggcttagtccgacctggtactgctctggagttgctggaagcccaagcagctactggctttatagtggatcctgttagcaacttgaggttaccagtggaggaagcctacaagagaggtctggtgggcattgagttcaaagagaagctcctgtctgcagaacgagctgtcactgggtataatgatcctgaaacaggaaacatcatctctttgttccaagccatgaataaggaactcatcgaaaagggccacggtattcgcttattagaagcacagatcgcaaccggggggatcattgacccaaaggagagccatcgtttaccagttgacatagcatataagaggggctatttcaatgaggaactcagtgagattctctcagatccaagtgatgataccaaaggattttttgaccccaacactgaagaaaatcttacctatctgcaactaaaagaaagatgcattaaggatgaggaaacagggctctgtcttctgcctctgaaagaaaagaagaaacaggtgcagacatcacaaaagaataccctcaggaagcgtagagtggtcatagttgacccagaaaccaataaagaaatgtctgttcaggaggcctacaagaagggcctaattgattatgaaaccttcaaagaactgtgtgagcaggaatgtgaatgggaagaaataaccatcacgggatcagatggctccaccagggtggtcctggtagatagaaagacaggcagtcagtatgatattcaagatgctattgacaagggccttgttgacaggaagttctttgatcagtaccgatccggcagcctcagcctcactcaatttgctgacatgatctccttgaaaaatggtgtcggcaccagcagcagcatgggcagtggtgtcagcgatgatgtttttagcagctcccgacatgaatcagtaagtaagatttccaccatatccagcgtcaggaatttaaccataaggagcagctctttttcagacaccctggaagaatcgagccccattgcagccatctttgacacagaaaacctggagaaaatctccattacagaaggtatagagcggggcatcgttgacagcatcacgggtcagaggcttctggaggctcaggcctgcacaggtggcatcatccacccaaccacgggccagaagctgtcacttcaggacgcagtctcccagggtgtgattgaccaagacatggccaccaggctgaagcctgctcagaaagccttcataggcttcgagggtgtgaagggaaagaagaagatgtcagcagcagaggcagtgaaagaaaaatggctcccgtatgaggctggccagcgcttcctggagttccagtacctcacgggaggtcttgttgacccggaagtgcatgggaggataagcaccgaagaagccatccggaaggggttcatagatggccgcgccgcacagaggctgcaagacaccagcagctatgccaaaatcctgacctgccccaaaaccaaattaaaaatatcctataaggatgccataaatcgctccatggtagaagatatcactgggctgcgccttctggaagccgcctccgtgtcgtccaagggcttacccagcccttacaacatgtcttcggctccgggctcccgctccggctcccgctcgggatctcgctccggatctcgctccgggtcccgcagtgggtcccggagaggaagctttgacgccacagggaattcttcctactcttattcctactcatttagcagtagttctattgggcactagtagtcagttgggagtggttgctataccttgacttcatttatatgaatttccactttattaaataatagaaaagaaaatcccggtgcttgcagtagagtgataggacattctatgcttacagaaaatatagccatgattgaaatcaaatagtaaaggctgttctggctttttatcttcttagctcatcttaaataagcagtacacttggatgcagtgcgtctgaagtgctaatcagttgtaacaatagcacaaatcgaacttaggatttgtttcttctcttctgtgtttcgatttttgatcaattctttaattttggaagcctataatacagttttctattcttggagataaaaattaaatggatcactgatattttagtcattctgcttctcatctaaatatttccatattctgtattaggagaaaattaccctcccagcaccagcccccctctcaaacccccaacccaaaaccaagcattttggaatgagtctcctttagtttcagagtgtggattgtataacccatatactcttcgatgtacttgtttggtttggtattaatttgactgtgcatgacagcggcaatcttttctttggtcaaagttttctgtttattttgcttgtcatattcgatgtactttaaggtgtctttatgaagtttgctattctggcaataaacttttagacttttg

SEQ ID NO: 327768 - DNA, 5382 bp, Homo sapiens
actctagagtaaaaaacgagcgcgagtcaagctgtacagatattggtcggtatccctactgcactcaactccttagtgcaacctgcatgcgccgctgggaatatgaaaatgaactgagtaaggtaagaaacaattatgatgaggagatcattagcttaaaaaatcagtttgagaccgagatcaacatcaccaagaccaccatccaccagctcaccatgcagaaggaagaggataccagtggctaccgggctcagatagacaatctcacccgagaaaacaggagcttatctgaagaaataaagaggctgaagaacactctaacccagaccacagagaatctcaggagggtggaagaagacatccaacagcaaaaggccactggctctgaggtgtctcagaggaaacagcagctggaggttgagctgagacaagtcactcagatgcgaacagaggagagcgtaagatataagcaatctcttgatgatgctgccaaaaccatccaggataaaaacaaggagatagaaaggttaaaacaactgatcgacaaagaaacaaatgaccggaaatgcctggaagatgaaaacgcgagattacaaagggtccagtatgacctgcagaaagcaaacagtagtgcgacggagacaataaacaaactgaaggttcaggagcaagaactgacacgcctgaggatcgactatgaaagggtttcccaggagaggactgtgaaggaccaggatatcacgcggttccagaactctctgaaagagctgcagctgcagaagcagaaggtggaagaggagctgaatcggctgaagaggaccgcgtcagaagactcctgcaagaggaagaagctggaggaagagctggaaggcatgaggaggtcgctgaaggagcaagccatcaaaatcaccaacctgacccagcagctggagcaggcatccattgttaagaagaggagtgaggatgacctccggcagcagagggacgtgctggatggccacctgagggaaaagcagaggacccaggaagagctgaggaggctctcttctgaggtcgaggccctgaggcggcagttactccaggaacaggaaagtgtcaaacaagctcacttgaggaatgagcatttccagaaggcgatagaagataaaagcagaagcttaaatgaaagcaaaatagaaattgagaggctgcagtctctcacagagaacctgaccaaggagcacttgatgttagaagaagaactgcggaacctgaggctggagtacgatgacctgaggagaggacgaagcgaagcggacagtgataaaaatgcaaccatcttggaactaaggagccagctgcagatcagcaacaaccggaccctggaactgcaggggctgattaatgatttacagagagagagggaaaatttgagacaggaaattgagaaattccaaaagcaggctttagaggcatctaataggattcaggaatcaaagaatcagtgtactcaggtggtacaggaaagagagagccttctggtgaaaatcaaagtcctggagcaagacaaggcaaggctgcagaggctggaggatgagctgaatcgtgcaaaatcaactctagaggcagaaaccagggtgaaacagcgcctggagtgtgagaaacagcaaattcagaatgacctgaatcagtggaagactcaatattcccgcaaggaggaggctattaggaagatagaatcggaaagagaaaagagtgagagagagaagaacagtcttaggagtgagatcgaaagactccaagcagagatcaagagaattgaagagaggtgcaggcgtaagctggaggattctaccagggagacacagtcacagttagaaacagaacgctcccgatatcagagggagattgataaactcagacagcgcccatatgggtcccatcgagagacccagactgagtgtgagtggaccgttgacacctccaagctggtgtttgatgggctgaggaagaaggtgacagcaatgcagctctatgagtgtcagctgatcgacaaaacaaccttggacaaactattgaaggggaagaagtcagtggaagaagttgcttctgaaatccagccattccttcggggtgcaggatctatcgctggagcatctgcttctcctaaggaaaaatactctttggtagaggccaagagaaagaaattaatcagcccagaatccacagtcatgcttctggaggcccaggcagctacaggtggtataattgatccccatcggaatgagaagctgactgtcgacagtgccatagctcgggacctcattgacttcgatgaccgtcagcagatatatgcagcagaaaaagctatcactggttttgatgatccattttcaggcaagacagtatctgtttcagaagccatcaagaaaaatttgattgatagagaaaccggaatgcgcctgctggaagcccagattgcttcagggggtgtagtagaccctgtgaacagtgtctttttgccaaaagatgtcgccttggcccgggggctgattgatagagatttgtatcgatccctgaatgatccccgagatagtcagaaaaactttgtggatccagtcaccaaaaagaaggtcagttacgtgcagctgaaggaacggtgcagaatcgaaccacatactggtctgctcttgctttcagtacagaagagaagcatgtccttccaaggaatcagacaacctgtgaccgtcactgagctagtagattctggtatattgagaccgtccactgtcaatgaactggaatctggtcagatttcttatgacgaggttggtgagagaattaaggacttcctccagggttcaagctgcatagcaggcatatacaatgagaccacaaaacagaagcttggcatttatgaggccatgaaaattggcttagtccgacctggtactgctctggagttgctggaagcccaagcagctactggctttatagtggatcctgttagcaacttgaggttaccagtggaggaagcctacaagagaggtctggtgggcattgagttcaaagagaagctcctgtctgcagaacgagctgtcactgggtataatgatcctgaaacaggaaacatcatctctttgttccaagccatgaataaggaactcatcgaaaagggccacggtattcgcttattagaagcacagatcgcaaccggggggatcattgacccaaaggagagccatcgtttaccagttgacatagcatataagaggggctatttcaatgaggaactcagtgagattctctcagatccaagtgatgataccaaaggattttttgaccccaacactgaagaaaatcttacctatctgcaactaaaagaaagatgcattaaggatgaggaaacagggctctgtcttctgcctctgaaagaaaagaagaaacaggtgcagacatcacaaaagaataccctcaggaagcgtagagtggtcatagttgacccagaaaccaataaagaaatgtctgttcaggaggcctacaagaagggcctaattgattatgaaaccttcaaagaactgtgtgagcaggaatgtgaatgggaagaaataaccatcacgggatcagatggctccaccagggtggtcctggtagatagaaagacaggcagtcagtatgatattcaagatgctattgacaagggccttgttgacaggaagttctttgatcagtaccgatccggcagcctcagcctcactcaatttgctgacatgatctccttgaaaaatggtgtcggcaccagcagcagcatgggcagtggtgtcagcgatgatgtttttagcagctcccgacatgaatcagtaagtaagatttccaccatatccagcgtcaggaatttaaccataaggagcagctctttttcagacaccctggaagaatcgagccccattgcagccatctttgacacagaaaacctggagaaaatctccattacagaaggtatagagcggggcatcgttgacagcatcacgggtcagaggcttctggaggctcaggcctgcacaggtggcatcatccacccaaccacgggccagaagctgtcacttcaggacgcagtctcccagggtgtgattgaccaagacatggccaccaggctgaagcctgctcagaaagccttcataggcttcgagggtgtgaagggaaagaagaagatgtcagcagcagaggcagtgaaagaaaaatggctcccgtatgaggctggccagcgcttcctggagttccagtacctcacgggaggtcttgttgacccggaagtgcatgggaggataagcaccgaagaagccatccggaaggggttcatagatggccgcgccgcacagaggctgcaagacaccagcagctatgccaaaatcctgacctgccccaaaaccaaattaaaaatatcctataaggatgccataaatcgctccatggtagaagatatcactgggctgcgccttctggaagccgcctccgtgtcgtccaagggcttacccagcccttacaacatgtcttcggctccgggctcccgctccggctcccgctcgggatctcgctccggatctcgctccgggtcccgcagtgggtcccggagaggaagctttgacgccacagggaattcttcctactcttattcctactcatttagcagtagttctattgggcactagtagtcagttgggagtggttgctataccttgacttcatttatatgaatttccactttattaaataatagaaaagaaaatcccggtgcttgcagtagagtgataggacattctatgcttacagaaaatatagccatgattgaaatcaaatagtaaaggctgttctggctttttatcttcttagctcatcttaaataagcagtacacttggatgcagtgcgtctgaagtgctaatcagttgtaacaatagcacaaatcgaacttaggatttgtttcttctcttctgtgtttcgatttttgatcaattctttaattttggaagcctataatacagttttctattcttggagataaaaattaaatggatcactgatattttagtcattctgcttctcatctaaatatttccatattctgtattaggagaaaattaccctcccagcaccagcccccctctcaaacccccaacccaaaaccaagcattttggaatgagtctcctttagtttcagagtgtggattgtataacccatatactcttcgatgtacttgtttggtttggtattaatttgactgtgcatgacagcggcaatcttttctttggtcaaagttttctgtttattttgcttgtcatattcgatgtactttaaggtgtctttatgaagtttgctattctggcaataaacttttagacttttg

SEQ ID NO: 327769 - DNA, 3850 bp, Homo sapiens
agcaggacagacggtcaggctgcgagagcgcggcagtaggagcatgactctctgagactgaaaacccctctggcagaaaccagggtgaaacagcgcctggagtgtgagaaacagcaaattcagaatgacctgaatcagtggaagactcaatattcccgcaaggaggaggctattaggaagatagaatcggaaagagaaaagagtgagagagagaagaacagtcttaggagtgagatcgaaagactccaagcagagatcaagagaattgaagagaggtgcaggcgtaagctggaggattctaccagggagacacagtcacagttagaaacagaacgctcccgatatcagagggagattgataaactcagacagcgcccatatgggtcccatcgagagacccagactgagtgtgagtggaccgttgacacctccaagctggtgtttgatgggctgaggaagaaggtgacagcaatgcagctctatgagtgtcagctgatcgacaaaacaaccttggacaaactattgaaggggaagaagtcagtggaagaagttgcttctgaaatccagccattccttcggggtgcaggatctatcgctggagcatctgcttctcctaaggaaaaatactctttggtagaggccaagagaaagaaattaatcagcccagaatccacagtcatgcttctggaggcccaggcagctacaggtggtataattgatccccatcggaatgagaagctgactgtcgacagtgccatagctcgggacctcattgacttcgatgaccgtcagcagatatatgcagcagaaaaagctatcactggttttgatgatccattttcaggcaagacagtatctgtttcagaagccatcaagaaaaatttgattgatagagaaaccggaatgcgcctgctggaagcccagattgcttcagggggtgtagtagaccctgtgaacagtgtctttttgccaaaagatgtcgccttggcccgggggctgattgatagagatttgtatcgatccctgaatgatccccgagatagtcagaaaaactttgtggatccagtcaccaaaaagaaggtcagttacgtgcagctgaaggaacggtgcagaatcgaaccacatactggtctgctcttgctttcagtacagaagagaagcatgtccttccaaggaatcagacaacctgtgaccgtcactgagctagtagattctggtatattgagaccgtccactgtcaatgaactggaatctggtcagatttcttatgacgaggttggtgagagaattaaggacttcctccagggttcaagctgcatagcaggcatatacaatgagaccacaaaacagaagcttggcatttatgaggccatgaaaattggcttagtccgacctggtactgctctggagttgctggaagcccaagcagctactggctttatagtggatcctgttagcaacttgaggttaccagtggaggaagcctacaagagaggtctggtgggcattgagttcaaagagaagctcctgtctgcagaacgagctgtcactgggtataatgatcctgaaacaggaaacatcatctctttgttccaagccatgaataaggaactcatcgaaaagggccacggtattcgcttattagaagcacagatcgcaaccggggggatcattgacccaaaggagagccatcgtttaccagttgacatagcatataagaggggctatttcaatgaggaactcagtgagattctctcagatccaagtgatgataccaaaggattttttgaccccaacactgaagaaaatcttacctatctgcaactaaaagaaagatgcattaaggatgaggaaacagggctctgtcttctgcctctgaaagaaaagaagaaacaggtgcagacatcacaaaagaataccctcaggaagcgtagagtggtcatagttgacccagaaaccaataaagaaatgtctgttcaggaggcctacaagaagggcctaattgattatgaaaccttcaaagaactgtgtgagcaggaatgtgaatgggaagaaataaccatcacgggatcagatggctccaccagggtggtcctggtagatagaaagacaggcagtcagtatgatattcaagatgctattgacaagggccttgttgacaggaagttctttgatcagtaccgatccggcagcctcagcctcactcaatttgctgacatgatctccttgaaaaatggtgtcggcaccagcagcagcatgggcagtggtgtcagcgatgatgtttttagcagctcccgacatgaatcagtaagtaagatttccaccatatccagcgtcaggaatttaaccataaggagcagctctttttcagacaccctggaagaatcgagccccattgcagccatctttgacacagaaaacctggagaaaatctccattacagaaggtatagagcggggcatcgttgacagcatcacgggtcagaggcttctggaggctcaggcctgcacaggtggcatcatccacccaaccacgggccagaagctgtcacttcaggacgcagtctcccagggtgtgattgaccaagacatggccaccaggctgaagcctgctcagaaagccttcataggcttcgagggtgtgaagggaaagaagaagatgtcagcagcagaggcagtgaaagaaaaatggctcccgtatgaggctggccagcgcttcctggagttccagtacctcacgggaggtcttgttgacccggaagtgcatgggaggataagcaccgaagaagccatccggaaggggttcatagatggccgcgccgcacagaggctgcaagacaccagcagctatgccaaaatcctgacctgccccaaaaccaaattaaaaatatcctataaggatgccataaatcgctccatggtagaagatatcactgggctgcgccttctggaagccgcctccgtgtcgtccaagggcttacccagcccttacaacatgtcttcggctccgggctcccgctccggctcccgctcgggatctcgctccggatctcgctccgggtcccgcagtgggtcccggagaggaagctttgacgccacagggaattcttcctactcttattcctactcatttagcagtagttctattgggcactagtagtcagttgggagtggttgctataccttgacttcatttatatgaatttccactttattaaataatagaaaagaaaatcccggtgcttgcagtagagtgataggacattctatgcttacagaaaatatagccatgattgaaatcaaatagtaaaggctgttctggctttttatcttcttagctcatcttaaataagcagtacacttggatgcagtgcgtctgaagtgctaatcagttgtaacaatagcacaaatcgaacttaggatttgtttcttctcttctgtgtttcgatttttgatcaattctttaattttggaagcctataatacagttttctattcttggagataaaaattaaatggatcactgatattttagtcattctgcttctcatctaaatatttccatattctgtattaggagaaaattaccctcccagcaccagcccccctctcaaacccccaacccaaaaccaagcattttggaatgagtctcctttagtttcagagtgtggattgtataacccatatactcttcgatgtacttgtttggtttggtattaatttgactgtgcatgacagcggcaatcttttctttggtcaaagttttctgtttattttgcttgtcatattcgatgtactttaaggtgtctttatgaagtttgctattctggcaataaacttttagacttttg

SEQ ID NO: 327770 - DNA, 6878 bp, Homo sapiens
cagttggaggaggagtatgaaaacctgctgaaagcgtcctttgagaggatggatcacctgcgacagctgcagaacatcattcaggccacgtccagggagatcatgtggatcaatgactgcgaggaggaggagctgctgtacgactggagcgacaagaacaccaacatcgctcagaaacaggaggccttctccatacgcatgagtcaactggaagttaaagaaaaagagctcaataagctgaaacaagaaagtgaccaacttgtcctcaatcagcatccagcttcagacaaaattgaggcctatatggacactctgcagacgcagtggagttggattcttcagatcaccaagtgcattgatgttcatctgaaagaaaatgctgcctactttcagttttttgaagaggcgcagtctactgaagcatacctgaaggggctccaggactccatcaggaagaagtacccctgcgacaagaacatgcccctgcagcacctgctggaacagatcaaggagctggagaaagaacgagagaaaatccttgaatacaagcgtcaggtgcagaacttggtaaacaagtctaagaagattgtacagctgaagcctcgtaacccagactacagaagcaataaacccattattctcagagctctctgtgactacaaacaagatcagaaaatcgtgcataagggggatgagtgtatcctgaaggacaacaacgagcgcagcaagtggtacgtgacgggcccgggaggcgttgacatgcttgttccctctgtggggctgatcatccctcctccgaacccactggccgtggacctctcttgcaagattgagcagtactacgaagccatcttggctctgtggaaccagctctacatcaacatgaagagcctggtgtcctggcactactgcatgattgacatagagaagatcagggccatgacaatcgccaagctgaaaacaatgcggcaggaagattacatgaagacgatagccgaccttgagttacattaccaagagttcatcagaaatagccaaggctcagagatgtttggagatgatgacaagcggaaaatacagtctcagttcaccgatgcccagaagcattaccagaccctggtcattcagctccctggctatccccagcaccagacagtgaccacaactgaaatcactcatcatggaacctgccaagatgtcaaccataataaagtaattgaaaccaacagagaaaatgacaagcaagaaacatggatgctgatggagctgcagaagattcgcaggcagatagagcactgcgagggcaggatgactctcaaaaacctccctctagcagaccaggggtcttctcaccacatcacagtgaaaattaacgagcttaagagtgtgcagaatgattcacaagcaattgctgaggttctcaaccagcttaaagatatgcttgccaacttcagaggttctgaaaagtactgctatttacagaatgaagtatttggactatttcagaaactggaaaatatcaatggtgttacagatggctacttaaatagcttatgcacagtaagggcactgctccaggctattctccaaacagaagacatgttaaaggtttatgaagccaggctcactgaggaggaaactgtctgcctggacctggataaagtggaagcttaccgctgtggactgaagaaaataaaaaatgacttgaacttgaagaagtcgttgttggccactatgaagacagaactacagaaagcccagcagatccactctcagacttcacagcagtatccactttatgatctggacttgggcaagttcggtgaaaaagtcacacagctgacagaccgctggcaaaggatagataaacagatcgactttagattatgggacctggagaaacaaatcaagcaattgaggaattatcgtgataactatcaggctttctgcaagtggctctatgatgctaaacgccgccaggattccttagaatccatgaaatttggagattccaacacagtcatgcggtttttgaatgagcagaagaacttgcacagtgaaatatctggcaaacgagacaaatcagaggaagtacaaaaaattgctgaactttgcgccaattcaattaaggattatgagctccagctggcctcatacacctcaggactggaaactctgctgaacatacctatcaagaggaccatgattcagtccccttctggggtgattctgcaagaggctgcagatgttcatgctcggtacattgaactacttacaagatctggagactattacaggttcttaagtgagatgctgaagagtttggaagatctgaagctgaaaaataccaagatcgaagttttggaagaggagctcagactggcccgagatgccaactcggaaaactgtaataagaacaaattcctggatcagaacctgcagaaataccaggcagagtgttcccagttcaaagcgaagcttgcgagcctggaggagctgaagagacaggctgagctggatgggaagtcggctaagcaaaatctagacaagtgctacggccaaataaaagaactcaatgagaagatcacccgactgacttatgagattgaagatgaaaagagaagaagaaaatctgtggaagacagatttgaccaacagaagaatgactatgaccaactgcagaaagcaaggcaatgtgaaaaggagaaccttggttggcagaaattagagtctgagaaagccatcaaggagaaggagtacgagattgaaaggttgagggttctactgcaggaagaaggcacccggaagagagaatatgaaaatgagctggcaaaggtaagaaaccactataatgaggagatgagtaatttaaggaacaagtatgaaacagagattaacattacgaagaccaccatcaaggagatatccatgcaaaaagaggatgattccaaaaatcttagaaaccagcttgatagactttcaagggaaaatcgagatctgaaggatgaaattgtcaggctcaatgacagcatcttgcaggccactgagcagcgaaggcgagctgaagaaaacgcccttcagcaaaaggcctgtggctctgagataatgcagaagaagcagcatctggagatagaactgaagcaggtcatgcagcagcgctctgaggacaatgcccggcacaagcagtccctggaggaggctgccaagaccattcaggacaaaaataaggagatcgagagactcaaagctgagtttcaggaggaggccaagcgccgctgggaatatgaaaatgaactgagtaaggtaagaaacaattatgatgaggagatcattagcttaaaaaatcagtttgagaccgagatcaacatcaccaagaccaccatccaccagctcaccatgcagaaggaagaggataccagtggctaccgggctcagatagacaatctcacccgagaaaacaggagcttatctgaagaaataaagaggctgaagaacactctaacccagaccacagagaatctcaggagggtggaagaagacatccaacagcaaaaggccactggctctgaggtgtctcagaggaaacagcagctggaggttgagctgagacaagtcactcagatgcgaacagaggagagcgtaagatataagcaatctcttgatgatgctgccaaaaccatccaggataaaaacaaggagatagaaaggttaaaacaactgatcgacaaagaaacaaatgaccggaaatgcctggaagatgaaaacgcgagattacaaagggtccagtatgacctgcagaaagcaaacagtagtgcgacggagacaataaacaaactgaaggttcaggagcaagaactgacacgcctgaggatcgactatgaaagggtttcccaggagaggactgtgaaggaccaggatatcacgcggttccagaactctctgaaagagctgcagctgcagaagcagaaggtggaagaggagctgaatcggctgaagaggaccgcgtcagaagactcctgcaagaggaagaagctggaggaagagctggaaggcatgaggaggtcgctgaaggagcaagccatcaaaatcaccaacctgacccagcagctggagcaggcatccattgttaagaagaggagtgaggatgacctccggcagcagagggacgtgctggatggccacctgagggaaaagcagaggacccaggaagagctgaggaggctctcttctgaggtcgaggccctgaggcggcagttactccaggaacaggaaagtgtcaaacaagctcacttgaggaatgagcatttccagaaggcgatagaagataaaagcagaagcttaaatgaaagcaaaatagaaattgagaggctgcagtctctcacagagaacctgaccaaggagcacttgatgttagaagaagaactgcggaacctgaggctggagtacgatgacctgaggagaggacgaagcgaagcggacagtgataaaaatgcaaccatcttggaactaaggagccagctgcagatcagcaacaaccggaccctggaactgcaggggctgattaatgatttacagagagagagggaaaatttgagacaggaaattgagaaattccaaaagcaggctttagaggcatctaataggattcaggaatcaaagaatcagtgtactcaggtggtacaggaaagagagagccttctggtgaaaatcaaagtcctggagcaagacaaggcaaggctgcagaggctggaggatgagctgaatcgtgcaaaatcaactctagaggcagaaaccagggtgaaacagcgcctggagtgtgagaaacagcaaattcagaatgacctgaatcagtggaagactcaatattcccgcaaggaggaggctattaggaagatagaatcggaaagagaaaagagtgagagagagaagaacagtcttaggagtgagatcgaaagactccaagcagagatcaagagaattgaagagaggtgcaggcgtaagctggaggattctaccagggagacacagtcacagttagaaacagaacgctcccgatatcagagggagattgataaactcagacagcgcccatatgggtcccatcgagagacccagactgagtgtgagtggaccgttgacacctccaagctggtgtttgatgggctgaggaagaaggtgacagcaatgcagctctatgagtgtcagctgatcgacaaaacaaccttggacaaactattgaaggggaagaagtcagtggaagaagttgcttctgaaatccagccattccttcggggtgcaggatctatcgctggagcatctgcttctcctaaggaaaaatactctttggtagaggccaagagaaagaaattaatcagcccagaatccacagtcatgcttctggaggcccaggcagctacaggtggtataattgatccccatcggaatgagaagctgactgtcgacagtgccatagctcgggacctcattgacttcgatgaccgtcagcagatatatgcagcagaaaaagctatcactggttttgatgatccattttcaggcaagacagtatctgtttcagaagccatcaagaaaaatttgattgatagagaaaccggaatgcgcctgctggaagcccagattgcttcagggggtgtagtagaccctgtgaacagtgtctttttgccaaaagatgtcgccttggcccgggggctgattgatagagatttgtatcgatccctgaatgatccccgagatagtcagaaaaactttgtggatccagtcaccaaaaagaaggtcagttacgtgcagctgaaggaacggtgcagaatcgaaccacatactggtctgctcttgctttcagtacagaagagaagcatgtccttccaaggaatcagacaacctgtgaccgtcactgagctagtagattctggtatattgagaccgtccactgtcaatgaactggaatctggtcagatttcttatgacgaggttggtgagagaattaaggacttcctccagggttcaagctgcatagcaggcatatacaatgagaccacaaaacagaagcttggcatttatgaggccatgaaaattggcttagtccgacctggtactgctctggagttgctggaagcccaagcagctactggctttatagtggatcctgttagcaacttgaggttaccagtggaggaagcctacaagagaggtctggtgggcattgagttcaaagagaagctcctgtctgcagaacgagctgtcactgggtataatgatcctgaaacaggaaacatcatctctttgttccaagccatgaataaggaactcatcgaaaagggccacggtattcgcttattagaagcacagatcgcaaccggggggatcattgacccaaaggagagccatcgtttaccagttgacatagcatataagaggggctatttcaatgaggaactcagtgagattctctcagatccaagtgatgataccaaaggattttttgaccccaacactgaagaaaatcttacctatctgcaactaaaagaaagatgcattaaggatgaggaaacagggctctgtcttctgcctctgaaagaaaagaagaaacaggtgcagacatcacaaaagaataccctcaggaagcgtagagtggtcatagttgacccagaaaccaataaagaaatgtctgttcaggaggcctacaagaagggcctaattgattatgaaaccttcattattgcagccctagcagcactccgcctcctattcttgcacgaaacgggatctactaccccctaggaatcacctcccattccgataaaatcaccttccacccttactacacaatcaaagacgccctcggcttacctctctccttc

SEQ ID NO: 327771 - DNA, 5156 bp, Homo sapiens
cagttggaggaggagtatgaaaacctgctgaaagcgtcctttgagaggatggatcacctgcgacagctgcagaacatcattcaggccacgtccagggagatcatgtggatcaatgactgcgaggaggaggagctgctgtacgactggagcgacaagaacaccaacatcgctcagaaacaggaggccttctccatacgcatgagtcaactggaagttaaagaaaaagagctcaataagctgaaacaagaaagtgaccaacttgtcctcaatcagcatccagcttcagacaaaattgaggcctatatggacactctgcagacgcagtggagttggattcttcagatcaccaagtgcattgatgttcatctgaaagaaaatgctgcctactttcagttttttgaagaggcgcagtctactgaagcatacctgaaggggctccaggactccatcaggaagaagtacccctgcgacaagaacatgcccctgcagcacctgctggaacagatcaaggagctggagaaagaacgagagaaaatccttgaatacaagcgtcaggtgcagaacttggtaaacaagtctaagaagattgtacagctgaagcctcgtaacccagactacagaagcaataaacccattattctcagagctctctgtgactacaaacaagatcagaaaatcgtgcataagggggatgagtgtatcctgaaggacaacaacgagcgcagcaagtggtacgtgacgggcccgggaggcgttgacatgcttgttccctctgtggggctgatcatccctcctccgaacccactggccgtggacctctcttgcaagattgagcagtactacgaagccatcttggctctgtggaaccagctctacatcaacatgaagagcctggtgtcctggcactactgcatgattgacatagagaagatcagggccatgacaatcgccaagctgaaaacaatgcggcaggaagattacatgaagacgatagccgaccttgagttacattaccaagagttcatcagaaatagccaaggctcagagatgtttggagatgatgacaagcggaaaatacagtctcagttcaccgatgcccagaagcattaccagaccctggtcattcagctccctggctatccccagcaccagacagtgaccacaactgaaatcactcatcatggaacctgccaagatgtcaaccataataaagtaattgaaaccaacagagaaaatgacaagcaagaaacatggatgctgatggagctgcagaagattcgcaggcagatagagcactgcgagggcaggatgactctcaaaaacctccctctagcagaccaggggtcttctcaccacatcacagtgaaaattaacgagcttaagagtgtgcagaatgattcacaagcaattgctgaggttctcaaccagcttaaagatatgcttgccaacttcagaggttctgaaaagtactgctatttacagaatgaagtatttggactatttcagaaactggaaaatatcaatggtgttacagatggctacttaaatagcttatgcacagtaagggcactgctccaggctattctccaaacagaagacatgttaaaggtttatgaagccaggctcactgaggaggaaactgtctgcctggacctggataaagtggaagcttaccgctgtggactgaagaaaataaaaaatgacttgaacttgaagaagtcgttgttggccactatgaagacagaactacagaaagcccagcagatccactctcagacttcacagcagtatccactttatgatctggacttgggcaagttcggtgaaaaagtcacacagctgacagaccgctggcaaaggatagataaacagatcgactttagattatgggacctggagaaacaaatcaagcaattgaggaattatcgtgataactatcaggctttctgcaagtggctctatgatgctaaacgccgccaggattccttagaatccatgaaatttggagattccaacacagtcatgcggtttttgaatgagcagaagaacttgcacagtgaaatatctggcaaacgagacaaatcagaggaagtacaaaaaattgctgaactttgcgccaattcaattaaggattatgagctccagctggcctcatacacctcaggactggaaactctgctgaacatacctatcaagaggaccatgattcagtccccttctggggtgattctgcaagaggctgcagatgttcatgctcggtacattgaactacttacaagatctggagactattacaggttcttaagtgagatgctgaagagtttggaagatctgaagctgaaaaataccaagatcgaagttttggaagaggagctcagactggcccgagatgccaactcggaaaactgtaataagaacaaattcctggatcagaacctgcagaaataccaggcagagtgttcccagttcaaagcgaagcttgcgagcctggaggagctgaagagacaggctgagctggatgggaagtcggctaagcaaaatctagacaagtgctacggccaaataaaagaactcaatgagaagatcacccgactgacttatgagattgaagatgaaaagagaagaagaaaatctgtggaagacagatttgaccaacagaagaatgactatgaccaactgcagaaagcaaggcaatgtgaaaaggagaaccttggttggcagaaattagagtctgagaaagccatcaaggagaaggagtacgagattgaaaggttgagggttctactgcaggaagaaggcacccggaagagagaatatgaaaatgagctggcaaaggtaagaaaccactataatgaggagatgagtaatttaaggaacaagtatgaaacagagattaacattacgaagaccaccatcaaggagatatccatgcaaaaagaggatgattccaaaaatcttagaaaccagcttgatagactttcaagggaaaatcgagatctgaaggatgaaattgtcaggctcaatgacagcatcttgcaggccactgagcagcgaaggcgagctgaagaaaacgcccttcagcaaaaggcctgtggctctgagataatgcagaagaagcagcatctggagatagaactgaagcaggtcatgcagcagcgctctgaggacaatgcccggcacaagcagtccctggaggaggctgccaagaccattcaggacaaaaataaggagatcgagagactcaaagctgagtttcaggaggaggccaagcgccgctgggaatatgaaaatgaactgagtaaggtaagaaacaattatgatgaggagatcattagcttaaaaaatcagtttgagaccgagatcaacatcaccaagaccaccatccaccagctcaccatgcagaaggaagaggataccagtggctaccgggctcagatagacaatctcacccgagaaaacaggagcttatctgaagaaataaagaggctgaagaacactctaacccagaccacagagaatctcaggagggtggaagaagacatccaacagcaaaaggccactggctctgaggtgtctcagaggaaacagcagctggaggttgagctgagacaagtcactcagatgcgaacagaggagagcgtaagatataagcaatctcttgatgatgctgccaaaaccatccaggataaaaacaaggagatagaaaggttaaaacaactgatcgacaaagaaacaaatgaccggaaatgcctggaagatgaaaacgcgagattacaaagggtccagtatgacctgcagaaagcaaacagtagtgcgacggagacaataaacaaactgaaggttcaggagcaagaactgacacgcctgaggatcgactatgaaagggtttcccaggagaggactgtgaaggaccaggatatcacgcggttccagaactctctgaaagagctgcagctgcagaagcagaaggtggaagaggagctgaatcggctgaagaggaccgcgtcagaagactcctgcaagaggaagaagctggaggaagagctggaaggcatgaggaggtcgctgaaggagcaagccatcaaaatcaccaacctgacccagcagctggagcaggcatccattgttaagaagaggagtgaggatgacctccggcagcagagggacgtgctggatggccacctgagggaaaagcagaggacccaggaagagctgaggaggctctcttctgaggtcgaggccctgaggcggcagttactccaggaacaggaaagtgtcaaacaagctcacttgaggaatgagcatttccagaaggcgatagaagataaaagcagaagcttaaatgaaagcaaaatagaaattgagaggctgcagtctctcacagagaacctgaccaaggagcacttgatgttagaagaagaactgcggaacctgaggctggagtacgatgacctgaggagaggacgaagcgaagcggacagtgataaaaatgcaaccatcttggaactaaggagccagctgcagatcagcaacaaccggaccctggaactgcaggggctgattaatgatttacagagagagagggaaaatttgagacaggaaattgagaaattccaaaagcaggctttagaggcatctaataggattcaggaatcaaagaatcagtgtactcaggtggtacaggaaagagagagccttctggtgaaaatcaaagtcctggagcaagacaaggcaaggctgcagaggctggaggatgagctgaatcgtgcaaaatcaactctagaggcagaaaccagggtgaaacagcgcctggagtgtgagaaacagcaaattcagaatgacctgaatcagtggaagactcaatattcccgcaaggaggaggctattaggaagatagaatcggaaagagaaaagagtgagagagagaagaacagtcttaggagtgagatcgaaagactccaagcagagatcaagagaattgaagagaggtgcaggcgtaagctggaggattctaccagggagacacagtcacagttagaaacagaacgctcccgatatctatggccagtgtttatcgaattcagagccagcggctcaccatactgggtcgccactcgggcagatcgctcagtgcatgtagtctcgtactggagccg

SEQ ID NO: 327772 - DNA, 225 bp, Homo sapiens
tccctgatgttacctcaaatgccacaggttaaggccaccagcccctactaggctgccctcgctttagacacacctgcaggcttgggtgtcctcagaccacatgtacttctcaccaactggctgcaaatttggaggttcccaccatgccctcaagttcgataactcactaaaacaattcacagaatgcagaaaagcatgatactttctttctcttttttttttttt

SEQ ID NO: 327773 - DNA, 389 bp, Homo sapiens
ttttttttttttgacagggacttattctgttgcccaggctggagtgcagtggtgtgatcacagctcactgcagatttcacctcctgggctcaagccatcctcccacctcagcctcccaagtagctgggaccacagatgtgtgccaccatgaccagctaatttttaaatgtttggtagagacagggtctctcaatgttgcccaggctggtctcaaactcctgggctcaagccatcctcctacctcagcttcccaaggtgctgggattacaggcgtgaaccactgtgcccagtcacacagatttttttaaaactcaccaaagtaaatcttataataaatcctttgggactatttaaataataataataactattatttacattggaggttt

SEQ ID NO: 327774 - DNA, 1528 bp, Homo sapiens
cagcggagcttccggcacggccttcaagcgcgggacgcgacaaagtcatggaccgcaacccctcgccgccgccgccgggtcgcgacaaggaggaggaggaggaggtggccggtggagactgcatagggagcacggtctacagcaaacactggctcttcggcgtcctcagcggactcatccagattgttagccctgaaaacaccaaatctagctcagatgatgaggagcagctgacggagcttgatgaagaaatggagaatgaaatttgcagagtatgggatatgtcaatggatgaggacgtggctttatttctccaagaatttaatgctcctgatatattcatgggagtactggccaagtccaagtgtcctcgattaagagaaatctgtgtgggaattttaggtaatatggcctgtttccaggagatatgtgtgtccatcagcagtgataaaaatcttgggcaggtgttattgcactgtttgtatgattcagacccacctactctgctggaaacaagcaggttgttgcttacttgcctttcccaggcagaagtggccagtgtttgggttgaaaggatccaggaacatccagctatttatgatagcatttgcttcattatgtcaagttcaacaaatgttgacttgctggtgaaggtgggggaggttgtggacaagctctttgatttggatgagaaactaatgttagaatgggtcagaaatggggctgctcagcctctggaccaaccccaggaagagtctgaagagcagccagtgtttcggcttgtgccctgtatacttgaagctgccaaacaagtacgttctgaaaatccagaatggcttgatgtttacatgcacattttacaactgcttactacagtggatgatggaattcaagcaattgtacattgtcctgacactggaaaagacatttggaatttactttttgacctggtctgccatgaattctgccagtctgatgatccacccatcattcttcaagaacagaaaacagtgctagcctctgttttttcagtgttgtctgccatctatgcctcacagactgagcaagagtatctaaagatagaaaaagtagatcttcctctaattgacagcctcattcgggtcttacaaaatatggaacagtgtcagaaaaaaccagagaactcggcagagtctaacacagaggaaactaaaaggactgatttaacccaagatgatttccacttgaaaatcttaaaggatattttatgtgaatttctttctaatatttttcaggcattaacaaaggagacggtggctcagggagtaaaggaaggccagttgagcaaacagaagtgttcctctgcatttcaaaaccttcttcctttctatagccctgtggtggaagattttattaaaatcctacgtgaagttgataaggcgcttgctgatgacttggaaaaaaacttcccaagtttgaaggttcagacttaaaacctgaattggaattacttctgtacaagaaataaactttatttttctcactgaca

SEQ ID NO: 327775 - DNA, 473 bp, Homo sapiens
ccaagtttgtagtctgtgtagcagggtggatggtgcccttcactaaagtaaagacgacagtggagaacatgtttgggttacataagcctccttgatgttggtgggttcaggtgggacatttgaaatgcctatgaagtcaggagggaattgaatatcctgatttgtttttattcactagttaaagcttgaaaaattttccttttttgacattaaatcttgttgttgttttaggagacggtggctcagggagtaaaggaaggccagttgagcaaacagaagtgttcctctgcatttcaaaaccttcttcctttctatagccctgtggtggaagattttattaaaatcctacgtgaagttgataaggcgcttgctgatgacttggaaaaaaacttcccaagtttgaaggttcagacttaaaacctgaattggaattacttctgtacaagaaataaactttatttttctcactgaca

SEQ ID NO: 327776 - DNA, 462 bp, Homo sapiens
gaattcatggcagaccaggtcaaaaagtaaattccaaatgtcttttccagggtcaggacaatgtacaattgcttgaattccatcatcccctgtagtaagcagttgtaaaatgggcatgtaaacatcaagccattttggattttcagaacggacttgtttggcatttatgcctcccagactgagcaagagtatctaaagatagaaaaaggcattaccaaaggagacggtggctcagggagtaaaggaaggccagttgagcaaacagaagtgttcctctgcatttcaaaaccttcttcctttctatagccctgtggtggaagattttattaaaatcctacgtgaagttgataaggcgcttgctgatgacttggaaaaaaacttcccaagtttgaaggttcagacttaaaacctgaattggaattacttctgtacaagaaataaactttatttttctcactgaca

SEQ ID NO: 327777 - DNA, 546 bp, Homo sapiens
cagcggagcttccggcacggccttcaagcgcgggacgcgacaaagtcatggaccgcaacccctcgccgccgccgccgggtcgcgacaaggaggaggaggaggaggtggccggtggagactgcatagggagcacggtctacagcaaacactggctcttcggcgtcctcagcggactcatccagattgttagccctgaaaacaccaaatctagctcagatgatgaggagcagctgacggagcttgatgaagaaatggagaatgaaatttgcagagtatgggatatgtcaatggatgaggacgtggctttatttctccaagaatttaatgctcctgatatattcatgggagtactggccaagtccaagtgtcctcgattaagattttcctgtcaacgggaccaatatcactgatggggaaatgaggcaacttgaaagctaggagtcaagttcaactgctttctcctttatcctcacactggattattttgctttcaccttgagagtcttcctcagcttcatccttttccatgcctgagggccctcctcc

SEQ ID NO: 327778 - DNA, 2392 bp, Homo sapiens
cagcggagcttccggcacggccttcaagcgcgggacgcgacaaagtcatggaccgcaacccctcgccgccgccgccgggtcgcgacaaggaggaggaggaggaggtggccggtggagactgcatagggagcacggtctacagcaaacactggctcttcggcgtcctcagcggactcatccagattgttagccctgaaaacaccaaatctagctcagatgatgaggagcagctgacggagcttgatgaagaaatggagaatgaaatttgcagagtatgggatatgtcaatggatgaggacgtggctttatttctccaagaatttaatgctcctgatatattcatgggagtactggccaagtccaagtgtcctcgattaagagaaatctgtgtgggaattttaggtaatatggcctgtttccaggagatatgtgtgtccatcagcagtgataaaaatcttgggcaggtgttattgcactgtttgtatgattcagacccacctactctgctggaaacaagcaggttgttgcttacttgcctttcccaggcagaagtggccagtgtttgggttgaaaggatccaggaacatccagctatttatgatagcatttgcttcattatgtcaagttcaacaaatgttgacttgctggtgaaggtgggggaggttgtggacaagctctttgatttggatgagaaactaatgttagaatgggtcagaaatggggctgctcagcctctggaccaaccccaggaagagtctgaagagcagccagtgtttcggcttgtgccctgtatacttgaagctgccaaacaagtacgttctgaaaatccagaatggcttgatgtttacatgcacattttacaactgcttactacagtggatgatggaattcaagcaattgtacattgtcctgacactggaaaagacatttggaatttactttttgacctggtctgccatgaattctgccagtctgatgatccacccatcattcttcaagaacagaaaacagtgctagcctctgttttttcagtgttgtctgccatctatgcctcacagactgagcaagagtatctaaagatagaaaaagtagatcttcctctaattgacagcctcattcgggtcttacaaaatatggaacagtgtcagaaaaaaccagagaactcggcagagtctaacacagaggaaactaaaaggactgatttaacccaagatgatttccacttgaaaatcttaaaggatattttatgtgaatttctttctaatatttttcaggcattaacaaaggagacggtggctcagggagtaaaggaaggccagttgagcaaacagaagtgttcctctgcatttcaaaaccttcttcctttctatagccctgtggtggaagattttattaaaatcctacgtgaagttgataaggcgcttgctgatgacttggaaaaaaacttcccaagtttgaaggttcagacttaaaacctgaattggaattacttctgtacaagaaataaactttatttttctcactgacaaaaaaaaaaaaaaaaaaaaaaaaaaaaaggggggggggtaaaaagtttccccgagaggggcgcccaaggttaacggcggtacccaggttttttgggcacaaggggggccccatataggggaggcggaataaaaaggcaagggcaggggcgcgggcggttaacacaagggcgggagccgggggaaacgtggcttacctgggggaacacctggggggagagcgaacctcttaatttccggggcgggcgcggggaaccatcatcgggcgccaatttacccctaagcggaaatttcagagaacctaagggcgacactcttacacactctctcaaggcgtcttcacgggtgtctcacccctagagggaatatatggctcaggggggggtggagaacaatttccggggccaccaggggagtatgtgagtctctggcaacaaatttttataggcggggtctgtcaatactacatatatacaaaactaaattacaatataatcagaaacacacactaaaaaacattaacagactagatacatataaaaatttaaatagataaatatggagagaacgaagaaacgaggagatgacgaaaggagaaacaaaaaaacagatataaaaccaacaaaccaccgaggaagagagacgagacaaaaacagcgaaccacgcagagagagtgaaaataccaacaacaaagacagataatgagaggacaaagaggagctacctaaaatagacaagcacgagagcgaaacgccacgagtagaatagcacgagaaaacactacggacagtaaaacagcgaaggcgaagaaatgaacaaagagaagcaagagacgagacgcaggccgcccacactatacaaacgg

SEQ ID NO: 327779 - DNA, 1753 bp, Homo sapiens
cagcggagcttccggcacggccttcaagcgcgggacgcgacaaagtcatggaccgcaacccctcgccgccgccgccgggtcgcgacaaggaggaggaggaggaggtggccggtggagactgcatagggagcacggtctacagcaaacactggctcttcggcgtcctcagcggactcatccagattgttagccctgaaaacaccaaatctagctcagatgatgaggagcagctgacggagcttgatgaagaaatggagaatgaaatttgcagagtatgggatatgtcaatggatgaggacgtggctttatttctccaagaatttaatgctcctgatatattcatgggagtactggccaagtccaagtgtcctcgattaagagaaatctgtgtgggaattttaggtaatatggcctgtttccaggagatatgtgtgtccatcagcagtgataaaaatcttgggcaggtgttattgcactgtttgtatgattcagacccacctactctgctggaaacaagcaggttgttgcttacttgcctttcccaggcagaagtggccagtgtttgggttgaaaggatccaggaacatccagctatttatgatagcatttgcttcattatgtcaagttcaacaaatgttgacttgctggtgaaggtgggggaggttgtggacaagctctttgatttggatgagaaactaatgttagaatgggtcagaaatggggctgctcagcctctggaccaaccccaggaagagtctgaagagcagccagtgtttcggcttgtgccctgtatacttgaagctgccaaacaagtacgttctgaaaatccagaatggcttgatgtttacatgcacattttacaactgcttactacagtggatgatggaattcaagcaattgtacattgtcctgacactggaaaagacatttggaatttactttttgacctggtctgccatgaattctgccagtctgatgatccacccatcattcttcaagaacagaaaacagtgctagcctctgttttttcagtgttgtctgccatctatgcctcacagactgagcaagagtatctaaagatagaaaaagtagatcttcctctaattgacagcctcattcgggtcttacaaaatatggaacagtgtcagaaaaaaccagagaactcggcagagtctaacacagaggaaactaaaaggactgatttaacccaagatgatttccacttgaaaatcttaaaggatattttatgtgaatttctttctaatatttttcaggcattaacaaaggagacggtggctcagggagtaaaggaaggccagttgagcaaacagaagtgttcctctgcatttcaaaaccttcttcctttctatagccctgtggtggaagattttattaaaatcctacgtgaagttgataaggcgcttgctgatgacttggaaaaaaacttcccaagtttgaaggaaccttatgcaaaaatccagatgtaatgaggtggctcctttcacccttcacgtggtctgccaggaagttgcctacttgctaaaaggtgtaccctgagcatttgtgactccgagggaaaccaggaacatcatgctgcagaaaccctttggaggaacgtgccaactgctccgtaaccatgagctggctctcctttgatggagagattaatagtttccataattatatcatcctggttgttctggggccagagtttacttagacttgaaagaaattgaagttaattgaaaaagaa

SEQ ID NO: 327780 - DNA, 1331 bp, Homo sapiens
cagcggagcttccggcacggccttcaagcgcgggacgcgacaaagtcatggaccgcaacccctcgccgccgccgccgggtcgcgacaaggaggaggaggaggaggtggccggtggagactgcatagggagcacggtctacagcaaacactggctcttcggcgtcctcagcggactcatccagattgttagccctgaaaacaccaaatctagctcagatgatgaggagcagctgacggagcttgatgaagaaatggagaatgaaatttgcagagtatgggatatgtcaatggatgaggacgtggctttatttctccaagaatttaatgctcctgatatattcatgggagtactggccaagtccaagtgtcctcgattaagagaaatctgtgtgggaattttaggtaatatggcctgtttccaggagatatgtgtgtccatcagcagtgataaaaatcttgggcaggtgttattgcactgtttgtatgattcagacccacctactctgctggaaacaagcaggttgttgcttacttgcctttcccaggcagaagtggccagtgtttgggttgaaaggatccaggaacatccagctatttatgatagcatttgcttcattatgtcaagttcaacaaatgttgacttgctggtgaaggtgggggaggttgtggacaagctctttgatttggatgagaaactaatgttagaatgggtcagaaatggggctgctcagcctctggaccaaccccaggaagagtctgaagagcagccagtgtttcggcttgtgccctgtatacttgaagctgccaaacaagtacgttctgaaaatccagaatggcttgatgtttacatgcacattttacaactgcttactacagtggatgatggaattcaagcaattgtacattgtcctgacactggaaaagacatttggaatttactttttgacctggtctgccatgaattctgccagtctgatgatccacccatcattcttcaagaacagaaaacagtgctagcctctgttttttcagtgttgtctgccatctatgcctcacagactgagcaagagtatctaaagatagaaaaaggagacggtggctcagggagtaaaggaaggccagttgagcaaacagaagtgttcctctgcatttcaaaaccttcttcctttctatagccctgtggtggaagattttattaaaatcctacgtgaagttgataaggcgcttgctgatgacttggaaaaaaacttcccaagtttgaaggttcagacttaaaacctgaattggaattacttctgtacaagaaataaactttatttttctcactgaca

SEQ ID NO: 327781 - DNA, 1499 bp, Homo sapiens
cagcggagcttccggcacggccttcaagcgcgggacgcgacaaagtcatggaccgcaacccctcgccgccgccgccgggtcgcgacaaggaggaggaggaggaggtggccggtggagactgcatagggagcacggtctacagcaaacactggctcttcggcgtcctcagcggactcatccagattgttagccctgaaaacaccaaatctagctcagatgatgaggagcagctgacggagcttgatgaagaaatggagaatgaaatttgcagagtatgggatatgtcaatggatgaggacgtggctttatttctccaagaatttaatgctcctgatatattcatgggagtactggccaagtccaagtgtcctcgattaagagaaatctgtgtgggaattttaggtaatatggcctgtttccaggagatatgtgtgtccatcagcagtgataaaaatcttgggcaggtgttattgcactgtttgtatgattcagacccacctactctgctggaaacaagcagaagtggccagtgtttgggttgaaaggatccaggaacatccagctatttatgatagcatttgcttcattatgtcaagttcaacaaatgttgacttgctggtgaaggtgggggaggttgtggacaagctctttgatttggatgagaaactaatgttagaatgggtcagaaatggggctgctcagcctctggaccaaccccaggaagagtctgaagagcagccagtgtttcggcttgtgccctgtatacttgaagctgccaaacaagtacgttctgaaaatccagaatggcttgatgtttacatgcacattttacaactgcttactacagtggatgatggaattcaagcaattgtacattgtcctgacactggaaaagacatttggaatttactttttgacctggtctgccatgaattctgccagtctgatgatccacccatcattcttcaagaacagaaaacagtgctagcctctgttttttcagtgttgtctgccatctatgcctcacagactgagcaagagtatctaaagatagaaaaagtagatcttcctctaattgacagcctcattcgggtcttacaaaatatggaacagtgtcagaaaaaaccagagaactcggcagagtctaacacagaggaaactaaaaggactgatttaacccaagatgatttccacttgaaaatcttaaaggatattttatgtgaatttctttctaatatttttcaggcattaacaaaggagacggtggctcagggagtaaaggaaggccagttgagcaaacagaagtgttcctctgcatttcaaaaccttcttcctttctatagccctgtggtggaagattttattaaaatcctacgtgaagttgataaggcgcttgctgatgacttggaaaaaaacttcccaagtttgaaggttcagacttaaaacctgaattggaattacttctgtacaagaaataaactttatttttctcactgaca

SEQ ID NO: 327782 - DNA, 497 bp, Homo sapiens
acagcacgcgctacatctggatgagtccgctgaggacgccgaatagccagtgtttgctgtagaccgtgctccctatgcagtctccaccggccacctcctcctcctcctccttgtcgcgacccggcggcggcggcaaggggttgcgacaaagaggaaactaaaaggactgatttaacccaagatgatttccacttgaaaatcttaaaggatattttatgtgaatttctttctaatatttttcaggcattaacaaaggagacggtggctcagggagtaaaggaaggccagttgagcaaacagaagtgttcctctgcatttcaaaaccttcttcctttctatagccctgtggtggaagattttattaaaatcctacgtgaagttgataaggcgcttgctgatgacttggaaaaaaacttcccaagtttgaaggttcagacttaaaacctgaattggaattacttctgtacaagaaataaactttatttttctcactgaca

SEQ ID NO: 327783 - DNA, 521 bp, Homo sapiens
  misc_feature (27)..(27): n is a, c, g, or t
atacggctaggtacgaggctgggtgtngtcatggaccgcaacccctcgccgccgccgccgggtcgcgacaaggaggaggaggaggaggtggccggtggagactgcatagggagcacggtctacagcaaacactggctcttcggcgtcctcagcggactcatccagattgttagccctgaaaacaccaaatctagctcagatgatgaggagcagctgacggagcttgatgaagaaatggagaatgaaatttgcagagtatgggatatgtcaatggatgaggagacggtggctcagggagtaaaggaaggccagttgagcaaacagaagtgttcctctgcatttcaaaaccttcttcctttctatagccctgtggtggaagattttattaaaatcctacgtgaagttgataaggcgcttgctgatgacttggaaaaaaacttcccaagtttgaaggttcagacttaaaacctgaattggaattacttctgtacaagaaataaactttatttttctcactgaca

SEQ ID NO: 327784 - DNA, 530 bp, Homo sapiens
atattaagccaaaatcagattcttgggaatagtcagtaggtttttatggttcttcaaatgacatcacatttcctaccattagaatcagatttcaaaataggaactttttcaggaaaatgaaggacagaatgtgggaacagactgtaaagaagaggcggggggagaagtactagctcaagagtaaaacggaatgggaaagcatagtcatttccttgagaatgatttagaagactgcttaggaagtactgttactatcatctggagatctgccagcatttcttttccattggaccatttagaaaccacaggtagagcaatcagtaccttaaagcacgtttttctcttctgtgtttgatttttgtttgtttgtttgactcacaggtggaagattttattaaaatcctacgtgaagttgataaggcgcttgctgatgacttggaaaaaaacttcccaagtttgaaggttcagacttaaaacctgaattggaattacttctgtacaagaaataaactttatttttctcactgaca

SEQ ID NO: 327785 - DNA, 517 bp, Homo sapiens
attgttgccatttccatgatgttcaatattcaaagcaatttggagacttcttgttccagatgcacccctttgttcgttgctcacatcaagtgatatctgactggtctttaaagatccaaatttcacaattttggatgagccttgactgatctgaaaatgttagatttttctctttcattctgtttgaacatgctttagtgtgagttggctatttctttagagcaattaaggaaaaatgcccaatttcccagaacaactcacaaagtactcatggattatttcattttcttaggaagttgcctacttgctaaaaggtgtaccctgagcatttgtgactccgagggaaaccaggaacatcatgctgcagaaaccctttggaggaacgtgccaactgctccgtaaccatgagctggctctcctttgatggagagattaatagtttccataattatatcatcctggttgttctggggccagagtttacttagacttgaaagaaattgaagttaattgaaaa

SEQ ID NO: 327786 - DNA, 1658 bp, Homo sapiens
cagcggagcttccggcacggccttcaagcgcgggacgcgacaaagtcatggaccgcaacccctcgccgccgccgccgggtcgcgacaaggaggaggaggaggaggtggccggtggagactgcatagggagcacggtctacagcaaacactggctcttcggcgtcctcagcggactcatccagattgttagccctgaaaacaccaaatctagctcagatgatgaggagcagctgacggagcttgatgaagaaatggagaatgaaatttgcagagtatgggatatgtcaatggatgaggacgtggctttatttctccaagaatttaatgctcctgatatattcatgggagtactggccaagtccaagtgtcctcgattaagagaaatctgtgtgggaattttaggtaatatggcctgtttccaggagatatgtgtgtccatcagcagtgataaaaatcttgggcaggtgttattgcactgtttgtatgattcagacccacctactctgctggaaacaagcaggttgttgcttacttgcctttcccaggcagaagtggccagtgtttgggttgaaaggatccaggaacatccagctatttatgatagcatttgcttcattatgtcaagttcaacaaatgttgacttgctggtgaaggtgggggaggttgtggacaagctctttgatttggatgagaaactaatgttagaatgggtcagaaatggggctgctcagcctctggaccaaccccaggaagagtctgaagagcagccagtgtttcggcttgtgccctgtatacttgaagctgccaaacaagtacgttctgaaaatccagaatggcttgatgtttacatgcacattttacaactgcttactacagtggatgatggaattcaagcaattgtacattgtcctgacactggaaaagacatttggaatttactttttgacctggtctgccatgaattctgccagtctgatgatccacccatcattcttcaagaacagaaaacagtgctagcctctgttttttcagtgttgtctgccatctatgcctcacagactgagcaagagtatctaaagatagaaaaagtagatcttcctctaattgacagcctcattcgggtcttacaaaatatggaacagtgtcagaaaaaaccagagaactcggcagagtctaacacagaggaaactaaaaggactgatttaacccaagatgatttccacttgaaaatcttaaaggatattttatgtgaatttctttctaatatttttcaggcattaacaaaggagacggtggctcagggagtaaaggaaggccagttgagcaaacagaagtgttcctctgcatttcaaaaccttcttcctttctatagccctgtggtggaagattttattaaaatcctacgtgaagttgataaggcgcttgctgatgacttggaaaaaaacttcccaagtttgaaggttcagacttaaaacctgaattggaattacttctgtacaagaaataaactttatttttctcactgacaaaaaaaacaaaaaaaattggggcccgcccggaagtttacactcgggggggcaggaggaagcacgtcagaccggcgaagggttccaaaaccggcgggggaacaggtgtggtatgcagccccgtccccggta

SEQ ID NO: 327787 - DNA, 1539 bp, Homo sapiens
cagcggagcttccggcacggccttcaagcgcgggacgcgacaaagtcatggaccgcaacccctcgccgccgccgccgggtcgcgacaaggaggaggaggaggaggtggccggtggagactgcatagggagcacggtctacagcaaacactggctcttcggcgtcctcagcggactcatccagattgttagccctgaaaacaccaaatctagctcagatgatgaggagcagctgacggagcttgatgaagaaatggagaatgaaatttgcagagtatgggatatgtcaatggatgaggacgtggctttatttctccaagaatttaatgctcctgatatattcatgggagtactggccaagtccaagtgtcctcgattaagagaaatctgtgtgggaattttaggtaatatggcctgtttccaggagatatgtgtgtccatcagcagtgataaaaatcttgggcaggtgttattgcactgtttgtatgattcagacccacctactctgctggaaacaagcaggttgttgcttacttgcctttcccaggcagaagtggccagtgtttgggttgaaaggatccaggaacatccagctatttatgatagcatttgcttcattatgtcaagttcaacaaatgttgacttgctggtgaaggtgggggaggttgtggacaagctctttgatttggatgagaaactaatgttagaatgggtcagaaatggggctgctcagcctctggaccaaccccaggaagagtctgaagagcagccagtgtttcggcttgtgccctgtatacttgaagctgccaaacaagtacgttctgaaaatccagaatggcttgatgtttacatgcacattttacaactgcttactacagtggatgatggaattcaagcaattgtacattgtcctgacactggaaaagacatttggaatttactttttgacctggtctgccatgaattctgccagtctgatgatccacccatcattcttcaagaacagaaaacagtgctagcctctgttttttcagtgttgtctgccatctatgcctcacagactgagcaagagtatctaaagatagaaaaagtagatcttcctctaattgacagcctcattcgggtcttacaaaatatggaacagtgtcagaaaaaaccagagaactcggcagagtctaacacagaggaaactaaaaggactgatttaacccaagatgatttccacttgaaaatcttaaaggatattttatgtgaatttctttctaatatttttcaggcattaacaaaggagacggtggctcagggagtaaaggaaggccagttgagcaaacagaagtgttcctctgcatttcaaaaccttcttcctttctatagccctgtggtggaagattttattaaaatcctacgtgaagttgataaggcgcttgctgatgacttggaaaaaaacttcccaagtttgaagggtttcaggtctttaaatccctgaaattttgggatttctttcttgttccaggttgtttaaaccttttattttttcctcc

SEQ ID NO: 327788 - DNA, 2370 bp, Homo sapiens
cagcggagcttccggcacggccttcaagcgcgggacgcgacaaagtcatggaccgcaacccctcgccgccgccgccgggtcgcgacaaggaggaggaggaggaggtggccggtggagactgcatagggagcacggtctacagcaaacactggctcttcggcgtcctcagcggactcatccagattgttagccctgaaaacaccaaatctagctcagatgatgaggagcagctgacggagcttgatgaagaaatggagaatgaaatttgcagagtatgggatatgtcaatggatgaggacgtggctttatttctccaagaatttaatgctcctgatatattcatgggagtactggccaagtccaagtgtcctcgattaagagaaatctgtgtgggaattttaggtaatatggcctgtttccaggagatatgtgtgtccatcagcagtgataaaaatcttgggcaggtgttattgcactgtttgtatgattcagacccacctactctgctggaaacaagcaggttgttgcttacttgcctttcccaggcagaagtggccagtgtttgggttgaaaggatccaggaacatccagctatttatgatagcatttgcttcattatgtcaagttcaacaaatgttgacttgctggtgaaggtgggggaggttgtggacaagctctttgatttggatgagaaactaatgttagaatgggtcagaaatggggctgctcagcctctggaccaaccccaggaagagtctgaagagcagccagtgtttcggcttgtgccctgtatacttgaagctgccaaacaagtacgttctgaaaatccagaatggcttgatgtttacatgcacattttacaactgcttactacagtggatgatggaattcaagcaattgtacattgtcctgacactggaaaagacatttggaatttactttttgacctggtctgccatgaattctgccagtctgatgatccacccatcattcttcaagaacagaaaacagtgctagcctctgttttttcagtgttgtctgccatctatgcctcacagactgagcaagagtatctaaagatagaaaaagcctcattcgggtcttacaaaatatggaacagtgtcagaaaaaaccagagaactcggcagagtctaacacagaggaaactaaaaggactgatttaacccaagatgatttccacttgaaaatcttaaaggatattttatgtgaatttctttctaatatttttcaggcattaacaaaggagacggtggctcagggagtaaaggaaggccagttgagcaaacagaagtgttcctctgcatttcaaaaccttcttcctttctatagccctgtggtggaagattttattaaaatcctacgtgaagttgataaggcgcttgctgatgacttggaaaaaaacttcccaagtttgaaggttcagacttaaaacctgaattggaattacttctgtacaagaaataaactttatttttctcactgacaaaaaaaaaaaaaaaaaaaaaaaaaaaaaggggggggggtaaaaagtttccccgagaggggcgcccaaggttaacggcggtacccaggttttttgggcacaaggggggccccatataggggaggcggaataaaaaggcaagggcaggggcgcgggcggttaacacaagggcgggagccgggggaaacgtggcttacctgggggaacacctggggggagagcgaacctcttaatttccggggcgggcgcggggaaccatcatcgggcgccaatttacccctaagcggaaatttcagagaacctaagggcgacactcttacacactctctcaaggcgtcttcacgggtgtctcacccctagagggaatatatggctcaggggggggtggagaacaatttccggggccaccaggggagtatgtgagtctctggcaacaaatttttataggcggggtctgtcaatactacatatatacaaaactaaattacaatataatcagaaacacacactaaaaaacattaacagactagatacatataaaaatttaaatagataaatatggagagaacgaagaaacgaggagatgacgaaaggagaaacaaaaaaacagatataaaaccaacaaaccaccgaggaagagagacgagacaaaaacagcgaaccacgcagagagagtgaaaataccaacaacaaagacagataatgagaggacaaagaggagctacctaaaatagacaagcacgagagcgaaacgccacgagtagaatagcacgagaaaacactacggacagtaaaacagcgaaggcgaagaaatgaacaaagagaagcaagagacgagacgcaggccgcccacactatacaaacgg

SEQ ID NO: 327789 - DNA, 1511 bp, Homo sapiens
  misc_feature (27)..(27): n is a, c, g, or t
atacggctaggtacgaggctgggtgtngtcatggaccgcaacccctcgccgccgccgccgggtcgcgacaaggaggaggaggaggaggtggccggtggagactgcatagggagcacggtctacagcaaacactggctcttcggcgtcctcagcggactcatccagattgttagccctgaaaacaccaaatctagctcagatgatgaggagcagctgacggagcttgatgaagaaatggagaatgaaatttgcagagtatgggatatgtcaatggatgaggacgtggctttatttctccaagaatttaatgctcctgatatattcatgggagtactggccaagtccaagtgtcctcgattaagagaaatctgtgtgggaattttaggtaatatggcctgtttccaggagatatgtgtgtccatcagcagtgataaaaatcttgggcaggtgttattgcactgtttgtatgattcagacccacctactctgctggaaacaagcaggttgttgcttacttgcctttcccaggcagaagtggccagtgtttgggttgaaaggatccaggaacatccagctatttatgatagcatttgcttcattatgtcaagttcaacaaatgttgacttgctggtgaaggtgggggaggttgtggacaagctctttgatttggatgagaaactaatgttagaatgggtcagaaatggggctgctcagcctctggaccaaccccaggaagagtctgaagagcagccagtgtttcggcttgtgccctgtatacttgaagctgccaaacaagtacgttctgaaaatccagaatggcttgatgtttacatgcacattttacaactgcttactacagtggatgatggaattcaagcaattgtacattgtcctgacactggaaaagacatttggaatttactttttgacctggtctgccatgaattctgccagtctgatgatccacccatcattcttcaagaacagaaaacagtgctagcctctgttttttcagtgttgtctgccatctatgcctcacagactgagcaagagtatctaaagatagaaaaagtagatcttcctctaattgacagcctcattcgggtcttacaaaatatggaacagtgtcagaaaaaaccagagaactcggcagagtctaacacagaggaaactaaaaggactgatttaacccaagatgatttccacttgaaaatcttaaaggatattttatgtgaatttctttctaatatttttcaggcattaacaaaggagacggtggctcagggagtaaaggaaggccagttgagcaaacagaagtgttcctctgcatttcaaaaccttcttcctttctatagccctgtggtggaagattttattaaaatcctacgtgaagttgataaggcgcttgctgatgacttggaaaaaaacttcccaagtttgaaggttcagacttaaaacctgaattggaattacttctgtacaagaaataaactttatttttctcactgaca

SEQ ID NO: 327790 - DNA, 1397 bp, Homo sapiens
  misc_feature (27)..(27): n is a, c, g, or t
atacggctaggtacgaggctgggtgtngtcatggaccgcaacccctcgccgccgccgccgggtcgcgacaaggaggaggaggaggaggtggccggtggagactgcatagggagcacggtctacagcaaacactggctcttcggcgtcctcagcggactcatccaggacgtggctttatttctccaagaatttaatgctcctgatatattcatgggagtactggccaagtccaagtgtcctcgattaagagaaatctgtgtgggaattttaggtaatatggcctgtttccaggagatatgtgtgtccatcagcagtgataaaaatcttgggcaggtgttattgcactgtttgtatgattcagacccacctactctgctggaaacaagcaggttgttgcttacttgcctttcccaggcagaagtggccagtgtttgggttgaaaggatccaggaacatccagctatttatgatagcatttgcttcattatgtcaagttcaacaaatgttgacttgctggtgaaggtgggggaggttgtggacaagctctttgatttggatgagaaactaatgttagaatgggtcagaaatggggctgctcagcctctggaccaaccccaggaagagtctgaagagcagccagtgtttcggcttgtgccctgtatacttgaagctgccaaacaagtacgttctgaaaatccagaatggcttgatgtttacatgcacattttacaactgcttactacagtggatgatggaattcaagcaattgtacattgtcctgacactggaaaagacatttggaatttactttttgacctggtctgccatgaattctgccagtctgatgatccacccatcattcttcaagaacagaaaacagtgctagcctctgttttttcagtgttgtctgccatctatgcctcacagactgagcaagagtatctaaagatagaaaaagtagatcttcctctaattgacagcctcattcgggtcttacaaaatatggaacagtgtcagaaaaaaccagagaactcggcagagtctaacacagaggaaactaaaaggactgatttaacccaagatgatttccacttgaaaatcttaaaggatattttatgtgaatttctttctaatatttttcaggcattaacaaaggagacggtggctcagggagtaaaggaaggccagttgagcaaacagaagtgttcctctgcatttcaaaaccttcttcctttctatagccctgtggtggaagattttattaaaatcctacgtgaagttgataaggcgcttgctgatgacttggaaaaaaacttcccaagtttgaaggttcagacttaaaacctgaattggaattacttctgtacaagaaataaactttatttttctcactgaca

SEQ ID NO: 327791 - DNA, 203 bp, Homo sapiens
  misc_feature (6)..(6): n is a, c, g, or t
  misc_feature (11)..(11): n is a, c, g, or t
gcggcngcctnctactactactactgctcgaattcaagcttctaacgatgtacggggacatggcctgtatgagaagaaaaagacctcaagaaagcaacgaaaggaacgcaagaacagaatgaagaaagtcagggggactgcaaaggccaatgttggtgctggcaaaatgagctggagattggatcacagccgaaggagtaaag

SEQ ID NO: 327792 - DNA, 678 bp, Homo sapiens
tcagtctagagttccaggggtgtggccaaaagtctgtgaggcggggccgtaggcagcctaaatcaggcatcggcgcggtcagcctcgtggcgcgcccacgcccccacgccggctcttcccggggtccttccgtgcgcgttgatatgattggccggcgaatcgtggttctcttttcctccttggctgtctgaagatagatcgccatcatgaacgacaccgtaactatccgcactagaaagttcatgaccaaccgactacttcagaggaaacaaatggtcattgatgtccttcaccccgggaaggcgacagtgcctaagacagaaattcgggaaaaactagccaaaatgtacaagaccacaccggatgtcatctttgtatttggattcagaactcattttggtggtggcaagacaactggctttggcatgatttatgattccctggattatgcaaagaaaaatgaacccaaacatagacttgcaagacatggcctgtatgagaagaaaaagacctcaagaaagcaacgaaaggaacgcaagaacagaatgaagaaagtcagggggactgcaaaggccaatgttggtgctggcaaaaagccgaaggagtaaaggtgctgcaatgatgttagctgtggccactgtggatttttcgcaagaacattaataaactaaaaacttc

SEQ ID NO: 327793 - DNA, 873 bp, Homo sapiens
gcttttcctctctactttcttggatttcttgttcatcagaaatgaagtgtctagcaggtactgagattgtaagcacggtgtggggatgcatcaccttcactgagtttgctttgatgatgctttgcatgttggcctttggacgacagttttatagtatggtcgattataatgccagtgctatttaggctggtgcaaaagtaattgcagtggcaaaaaccacaattacttttgcaccaacctaatatgttttaagatagtatattatgagcaaaggagaaaacgtttaaaatcatgtttattttgtaaactccaaaatgcatgttacatgtgaagtgactcactggaggaaggtgagtactttaccaagtaggcacttgggaaatgctgtgtccacatacttaggaaatggcttcagttaacactgggcttgggaagggctctcttatccaaggagcagtcttctctggagccatgaaaccagcctggcagcactggtaataaactagtctgtgaaatctggcaaagcctctgtcctgtttggatatacgccaaactgccttttaccatttccattgctttttattacttaatctcccaactttgtgcctggtgtctttttttttttttaaaatagaaaatttttgaggtaattatgtattcatataaaagtctttggtggatatgctttttcccacaagcacttggttagaatggcccattacctcatttgtttattttttgagacagggtctcttgtcacccaggctggagtacagtggcatgatcatgggttactgtacctcccgggcttgggtgattctcccacctcagcctcccttgtagctgcgactaccacgccatgtctcaccagtc

SEQ ID NO: 327794 - DNA, 572 bp, Homo sapiens
aagcagtggatcaacgcagagtgcccattatggccggggctcttttcctccttggctgtctgaagatagatcgccatcatgaacgacaccgtaactatccgcactagaaagttcatgaccaaccgactacttcagaggaaacaaatggtcattgatgtccttcaccccgggaaggcgacagtgcctaagacagaaattcgggaaaaactagccaaaatgtacaagaccacaccggatgtcatctttgtatttggattcagaactcattttggtggtggcaagacaactggctttggcatgatttatgattccctggattatgcaaagaaaaatgaacccaaacatagacttgcaagacatggcctgtatgagaagaaaaagacctcaagaaagcaacgaaaggaacgcaagaacagaatgaagaaagtcagggggactgcaaaggccaatgttggtgctggcaaaaagtgagctggagattggatcacagccgaaggagtaaaggtgctgcaatgatgttagctgtggccactgtggatttttcgcaagaacattaataaactaaaaacttc

SEQ ID NO: 327795 - DNA, 539 bp, Homo sapiens
  misc_feature (16)..(17): n is a, c, g, or t
ggatccccgggctgcnngaattcggcacgaggatagatcgccatcatgaacgacaccgtaactatccgcactagaaagttcatgaccaaccgactacttcagaggaaacaaatggtcattgatgtccttcaccccgggaaggcgacagtgcctaagacagaaattcgggaaaaactagccaaaatgtacaagaccacaccggatgtcatctttgtatttggattcagaactcattttggtggtggcaagacaactggctttggcatgatttatgattccctggattatgcaaagaaaaatgaacccaaacatagacttgcaagacatggcctgtatgagaagaaaaagacctcaagaaagcaacgaaaggaacgcaagaacagaatgaagaaagtcagggggactgcaaaggccaatgttggtgctggcaaaaagtgagctggagattggatcacagccgaaggagtaaaggtgctgcaatgatgttagctgtggccactgtggatttttcgcaagaacattaataaactaaaaacttc

SEQ ID NO: 327796 - DNA, 597 bp, Homo sapiens
ggcacatatactaaaattggaacgatacagagaagattagcatggcccctgcgcaaggatgacacgcaaattcgtgaagcgttccatatgatagatcgccatcatgaacgacaccgtaactatccgcactagaaagttcatgaccaaccgactacttcagaggaaacaaatggtcattgatgtccttcaccccgggaaggcgacagtgcctaagacagaaattcgggaaaaactagccaaaatgtacaagaccacaccggatgtcatctttgtatttggattcagaactcattttggtggtggcaagacaactggctttggcatgatttatgattccctggattatgcaaagaaaaatgaacccaaacatagacttgcaagacatggcctgtatgagaagaaaaagacctcaagaaagcaacgaaaggaacgcaagaacagaatgaagaaagtcagggggactgcaaaggccaatgttggtgctggcaaaaagtgagctggagattggatcacagccgaaggagtaaaggtgctgcaatgatgttagctgtggccactgtggatttttcgcaagaacattaataaactaaaaacttc

SEQ ID NO: 327797 - DNA, 735 bp, Homo sapiens
  misc_feature (3)..(4): n is a, c, g, or t
  misc_feature (16)..(16): n is a, c, g, or t
  misc_feature (21)..(21): n is a, c, g, or t
tgnntagtacgaggcngggtntgaatcggccgagctgaagatagatcgccatcatgaacgacaccgtaactatccgcactagaaagttcatgaccaaccgactacttcagaggaaacaaatggtcattgatgtccttcaccccgggaaggcgacagtgcctaagacagaaattcgggaaaaactagccaaaatgtacaagaccacaccggatgtcatctttgtatttggattcagaactcattttggtggtggcaagacaactggctttggcatgatttatgattccctggattatgcaaagaaaaatgaacccaaacatagacttgcaagacatggcctgtatgagaagaaaaagacctcaagaaagcaacgaaaggaacgcaagaacagaatgaagaaagtcagggggactgcaaaggccaatgttggtgctggcaaaaagtgagctggagattggatcacagccgaaggagtaaaggtgctgcaatgatgttagctgtggccactgtggatttttcgcaagaacattaataaactaaaaacttcatgttgaacacaacaaacacaaaaaaaactccgggggctctctatgccggggggcggccacacgccggtctcggactggcgcccgtggccataagctggttcccttgaccaagtttctttgtccacgtgggtaatcggcgggtccctatagggagccgctattcgaagccggtacgtgatccgcccca

SEQ ID NO: 327798 - DNA, 525 bp, Homo sapiens
  misc_feature (3)..(4): n is a, c, g, or t
  misc_feature (16)..(16): n is a, c, g, or t
  misc_feature (21)..(21): n is a, c, g, or t
tgnntagtacgaggcngggtntgaatcggccgagctgaagatagatcgccatcatgaacgacaccgtaactatccgcactagaaagttcatgaccaaccgactacttcagaggaaacaaatggtcattgatgtccttcaccccgggaaggcgacagtgcctaagacagaaattcgggaaaaactagccaaaatgtacaagaccacaccggatgtcatctttgtatttggattcagaactcattttggtggtggcaagacaactggctttggcatgatttatgattccctggattatgcaaagaaaaatgaacccaaacatagacttgcaagacatggcctgtatgagaagaaaaagacctcaagaaagcaacgaaaggaacgcaagaacagaatgaagaaagtcagggggactgcaaaggccaatgttggtgctggcaaaaagccgaaggagtaaaggtgctgcaatgatgttagctgtggccactgtggatttttcgcaagaacattaataaactaaaaacttc

SEQ ID NO: 327799 - DNA, 651 bp, Homo sapiens
  misc_feature (3)..(4): n is a, c, g, or t
  misc_feature (16)..(16): n is a, c, g, or t
  misc_feature (21)..(21): n is a, c, g, or t
tgnntagtacgaggcngggtntgaatcggccgagctgaagatagatcgccatcatgaacgacaccgtaactatccgcactagaaagttcatgaccaaccgactacttcagaggaaacaaatggtcattgatgtccttcaccccgggaaggcgacagtgcctaagacagaaattcgggaaaaactagccaaaatgtacaagaccacaccggatgtcatctttgtatttggattcagaactcattttggtggtggcaagacaactggctttggcatgatttatgattccctggattatgcaaagaaaaatgaacccaaacatagacttgcaagacatggcctgtatgagaagaaaaagacctcaagaaagcaacgaaaggaacgcaagaacagaatgaagaaagtcagggggactgcaaaggccaatgttggtgctggcaaaaagccgaaggagtaaaggtgctgcaatgatgttagctgtggccactgtggatttttcgcaagaacattaataaactaaaaacttcctcgagggggggccccgtaacccatttccccctataaggaggtcgttttacaatttcactggcccgtcggttttacaacgtcctggaactgggaaaaaaccctggccgtacccccaactttaattc

SEQ ID NO: 327800 - DNA, 536 bp, Homo sapiens
  misc_feature (6)..(6): n is a, c, g, or t
  misc_feature (507)..(507): n is a, c, g, or t
  misc_feature (518)..(518): n is a, c, g, or t
  misc_feature (525)..(525): n is a, c, g, or t
tggtgntctcgaggatcccctcctcagcagacgcagctcttttcctccttggctgtctgaagatagatcgccatcatgaacgacaccgtaactatccgcactagaaagttcatgaccaaccgactacttcagaggaaacaaatggtcattgatgtccttcaccccgggaaggcgacagtgcctaagacagaaattcgggaaaaactagccaaaatgtacaagaccacaccggatgtcatctttgtatttggattcagaactcattttggtggtggcaagacaactggctttggcatgatttatgattccctggattatgcaaagaaaaatgaacccaaacatagacttgcaagacatggcctgtatgagaagaaaaagacctcaagaaagcaacgaaaggaacgcaagaacagaatgaagaaagtcagggggactgcaaaggccaatgttggtgctggcaaaagtgagctggagattggatcacagccgaaggagtaaaggcggggnggaaatgaaanaggtaanagtcgattgat

SEQ ID NO: 327801 - DNA, 218 bp, Homo sapiens
catcagctcccccctgttatcgagtgctttcatgccgggaaggcgacagtgcctaagacagaaattcgggaaaaactagccaaaatgtacaagaccacaccggatgtcatctttgtatttggattcagaactcattttggtggtggcaagacaactggctttggcatgaaaggcactggacatgaagtgggatcctcatagagtctgacctcgcaggg

SEQ ID NO: 327802 - DNA, 507 bp, Homo sapiens
  misc_feature (6)..(6): n is a, c, g, or t
  misc_feature (11)..(11): n is a, c, g, or t
gcggcngcctnctactactactactgctcgaattcaagcttctaacgatgtacggggacatggcctgtatgagaagaaaaagacctcaagaaagcaacgaaaggaacgcaagaacagaatgaagaaagtcagggggactgcaaaggccaatgttggtgctggcaaaaagaaggtaacatgttttaagaaactatgtagcatagtgtcttaacacctcagtaaagtagcttggcccaccccttgtcagctcacagcacaatctggaggccacattggttcattgatcccagctggtgggcacctttcaagcctatcacaagaagttttaattttactaattggcatagaaccttcaatgcagagcggatcccattccctgtgattttacttattaatatggacactggtttaagaagcagttggatcaatgtggcccgtgttttcctggcacactggaaaggcaactgagatctcaggattgctttcctctccagttggccaagacaa

SEQ ID NO: 327803 - DNA, 1473 bp, Homo sapiens
ttgctcaggctgctcttgaactcccggacttgagcagtctgcttgtctaagccttccaaagtgctgggattacaggtgtgagccactgtgcccagcctgttacctcatttaaaacaaattttgcacatctgaacagcctaaaattgtaatgtgataagtggggtaggagtggggtgggcgtagtgggattttgaatcaatgaaggcccttgttcttgtggcatccttttgcagtgattccctgccaggcaaggcagtaaacctgggattgcctgcccaggactgtaatcacattgatgtcccagcgccatggagtatgtaatgaatgaactgccagcagaactactcactaagaactactccctgtttgtgaggattgtacctgttgagagaagttgcaaaaagaattagtcaaaagaattagtcaaaatttgtcctctgacctaggtctgaaggacatttaacacattgattgttctcttcatccagcctttgagccctatgagttagtgcccttagcctttgagtcccacaggtatggaggagctacctgtggggacctgagccatcactattcctgcttcaagttacactggtgcctctcactagcactgctctgaaaagccagctggaaaaatcaatgcatttgagtacataaattctttggctccaaagaaatgccatagcaatattgcttttaattcagttttgtttagatgttagaattggtatttgttcttgctttttggttgcgatggagttatatactaagttacttatactaaggcattagtagtctcatatctgaggagcaattgtatttttagttcagctaaattaatgcctctttttaaatactaacttgtactacttttgtggctgtgaatggtatcttttattgaactgaggcagcttttaaaagacttgcctgatcatttagagcactcccattgaggttaaattagacttgaatctgtaatgattctcgtaactgttcctggtgtgtgtccagcacaatgttgctgggcagagcagaggggcagaggctcaggtatgtacttcattgacaagtgggcaaggccatcctgggtaccacattggcttaatgatctcttcattgtgaagtccggctacctcgtttgcataagaactacagtaatcaggcaaggcattgtcagaattgggaggaataaaatcagtgagtctggaaggagtgctctgtatacaattgcaaagaacaaaatggtcatctttaaggtacctgattgcatgcacttaaatgcagattattttggagtttgaaaagggactattaatgaaatctttcttttccctcctttctctttttcccttccccgccactgattcagtgagctggagattggatcacagccgaaggagtaaaggtgctgcaatgatgttagctgtggccactgtggatttttcgcaagaacattaataaactaaaaacttc

SEQ ID NO: 327804 - DNA, 1861 bp, Homo sapiens
ttgctcaggctgctcttgaactcccggacttgagcagtctgcttgtctaagccttccaaagtgctgggattacaggtgtgagccactgtgcccagcctgttacctcatttaaaacaaattttgcacatctgaacagcctaaaattgtaatgtgataagtggggtaggagtggggtgggcgtagtgggattttgaatcaatgaaggcccttgttcttgtggcatccttttgcagtgattccctgccaggcaaggcagtaaacctgggattgcctgcccaggactgtaatcacattgatgtcccagcgccatggagtatgtaatgaatgaactgccagcagaactactcactaagaactactccctgtttgtgaggattgtacctgttgagagaagttgcaaaaagaattagtcaaaagaattagtcaaaatttgtcctctgacctaggtctgaaggacatttaacacattgattgttctcttcatccagcctttgagccctatgagttagtgcccttagcctttgagtcccacaggtatggaggagctacctgtggggacctgagccatcactattcctgcttcaagttacactggtgcctctcactagcactgctctgaaaagccagctggaaaaatcaatgcatttgagtacataaattctttggctccaaagaaatgccatagcaatattgcttttaattcagttttgtttagatgttagaattggtatttgttcttgctttttggttgcgatggagttatatactaagttacttatactaaggcattagtagtctcatatctgaggagcaattgtatttttagttcagctaaattaatgcctctttttaaatactaacttgtactacttttgtggctgtgaatggtatcttttattgaactgaggcagcttttaaaagacttgcctgatcatttagagcactcccattgaggttaaattagacttgaatctgtaatgattctcgtaactgttcctggtgtgtgtccagcacaatgttgctgggcagagcagaggggcagaggctcaggtatgtacttcattgacaagtgggcaaggccatcctgggtaccacattggcttaatgatctcttcattgtgaagtccggctacctcgtttgcataagaactacagtaatcaggcaaggcattgtcagaattgggaggaataaaatcagtgagtctggaaggagtgctctgtatacaattgcaaagaacaaaatggtcatctttaaggtacctgattgcatgcacttaaatgcagattattttggagtttgaaaagggactattaatgaaatctttcttttccctcctttctctttttcccttccccgccactgattcagtgagctggagattggatcacaggtataattcaagcttttcatgtagtcatgtagatcactagactccttggtgtactgacgtagcaatttaaaagcagatcatgtgtagtacatctagaagtagatttacaaatattctgaagagttgtaaccttttaaaatactaacagtgacatggttttgtttttaaggtttagcaatatttagcccattatttttgttttattcttaacttgaatgtttgtaaattttatttcttgatgctttcattgtgttatgataacatcaaaataacttgatattctaggttactaataattgttgtgcatgagtgttactacttttggaattgaagactttaaagaattttaaaggcagttgttgactaaacttctttctcttgattcaagccgaaggagtaaaggtgctgcaatgatgttagctgtggccactgtggatttttcgcaagaacattaataaactaaaaacttc

SEQ ID NO: 327805 - DNA, 139 bp, Homo sapiens
ttggatccggttggatccgaattcggatccaacgccaatgttggtgctggcaaaaagccgaaggagtaaaggtgctgcaatgatgttagctgtggccactgtggatttttcgcaagaacattaataaactaaaaacttc

SEQ ID NO: 327806 - DNA, 190 bp, Homo sapiens
  misc_feature (29)..(30): n is a, c, g, or t
  misc_feature (37)..(37): n is a, c, g, or t
cgcggccgcgcgacacggtgcgagaagannacagaangaagaaagtcagggggactgcaaaggccaatgttggtgctggcaaaaaagtgagctggagattggatcaagccgaaggagtaaaggtgctgcaatgatgttagctgtggccactgtggatttttcgcaagaacattaataaactaaaaacttc

SEQ ID NO: 327807 - DNA, 903 bp, Homo sapiens
  misc_feature (742)..(742): n is a, c, g, or t
  misc_feature (745)..(745): n is a, c, g, or t
  misc_feature (749)..(750): n is a, c, g, or t
  misc_feature (752)..(752): n is a, c, g, or t
  misc_feature (760)..(760): n is a, c, g, or t
  misc_feature (778)..(778): n is a, c, g, or t
  misc_feature (807)..(807): n is a, c, g, or t
  misc_feature (809)..(809): n is a, c, g, or t
  misc_feature (811)..(812): n is a, c, g, or t
  misc_feature (817)..(817): n is a, c, g, or t
  misc_feature (819)..(819): n is a, c, g, or t
  misc_feature (821)..(821): n is a, c, g, or t
  misc_feature (834)..(834): n is a, c, g, or t
  misc_feature (838)..(838): n is a, c, g, or t
  misc_feature (840)..(840): n is a, c, g, or t
  misc_feature (849)..(849): n is a, c, g, or t
  misc_feature (853)..(853): n is a, c, g, or t
  misc_feature (866)..(866): n is a, c, g, or t
tcagtctagagttccaggggtgtggccaaaagtctgtgaggcggggccgtaggcagcctaaatcaggcatcggcgcggtcagcctcgtggcgcgcccacgcccccacgccggctcttcccggggtccttccgtgcgcgttgatatgattggccggcgaatcgtggttctcttttcctccttggctgtctgaagatagatcgccatcatgaacgacaccgtaactatccgcactagaaagttcatgaccaaccgactacttcagaggaaacaaatggtcattgatgtccttcaccccgggaaggcgacagtgcctaagacagaaattcgggaaaaactagccaaaatgtacaagaccacaccggatgtcatctttgtatttggattcagaactcattttggtggtggcaagacaactggctttggcatgatttatgattccctggattatgcaaagaaaaatgaacccaaacatagacttgcaagacatggcctgtatgagaagaaaaagacctcaagaaagcaacgaaaggaacgcaagaacagaatgaagaaagtcagggggactgcaaaggccaatgttggtgctggcaaaaagccgaaggagtaaaggtgctgcaatgatgttagctgtggccactgtggatttttcgcaagaacattaataaactaaaaacttccaaaaaaaaaaaaaaaaaaaaaaacaaaactttgtgggcgcgctcgggccccgaaaaagttttnaanaccnntncgttgggnccgggcccatggtagganccggcccaacgggcccaaggaacccggcngnanngggcngntncccccaataaaangccngnggaccggcngtcngacaacccagggnccggggcctcggccatcccagggcccagggccgatta

SEQ ID NO: 327808 - DNA, 759 bp, Homo sapiens
gtcaaaggctgtgaggtgagtcacaaggaaggcactcctcagttccctggaaataatcctgctgttgttattgttattgttatattaatgttggctatcctttgccatacctactgagtgttgaaaatatccatttagcagacttcttggacagggattagcagccttattttacagatgatggaattgaggcacagagatataaagaaacatactaaaaagcatagggaatgggtaacagagttgggttccaagccaggcttttgtggctccagagcctgtggtctacaaaatatgggatctgtaagaaaggaaagtcagggggactgcaaaggccaatgttggtgctggcaaaaagtgagctggagattggatcaagccgaaggagtaaaggtgctgcaatgatgttagctgtggccactgtggatttttcgcaagaacattaataaactaaaaacttcaaaaaaaaaaacttgtgtgtggggcgcgcccttgggcccctgaaaaaagcttttttaaaccaattggtggggcgcgggggcccattgggttaaggacacacggggccatagggggtccccaagagaaaccgggcggcagagaaaaaagggcgtgagattctcccgaccgcatgtaaaaagcgcccgggggggaaacggaggcgttcggaaaaaatctcgaagagggagctccagagaggcacatcggggagcatattaaaaggggaggcccagaggagcctcggatataaagttaccc

SEQ ID NO: 327809 - DNA, 163 bp, Homo sapiens
  misc_feature (22)..(22): n is a, c, g, or t
agcgacgctgatgctgcggtgnctctagaggatcccggcaccattgtgtggcaaaagaagtgagctggagattggatcaagccgaaggagtaaaggtgctgcaatgatgttagctgtggccactgtggatttttcgcaagaacattaataaactaaaaacttc

SEQ ID NO: 327810 - DNA, 130 bp, Homo sapiens
  misc_feature (12)..(13): n is a, c, g, or t
catgctgcggtnnctctagaggaccccggcaccatgtgctggcaaaagccgaaggagtaaaggtgctgcaatgatgttagctgtggccactgtggatttttcgcaagaacattaataaactaaaaacttc

SEQ ID NO: 327811 - DNA, 361 bp, Homo sapiens
  misc_feature (91)..(91): n is a, c, g, or t
  misc_feature (101)..(101): n is a, c, g, or t
tgggagagtggaggtaagagaaaggaaggagtgtcagaataatagagggaaaaaggtgagaaaagaaacctagtaaagaagtaggcacganagacaactgnctttggcatgatttatgattccctggattatgcaaagaaaaatgaacccaaacatagacttgcaagacatggcctgtatgagaagaaaaagacctcaagaaagcaacgaaaggaacgcaagaacagaatgaagaaagtcagggggactgcaaaggccaatgttggtgctggcaaaaagccgaaggagtaaaggtgctgcaatgatgttagctgtggccactgtggatttttcgcaagaacattaataaactaaaaacttc

SEQ ID NO: 327812 - DNA, 168 bp, Homo sapiens
  misc_feature (29)..(30): n is a, c, g, or t
  misc_feature (37)..(37): n is a, c, g, or t
cgcggccgcgcgacacggtgcgagaagannacagaangaagaaagtcagggggactgcaaaggccaatgttggtgctggcaaaaagccgaaggagtaaaggtgctgcaatgatgttagctgtggccactgtggatttttcgcaagaacattaataaactaaaaacttc

SEQ ID NO: 327813 - DNA, 803 bp, Homo sapiens
aacctgtggatactcattaattctttgttaatatttatttccatgatagcatcattccagccagacttgctgaaaatctactggtgaggcaaatataatatatataaatatgctacatatatatttataaaatttctagtgggagttctatataaatgtttcttgggtattcttcagcctgtgatttaaagttttacaaaaagcagagctttttcctaagttacttttcagttaggtaactgtgtgatccagttcttccagctgcttctataatgaggcacatattaatacagtttttatatggtatctatgaaagagttcacttcatagagaataatacttgagcaaagacctcaagaaagcaacgaaaggaacgcaagaacagaatgaagaaagtcagggggactgcaaaggccaatgttggtgctggcaaaaccgaaggagtaaaggtgctgcaatgatgttagctgtggcactgtggatttttccgcaagacgcataaaattaaactaaaggactccagaaaagaaaagcagaataaacgaaaaacaaacaaaccttgtgcgtgggcgggcacttggccccctgagagaagaggtttcaaagaccacactctggtgtgggggccggggggccccaggtaagtctacggtgccagcgggccgaaaaggggtccccaagcaaaaccgcggccaaagcaggcggttggtctctccccaataaaaaccgcgggggaaccgggggttggacaccccaaagcgctgcgggcaactcggcctaacaaggggccagaggcgaaatag

SEQ ID NO: 327814 - DNA, 528 bp, Homo sapiens
ggacgcgtgggtcggacgcgtgggtcgacccacgcgtctgaagatagatcgccatcatgaacgacaccgtaactatccgcactagaaagttcatgaccaaccgactacttcagaggaaacaaatggtcattgatgtccttcaccccgggaaggcgacagtgcctaagacagaaattcgggaaaaactagccaaaatgtacaagaccacaccggatgtcatctttgtatttggattcagaactcattttggtggtggcaagacaactggctttggcatgatttatgattccctggattatgcaaagaaaaatgaacccaaacatagacttgcaagacatggcctgtatgagaagaaaaagacctcaagaaagcaacgaaaggaacgcaagaacagaatgaagaaagtcagggggactgcaaaggccaatgttggtgctggcaaaaagccgaaggagtaaaggtgctgcaatgatgttagctgtggccactgtggatttttcgcaagaacattaataaactaaaaacttc

SEQ ID NO: 327815 - DNA, 382 bp, Homo sapiens
gcggactactactactactaaattcgcggccgcgtcgcacaccggatgtcatctttgtatttggattcagaactcattttggtggtggcaagacaactggctttggcatgatttatgattccctggattatgcaaagaaaaatgaacccaaacatagacttgcaagacatggcctgtatgagaagaaaaagacctcaagaaagcaacgaaaggaacgcaagaacagaatgaagaaagtcagggggactgcaaaggccaatgttggtgctggcaaaaaagtgagctggagattggatcaagccgaaggagtaaaggtgctgcaatgatgttagctgtggccactgtggatttttcgcaagaacattaataaactaaaaacttc

SEQ ID NO: 327816 - DNA, 538 bp, Homo sapiens
tcgggacaccgaagtggaagcaatcccgcacagatagatcgccatcatgaacgacaccgtaactatccgcactagaaagttcatgaccaaccgactacttcagaggaaacaaatggtcattgatgtccttcaccccgggaaggcgacagtgcctaagacagaaattcgggaaaaactagccaaaatgtacaagaccacaccggatgtcatctttgtatttggattcagaactcattttggtggtggcaagacaactggctttggcatgatttatgattccctggattatgcaaagaaaaatgaacccaaacatagacttgcaagacatggcctgtatgagaagaaaaagacctcaagaaagcaacgaaaggaacgcaagaacagaatgaagaaagtcagggggactgcaaaggccaatgttggtgctggcaaaagtgagctggagattggatcaagccgaaggagtaaaggtgctgcaatgatgttagctgtggccactgtggatttttcgcaagaacattaataaactaaaaacttc

SEQ ID NO: 327817 - DNA, 811 bp, Homo sapiens
  misc_feature (29)..(30): n is a, c, g, or t
  misc_feature (37)..(37): n is a, c, g, or t
  misc_feature (170)..(170): n is a, c, g, or t
  misc_feature (172)..(173): n is a, c, g, or t
  misc_feature (175)..(175): n is a, c, g, or t
  misc_feature (178)..(180): n is a, c, g, or t
  misc_feature (182)..(182): n is a, c, g, or t
  misc_feature (190)..(190): n is a, c, g, or t
cgcggccgcgcgacacggtgcgagaagannacagaangaagaaagtcagggggactgcaaaggccaatgttggtgctggcaaaaagccgaaggagtaaaggtgctgcaatgatgttagctgtggccactgtggatttttcgcaagaacattaataaactaaaaacttcanannanaannnanaaaaaaanaaaaaaaaaagaaaaaaaaaaaaagaaaaaaaaaaaaaaaaaaaaaaaaagagagaggggggggcgcgccccaacagaaatatatccccgcgggggggcgccccaaaatagcgcgcgaccccaccacgttttttctacgaaacaaaggggcgcccacaaagaggggagtttattatatataaaaagagagagagaagagagggggcggaggatttataaaacagaaggttttaaggaggaaaaaaaacgggcaagaggagatatctttttagaaaaagaacaacccatttttggagggggggggaggaaacaacatagggaggcgccacactctccccaccacaagaataatttataaacgccttcgcggggagaggcataatatctacaacacctgagagcgacgcggtacaacagagaggggtgaaccacccaccacacagcgcgcactatcgttcgcacgcaccaggagagaatagacaaccgtcttctcgctcggccgcgagcgcaggagtcatgtttctctcgctatcacagagcaatttttacccaccggggggccgcaaggagatgcccaacatcacatgacacccggaacggaggggggagggcacaggctgg

SEQ ID NO: 327818 - DNA, 958 bp, Homo sapiens
  misc_feature (29)..(30): n is a, c, g, or t
  misc_feature (37)..(37): n is a, c, g, or t
cgcggccgcgcgacacggtgcgagaagannacagaangaagaaagtcagggggactgcaaaggccaatgttggtgctggcaaaaaagtgagctggagattggatcaagccgaaggagtaaaggtgctgcaatgatgttagctgtggccactgtggatttttcgcaagaacattaataaactaaaaacttctgtgaaaaaaaaaacacacacacaaaaaaaaacataacatatgtgtcacgggacgtcctgcaagccccatagaaaaactttcatagtacaccaactactctcagtagaggcgacgcggggcaccagaagataaaggtgtgacacaatgggcctacactacggtggttgttaccaacacgtggatatctgtgtgcccaatacgaccatctcagaggctgcgaggactccagaaaacaaaacaaaaaacagccgccccgacagccggccaaaacccgagcggggtaccgaagaaaaaaaaaaacaccccgcacgagaggagacgacccaccgcaggcgaccaaacacacaaaagggagaacactacgagcccacagaggggaggccccaacacgagcagaccgaggcaccacaaaacacacgaaatatacatagcaatccacaacccgcttcatcaacataaccgacatcaaaaactagctaactagaatcacaaacacactcctcactaactcaccaacattacacacaacaacactcccaacaactatatcggcccctggtctagtgagcacgatgaactgcgtctgacatggcaggtgctggcgaggttctgggttgctgccggagtgggtggtggaggaggtcgatgtcgggtctccgtaggcagaagggggacgacggagttgacatggaggctgggtgacattcgatcgcgagagagaaggtagtgagatacgatgcccgcacatgctgtagggggcgaaggtg

SEQ ID NO: 327819 - DNA, 391 bp, Homo sapiens
  misc_feature (313)..(313): n is a, c, g, or t
gcggccgcctactactactactactaaattcgcggccgctcgacccaaaatgtacaagaccacaccggatgtcatctttgtatttggattcagaactcattttggtggtggcaagacaactggctttggcatgatttatgattccctggattatgcaaagaaaaatgaacccaaacatagacttgcaagacatggcctgtatgagaagaaaaagacctcaagaaagcaacgaaaggaacgcaagaacagaatgaagaaagtcagggggactgcaaaggccaatgttggtgctggcaaaagtgagctggagatnggatcacagccgaaggagcaaaggagaagctaaatccctaaggacgcagccccataatgggccccagtgtggagagag

SEQ ID NO: 327820 - DNA, 203 bp, Homo sapiens
ggatttgctggtgcagtacaactaggcttaatagggacatggcctgtatgagaagaaaaagacctcaagaaagcaacgaaaggaacgcaagaacagaatgaagaaagtcagggggactgcaaaggccaatgttggtgctggcaaaagtgagctgagattgatcacagccaagagtaagtgctgcatttcgtggccattactcg

SEQ ID NO: 327821 - DNA, 711 bp, Homo sapiens
  misc_feature (599)..(599): n is a, c, g, or t
ggtacccctacacggtgaaaaaggggaggcaaaaggttatccccgggtacctgaaagatttcccagggtaagatatcgaaaggggatagattggtggcctcacgcgtgtatccccagcactttgggaggcaagaggatagcttgagctgaggagttcgagaccactcgtgccgaattcggcacgatagatcgccatcatgaacgacaccgtaactatccgcactagaaagttcatgaccaaccgactacttcagaggaaacaaatggtcattgatgtccttcaccccgggaaggcgacagtgcctaagacagaaattcgggaaaaactagccaaaatgtacaagaccacaccggatgtcatctttgtatttggattcagaactcattttggtggtggcaagacaactggctttggcatgatttatgattccctggattatgcaaagaaaaatgaacccaaacatagacttgcaagacatggcctgtatgagaagaaaaagacctcaagaaagcaacgaaaggaacgcaagaacagaatgaagaaagtcagggggactgcaaaggccaatgttggtgctggcaaaatgagctggagattngatcacagccgaaggagtaaaggtgctgcaatgatgttagctgtggccagtgcatattagtggacagcacttagtagctgtggaggaagatgcagagccagtgtggagagag

SEQ ID NO: 327822 - DNA, 270 bp, Homo sapiens
gcacctttactgcttcggcttttagaaaaatgaacccaaacatagacttgcaagacatggcctgtatgagaagaaaaagacctcaagaaagcaacgaaaggaacgcaagaacagaatgaagaaagtcagggggactgcaaaggccaatgttggtgctggcaaaaagccgaaggagtaaaggtgctgcaatgatgttagctgtggccagtgcatattagtggacagcacttagtagctgtggaggaagatgcagagccagtgtggagagag

SEQ ID NO: 327823 - DNA, 436 bp, Homo sapiens
gcacattgacgtccttcaccccgggaaggcgacagtgcctaagacagaaattcgggaaaaactagccaaaatgtacaagaccacaccggatgtcatctttgtatttggattcagaactcattttggtggtggcaagacaactggctttggcatgatttatgattccctggattatgcaaagaaaaatgaacccaaacatagacttgcaagacatggcctgtatgagaagaaaaagacctcaagaaagcaacgaaaggaacgcaagaacagaatgaagaaagtcagggggactgcaaaggccaatgttggtgctggcaaaagtgagctggagattggatcacagccgaaggagtaaaggtgctgcaatgatgttagctgtgggggctgctgaggtggaacctgatgctgcagcgcctgtgacgtctgactcaagtgt

SEQ ID NO: 327824 - DNA, 748 bp, Homo sapiens
taggctaggtaagagcccggtgttatgaagatagatcgccatcatgaacgacaccgtaactatccgcactagaaagttcatgaccaaccgactacttcagaggaaacaaatggtcattgatgtccttcaccccgggaaggcgacagtgcctaagacagaaattcgggaaaaactagccaaaatgtacaagaccacaccggatgtcatctttgtatttggattcagaactcattttggtggtggcaagacaactggctttggcatgatttatgattccctggattatgcaaagaaaaatgaacccaaacatagacttgcaagacatggcctgtatgagaagaaaaagacctcaagaaagcaacgaaaggaacgcaagaacagaatgaagaaagtcagggggactgcaaaggccaatgttggtgctggcaaaatgcacaatgtgatgcttggatgattgtgatcaagccgaaggagtaaaggtgctgcaatgatgttagctgtggccactgtggatttttcgcaagaacattaataaactaaaaacttcacacacaaccagcacaaaccaaaaccaacaaaacgaaacacagacacaaactatttccgtaggactcacagcacagagctgcgcatacactacagcggatcatcaacagcgcgctcgccttgtccgtcattatatctcctgcaccctcatgtgttgccaacagtgggaaaaccgtgcatacacacaaaagaagcgtaaaca

SEQ ID NO: 327825 - DNA, 166 bp, Homo sapiens
cggccgctactactactaaattcgcggcccgtcgactgtctgaagacctcaagaaagcaacgaaaggaacgcaagaacagaatgaagaaagtcagggggactgcaaaggccaatgttggtgctggcaaaatgagctggagattggatcacagccgaaggagtaaag

SEQ ID NO: 327826 - DNA, 282 bp, Homo sapiens
gaggtgatacccctagttttagaagtctcatagctcaagacaactggctttggcatgatttatgattccctggattatgcaaagaaaaatgaacccaaacatagacttgcaagacatggcctgtatgagaagaaaaagacctcaagaaagcaacgaaaggaacgcaagaacagaatgaagaaagtcagggggactgcaaaggccaatgttggtgctggcaaaatgagctggagattggatcacagccgaaggagtaaaggtgctgcaatgatgttagctgtg

SEQ ID NO: 327827 - DNA, 941 bp, Homo sapiens
tcagtctagagttccaggggtgtggccaaaagtctgtgaggcggggccgtaggcagcctaaatcaggcatcggcgcggtcagcctcgtggcgcgcccacgcccccacgccggctcttcccggggtccttccgtgcgcgttgatatgattggccggcgaatcgtggttctcttttcctccttggctgtctgaagatagatcgccatcatgaacgacaccgtaactatccgcactagaaagttcatgaccaaccgactacttcagaggaaacaaatggtcattgatgtccttcaccccgggaaggcgacagtgcctaagacagaaattcgggaaaaactagccaaaatgtacaagaccacaccggatgtcatctttgtatttggattcagaactcattttggtggtggcaagacaactggctttggcatgatttatgattccctggattatgcaaagaaaaatgaacccaaacatagacttgcaagacatggcctgtatgagaagaaaaagacctcaagaaagcaacgaaaggaacgcaagaacagaatgaagaaagtcagggggactgcaaaggccaatgttggtgctggcaaaagtgagctggagatgggatcaaagcgaaggagtaaaggtgctgcatgatgttagtgtggcactgtggatttttcgcagacattaataattaaaattgaaaaaaaaaaaaaaaattgttcgggcggccggcccaaaaggttctcaacacccattcggtggcgcgggccaagaggatgacttggccacgcggcccaaggaacgggccgacggcccgttccccaaaaacgccgggccggggtcgacaaccccgggtcggggtccgcttccagggccacgcgacccccgccctcgctcgcgggcacaatagaaacgagaaaaagagccaacacaaagagcacagcacagaca

SEQ ID NO: 327828 - DNA, 290 bp, Homo sapiens
  misc_feature (254)..(254): n is a, c, g, or t
ctactactactaaattagcggccggtcgaccaagacaactggctttggcatgatttatgattccctggattatgcaaagaaaaatgaacccaaacatagacttgcaagacatggcctgtatgagaagaaaaagacctcaagaaagcaacgaaaggaacgcaagaacagaatgaagaaagtcagggggactgcaaaggccaatgttggtgctggcaaaatgagctggagattggatcacagccgaaggagtaaanataactcgccctcgtcggacgggtgagttggcttat

SEQ ID NO: 327829 - DNA, 462 bp, Homo sapiens
ctatatgcttagacctgagtaaccttaagcatttatggaattctacaagcagagtacagggtcagaatgtatctggggagtctgttagctctaattaagttgctgttcttcatgcaaaagtacaagagattcaatgaagaatttcaaacagataaataataaatgataaaatatactacttttgaaagttacagtgtgaaaaagtacatataaagaacatgaatccaacaaaaaaaattgggataataattagtttccctaaagaaaaatgaacccaaacatagacttgcaagacatggcctgtatgagaagaaaaagacctcaagaaagcaacgaaaggaacgcaagaacagaatgaagaaagtcagggggactgcaaaggccaatgttggtgctggcaaaatgagctggagattggatcacagccgaaggagtaaaggtgctgcaatgatgttagctgtg

SEQ ID NO: 327830 - DNA, 400 bp, Homo sapiens
  misc_feature (2)..(2): n is a, c, g, or t
anagagagagagagagagagagagagagagagagagagagagagagagagagagagagagagagagagagagagagacacaccggatgtcatctttgtatttggattcagaactcattttggtggtggcaagacaactggctttggcatgatttatgattccctggattatgcaaagaaaaatgaacccaaacatagacttgcaagacatggcctgtatgagaagaaaaagacctcaagaaagcaacgaaaggaacgcaagaacagaatgaagaaagtcagggggactgcaaaggccaatgttggtgctggcaaaaagccgaaggagtaaaggtgctgcaatgatgttagctgtggccactgtggatttttcgcaagaacattaataaactaaaaacttc

SEQ ID NO: 327831 - DNA, 511 bp, Homo sapiens
atgcgcgacgcttccatcaatgcagctcttttcctccttggctgtctgaagatagatcgccatcatgaacgacaccgtaactatccgcactagaaagttcatgaccaaccgactacttcagaggaaacaaatggtcattgatgtccttcaccccgggaaggcgacagtgcctaagacagaaattcgggaaaaactagccaaaatgtacaagaccacaccggatgtcatctttgtatttggattcagaactcattttggtggtggcaagacaactggctttggcatgatttatgattccctggattatgcaaagaaaaatgaacccaaacatagacttgcaagacatggcctgtatgagaagaaaaagacctcaagaaagcaacgaaaggaacgcaagaacagaatgaagaaagtcagggggactgcaaaggccaatgttggtgctggcaaaatgagctggagattggatcacagccgaaggagtaaaggtgctgcaatgatgttagctgtg

SEQ ID NO: 327832 - DNA, 549 bp, Homo sapiens
ggaaagagagagaggcagagagacaaagagggagtcaaagagagaaagagagagacagagtcagagagagaagcagtaaagagaaaaacagtgtaccctgttcctttaaaagccagggtaaatttaaatttaaaacctctaattgataattgaaggtcttctctgtgaccctgtaacactccaataccaccttgttgtcactgtaaacaaggtggcatcgataaacaccccaccaccaaaatgtacaagaccacaccggatgtcatctttgtatttggattcagaactcattttggtggtggcaagacaactggctttggcatgatttatgattccctggattatgcaaagaaaaatgaacccaaacatagacttgcaagacatggcctgtatgagaagaaaaagacctcaagaaagcaacgaaaggaacgcaagaacagaatgaagaaagtcagggggactgcaaaggccaatgttggtgctggcaaaatgagctggagattggatcacagccgaaggagtaaaggtgctgcaatgatgttagctgtg

SEQ ID NO: 327833 - DNA, 1113 bp, Homo sapiens
gggtttatcggaaaatgtgtttattgagatggtttcccactcatcttgactcagagtgcttttagtgctgcttcctcctgaaggaacatccttctgtaagcctcttttcctccttggctgtctgaagatagatcgccatcatgaacgacaccgtaactatccgcactagaaagttcatgaccaaccgactacttcagaggaaacaaatggtcattgatgtccttcaccccgggaaggcgacagtgcctaagacagaaattcgggaaaaactagccaaaatgtacaagaccacaccggatgtcatctttgtatttggattcagaactcattttggtggtggcaagacaactggctttggcatgatttatgattccctggattatgcaaagaaaaatgaacccaaacatagacttgcaagacatggcctgtatgagaagaaaaagacctcaagaaagcaacgaaaggaacgcaagaacagaatgaagaaagtcagggggactgcaaaggccaatgttggtgctggcaaaaagccgaaggagtaaaggtgctgcaatgatgttagctgtggccactgtggatttttcgcaagaacattaataaactaaaaacttctgtgtctggttgtttgaaaaaaaaaaaaaaaaaaaaaaaattgggggcacaaatgccggggtggcgagaaaaagagcgtcacggaatggggccaaggggccactaggtggtacatggaccccagtttcttggtaccaaagggggaacatctggcgcgacacccatatagaagagtcggcactaaattccgataagccagggtaacccggaattactgcactcgcgcgccaaaaagaacacacagagccgcaagacgagacgcgcgaaagaacgcgacaaaaacgaacaaagaggggggaaaacaagaaagaaacaagaaaaagaagagaggcagagaaaaggaaaacaaacaaggacaaaaaccaaaacgacaacaaacgacggaacaacaacacaggaagacgaaaaaaagacaaaaacaacgaaaaagacaaaaagcaaaaacaaaaaagacaaagagaaaaacaaagagaaaaaaacaaagaaaagacaaacaagaaa

SEQ ID NO: 327834 - DNA, 1005 bp, Homo sapiens
ggacgcgtgggtcggacgcgtgggtcgacccacgcgtctgaagatagatcgccatcatgaacgacaccgtaactatccgcactagaaagttcatgaccaaccgactacttcagaggaaacaaatggtcattgatgtccttcaccccgggaaggcgacagtgcctaagacagaaattcgggaaaaactagccaaaatgtacaagaccacaccggatgtcatctttgtatttggattcagaactcattttggtggtggcaagacaactggctttggcatgatttatgattccctggattatgcaaagaaaaatgaacccaaacatagacttgcaagacatggcctgtatgagaagaaaaagacctcaagaaagcaacgaaaggaacgcaagaacagaatgaagaaagtcagggggactgcaaaggccaatgttggtgctggcaaaaagccgaaggagtaaaggtgctgcaatgatgttagctgtggccactgtggatttttcgcaagaacattaataaactaaaaacttctgtgcaacgccaacacacaccgacacaaacaacaaaaaaaacgcgcaaacaaccacaagaagcaaaccagaaaaaagacgaaaaaacaaagagaaaagaaaaagaaaaaaacaaaaaacaaaaaacacaaaaacagaaggcggcagcgagacaaaaaacaaacagcagcagagagagagagaaaaagacgcgagcaggcagagacgaacagagagaaacttgagaaacgaaaaaagaaagaggagagacaacaacagcagacaagaccaacacgcagcagacgaagagaaacaaaatgtggggagaaaaaaaaccaacacacaagcacgcggagcaaaacagaaaggtgagaaggcacagacgaagcgagagaaacaggaagaaaaaacagaagagaaaagaaagaaaaggcaggcagaagggaggcgaaagcccggaaaacagaaacacaaaaaggaacagaaaaacagcgcacac

SEQ ID NO: 327835 - DNA, 537 bp, Homo sapiens
ccaatacacgagcacccagattcataaagcaagtccttagggacctacaaagagacttaggctcccacacaataataatgggagactttaacaccccactgtcaacattagacagatcaacaagacagaaagttaacaaggatatccaggaactcaactcagctctgcaccaagcagacctaacaggtggcatcgataaacaccgtgtttatcgatgccaccaccaaaatgtacaagaccacaccggatgtcatctttgtatttggattcagaactcattttggtggtggcaagacaactggctttggcatgatttatgattccctggattatgcaaagaaaaatgaacccaaacatagacttgcaagacatggcctgtatgagaagaaaaagacctcaagaaagcaacgaaaggaacgcaagaacagaatgaagaaagtcagggggactgcaaaggccaatgttggtgctggcaaaatgagctggagattggatcacagccgaaggagtaaaggtgctgcaatgatgttagctgtg

SEQ ID NO: 327836 - DNA, 348 bp, Homo sapiens
gcgagcctgtaaaatatcagaaatagaaagtcatgaccaaccgactacttcagaggaaacaaatggtcattgatgtccttcaccccgggaaggcgacagtgcctaagacagaaattcgggaaaaactagccaaaatgtacaagaccacaccggatgtcatcttgagaatggacaccagttaaacagaccagcaaatacgcgtgcggaacaggacccaggcgtctcctcttgctccctggttggggggcggtggctggggctgtgcggccaatgatggatttgtttcttttatgttttaaaataggatttagtgttgtgacctgtttttaaaataaagtatcttgaaat

SEQ ID NO: 327837 - DNA, 553 bp, Homo sapiens
cactcgagctcgctaccctgctcttttcctccttggctgtctgaagatagatcgccatcatgaacgacaccgtaactatccgcactagaaagttcatgaccaaccgactacttcagaggaaacaaatggtcattgatgtccttcaccccgggaaggcgacagtgcctaagacagaaattcgggaaaaactagccaaaatgtacaagaccacaccggatgtcatctttgtatttggattcagaactcattttggtggtggcaagacaactggctttggcatgatttatgattccctggattatgcaaagaaaaatgaacccaaacatagacttgcaagacatggcctgtatgagaagaaaaagacctcaagaaagcaacgaaaggaacgcaagaacagaatgaagaaagtcagggggactgcaaaggccaatgttggtgctggcaaaaagtgagctggagattggatcacagccgaaggagtaaaggtgctgcaatgatgttagctgtggccactgtggatttttcgcaagaacattaataaactaaaaacttc

SEQ ID NO: 327838 - DNA, 558 bp, Homo sapiens
tacaccctgttccagcctaaaaatcctcttttcctccttggctgtctgaagatagatcgccatcatgaacgacaccgtaactatccgcactagaaagttcatgaccaaccgactacttcagaggaaacaaatggtcattgatgtccttcaccccgggaaggcgacagtgcctaagacagaaattcgggaaaaactagccaaaatgtacaagaccacaccggatgtcatctttgtatttggattcagaactcattttggtggtggcaagacaactggctttggcatgatttatgattccctggattatgcaaagaaaaatgaacccaaacatagacttgcaagacatggcctgtatgagaagaaaaagacctcaagaaagcaacgaaaggaacgcaagaacagaatgaagaaagtcagggggactgcaaaggccaatgttggtgctggcaaaaagtgagctggagattggatcacagccgaaggagtaaaggtgctgcaatgatgttagctgtggccactgtggatttttcgcaagaacattaataaactaaaaacttc

SEQ ID NO: 327839 - DNA, 535 bp, Homo sapiens
gctactactactactaaattagcggccgatagatcgccatcatgaacgacaccgtaactatccgcactagaaagttcatgaccaaccgactacttcagaggaaacaaatggtcattgatgtccttcaccccgggaaggcgacagtgcctaagacagaaattcgggaaaaactagccaaaatgtacaagaccacaccggatgtcatctttgtatttggattcagaactcattttggtggtggcaagacaactggctttggcatgatttatgattccctggattatgcaaagaaaaatgaacccaaacatagacttgcaagacatggcctgtatgagaagaaaaagacctcaagaaagcaacgaaaggaacgcaagaacagaatgaagaaagtcagggggactgcaaaggccaatgttggtgctggcaaaaagtgagctggagattggatcacagccgaaggagtaaaggtgctgcaatgatgttagctgtggccactgtggatttttcgcaagaacattaataaactaaaaacttc

SEQ ID NO: 327840 - DNA, 952 bp, Homo sapiens
  misc_feature (952)..(952): n is a, c, g, or t
aagcagtggatcaacgcagagtgcccattatggccggggctcttttcctccttggctgtctgaagatagatcgccatcatgaacgacaccgtaactatccgcactagaaagttcatgaccaaccgactacttcagaggaaacaaatggtcattgatgtccttcaccccgggaaggcgacagtgcctaagacagaaattcgggaaaaactagccaaaatgtacaagaccacaccggatgtcatctttgtatttggattcagaactcattttggtggtggcaagacaactggctttggcatgatttatgattccctggattatgcaaagaaaaatgaacccaaacatagacttgcaagacatggcctgtatgagaagaaaaagacctcaagaaagcaacgaaaggaacgcaagaacagaatgaagaaagtcagggggactgcaaaggccaatgttggtgctggcaaaaagtgagctggagattggatcacagccgaaggagtaaaggtgctgcaatgatgttagctgtggccactgtggatttttcgcaagaacattaataaactaaaaacttcaaaaaaaaaaaacaaacaaaaaaaaaaaaaacaaaaaaaaaaaaaaaaaaaaaaaaaaaaaaaaaaaaaaagggggggggaaaaaaacaaggggggggggaaaaagggcgagtggaaagggactactagtggattagtaaaagaagcggaggcagaacaacaccagggggcgacaaacaaagacgacagccagacgaaacccagcggggggccaacgacacgcgggaaaaggccgcaaaaatacgggcgagaacgattggtggaaaatattgtgttgaatgaagccgcatacacgacaacagaagagagacgacaggaacatagagggtgaaagagtacgcaatcgagcaaacaggacgacagcgcaaatcctcacgccn

SEQ ID NO: 327841 - DNA, 919 bp, Homo sapiens
  misc_feature (16)..(17): n is a, c, g, or t
  misc_feature (919)..(919): n is a, c, g, or t
ggatccccgggctgcnngaattcggcacgaggatagatcgccatcatgaacgacaccgtaactatccgcactagaaagttcatgaccaaccgactacttcagaggaaacaaatggtcattgatgtccttcaccccgggaaggcgacagtgcctaagacagaaattcgggaaaaactagccaaaatgtacaagaccacaccggatgtcatctttgtatttggattcagaactcattttggtggtggcaagacaactggctttggcatgatttatgattccctggattatgcaaagaaaaatgaacccaaacatagacttgcaagacatggcctgtatgagaagaaaaagacctcaagaaagcaacgaaaggaacgcaagaacagaatgaagaaagtcagggggactgcaaaggccaatgttggtgctggcaaaaagtgagctggagattggatcacagccgaaggagtaaaggtgctgcaatgatgttagctgtggccactgtggatttttcgcaagaacattaataaactaaaaacttcaaaaaaaaaaaacaaacaaaaaaaaaaaaaacaaaaaaaaaaaaaaaaaaaaaaaaaaaaaaaaaaaaaaagggggggggaaaaaaacaaggggggggggaaaaagggcgagtggaaagggactactagtggattagtaaaagaagcggaggcagaacaacaccagggggcgacaaacaaagacgacagccagacgaaacccagcggggggccaacgacacgcgggaaaaggccgcaaaaatacgggcgagaacgattggtggaaaatattgtgttgaatgaagccgcatacacgacaacagaagagagacgacaggaacatagagggtgaaagagtacgcaatcgagcaaacaggacgacagcgcaaatcctcacgccn

SEQ ID NO: 327842 - DNA, 547 bp, Homo sapiens
  misc_feature (6)..(6): n is a, c, g, or t
tggtgntctcgaggatcccctcctcagcagacgcagctcttttcctccttggctgtctgaagatagatcgccatcatgaacgacaccgtaactatccgcactagaaagttcatgaccaaccgactacttcagaggaaacaaatggtcattgatgtccttcaccccgggaaggcgacagtgcctaagacagaaattcgggaaaaactagccaaaatgtacaagaccacaccggatgtcatctttgtatttggattcagaactcattttggtggtggcaagacaactggctttggcatgatttatgattccctggattatgcaaagaaaaatgaacccaaacatagacttgcaagacatggcctgtatgagaagaaaaagacctcaagaaagcaacgaaaggaacgcaagaacagaatgaagaaagtcagggggactgcaaaggccaatgttggtgctggcaaaaagccgaaggagtaaaggtgctgcaatgatgttagctgtggccactgtggatttttcgcaagaacattaataaactaaaaacttc

SEQ ID NO: 327843 - DNA, 538 bp, Homo sapiens
tccgctgcggcacacttaacgtcattgctcttttcctccttggctgtctgaagatagatcgccatcatgaacgacaccgtaactatccgcactagaaagttcatgaccaaccgactacttcagaggaaacaaatggtcattgatgtccttcaccccgggaaggcgacagtgcctaagacagaaattcgggaaaaactagccaaaatgtacaagaccacaccggatgtcatctttgtatttggattcagaactcattttggtggtggcaagacaactggctttggcatgatttatgattccctggattatgcaaagaaaaatgaacccaaacatagacttgcaagacatggcctgtatgagaagaaaaagacctcaagaaagcaacgaaaggaacgcaagaacagaatgaagaaagtcagggggactgcaaaggccaatgttggtgctggcaaaaagccgaaggagtaaaggtgctgcaatgatgttagctgtggccactgtggatttttcgcaagaacattaataaactaaaaacttc

SEQ ID NO: 327844 - DNA, 694 bp, Homo sapiens
aagcagtggatcaacgcagagtgcccattatggccggggctcttttcctccttggctgtctgaagatagatcgccatcatgaacgacaccgtaactatccgcactagaaagttcatgaccaaccgactacttcagaggaaacaaatggtcattgatgtccttcaccccgggaaggcgacagtgcctaagacagaaattcgggaaaaactagccaaaatgtacaagaccacaccggatgtcatctttgtatttggattcagaactcattttggtggtggcaagacaactggctttggcatgatttatgattccctggattatgcaaagaaaaatgaacccaaacatagacttgcaagacatggcctgtatgagaagaaaaagacctcaagaaagcaacgaaaggaacgcaagaacagaatgaagaaagtcagggggactgcaaaggccaatgttggtgctggcaaaaagtgagctggagattggatcacagccgaaggagtaaaggtgctgcaatgatgttagctgtggccactgtggatttttcgcaagaacattaataaactaaaaacttcatgtgtctggttgtttgaaaaaaaaaaccacccacaaaacaaaaaaacttggggggggcccggacccacatggcctatacgagccgattacaatcactgccggcgtttaaacgtcggactgg

SEQ ID NO: 327845 - DNA, 739 bp, Homo sapiens
  misc_feature (703)..(703): n is a, c, g, or t
aagcagtggatcaacgcagagtgcccattatggccggggctcttttcctccttggctgtctgaagatagatcgccatcatgaacgacaccgtaactatccgcactagaaagttcatgaccaaccgactacttcagaggaaacaaatggtcattgatgtccttcaccccgggaaggcgacagtgcctaagacagaaattcgggaaaaactagccaaaatgtacaagaccacaccggatgtcatctttgtatttggattcagaactcattttggtggtggcaagacaactggctttggcatgatttatgattccctggattatgcaaagaaaaatgaacccaaacatagacttgcaagacatggcctgtatgagaagaaaaagacctcaagaaagcaacgaaaggaacgcaagaacagaatgaagaaagtcagggggactgcaaaggccaatgttggtgctggcaaaaagtgagctggagattggatcacagccgaaggagtaaaggtgctgcaatgatgttagctgtggccactgtggatttttcgcaagaacattaataaactaaaaacttccatggcctgtatgagagaaaagacctcagaaagcacgaaggacgcagaacagatgagaagtcaggggactgcaaggccaatgttggtctgcaaagtgagctggagattggatcacagccgaaggagtaaanataactcgccctcgtcggacgggtgagttggcttat

SEQ ID NO: 327846 - DNA, 923 bp, Homo sapiens
  misc_feature (917)..(917): n is a, c, g, or t
aagcagtggatcaacgcagagtgcccattatggccggggctcttttcctccttggctgtctgaagatagatcgccatcatgaacgacaccgtaactatccgcactagaaagttcatgaccaaccgactacttcagaggaaacaaatggtcattgatgtccttcaccccgggaaggcgacagtgcctaagacagaaattcgggaaaaactagccaaaatgtacaagaccacaccggatgtcatctttgtatttggattcagaactcattttggtggtggcaagacaactggctttggcatgatttatgattccctggattatgcaaagaaaaatgaacccaaacatagacttgcaagacatggcctgtatgagaagaaaaagacctcaagaaagcaacgaaaggaacgcaagaacagaatgaagaaagtcagggggactgcaaaggccaatgttggtgctggcaaaaagtgagctggagattggatcacagccgaaggagtaaaggtgctgcaatgatgttagctgtggccactgtggatttttcgcaagaacattaataaactaaaaacttcaaaacaccttttgcggcccgccctcgcggcccctccgaaaaagctcttttctaacacccttccgttgggcgacggtgggccccgagttgaggttagagtgtgacaccatgtggctcaatagcgtgtgttcccttgagggaaactcgcgtggctccagtgaacataggtgcgtgggaatttctctccaccaattttaaaaaaaacgcgccgggggggacaacccgagaggctgttttgagaacaaattcccaaaatgggaggttactcggagggtccataaacgggggatctctttccaaacgggaggtgtcccaagggagacttccgatttcaatttacccccgnccttgg

SEQ ID NO: 327847 - DNA, 616 bp, Homo sapiens
  misc_feature (6)..(6): n is a, c, g, or t
tggtgntctcgaggatcccctcctcagcagacgcagctcttttcctccttggctgtctgaagatagatcgccatcatgaacgacaccgtaactatccgcactagaaagttcatgaccaaccgactacttcagaggaaacaaatggtcattgatgtccttcaccccgggaaggcgacagtgcctaagacagaaattcgggaaaaactagccaaaatgtacaagaccacaccggatgtcatctttgtatttggattcagaactcattttggtggtggcaagacaactggctttggcatgatttatgattccctggattatgcaaagaaaaatgaacccaaacatagacttgcaagacatggcctgtatgagaagaaaaagacctcaagaaagcaacgaaaggaacgcaagaacagaatgaagaaagtcagggggactgcaaaggccaatgttggtgctggcaaaaagccgaaggagtaaaggtgctgcaatgatgttagctgtggccactgtggatttttcgcaagaacattaataaactaaaaacttcaaaaaaaaaaaaaaaaaaaaacaaaacaaaaaaaaaaagggggggggggcaaaaaaaacccccgggggg

SEQ ID NO: 327848 - DNA, 772 bp, Homo sapiens
  misc_feature (6)..(6): n is a, c, g, or t
  misc_feature (611)..(611): n is a, c, g, or t
  misc_feature (614)..(614): n is a, c, g, or t
  misc_feature (618)..(619): n is a, c, g, or t
  misc_feature (621)..(621): n is a, c, g, or t
  misc_feature (629)..(629): n is a, c, g, or t
  misc_feature (647)..(647): n is a, c, g, or t
  misc_feature (676)..(676): n is a, c, g, or t
  misc_feature (678)..(678): n is a, c, g, or t
  misc_feature (680)..(681): n is a, c, g, or t
  misc_feature (686)..(686): n is a, c, g, or t
  misc_feature (688)..(688): n is a, c, g, or t
  misc_feature (690)..(690): n is a, c, g, or t
  misc_feature (703)..(703): n is a, c, g, or t
  misc_feature (707)..(707): n is a, c, g, or t
  misc_feature (709)..(709): n is a, c, g, or t
  misc_feature (718)..(718): n is a, c, g, or t
  misc_feature (722)..(722): n is a, c, g, or t
  misc_feature (735)..(735): n is a, c, g, or t
tggtgntctcgaggatcccctcctcagcagacgcagctcttttcctccttggctgtctgaagatagatcgccatcatgaacgacaccgtaactatccgcactagaaagttcatgaccaaccgactacttcagaggaaacaaatggtcattgatgtccttcaccccgggaaggcgacagtgcctaagacagaaattcgggaaaaactagccaaaatgtacaagaccacaccggatgtcatctttgtatttggattcagaactcattttggtggtggcaagacaactggctttggcatgatttatgattccctggattatgcaaagaaaaatgaacccaaacatagacttgcaagacatggcctgtatgagaagaaaaagacctcaagaaagcaacgaaaggaacgcaagaacagaatgaagaaagtcagggggactgcaaaggccaatgttggtgctggcaaaaagccgaaggagtaaaggtgctgcaatgatgttagctgtggccactgtggatttttcgcaagaacattaataaactaaaaacttccaaaaaaaaaaaaaaaaaaaaaaacaaaactttgtgggcgcgctcgggccccgaaaaagttttnaanaccnntncgttgggnccgggcccatggtagganccggcccaacgggcccaaggaacccggcngnanngggcngntncccccaataaaangccngnggaccggcngtcngacaacccagggnccggggcctcggccatcccagggcccagggccgatta

SEQ ID NO: 327849 - DNA, 679 bp, Homo sapiens
actctttgaggaccccatcgctaagaaaccctctaatcattcgctttaccggataaaactgttttttgcgctcttttcctccttggctgtctgaagatagatcgccatcatggtgagtctccctgggcccgtgcagtcatctgccgcgtatccgagccatccgtggtccctgggtcccagtacttgagctatagatagatcgccatcatgaacgacaccgtaactatccgcactagaaagttcatgaccaaccgactacttcagaggaaacaaatggtcattgatgtccttcaccccgggaaggcgacagtgcctaagacagaaattcgggaaaaactagccaaaatgtacaagaccacaccggatgtcatctttgtatttggattcagaactcattttggtggtggcaagacaactggctttggcatgatttatgattccctggattatgcaaagaaaaatgaacccaaacatagacttgcaagacatggcctgtatgagaagaaaaagacctcaagaaagcaacgaaaggaacgcaagaacagaatgaagaaagtcagggggactgcaaaggccaatgttggtgctggcaaaaagccgaaggagtaaaggtgctgcaatgatgttagctgtggccactgtggatttttcgcaagaacattaataaactaaaaacttc

SEQ ID NO: 327850 - DNA, 655 bp, Homo sapiens
  misc_feature (6)..(6): n is a, c, g, or t
tggtgntctcgaggatcccctcctcagcagacgcagctcttttcctccttggctgtctgaagatagatcgccatcatgaacgacaccgtaactatccgcactagaaagttcatgaccaaccgactacttcagaggaaacaaatggtcattgatgtccttcaccccgggaaggcgacagtgcctaagacagaaattcgggaaaaactagccaaaatgtacaagaccacaccggatgtcatctttgtatttggattcagaactcattttggtggtggcaagacaactggctttggcatgatttatgattccctggattatgcaaagaaaaatgaacccaaacatagacttgcaagacatggcctgtatgagaagaaaaagacctcaagaaagcaacgaaaggaacgcaagaacagaatgaagaaagtcagggggactgcaaaggccaatgttggtgctggcaaaaagccgaaggagtaaaggtgctgcaatgatgttagctgtggccactgtggatttttcgcaagaacattaataaactaaaaacttcaaaaaaaaaaaaaaaaaaaaaaaaaaaaaaaaaaaaaaaaaaaaaaaaaaaaaaaaaaaacaaaacaaaaaaaaaaagggggggggggcaaaaaaaacccccgggggg

SEQ ID NO: 327851 - DNA, 1048 bp, Homo sapiens
  misc_feature (6)..(6): n is a, c, g, or t
tggtgntctcgaggatcccctcctcagcagacgcagctcttttcctccttggctgtctgaagatagatcgccatcatgaacgacaccgtaactatccgcactagaaagttcatgaccaaccgactacttcagaggaaacaaatggtcattgatgtccttcaccccgggaaggcgacagtgcctaagacagaaattcgggaaaaactagccaaaatgtacaagaccacaccggatgtcatctttgtatttggattcagaactcattttggtggtggcaagacaactggctttggcatgatttatgattccctggattatgcaaagaaaaatgaacccaaacatagacttgcaagacatggcctgtatgagaagaaaaagacctcaagaaagcaacgaaaggaacgcaagaacagaatgaagaaagtcagggggactgcaaaggccaatgttggtgctggcaaaaagccgaaggagtaaaggtgctgcaatgatgttagctgtggccactgtggatttttcgcaagaacattaataaactaaaaacttctgtgtctggttgtttgaaaaaaaaaaaaaaaaaaaaaaaattgggggcacaaatgccggggtggcgagaaaaagagcgtcacggaatggggccaaggggccactaggtggtacatggaccccagtttcttggtaccaaagggggaacatctggcgcgacacccatatagaagagtcggcactaaattccgataagccagggtaacccggaattactgcactcgcgcgccaaaaagaacacacagagccgcaagacgagacgcgcgaaagaacgcgacaaaaacgaacaaagaggggggaaaacaagaaagaaacaagaaaaagaagagaggcagagaaaaggaaaacaaacaaggacaaaaaccaaaacgacaacaaacgacggaacaacaacacaggaagacgaaaaaaagacaaaaacaacgaaaaagacaaaaagcaaaaacaaaaaagacaaagagaaaaacaaagagaaaaaaacaaagaaaagacaaacaagaaa

SEQ ID NO: 327852 - DNA, 583 bp, Homo sapiens
  misc_feature (6)..(6): n is a, c, g, or t
  misc_feature (554)..(554): n is a, c, g, or t
tggtgntctcgaggatcccctcctcagcagacgcagctcttttcctccttggctgtctgaagatagatcgccatcatgaacgacaccgtaactatccgcactagaaagttcatgaccaaccgactacttcagaggaaacaaatggtcattgatgtccttcaccccgggaaggcgacagtgcctaagacagaaattcgggaaaaactagccaaaatgtacaagaccacaccggatgtcatctttgtatttggattcagaactcattttggtggtggcaagacaactggctttggcatgatttatgattccctggattatgcaaagaaaaatgaacccaaacatagacttgcaagacatggcctgtatgagaagaaaaagacctcaagaaagcaacgaaaggaacgcaagaacagaatgaagaaagtcagggggactgcaaaggccaatgttggtgctggcaaaaagccgaaggagtaaaggtgctgcaatgatgttagctgtggccactgtggatttttcgcaagaacattaataaactaaaaacttcataaaanaaaaaaacattggacaataaaaaccttgt

SEQ ID NO: 327853 - DNA, 737 bp, Homo sapiens
  misc_feature (6)..(6): n is a, c, g, or t
tggtgntctcgaggatcccctcctcagcagacgcagctcttttcctccttggctgtctgaagatagatcgccatcatgaacgacaccgtaactatccgcactagaaagttcatgaccaaccgactacttcagaggaaacaaatggtcattgatgtccttcaccccgggaaggcgacagtgcctaagacagaaattcgggaaaaactagccaaaatgtacaagaccacaccggatgtcatctttgtatttggattcagaactcattttggtggtggcaagacaactggctttggcatgatttatgattccctggattatgcaaagaaaaatgaacccaaacatagacttgcaagacatggcctgtatgagaagaaaaagacctcaagaaagcaacgaaaggaacgcaagaacagaatgaagaaagtcagggggactgcaaaggccaatgttggtgctggcaaaaagccgaaggagtaaaggtgctgcaatgatgttagctgtggccactgtggatttttcgcaagaacattaataaactaaaaacttcagacccagggcgctggggctgcagcgcgcaaggtcgaccacggaagctgcgcaaggaaaagccccgggatgcggcccgaaaccggcgcacgccaggaaccgggtgctgtaccagtggatcaaagctgccgtcagccggggtagccgcaccgtgaagccctatagggcctacatagacggatgacgcttgg

SEQ ID NO: 327854 - DNA, 982 bp, Homo sapiens
  misc_feature (6)..(6): n is a, c, g, or t
tggtgntctcgaggatcccctcctcagcagacgcagctcttttcctccttggctgtctgaagatagatcgccatcatgaacgacaccgtaactatccgcactagaaagttcatgaccaaccgactacttcagaggaaacaaatggtcattgatgtccttcaccccgggaaggcgacagtgcctaagacagaaattcgggaaaaactagccaaaatgtacaagaccacaccggatgtcatctttgtatttggattcagaactcattttggtggtggcaagacaactggctttggcatgatttatgattccctggattatgcaaagaaaaatgaacccaaacatagacttgcaagacatggcctgtatgagaagaaaaagacctcaagaaagcaacgaaaggaacgcaagaacagaatgaagaaagtcagggggactgcaaaggccaatgttggtgctggcaaaaagccgaaggagtaaaggtgctgcaatgatgttagctgtggccactgtggatttttcgcaagaacattaataaactaaaaacttcaaaaaaaccgggggatctatggggggggggggaaaaaggggtttgaaggggccggggacaagggtccggaaccacatttttccgggcccaaggggggaaaaatccgggcagggttcacccataaaaggggaggccatataaaaagggcaaagaagccgttaagcctcggataagacgcggcacaaaacgagcaatcgcgacaaaacgcacagcaggcgatactagaacaggggtacccaacagttgaaacacacaaggaggtgacgaacaacatcacgcactagcatccagcctgccacatcgccacaacaagaactaaacaaccgacacacatcgacaacacagtcacagccagcaacgagaagatcagccacctacaacgactcacgcaaagccataaaaacagaacacaaagcagaacacagcaacacgcac

SEQ ID NO: 327855 - DNA, 640 bp, Homo sapiens
  misc_feature (6)..(6): n is a, c, g, or t
  misc_feature (552)..(552): n is a, c, g, or t
  misc_feature (561)..(561): n is a, c, g, or t
tggtgntctcgaggatcccctcctcagcagacgcagctcttttcctccttggctgtctgaagatagatcgccatcatgaacgacaccgtaactatccgcactagaaagttcatgaccaaccgactacttcagaggaaacaaatggtcattgatgtccttcaccccgggaaggcgacagtgcctaagacagaaattcgggaaaaactagccaaaatgtacaagaccacaccggatgtcatctttgtatttggattcagaactcattttggtggtggcaagacaactggctttggcatgatttatgattccctggattatgcaaagaaaaatgaacccaaacatagacttgcaagacatggcctgtatgagaagaaaaagacctcaagaaagcaacgaaaggaacgcaagaacagaatgaagaaagtcagggggactgcaaaggccaatgttggtgctggcaaaaagccgaaggagtaaaggtgctgcaatgatgttagctgtggccactgtggatttttcgcaagaacattaataaactaaaaacttcaaaanaaaaaaaanggaacgatatgcatgcggccgcatttcggctcatttgccaattcgccttatgtgaggcgtataccattcactggccggg

SEQ ID NO: 327856 - DNA, 712 bp, Homo sapiens
  misc_feature (6)..(6): n is a, c, g, or t
  misc_feature (562)..(562): n is a, c, g, or t
  misc_feature (567)..(567): n is a, c, g, or t
tggtgntctcgaggatcccctcctcagcagacgcagctcttttcctccttggctgtctgaagatagatcgccatcatgaacgacaccgtaactatccgcactagaaagttcatgaccaaccgactacttcagaggaaacaaatggtcattgatgtccttcaccccgggaaggcgacagtgcctaagacagaaattcgggaaaaactagccaaaatgtacaagaccacaccggatgtcatctttgtatttggattcagaactcattttggtggtggcaagacaactggctttggcatgatttatgattccctggattatgcaaagaaaaatgaacccaaacatagacttgcaagacatggcctgtatgagaagaaaaagacctcaagaaagcaacgaaaggaacgcaagaacagaatgaagaaagtcagggggactgcaaaggccaatgttggtgctggcaaaaagccgaaggagtaaaggtgctgcaatgatgttagctgtggccactgtggatttttcgcaagaacattaataaactaaaaacttctgtgtctggttgttnaaaanaacaaaacacaccaaaaaaaacaacaaaaaaaaaaaaaagggggggccgccaaaaaaaaacacaccaagggggccaaaagaaaaaccaaggaaaagggggaccaaaagagaaaaagggggggggggcggaaccgggggggggaaa

SEQ ID NO: 327857 - DNA, 1024 bp, Homo sapiens
  misc_feature (6)..(6): n is a, c, g, or t
tggtgntctcgaggatcccctcctcagcagacgcagctcttttcctccttggctgtctgaagatagatcgccatcatgaacgacaccgtaactatccgcactagaaagttcatgaccaaccgactacttcagaggaaacaaatggtcattgatgtccttcaccccgggaaggcgacagtgcctaagacagaaattcgggaaaaactagccaaaatgtacaagaccacaccggatgtcatctttgtatttggattcagaactcattttggtggtggcaagacaactggctttggcatgatttatgattccctggattatgcaaagaaaaatgaacccaaacatagacttgcaagacatggcctgtatgagaagaaaaagacctcaagaaagcaacgaaaggaacgcaagaacagaatgaagaaagtcagggggactgcaaaggccaatgttggtgctggcaaaaagccgaaggagtaaaggtgctgcaatgatgttagctgtggccactgtggatttttcgcaagaacattaataaactaaaaacttctgtgcaacgccaacacacaccgacacaaacaacaaaaaaaacgcgcaaacaaccacaagaagcaaaccagaaaaaagacgaaaaaacaaagagaaaagaaaaagaaaaaaacaaaaaacaaaaaacacaaaaacagaaggcggcagcgagacaaaaaacaaacagcagcagagagagagagaaaaagacgcgagcaggcagagacgaacagagagaaacttgagaaacgaaaaaagaaagaggagagacaacaacagcagacaagaccaacacgcagcagacgaagagaaacaaaatgtggggagaaaaaaaaccaacacacaagcacgcggagcaaaacagaaaggtgagaaggcacagacgaagcgagagaaacaggaagaaaaaacagaagagaaaagaaagaaaaggcaggcagaagggaggcgaaagcccggaaaacagaaacacaaaaaggaacagaaaaacagcgcacac

SEQ ID NO: 327858 - DNA, 1167 bp, Homo sapiens
  misc_feature (6)..(6): n is a, c, g, or t
tggtgntctcgaggatcccctcctcagcagacgcagctcttttcctccttggctgtctgaagatagatcgccatcatgaacgacaccgtaactatccgcactagaaagttcatgaccaaccgactacttcagaggaaacaaatggtcattgatgtccttcaccccgggaaggcgacagtgcctaagacagaaattcgggaaaaactagccaaaatgtacaagaccacaccggatgtcatctttgtatttggattcagaactcattttggtggtggcaagacaactggctttggcatgatttatgattccctggattatgcaaagaaaaatgaacccaaacatagacttgcaagacatggcctgtatgagaagaaaaagacctcaagaaagcaacgaaaggaacgcaagaacagaatgaagaaagtcagggggactgcaaaggccaatgttggtgctggcaaaaagccgaaggagtaaaggtgctgcaatgatgttagctgtggccactgtggatttttcgcaagaacattaataaactaaaaacttcccccgagtttttttttttttttttaatttaaatccccccaaaaggggtttttttccccgggagagttttgtagtccaccagaggggggtatttcgggaagaggattctggaggtatgcgcgccgggcgggccacgggggccctccacaactttttgggggccttcgcaggcagccaagggtgtccatcatataccagccaggggggcccgggctaacagacgggggtagcagaggagcgtcgtttgagactcctcccttccgttgggagaagcccctcgtacccaaatattttctcttgggtaatattatgccccccccgggggtttgggcaaaagaggcccaggcggagaagataacaaaatgctgggggccgaggtgacaccaacaccgctttttaacggagaacccggggggtggcttctacacccaaaagaatatcgttctcgtgccaaaagcataaaatggcctcccaccgagtctgtactggtaagaggggggcgcggatccaaaaacattctcccgagaggagccgacgcttcacccctgtatgacgaaccattggccgcggcttgtgctaggcggcccaaaggtggcgagagtattcttggggtccgaaagc

SEQ ID NO: 327859 - DNA, 1189 bp, Homo sapiens
  misc_feature (6)..(6): n is a, c, g, or t
tggtgntctcgaggatcccctcctcagcagacgcagctcttttcctccttggctgtctgaagatagatcgccatcatgaacgacaccgtaactatccgcactagaaagttcatgaccaaccgactacttcagaggaaacaaatggtcattgatgtccttcaccccgggaaggcgacagtgcctaagacagaaattcgggaaaaactagccaaaatgtacaagaccacaccggatgtcatctttgtatttggattcagaactcattttggtggtggcaagacaactggctttggcatgatttatgattccctggattatgcaaagaaaaatgaacccaaacatagacttgcaagacatggcctgtatgagaagaaaaagacctcaagaaagcaacgaaaggaacgcaagaacagaatgaagaaagtcagggggactgcaaaggccaatgttggtgctggcaaaaagccgaaggagtaaaggtgctgcaatgatgttagctgtggccactgtggatttttcgcaagaacattaataaactaaaaacttcaaaaaaaaattttgggggggcggggcaagaaagaaattttttaaacccctccgggtggggcgcgcgcgggcgacccagggtggtgtaacagtgcagaactgcgtggcccaaaggggcgcggtcccaaaggagaacccgtgggcgcagacacaacagcgcggctgcgaggagctgggttcttcccccccccaatatataaaaaaaaacagcgggccgccgggggggaggagagacaaccaaccacagagtaggagagcagacgagcagatcgaagcatatattaatagctacagcactagcgacagtagacagagcacacagacacgagcaacaccaaacaacaaaaacaataaaaaaacaaacaatctataacaaccctagaaaaagagaatataaaaagaaaagacaaacaattagaaaaaaagaaacgatagtaaggaaaaaacaaataaggtagtagatagaggagtaataagataagataagaagataaagagaagagaagaggatggaagttatagaatatatttataagagtagaaagtaaaaaaaattaggtattaaagaagtatagaagaaagagagaagaataaaaggaaaaaagaagagagagagaagtataagaaacagataataaaataa

SEQ ID NO: 327860 - DNA, 673 bp, Homo sapiens
  misc_feature (6)..(6): n is a, c, g, or t
tggtgntctcgaggatcccctcctcagcagacgcagctcttttcctccttggctgtctgaagatagatcgccatcatgaacgacaccgtaactatccgcactagaaagttcatgaccaaccgactacttcagaggaaacaaatggtcattgatgtccttcaccccgggaaggcgacagtgcctaagacagaaattcgggaaaaactagccaaaatgtacaagaccacaccggatgtcatctttgtatttggattcagaactcattttggtggtggcaagacaactggctttggcatgatttatgattccctggattatgcaaagaaaaatgaacccaaacatagacttgcaagacatggcctgtatgagaagaaaaagacctcaagaaagcaacgaaaggaacgcaagaacagaatgaagaaagtcagggggactgcaaaggccaatgttggtgctggcaaaaagccgaaggagtaaaggtgctgcaatgatgttagctgtggccactgtggatttttcgcaagaacattaataaactaaaaacttcctcgagggggggccccgtaacccatttccccctataaggaggtcgttttacaatttcactggcccgtcggttttacaacgtcctggaactgggaaaaaaccctggccgtacccccaactttaattc

SEQ ID NO: 327861 - DNA, 630 bp, Homo sapiens
  misc_feature (6)..(6): n is a, c, g, or t
  misc_feature (546)..(546): n is a, c, g, or t
tggtgntctcgaggatcccctcctcagcagacgcagctcttttcctccttggctgtctgaagatagatcgccatcatgaacgacaccgtaactatccgcactagaaagttcatgaccaaccgactacttcagaggaaacaaatggtcattgatgtccttcaccccgggaaggcgacagtgcctaagacagaaattcgggaaaaactagccaaaatgtacaagaccacaccggatgtcatctttgtatttggattcagaactcattttggtggtggcaagacaactggctttggcatgatttatgattccctggattatgcaaagaaaaatgaacccaaacatagacttgcaagacatggcctgtatgagaagaaaaagacctcaagaaagcaacgaaaggaacgcaagaacagaatgaagaaagtcagggggactgcaaaggccaatgttggtgctggcaaaaagccgaaggagtaaaggtgctgcaatgatgttagctgtggccactgtggatttttcgcaagaacctcgtgccgaattcggcanagacccgtcaccaccttggtggaggaacaagaaaagcttcagcttggtggtgattgcacacggacgtggttccccattcgagct

SEQ ID NO: 327862 - DNA, 960 bp, Homo sapiens
aagcagtggatcaacgcagagtgcccattatggccggggctcttttcctccttggctgtctgaagatagatcgccatcatgaacgacaccgtaactatccgcactagaaagttcatgaccaaccgactacttcagaggaaacaaatggtcattgatgtccttcaccccgggaaggcgacagtgcctaagacagaaattcgggaaaaactagccaaaatgtacaagaccacaccggatgtcatctttgtatttggattcagaactcattttggtggtggcaagacaactggctttggcatgatttatgattccctggattatgcaaagaaaaatgaacccaaacatagacttgcaagacatggcctgtatgagaagaaaaagacctcaagaaagcaacgaaaggaacgcaagaacagaatgaagaaagtcagggggactgcaaaggccaatgttggtgctggcaaaaagtgagctggagattggatcacaggtataattcaagcttttcatgtagtcatgtagatcactagactccttggtgtactgacgtagcaatttaaaagcagatcatgtgtagtacatctagaagtagatttacaaatattctgaagagttgtaaccttttaaaatactaacagtgacatggttttgtttttaaggtttagcaatatttagcccattatttttgttttattcttaacttgaatgtttgtaaattttatttcttgatgctttcattgtgttatgataacatcaaaataacttgatattctaggttactaataattgttgtgcatgagtgttactacttttggaattgaagactttaaagaattttaaaggcagttgttgactaaacttctttctcttgattcaagccgaaggagtaaaggtgctgcaatgatgttagctgtggccactgtggatttttcgcaagaacattaataaactaaaaacttc

SEQ ID NO: 327863 - DNA, 938 bp, Homo sapiens
aagcagtggatcaacgcagagtgcccattatggccggggctcttttcctccttggctgtctgaagatagatcgccatcatgaacgacaccgtaactatccgcactagaaagttcatgaccaaccgactacttcagaggaaacaaatggtcattgatgtccttcaccccgggaaggcgacagtgcctaagacagaaattcgggaaaaactagccaaaatgtacaagaccacaccggatgtcatctttgtatttggattcagaactcattttggtggtggcaagacaactggctttggcatgatttatgattccctggattatgcaaagaaaaatgaacccaaacatagacttgcaagacatggcctgtatgagaagaaaaagacctcaagaaagcaacgaaaggaacgcaagaacagaatgaagaaagtcagggggactgcaaaggccaatgttggtgctggcaaaagtatagttcattaaggaaaatatagaaacgtcattaattgtaggtctttagtttctaggaaagaagggatcttattaatttttaaaataacttttcttaatgtttcttcttttccctcttcttctggattacagaaggtaacatgttttaagaaactatgtagcatagtgtcttaacacctcagtaaagtagcttggcccaccccttgtcagctcacagcacaatctggaggccacattggttcattgatcccagctggtgggcacctttcaagcctatcacaagaagttttaattttactaattggcatagaaccttcaatgcagagcggatcccattccctgtgattttacttattaatatggacactggtttaagaagcagttggatcaatgtggcccgtgttttcctggcacactggaaaggcaactgagatctcaggattgctttcctctccagttggccaagacaa

SEQ ID NO: 327864 - DNA, 1161 bp, Homo sapiens
aagcagtggatcaacgcagagtgcccattatggccggggctcttttcctccttggctgtctgaagatagatcgccatcatgaacgacaccgtaactatccgcactagaaagttcatgaccaaccgactacttcagaggaaacaaatggtcattgatgtccttcaccccgggaaggcgacagtgcctaagacagaaattcgggaaaaactagccaaaatgtacaagaccacaccggatgtcatctttgtatttggattcagaactcattttggtggtggcaagacaactggctttggcatgatttatgattccctggattatgcaaagaaaaatgaacccaaacatagacttgcaagacatggcctgtatgagaagaaaaagacctcaagaaagcaacgaaaggaacgcaagaacagaatgaagaaagtcagggggactgcaaaggccaatgttggtgctggcaaaaaggcctccttggagcggggaaggagagctcttcagttcctttggcaccttcacgcagcatgcaagacgggctgctttttcttctgtttatggatgaggcacagagggtagatgacttgccccaagtccttcagctcattcatgctggggaaaggagtaagcttcaggcgtcttcccctggagttcacgccacctctgacagcaagtgagccgtttgctactcaagtgctgtttcttgcttttttaagatgagggaattggggcttggagtgcaagcattgggaagaatttcccaggaagagagatgcacagatgtgaagaactcgaaggcaagagaaagccggggggttgtgtggcaggtagaagtgccaggaccgtggagcgtgtggacatgtggcagattgcggaggggctgtggcaagtatttacaggtggccgttacctggaggaagactgaaaacagagaacagtgctgccaggcgtgccttttggagagggcactggtcagaaacggagccttcatgtcgcctgcctcacctgctcctgctggttctccccaccctgtggacggtgacttggtcctccacttgccagaagccttgtcagcaaccttgactctgtcaccccacatccaggccatcaacaagtcttttggccctttctttgaaatccaccaggaatccagctgcttctccc

SEQ ID NO: 327865 - DNA, 933 bp, Homo sapiens
aagcagtggatcaacgcagagtgcccattatggccggggctcttttcctccttggctgtctgaagatagatcgccatcatgaacgacaccgtaactatccgcactagaaagttcatgaccaaccgactacttcagaggaaacaaatggtcattgatgtccttcaccccgggaaggcgacagtgcctaagacagaaattcgggaaaaactagccaaaatgtacaagaccacaccggatgtcatctttgtatttggattcagaactcattttggtggtggcaagacaactggctttggcatgatttatgattccctggattatgcaaagaaaaatgaacccaaacatagacttgcaagacatggcctgtatgagaagaaaaagacctcaagaaagcaacgaaaggaacgcaagaacagaatgaagaaagtcagggggactgcaaaggccaatgttggtgctggcaaaaagccgaaggagtaagggaagctgccaaagaatgtcgacgtcgaaagaaagaatatgtaaaatgtctggagagccgagttgcagtgctggaagtccagaacaagaagcttatagaggaacttgaaaccttgacagacatttggttctcccaaaacagattactagaaatatttaactatgaaactgaaggcagcatggtatagttgcttatgacggaatacaatgatatagctggcaagaatggtggcttcttttcttcgtatcattcatctctctctttaatcacttaacattcctaaaaatgttccactggtacgtattaagtcgtaggctattacttcaactttttaaagcagacaacaggctacaacatgtgcggtctcttaaactgcactatttgtaggttgtccaaggccacatactggggtcccattctagtggccacccagggcctcggaacaatttgac

SEQ ID NO: 327866 - DNA, 921 bp, Homo sapiens
  misc_feature (915)..(915): n is a, c, g, or t
aagcagtggatcaacgcagagtgcccattatggccggggctcttttcctccttggctgtctgaagatagatcgccatcatgaacgacaccgtaactatccgcactagaaagttcatgaccaaccgactacttcagaggaaacaaatggtcattgatgtccttcaccccgggaaggcgacagtgcctaagacagaaattcgggaaaaactagccaaaatgtacaagaccacaccggatgtcatctttgtatttggattcagaactcattttggtggtggcaagacaactggctttggcatgatttatgattccctggattatgcaaagaaaaatgaacccaaacatagacttgcaagacatggcctgtatgagaagaaaaagacctcaagaaagcaacgaaaggaacgcaagaacagaatgaagaaagtcagggggactgcaaaggccaatgttggtgctggcaaaagtgagctggagattggatcaagccgaaggagtaaaggtgctgcaatgatgttagctgtggccactgtggatttttcgcaagaacattaataaactaaaaacttcaaaacaccttttgcggcccgccctcgcggcccctccgaaaaagctcttttctaacacccttccgttgggcgacggtgggccccgagttgaggttagagtgtgacaccatgtggctcaatagcgtgtgttcccttgagggaaactcgcgtggctccagtgaacataggtgcgtgggaatttctctccaccaattttaaaaaaaacgcgccgggggggacaacccgagaggctgttttgagaacaaattcccaaaatgggaggttactcggagggtccataaacgggggatctctttccaaacgggaggtgtcccaagggagacttccgatttcaatttacccccgnccttgg

SEQ ID NO: 327867 - DNA, 587 bp, Homo sapiens
aagcagtggatcaacgcagagtgcccattatggccggggctcttttcctccttggctgtctgaagatagatcgccatcatgaacgacaccgtaactatccgcactagaaagttcatgaccaaccgactacttcagaggaaacaaatggtcattgatgtccttcaccccgggaaggcgacagtgcctaagacagaaattcgggaaaaactagccaaaatgtacaagaccacaccggatgtcatctttgtatttggattcagaactcattttggtggtggcaagacaactggctttggcatgatttatgattccctggattatgcaaagaaaaatgaacccaaacatagacttgcaagacatggcctgtatgagaagaaaaagacctcaagaaagcaacgaaaggaacgcaagaacagaatgaagaaagtcagggggactgcaaaggccaatgttggtgctggcaaaacttgcgaaaaatccacagtggccacagctaacatcattgcagcacctttactccttcggctgtgatccaatctccagctcactttttgccagcaccaacattggtcgacgcggccgcgaat

SEQ ID NO: 327868 - DNA, 534 bp, Homo sapiens
aagcagtggatcaacgcagagtgcccattatggccggggctcttttcctccttggctgtctgaagatagatcgccatcatgaacgacaccgtaactatccgcactagaaagttcatgaccaaccgactacttcagaggaaacaaatggtcattgatgtccttcaccccgggaaggcgacagtgcctaagacagaaattcgggaaaaactagccaaaatgtacaagaccacaccggatgtcatctttgtatttggattcagaactcattttggtggtggcaagacaactggctttggcatgatttatgattccctggattatgcaaagaaaaatgaacccaaacatagacttgcaagacatggcctgtatgagaagaaaaagacctcaagaaagcaacgaaaggaacgcaagaacagaatgaagaaagtcagggggactgcaaaggccaatgttggtgctggcaaaagtgagctggagattggatcacagccgaaggagtaagtgctgtcctataaacttgcgggccagctcagt

SEQ ID NO: 327869 - DNA, 659 bp, Homo sapiens
  misc_feature (488)..(488): n is a, c, g, or t
aagcagtggatcaacgcagagtgcccattatggccggggctcttttcctccttggctgtctgaagatagatcgccatcatgaacgacaccgtaactatccgcactagaaagttcatgaccaaccgactacttcagaggaaacaaatggtcattgatgtccttcaccccgggaaggcgacagtgcctaagacagaaattcgggaaaaactagccaaaatgtacaagaccacaccggatgtcatctttgtatttggattcagaactcattttggtggtggcaagacaactggctttggcatgatttatgattccctggattatgcaaagaaaaatgaacccaaacatagacttgcaagacatggcctgtatgagaagaaaaagacctcaagaaagcaacgaaaggaacgcaagaacagaatgaagaaagtcagggggactgcaaaggccaatgttggtgctggcaaaatgagctggagattggatcacanccgaagttgtggagctggcagggaagtgtgttgttggagtcgagcctggctgcggtggtaggttgtagattcttcaacaggggctgttgcggtgctaggaggtgaaggcgtcgtgtgagttgagctgggtgggtctggaagcggtagattctccctgagcgatcctctaga

SEQ ID NO: 327870 - DNA, 583 bp, Homo sapiens
  misc_feature (522)..(522): n is a, c, g, or t
  misc_feature (533)..(533): n is a, c, g, or t
  misc_feature (558)..(558): n is a, c, g, or t
  misc_feature (568)..(568): n is a, c, g, or t
aagcagtggatcaacgcagagtgcccattatggccggggctcttttcctccttggctgtctgaagatagatcgccatcatgaacgacaccgtaactatccgcactagaaagttcatgaccaaccgactacttcagaggaaacaaatggtcattgatgtccttcaccccgggaaggcgacagtgcctaagacagaaattcgggaaaaactagccaaaatgtacaagaccacaccggatgtcatctttgtatttggattcagaactcattttggtggtggcaagacaactggctttggcatgatttatgattccctggattatgcaaagaaaaatgaacccaaacatagacttgcaagacatggcctgtatgagaagaaaaagacctcaagaaagcaacgaaaggaacgcaagaacagaatgaagaaagtcagggggactgcaaaggccaatgttggtgctggcaaaaaagtggagcttgggagggatttggttcaacaaggccggaaggtggtaaaagggttncttccaattgnttgttaggttgttggcccacttgtngggttttttnggaaggaccattaat

SEQ ID NO: 327871 - DNA, 518 bp, Homo sapiens
aagcagtggatcaacgcagagtgcccattatggccggggctcttttcctccttggctgtctgaagatagatcgccatcatgaacgacaccgtaactatccgcactagaaagttcatgaccaaccgactacttcagaggaaacaaatggtcattgatgtccttcaccccgggaaggcgacagtgcctaagacagaaattcgggaaaaactagccaaaatgtacaagaccacaccggatgtcatctttgtatttggattcagaactcattttggtggtggcaagacaactggctttggcatgatttatgattccctggattatgcaaagaaaaatgaacccaaacatagacttgcaagacatggcctgtatgagaagaaaaagacctcaagaaagcaacgaaaggaacgcaagaacagaatgaagaaagtcagggggactgcaaaggccaatgttggtgctggcaaaaagtgagcctggaaaattttgggggaaattcccaaaacccccaaaggggcccc

SEQ ID NO: 327872 - DNA, 592 bp, Homo sapiens
  misc_feature (480)..(480): n is a, c, g, or t
aagcagtggatcaacgcagagtgcccattatggccggggctcttttcctccttggctgtctgaagatagatcgccatcatgaacgacaccgtaactatccgcactagaaagttcatgaccaaccgactacttcagaggaaacaaatggtcattgatgtccttcaccccgggaaggcgacagtgcctaagacagaaattcgggaaaaactagccaaaatgtacaagaccacaccggatgtcatctttgtatttggattcagaactcattttggtggtggcaagacaactggctttggcatgatttatgattccctggattatgcaaagaaaaatgaacccaaacatagacttgcaagacatggcctgtatgagaagaaaaagacctcaagaaagcaacgaaaggaacgcaagaacagaatgaagaaagtcagggggactgcaaaggccaatgttggtgctggcaaaatgagctggagattngatcacagccgaaggagtaaaggtgctgcaatgatgttagctgtggccagtgcatattagtggacagcacttagtagctgtggaggaagatgcagagccagtgtggagagag

SEQ ID NO: 327873 - DNA, 582 bp, Homo sapiens
aagcagtggatcaacgcagagtgcccattatggccggggctcttttcctccttggctgtctgaagatagatcgccatcatgaacgacaccgtaactatccgcactagaaagttcatgaccaaccgactacttcagaggaaacaaatggtcattgatgtccttcaccccgggaaggcgacagtgcctaagacagaaattcgggaaaaactagccaaaatgtacaagaccacaccggatgtcatctttgtatttggattcagaactcattttggtggtggcaagacaactggctttggcatgatttatgattccctggattatgcaaagaaaaatgaacccaaacatagacttgcaagacatggcctgtatgagaagaaaaagacctcaagaaagcaacgaaaggaacgcaagaacagaatgaagaaagtcagggggactgcaaaggccaatgttggtgctggcaaaagtgagctggagattggatcacagccgaaggagtaaaggtgctgcaatgatgttagctgtgggggctgctgaggtggaacctgatgctgcagcgcctgtgacgtctgactcaagtgt

SEQ ID NO: 327874 - DNA, 572 bp, Homo sapiens
aagcagtggatcaacgcagagtgcccattatggccggggctcttttcctccttggctgtctgaagatagatcgccatcatgaacgacaccgtaactatccgcactagaaagttcatgaccaaccgactacttcagaggaaacaaatggtcattgatgtccttcaccccgggaaggcgacagtgcctaagacagaaattcgggaaaaactagccaaaatgtacaagaccacaccggatgtcatctttgtatttggattcagaactcattttggtggtggcaagacaactggctttggcatgatttatgattccctggattatgcaaagaaaaatgaacccaaacatagacttgcaagacatggcctgtatgagaagaaaaagacctcaagaaagcaacgaaaggaacgcaagaacagaatgaagaaagtcagggggactgcaaaggccaatgttggtgctggcaaaaaagtgagctggagattggatcaagccgaaggagtaaaggtgctgcaatgatgttagctgtggccactgtggatttttcgcaagaacattaataaactaaaaacttc

SEQ ID NO: 327875 - DNA, 525 bp, Homo sapiens
aagcagtggatcaacgcagagtgcccattatggccggggctcttttcctccttggctgtctgaagatagatcgccatcatgaacgacaccgtaactatccgcactagaaagttcatgaccaaccgactacttcagaggaaacaaatggtcattgatgtccttcaccccgggaaggcgacagtgcctaagacagaaattcgggaaaaactagccaaaatgtacaagaccacaccggatgtcatctttgtatttggattcagaactcattttggtggtggcaagacaactggctttggcatgatttatgattccctggattatgcaaagaaaaatgaacccaaacatagacttgcaagacatggcctgtatgagaagaaaaagacctcaagaaagcaacgaaaggaacgcaagaacagaatgaagaaagtcagggggactgcaaaggccaatgttggtgctggcaaaatgagctggagattggatcacagccgaaggagtaaaggtgctgcaatgatgttagctgtg

SEQ ID NO: 327876 - DNA, 572 bp, Homo sapiens
aagcagtggatcaacgcagagtgcccattatggccggggctcttttcctccttggctgtctgaagatagatcgccatcatgaacgacaccgtaactatccgcactagaaagttcatgaccaaccgactacttcagaggaaacaaatggtcattgatgtccttcaccccgggaaggcgacagtgcctaagacagaaattcgggaaaaactagccaaaatgtacaagaccacaccggatgtcatctttgtatttggattcagaactcattttggtggtggcaagacaactggctttggcatgatttatgattccctggattatgcaaagaaaaatgaacccaaacatagacttgcaagacatggcctgtatgagaagaaaaagacctcaagaaagcaacgaaaggaacgcaagaacagaatgaagaaagtcagggggactgcaaaggccaatgttggtgctggcaaaaagccgaaggagtaaaggtgctgcaatgatgttagctgtggccagtgcatattagtggacagcacttagtagctgtggaggaagatgcagagccagtgtggagagag

SEQ ID NO: 327877 - DNA, 806 bp, Homo sapiens
aagcagtggatcaacgcagagtgcccattatggccggggctcttttcctccttggctgtctgaagatagatcgccatcatgaacgacaccgtaactatccgcactagaaagttcatgaccaaccgactacttcagaggaaacaaatggtcattgatgtccttcaccccgggaaggcgacagtgcctaagacagaaattcgggaaaaactagccaaaatgtacaagaccacaccggatgtcatctttgtatttggattcagaactcattttggtggtggcaagacaactggctttggcatgatttatgattccctggattatgcaaagaaaaatgaacccaaacatagacttgcaagacatggcctgtatgagaagaaaaagacctcaagaaagcaacgaaaggaacgcaagaacagaatgaagaaagtcagggggactgcaaaggccaatgttggtgctggcaaaaagaaggtaacatgttttaagaaactatgtagcatagtgtcttaacacctcagtaaagtagcttggcccaccccttgtcagctcacagcacaatctggaggccacattggttcattgatcccagctggtgggcacctttcaagcctatcacaagaagttttaattttactaattggcatagaaccttcaatgcagagcggatcccattccctgtgattttacttattaatatggacactggtttaagaagcagttggatcaatgtggcccgtgttttcctggcacactggaaaggcaactgagatctcaggattgctttcctctccagttggccaagacaa

SEQ ID NO: 327878 - DNA, 510 bp, Homo sapiens
  misc_feature (474)..(474): n is a, c, g, or t
tacaccctgttccagcctaaaaatcctcttttcctccttggctgtctgaagatagatcgccatcatgaacgacaccgtaactatccgcactagaaagttcatgaccaaccgactacttcagaggaaacaaatggtcattgatgtccttcaccccgggaaggcgacagtgcctaagacagaaattcgggaaaaactagccaaaatgtacaagaccacaccggatgtcatctttgtatttggattcagaactcattttggtggtggcaagacaactggctttggcatgatttatgattccctggattatgcaaagaaaaatgaacccaaacatagacttgcaagacatggcctgtatgagagaaaagacctcagaaagcacgaaggacgcagaacagatgagaagtcaggggactgcaaggccaatgttggtctgcaaagtgagctggagattggatcacagccgaaggagtaaanataactcgccctcgtcggacgggtgagttggcttat

SEQ ID NO: 327879 - DNA, 1152 bp, Homo sapiens
tacaccctgttccagcctaaaaatcctcttttcctccttggctgtctgaagatagatcgccatcatgaacgacaccgtaactatccgcactagaaagttcatgaccaaccgactacttcagaggaaacaaatggtcattgatgtccttcaccccgggaaggcgacagtgcctaagacagaaattcgggaaaaactagccaaaatgtacaagaccacaccggatgtcatctttgtatttggattcagaactcattttggtggtggcaagacaactggctttggcatgatttatgattccctggattatgcaaagaaaaatgaacccaaacatagacttgcaagagtaggtgtcttttcatttgttgatcagctcctgaagacctattttttcaatagcgttgtgttgtgagtgtggtaaaaagggcaagaccaagcaatctgggatacaactctgaaaggattaagagaaaaagttatttcataaaatgcacaggtggagtacgggggttcaaaattgaagtctgacatttgagctgagttcagaagggcagctgaagtagtgttcttggagatgggctaggggtaaggattgttttccagaggagaagtaaggggatgtgtttggaaaggtagcctggcaccaaattcacttagtttggattaagtctgcatctgggcttaaacccataggtagtcaggaaccaggaaaagtttttgattgtatactgagtgtcaaacactgcagagtgaactacagcagtgatctgggcaagctccccagcttacattctagtaaacaagtaagcatcatcacctcgaagtgcttgttttgtttgttcctttaactcactttatcctatcctgttagataaaccttcccatacgatagctgtgagggaaaatcctggtgatgtcataggtagaggctgcacttttttttttagagagagagtttagctctgtcgcccaggctggagtgcagtggtacaatctccttggctcactgcaacctccgcctgccaggttcacgcaactcttctgcctgagcttcctgagtagctgggattacaggtgcgcaccatcatgcctgggtaatttttgtatttttagtagagactgggtttcaccatgttggtcagcctggtcttgaac

SEQ ID NO: 327880 - DNA, 449 bp, Homo sapiens
tacaccctgttccagcctaaaaatcctcttttcctccttggctgtctgaagatagatcgccatcatgaacgacaccgtaactatccgcactagaaagttcatgaccaaccgactacttcagaggaaacaaatggtcattgatgtccttcaccccgggaaggcgacagtgcctaagacagaaattcgggaaaaactagccaaaatgtacaagaccacaccggatgtcatctttgtatttggattcagaactcattttggtggtggcaagacaactggctttggcatgatttatgattccctggattatgcaaagaaaaatgaacccaaacatagacttgcaagacatggcctgatgggagaagactggatcttcgtcccatcagcggatttctatacattgacctcttgtttgttatcaaaacagcagtcctgattggagcagactgcgg

SEQ ID NO: 327881 - DNA, 537 bp, Homo sapiens
  misc_feature (48)..(50): n is a, c, g, or t
  misc_feature (66)..(66): n is a, c, g, or t
  misc_feature (89)..(89): n is a, c, g, or t
  misc_feature (105)..(105): n is a, c, g, or t
  misc_feature (110)..(110): n is a, c, g, or t
  misc_feature (125)..(125): n is a, c, g, or t
gaggagtcccttccggggcccgagcgcgttgaggtatcctctgagggnnngttgcgggtgacgcanaccgcaattttttccgcgctagnaaagttcatgcaccanaccgnactactctcagaagnaaacaaatggtcattgatgtccttcaccccgggaaggcgacagtgcctaagacagaaattcgggaaaaactagccaaaatgtacaagaccacaccggatgtcatctttgtatttggattcagaactcattttggtggtggcaagacaactggctttggcatgatttatgattccctggattatgcaaagaaaaatgaacccaaacatagacttgcaagacatggcctgtatgagaagaaaaagacctcaagaaagcaacgaaaggaacgcaagaacagaatgaagaaagtcagggggactgcaaaggccaatgttggtgctggcaaaaagccgaaggagtaaaggtgctgcaatgatgttagctgtggccactgtggatttttcgcaagaacattaataaactaaaaacttc

SEQ ID NO: 327882 - DNA, 420 bp, Homo sapiens
  misc_feature (36)..(36): n is a, c, g, or t
  misc_feature (48)..(48): n is a, c, g, or t
gttgctgcggtcgttctagaggatcccttcatgtcnagggccttcatnccgggaaggcgacagtgcctaagacagaaattcgggaaaaactagccaaaatgtacaagaccacaccggatgtcatctttgtatttggattcagaactcattttggtggtggcaagacaactggctttggcatgaaaggcctcgaatgaattcatgtcagccccttcatccccaagacaactgcaatacactgagaaggtccagagcagtggaagctgaagagacaactctttgtgtgtgtatgtctgttcaccggatctcgaagacacctgagtaccatgtcagtcttcatgacctgatcacctatgactcaatacagatggtgaagtcaagacgttcctactgagaagggcatgaagcactggatatgaa

SEQ ID NO: 327883 - DNA, 895 bp, Homo sapiens
cggccgctactactactaaattcgcggcccgtcgactgtctgagatagatcgccatcatgaacgacaccgtaactatccgcactagaaagttcatgaccaaccgactacttcagaggaaacaaatggtcattgatgtccttcaccccgggaaggcgacagtgcctaagacagaaattcgggaaaaactagccaaaatgtacaagaccacaccggatgtcatctttgtatttggattcagaactcattttggtggtggcaagacaactggctttggcatgatttatgattccctggattatgcaaagaaaaatgaacccaaacatagacttgcaagacatggcctgtatgagaagaaaaagacctcaagaaagcaacgaaaggaacgcaagaacagaatgaagaaagtcagggggactgcaaaggccaatgttggtgctggcaaaaagatgagggaattggggcttggagtgcaagcattgggaagaatttcccaggaagagagatgcacagatgtgaagaactcgaaggcaagagaaagccggggggttgtgtggcaggtagaagtgccaggaccgtggagcgtgtggacatgtggcagattgcggaggggctgtggcaagtatttacaggtggccgttacctggaggaagactgaaaacagagaacagtgctgccaggcgtgccttttggagagggcactggtcagaaacggagccttcatgtcgcctgcctcacctgctcctgctggttctccccaccctgtggacggtgacttggtcctccacttgccagaagccttgtcagcaaccttgactctgtcaccccacatccaggccatcaacaagtcttttggccctttctttgaaatccaccaggaatccagctgcttctccc

SEQ ID NO: 327884 - DNA, 710 bp, Homo sapiens
  misc_feature (674)..(674): n is a, c, g, or t
aagcagtggatcaacgcagagtgcccattatggccggggctcttttcctccttggctgtctgaagatagatcgccatcatgaacgacaccgtaactatccgcactagaaagttcatgaccaaccgactacttcagaggaaacaaatggtcattgatgtccttcaccccgggaaggcgacagtgcctaagacagaaattcgggaaaaactagccaaaatgtacaagaccacaccggatgtcatctttgtatttggattcagaactcattttggtggtggcaagacaactggctttggcatgatttatgattccctggattatgcaaagaaaaatgaacccaaacatagacttgcaagacatggcctgtatgagaagaaaaagacctcaagaaagcaacgaaaggaacgcaagaacagaatgaagaaagtcagggggactgcaaaggccaatgttggtgctggcaaaaagtgagctggagattggatcacagccgaaggagtaaaggtgctgcaatgatgttagctgtggccactgtggatttttcgcaagaacattaataaactaaaaacttcaaagcacgaaggacgcagaacagatgagaagtcaggggactgcaaggccaatgttggtctgcaaagtgagctggagattggatcacagccgaaggagtaaanataactcgccctcgtcggacgggtgagttggcttat

SEQ ID NO: 327885 - DNA, 625 bp, Homo sapiens
  misc_feature (596)..(596): n is a, c, g, or t
aagcagtggatcaacgcagagtgcccattatggccggggctcttttcctccttggctgtctgaagatagatcgccatcatgaacgacaccgtaactatccgcactagaaagttcatgaccaaccgactacttcagaggaaacaaatggtcattgatgtccttcaccccgggaaggcgacagtgcctaagacagaaattcgggaaaaactagccaaaatgtacaagaccacaccggatgtcatctttgtatttggattcagaactcattttggtggtggcaagacaactggctttggcatgatttatgattccctggattatgcaaagaaaaatgaacccaaacatagacttgcaagacatggcctgtatgagaagaaaaagacctcaagaaagcaacgaaaggaacgcaagaacagaatgaagaaagtcagggggactgcaaaggccaatgttggtgctggcaaaaagtgagctggagattggatcacagccgaaggagtaaaggtgctgcaatgatgttagctgtggccactgtggatttttcgcaagaacattaataaactaaaaacttcctttagtgagggttttcgagcttngcgttcatgggcatagctgtttctgtgtg

SEQ ID NO: 327886 - DNA, 760 bp, Homo sapiens
aagcagtggatcaacgcagagtgcccattatggccggggctcttttcctccttggctgtctgaagatagatcgccatcatgaacgacaccgtaactatccgcactagaaagttcatgaccaaccgactacttcagaggaaacaaatggtcattgatgtccttcaccccgggaaggcgacagtgcctaagacagaaattcgggaaaaactagccaaaatgtacaagaccacaccggatgtcatctttgtatttggattcagaactcattttggtggtggcaagacaactggctttggcatgatttatgattccctggattatgcaaagaaaaatgaacccaaacatagacttgcaagacatggcctgtatgagaagaaaaagacctcaagaaagcaacgaaaggaacgcaagaacagaatgaagaaagtcagggggactgcaaaggccaatgttggtgctggcaaaaagtgagctggagattggatcacagccgaaggagtaaaggtgctgcaatgatgttagctgtggccactgtggatttttcgcaagaacattaataaactaaaaacttcatgttgaacacaacaaacacaaaaaaaactccgggggctctctatgccggggggcggccacacgccggtctcggactggcgcccgtggccataagctggttcccttgaccaagtttctttgtccacgtgggtaatcggcgggtccctatagggagccgctattcgaagccggtacgtgatccgcccca

SEQ ID NO: 327887 - DNA, 970 bp, Homo sapiens
aagcagtggatcaacgcagagtgcccattatggccggggctcttttcctccttggctgtctgaagatagatcgccatcatgaacgacaccgtaactatccgcactagaaagttcatgaccaaccgactacttcagaggaaacaaatggtcattgatgtccttcaccccgggaaggcgacagtgcctaagacagaaattcgggaaaaactagccaaaatgtacaagaccacaccggatgtcatctttgtatttggattcagaactcattttggtggtggcaagacaactggctttggcatgatttatgattccctggattatgcaaagaaaaatgaacccaaacatagacttgcaagacatggcctgtatgagaagaaaaagacctcaagaaagcaacgaaaggaacgcaagaacagaatgaagaaagtcagggggactgcaaaggccaatgttggtgctggcaaaaagtgagctggagattggatcacagccgaaggagtaaaggtgctgcaatgatgttagctgtggccactgtggatttttcgcaagaacattaataaactaaaaacttcaaaaaaaaaaaacaaacaaaaaaaaaaaaaacaaaaaaaaaaaaaaaaaaaaaaaaaaaaaaaaaaaaaaaaaaaaagggggggggggggaaaaaacgggggggaagaatatagcagcaacacatttttgtaaaggggccccccagagagataataaaaacagggcagagcggcaaaaagcagggaagaaacaactagtcgtgatttgaagaaccaccattgcgggggtgaatggagaccaccgagaaaggcgccgacaaaacatgagagtgtaccgcttgttcgcgagttctccttttttatctgcgatcataccaaggacgcggcagaatgagcacgagacacggtagtgagacagctcaaaataaaccaaaaagagacgcaagaacaaagaccac

SEQ ID NO: 327888 - DNA, 701 bp, Homo sapiens
actctttgaggaccccatcgctaagaaaccctctaatcattcgctttaccggataaaactgttttttgcgctcttttcctccttggctgtctgaagatagatcgccatcatggtgagtctccctgggcccgtgcagtcatctgccgcgtatccgagccatccgtggtccctgggtcccagtacttgagctatagatagatcgccatcatgaacgacaccgtaactatccgcactagaaagttcatgaccaaccgactacttcagaggaaacaaatggtcattgatgtccttcaccccgggaaggcgacagtgcctaagacagaaattcgggaaaaactagccaaaatgtacaagaccacaccggatgtcatctttgtatttggattcagaactcattttggtggtggcaagacaactggctttggcatgatttatgattccctggattatgcaaagaaaaatgaacccaaacatagacttgcaagacatggcctgtatgagaagaaaaagacctcaagaaagcaacgaaaggaacgcaagaacagaatgaagaaagtcagggggactgcaaaggccaatgttggtgctggcaaaaagtgagctggagattggatcacagccgaaggagtaaaggtgctgcaatgatgttagctgtggccactgtggatttttcgcaagaacattaataaactaaaaacttc

SEQ ID NO: 327889 - DNA, 603 bp, Homo sapiens
actctttgaggaccccatcgctaagaaaccctctaatcattcgctttaccggataaaactgttttttgcgctcttttcctccttggctgtctgaagatagatcgccatcatgaacgacaccgtaactatccgcactagaaagttcatgaccaaccgactacttcagaggaaacaaatggtcattgatgtccttcaccccgggaaggcgacagtgcctaagacagaaattcgggaaaaactagccaaaatgtacaagaccacaccggatgtcatctttgtatttggattcagaactcattttggtggtggcaagacaactggctttggcatgatttatgattccctggattatgcaaagaaaaatgaacccaaacatagacttgcaagacatggcctgtatgagaagaaaaagacctcaagaaagcaacgaaaggaacgcaagaacagaatgaagaaagtcagggggactgcaaaggccaatgttggtgctggcaaaaagtgagctggagattggatcacagccgaaggagtaaaggtgctgcaatgatgttagctgtggccactgtggatttttcgcaagaacattaataaactaaaaacttc

SEQ ID NO: 327890 - DNA, 546 bp, Homo sapiens
  misc_feature (18)..(18): n is a, c, g, or t
cacccaatcggctaggtncgaggctgggtggtgctgaagatagatcgccatcatgaacgacaccgtaactatccgcactagaaagttcatgaccaaccgactacttcagaggaaacaaatggtcattgatgtccttcaccccgggaaggcgacagtgcctaagacagaaattcgggaaaaactagccaaaatgtacaagaccacaccggatgtcatctttgtatttggattcagaactcattttggtggtggcaagacaactggctttggcatgatttatgattccctggattatgcaaagaaaaatgaacccaaacatagacttgcaagacatggcctgtatgagaagaaaaagacctcaagaaagcaacgaaaggaacgcaagaacagaatgaagaaagtcagggggactgcaaaggccaatgttggtgctggcaaaaagtgagctggagattggatcacagccgaaggagtaaaggtgctgcaatgatgttagctgtggccactgtggatttttcgcaagaacattaataaactaaaaacttc

SEQ ID NO: 327891 - DNA, 334 bp, Homo sapiens
cgtgatctcgactcactgcaacctctgcctcctacgttcaaacaattctcccacctcagcctactgagtagctggaattacaggcatgcaccaccacacctggctaatttttgtatttttagtacacacggggtttcatcacgttggccagcctcatttttttttgtatttttatgtagagatggggttttgccatgtcacccaggctgttcttgaactcctacgctcaagtgatccacgtgcctcagcctcaaatgtctattaatgatcaatacagaccaatttcagggcttttttgggtataaaaagtaaggatagtagaggccgggcacgg

SEQ ID NO: 327892 - DNA, 2663 bp, Homo sapiens
gtggagctgccgcacgtgggagggcgctggccaggcagcactgtggcctctgcggctaggccggctcgagactcccgggcgccgaggcgctgccgcccgcctcgccgccccacgccgaaggaccacgcgcccgccgccgccagcctctcagcgctcccatgatcgcccggtgccttttggctgtgcgaagcctccgcagagttggtggttccaggattttactcagaatgacgttaggaagagaagtgatgtctcctcttcaggcaatgtcttcctatactgtggctggcagaaatgttttaagatgggatctttcaccagagcaaattaaaacaagaactgaggagctcattgtgcagaccaaacaggtgtacgatgctgttggaatgctcggtattgaggaagtaacttacgagaactgtctgcaggcactggcagatgtagaagtaaagtatatagtggaaaggaccatgctagactttccccagcatgtatcctctgacaaagaagtacgagcagcaagtacagaagcagacaaaagactttctcgttttgatattgagatgagcatgagaggagatatatttgagagaattgttcatttacaggaaacctgtgatctggggaagataaaacctgaggccagacgatacttggaaaagtcaattaaaatggggaaaagaaatgggctccatcttcctgaacaagtacagaatgaaatcaaatcaatgaagaaaagaatgagtgagctatgtattgattttaacaaaaacctcaatgaggatgataccttccttgtattttccaaggctgaacttggtgctcttcctgatgatttcattgacagtttagaaaagacagatgatgacaagtataaaattaccttaaaatatccacactatttccctgtcatgaagaaatgttgtatccctgaaaccagaagaaggatggaaatggcttttaatacaaggtgcaaagaggaaaacaccataattttgcagcagctactcccactgcgaaccaaggtggccaaactactcggttatagcacacatgctgacttcgtccttgaaatgaacactgcaaagagcacaagccgcgtaacagcctttctagatgatttaagccagaagttaaaacccttgggtgaagcagaacgagagtttattttgaatttgaagaaaaaggaatgcaaagacaggggttttgaatatgatgggaaaatcaatgcctgggatctatattactacatgactcagacagaggaactcaagtattccatagaccaagagttcctcaaggaatacttcccaattgaggtggtcactgaaggcttgctgaacacctaccaggagttgttgggactttcatttgaacaaatgacagatgctcatgtttggaacaagagtgttacactttatactgtgaaggataaagctacaggagaagtattgggacagttctatttggacctctatccaagggaaggaaaatacaatcatgcggcctgcttcggtctccagcctggctgccttctgcctgatggaagccggatgatggcagtggctgccctcgtggtgaacttctcacagccagtggcaggtcgtccctctctcctgagacacgacgaggtgaggacttactttcatgagtttggtcacgtgatgcatcagatttgtgcacaggtgagttttttttttcccccagtaaacctgccaattagtttttttagaaaacttcttgactgctgtcaggtttctgctcctaacaggttttttcagaagctgaatgtgttcaagaattttataggccttctgcaaaaccaaaattttccttatcctgtcctctttcacaacatatttttacttggaggttcatctaccagtgaaagatgtttgttgaataacagcctatggaaaaagaataagactatctgtaaggaaaggttacaaatactttgctttttccttttaatcctttaggaatttgatataaatttctcagaaaaactgtgctgtaatctgtctcttctgcttatcaatgctttgtttactttagtggtttttcaatcctcttagaccctttactcatttttaaataataattttgtaacatttgcctttactaacttcaaattaaaatcatagataatatagtctaaccatgcaaagaatttgccagagtggaggtgtatgtgtgcagtagattaaaactgatttttttatttctgaaaataaaaagtacatttattctcaactttgtaatacagtccatttaattaggcccagactattctagcatgaaccatatgaacttgctaacatttaaccattattaacatatgaaaatgtctagttcagcaattcaccgtaatagttgaaatatactgttatttggctgggcatggtggctcatgcctgtaatcccagcactttgggaggccaaggtggaaggatcgcttgagtctaggagtttgagaacagcctgggcaacgtggtaaaacaaacaaaaattatccaggcatggtggtatgtgcctgtggtcccagctactcgggaggctgaggtgggaggatcacttgagttcaggaggttgaggttgtagtgagccatgattgtgccactgcaccacagcctgggtgacagagcagaccttgacttaaa

SEQ ID NO: 327893 - DNA, 3123 bp, Homo sapiens
gctagaccgtccctgtggagcgccatgccagtagataggatgatgatggtcgtacactgtgcctacagaaatctctggacatagagatattgtgctttggattctcaccattagaaaacgcctggtgcaaaccgttctttgtgtgactgatcctgatgcacgtgcgtgagagtcatcactggaatctctgaactggcaggtccgagtcgagctcgattatctgaacctttggatctatctttaactctctttattgtgagtctaaattccaattctgcagcagatcagtaaactcacagtatttttcctgtggaaatctattcaataaggaaaccaagacaggataataaaatttaaaaaaaaaacaactttgaattcccctgcctaggtcttccagttgttttccagcgcatacctcaggtatgactttgctagccggggacaaaattagcaccttccgattctctagtccaaatgaactttgtgctaaataaaaaattattatactacataataaagttacagatagcaggaaatgcaagagctaggagattcctagattatatctgccaagcaaataccttaaacatccacctgaaatcctactaccccctcttctgagataatttgcccagcccttctcttcccacacactcactcaatgtcacccccttctaatccccaaaactgtttttgtggtctttgtagcctatagtagttttctcacatctttccccctagacttttctgtttttcagtttcagacaaaaaaactcttcagctttttccagtgtgtctccttaacagtaactttaccacttgaaatcttatttcatagaaaaactaaattggtgtggaaaggctgcacacaataaagttatattattatccatgaaaatgaactcatatttctttcatactttaacgttaaaaccgaaatgcatgagagcaaaagcaccatggtgttctttctatttagggcctacctctaatatttaaaatctaccaaagagcagtcacaaaattaaaactcagcccgggcgcagtggctcatgcctgtaatcccagcactttgggaggccaaggcaggaggatcacctgaggtcagagttcaagaccagcatggtcaacatggtgaaaccctgtctctacaaaaatacaaaaagctgggcatgatgttgggttcctgtagtcccagctacttaggaggctgaggcaggagaatagcttgaacccgggaggtggaggttgcagtgagctgagatcatgccattgcactccagcctggacgacagagtgagattcagtctcaaaaaaaattaatactcaaagaattatctagcataatttaaaagaaaggactttttaaaaattctctagcataattcaaaagaaaggacttaactttttttttttttagtgtggtcatccgtctagttgttctttttttccagatcagagcagagaatatcactgacatgcttgaaatggtggataactatgtaaattgtaattggacaaatgtacactttagatttatggactgagccacatataataaggtctctcctggtaattgatccaggggatttaggcctctttcgggttttttgttttttttttaggcattgttatgttgtgaaggataaaatcttcaacatcttatgcaaatggatagtaggcatgatcctaaaggtttagttttacgatgctgcagagaagagaaatgtcttgacgttttgccacctgatgtagactttgtccccctctagtataaatgttgcatgttacctagataaacaactaaaaattgccttgagttatcacctgagctacttatgccaaggtcttgcctttctaaagctaataaggtgagaggtggatatctgtagctcttcggatgaaaaattgcattgtgggagataccaaaattgaggaaatagctcttcaaagaaaaattactgatatgatcattgtacttgtaaatgccttaagtagcaggcagtgactcaattttctactttaccattttacctttagcttttatgtatgaattataggtctgtggagattctgcctccccactaggccagtgtgtgtttaccatttattcattttctatcatacacaggtggattaaaatttacattaaaatttacattaaaataccatcatacttcaggcttctataacaaaatatcagactgggtggcttcaaaagcagacatttcttacagttctggaagctgggaagtcccacaatccacatgctggtaaatttggttcgtggtgaggcccctcttcctcttttactgaccacatccccaaaagtgtcaggtagacatgttacaaatagctctgtagagagccatgggaagagacaggaggcagatgtggaacataaagggtttagaaacttctgcaggcagcagtggcagggagcaagccctagagtgtctctttttacgagagcaggaatcccatcatgagagttccttcctcatgactttatctaaacccagtcacccccaacaaaggccccaccccctaaccccatcacattggctgttacggcttcaatgtaggggatggggcacaaacattcagtccataacgaatactgattcctcaaatagggtttaaacatagttaactgagcccccaaagaatgttaaaagagaaaatccattttatttgaatagatgcagtgaccacagcttcttccctcaaatcaacacattacagttagatgtctcccatctgaaattggatagcccactgaaattgaacatgccttctcttataaatgtgtggtgagaataaaagcaacaaagaaatgaatgtggtggctcacacctgtaatcctaacactttggaaggttgaggcaggaggatcctttgtgctcaagagtttgagaccagcctgagcaacacagtgagaccctgtctctacaaaaactaaaaaaattagctagggatggtggcacatgcctgtagtcccagctacttgggaggctgaggtgggaggattgcttgagcccaagaaggtcaaggctgccatgagccataatcacgccactgcactccagcctgggtgacagagaccctgtcttaaaataaaat

SEQ ID NO: 327894 - DNA, 3706 bp, Homo sapiens
gtggagctgccgcacgtgggagggcgctggccaggcagcactgtggcctctgcggctaggccggctcgagactcccgggcgccgaggcgctgccgcccgcctcgccgccccacgccgaaggaccacgcgcccgccgccgccagcctctcagcgctcccatgatcgcccggtgccttttggctgtgcgaagcctccgcagagttggtggttccaggattttactcagaatgacgttaggaagagaagtgatgtctcctcttcaggcaatgtcttcctatactgtggctggcagaaatgttttaagatgggatctttcaccagagcaaattaaaacaagaactgaggagctcattgtgcagaccaaacaggtgtacgatgctgttggaatgctcggtattgaggaagtaacttacgagaactgtctgcaggcactggcagatgtagaagtaaagtatatagtggaaaggaccatgctagactttccccagcatgtatcctctgacaaagaagtacgagcagcaagtacagaagcagacaaaagactttctcgttttgatattgagatgagcatgagaggagatatatttgagagaattgttcatttacaggaaacctgtgatctggggaagataaaacctgaggccagacgatacttggaaaagtcaattaaaatggggaaaagaaatgggctccatcttcctgaacaagtacagaatgaaatcaaatcaatgaagaaaagaatgagtgagctatgtattgattttaacaaaaacctcaatgaggatgataccttccttgtattttccaaggctgaacttggtgctcttcctgatgatttcattgacagtttagaaaagacagatgatgacaagtataaaattaccttaaaatatccacactatttccctgtcatgaagaaatgttgtatccctgaaaccagaagaaggatggaaatggcttttaatacaaggtgcaaagaggaaaacaccataattttgcagcagctactcccactgcgaaccaaggtggccaaactactcggttatagcacacatgctgacttcgtccttgaaatgaacactgcaaagagcacaagccgcgtaacagcctttctagatgatttaagccagaagttaaaacccttgggtgaagcagaacgagagtttattttgaatttgaagaaaaaggaatgcaaagacaggggttttgaatatgatgggaaaatcaatgcctgggatctatattactacatgactcagacagaggaactcaagtattccatagaccaagagttcctcaaggaatacttcccaattgaggtggtcactgaaggcttgctgaacacctaccaggagttgttgggactttcatttgaacaaatgacagatgctcatgtttggaacaagagtgttacactttatactgtgaaggataaagctacaggagaagtattgggacagttctatttggacctctatccaagggaaggaaaatacaatcatgcggcctgcttcggtctccagcctggctgccttctgcctgatggaagccggatgatggcagtggctgccctcgtggtgaacttctcacagccagtggcaggtcgtccctctctcctgagacacgacgaggtgaggacttactttcatgagtttggtcacgtgatgcatcagatttgtgcacagactgattttgcacgatttagcggaacaaatgtggaaactgactttgtagaggtgccatcgcaaatgcttgaaaattgggtgtgggacgtcgattccctccgaagattgtcaaaacattataaagatggaagccctattgcagacgatctgcttgaaaaacttgttgcttctaggctggtcaacacaggtcttctgaccctgcgccagattgttttgagcaaagttgatcagtctcttcataccaacacatcgctggatgctgcaagtgaatatgccaaatactgctcagaaatattaggagttgcagctactccaggcacaaatatgccagctacctttggacatttggcagggggatacgatggccaatattatggatatctttggagtgaagtattttccatggatatgttttacagctgttttaaaaaagaagggataatgaatccagaggttggaatgaaatacagaaacctaatcctgaaacctgggggatctctggacggcatggacatgctccacaatttcttgaaacgtgagccaaaccaaaaagcgttcctaatgagtagaggcctgcatgctccgtgaactggggatctttggtagccgtccatgtctggaggacaagtcgacatcaccatgtgttactggcctggaaactgaagggagttttgcaagtgaaaatttagatttctattgacatccttttgttttctaattttaaaaattataaagatgtaaatggaattataaatactgtgacctaagaaaagacccactagaaagtaattgtactataaaatttcataaaactggatttgatttctttttatgaaagtttcatatgaatgtaacttgattttttactattataatctagataatatgatataagagggctaagaatttttaaattgaatcatatatatgatataatttgatccttcttgtatcttgaagttttgtacttgggatttctggactgataaatgaatcatcacattcttctggtaaatattttcttggagctctgtgtcaactttgatcctttgtctcccaggaaggtgtgacctctcctttgcctgcatacctcaaggccaggggaatatgcctcagtgatgcatttatctttgtatatcaggccgcatgattcccaactttctgccacacttaaattacgttcctccatttcagttttgtcttttctgtctaaagttcagtcaaagagtatcaaaaaattatgtttcagctagactggtgtaatgtataagtttttgtatcttgtattagaggatttcgtagcttttattagaggctcatttccacctcagcatacaagatcgttagtcttttggcatgtgtgccaattagaatactaaagcaagtccaagcacatttttctcttctcacgtttctaataagtgttagggactttgcctcttttacttaccacgtccccaaaagtgtcaggtagacatgtcacaaatggctctgtagagagccatgggaagagagaggaggtggatgtggaacataaagggttcagaaactccagaagaggagtgggttttggatagaagcatttgaggacagctgctccaaagccttatgtgtatgatgaaacttaaccacggggaagagactcttcagtagcctgttctgtctggtgatttttattttaagtgaacctttggatctatctttaactctctttattgtgagtctaaattccaattctgcagcagatcagtaaactcacagtatttttcctgtggaaatctattcaataaggaaaccaagacaggataataaaatttaaaaaaaaaacaactttgaattcccctgcctaggtcttccagttgttttccagcgcatacctcaggtatgactttgctagccggggacaaaattagcaccttccgattctctagtccaaatgaactttgtgctaaataaaaaattattatactacataataacctacaatagccacacataccctccgttaccctctagaacag

SEQ ID NO: 327895 - DNA, 3209 bp, Homo sapiens
  misc_feature (1245)..(1245): n is a, c, g, or t
  misc_feature (1753)..(1753): n is a, c, g, or t
  misc_feature (1784)..(1784): n is a, c, g, or t
  misc_feature (2666)..(2666): n is a, c, g, or t
  misc_feature (2953)..(2953): n is a, c, g, or t
  misc_feature (3077)..(3077): n is a, c, g, or t
  misc_feature (3130)..(3130): n is a, c, g, or t
  misc_feature (3161)..(3161): n is a, c, g, or t
gtggagctgccgcacgtgggagggcgctggccaggcagcactgtggcctctgcggctaggccggctcgagactcccgggcgccgaggcgctgccgcccgcctcgccgccccacgccgaaggaccacgcgcccgccgccgccagcctctcagcgctcccatgatcgcccggtgccttttggctgtgcgaagcctccgcagagttggtggttccaggattttactcagaatgacgttaggaagagaagtgatgtctcctcttcaggcaatgtcttcctatactgtggctggcagaaatgttttaagatgggatctttcaccagagcaaattaaaacaagaactgaggagctcattgtgcagaccaaacaggtgtacgatgctgttggaatgctcggtattgaggaagtaacttacgagaactgtctgcaggcactggcagatgtagaagtaaagtatatagtggaaaggaccatgctagactttccccagcatgtatcctctgacaaagaagtacgagcagcaagtacagaagcagacaaaagactttctcgttttgatattgagatgagcatgagaggagatatatttgagagaattgttcatttacaggtaagtggtgttataaatccctttaaagagggaaaaactctacaacaaaaaagaacattcagtcataaataaaacatactgactggattttcttagcttttgtttcgaatgattataaaaccataatgggcattatatagtattacataatgttaattatatcgttgaggttatgttgagctgctaattccattcacttaaagaccaaatgtagaagagtgaacatctgtaaagttaaggctttttaataacattatgaacttgatggttacatgtaagggttatcttagaccaaatcaattagaagcaaatggaatcaagttgtttatctgtaaatatctcgtggttttggaaccataatattgatgacatactgttgatgctgtatgccggagtcattcctgtctgtcatccttacatttttcaagacttggggaaattatggataataaatgttctaggtgggtctgtccaggtgtttttgatctttttaccaatgttgatttgcctcctagcagctttcaatttttattttcatgacacttcagcaatttttttggggaaaaaaaacagtttcaaaattccaggctttttttttgtttaattttgcatgtttctttctgcagaatcctaattntttttcctttttagcagaccgtgacaagagttggaatatttaatattttaaattaaatagcattttaatttgtaactcattatacaatgtgtcatcaagatttagacatgtaaaatgtatatcctattttctcatatcagacaagcatttttcatcctataattgataatcatataattcataataattcacatttggtctataaacttcatggtgaaagtaagttatgaaaataactttatgattattcttcattagctaaattgttcttcttgctccttttgaccacagttatttgatgtgatttgaatcatggtctttatagtctcctcattttatttcatccccaaattacatttctttgttgttctattttttttatgtaatttggaatttttcctagaatttccagtttcctttgattaatcctattttcatcatgatttctaagttcttatttggaataatgtttttgtttttatttcacattctgtgattcttatgaatnttatcaagatatgaaaggtttgtcactttanatttctttgtcatagagtacttttaaattttgtgtatttgagaccagcctggccaacatggtgaaactccatttctactaaaaatacaaaaattggccaggcacggtggctcatgcctgtaatcctagctactcaggaggctgaggcaggagaatcacttgaacccaggaggcagaggttgcagtgagctgagatcatgccactgcactccagcctgggcaacagagtgaggctccttctcaaaaattaaaataaaataaattttctatagttttgggattgatcccactaaacttgggaacaaattgctgactctagagtagactggcacactatagtgacctgatagacaccaatgcgttcatcagatttgtgtctttatttgagctggttcatttcgggcctttattttaacaatttaaggtaatttcagatttggttctgtaattctggtttctataatttttattgtgtgaacattttttaggggcttctacaacatttgctaactctacatcaggataataaaaaataactattgtgtttgtttttgcattgaaggtcattaggtgaatttacctacctttaaacatcttccatgacaaatggttatgtttatttaggcaatttttttaaaaacctagaattaccagtattagttctctgctggagttggacactttaataaatggtaaaacttatcccattcgtacctaaagggcaaaatcagatatccaaatattttatttattttctctgtgatactgtaagttaaataggatagccatgatatagcatataaagccttcattaatggctgggcatggtggctcacgcctgtaatcccagcactttgtgaggctgaggcaggcagatcacttnagctcgggagttcaagaccagcttgggcaatatggcaaaaacccatctctacaaaaataaaaaatagtggccaggtgcggtggctcacgcctgtaatcccagcactttgggaggccaaggcgggtggatcacgggaggtcagaagttcaagaccagcctggtcaacatggtgaaaccctgtctctactaaatatacaaaaattagccaggtgtggtggcaggcgcctgtaatcccagctactcaggaggctgaggcatgagaattgcttgaacccgggaggtggagnttgcagtgagtctagactgtgccattgggctccagcctgggcaacaagagcaaaacttcatctcaaaaaaataaaaaataaattaattaattaaaaatagaaaaattagctgagcatggtggtnagtgcctgtagtcccagctactcgggaggctgaggtgggaggattgcttgtgnccaggaggttgagactgcactgagcagtggntgtgccactgtactccagcctgagtcacagagtgagaccatgtctcag

SEQ ID NO: 327896 - DNA, 6270 bp, Homo sapiens
gtggagctgccgcacgtgggagggcgctggccaggcagcactgtggcctctgcggctaggccggctcgagactcccgggcgccgaggcgctgccgcccgcctcgccgccccacgccgaaggaccacgcgcccgccgccgccagcctctcagcgctcccatgatcgcccggtgccttttggctgtgcgaagcctccgcagagttggtggttccaggattttactcagaatgacgttaggaagagaagtgatgtctcctcttcaggcaatgtcttcctatactgtggctggcagaaatgttttaagatgggatctttcaccagagcaaattaaaacaagaactgaggagctcattgtgcagaccaaacaggtgtacgatgctgttggaatgctcggtattgaggaagtaacttacgagaactgtctgcaggcactggcagatgtagaagtaaagtatatagtggaaaggaccatgctagactttccccagcatgtatcctctgacaaagaagtacgagcagcaagtacagaagcagacaaaagactttctcgttttgatattgagatgagcatgagaggagatatatttgagagaattgttcatttacaggaaacctgtgatctggggaagataaaacctgaggccagacgatacttggaaaagtcaattaaaatggggaaaagaaatgggctccatcttcctgaacaagtacagaatgaaatcaaatcaatgaagaaaagaatgagtgagctatgtattgattttaacaaaaacctcaatgaggatgataccttccttgtattttccaaggctgaacttggtgctcttcctgatgatttcattgacagtttagaaaagacagatgatgacaagtataaaattaccttaaaatatccacactatttccctgtcatgaagaaatgttgtatccctgaaaccagaagaaggatggaaatggcttttaatacaaggtgcaaagaggaaaacaccataattttgcagcagctactcccactgcgaaccaaggtggccaaactactcggttatagcacacatgctgacttcgtccttgaaatgaacactgcaaagagcacaagccgcgtaacagcctttctagatgatttaagccagaagttaaaacccttgggtgaagcagaacgagagtttattttgaatttgaagaaaaaggaatgcaaagacaggggttttgaatatgatgggaaaatcaatgcctgggatctatattactacatgactcagacagaggaactcaagtattccatagaccaagagttcctcaaggaatacttcccaattgaggtggtcactgaaggcttgctgaacacctaccaggagttgttgggactttcatttgaacaaatgacagatgctcatgtttggaacaagagtgttacactttatactgtgaaggataaagctacaggagaagtattgggacagttctatttggacctctatccaagggaaggaaaatacaatcatgcggcctgcttcggtctccagcctggctgccttctgcctgatggaagccggatgatggcagtggctgccctcgtggtgaacttctcacagccagtggcaggtcgtccctctctcctgagacacgacgaggtgaggacttactttcatgagtttggtcacgtgatgcatcagatttgtgcacagactgattttgcacgatttagcggaacaaatgtggaaactgactttgtagaggtgccatcgcaaatgcttgaaaattgggtgtgggacgtcgattccctccgaagattgtcaaaacattataaagatggaagccctattgcagacgatctgcttgaaaaacttgttgcttctaggctggtcaacacaggtcttctgaccctgcgccagattgttttgagcaaagttgatcagtctcttcataccaacacatcgctggatgctgcaagtgaatatgccaaatactgctcagaaatattaggagttgcagctactccaggcacaaatatgccagctacctttggacatttggcagggggatacgatggccaatattatggatatctttggagtgaagtattttccatggatatgttttacagctgttttaaaaaagaagggataatgaatccagaggttggaatgaaatacagaaacctaatcctgaaacctgggggatctctggacggcatggacatgctccacaatttcttgaaacgtgagccaaaccaaaaagcgttcctaatgagtagaggcctgcatgctccgtgaactggggatctttggtagccgtccatgtctggaggacaagtcgacatcaccatgtgttactggcctggaaactgaagggagttttgcaagtgaaaatttagatttctattgacatccttttgttttctaattttaaaaattataaagatgtaaatggaattataaatactgtgacctaagaaaagacccactagaaagtaattgtactataaaatttcataaaactggatttgatttctttttatgaaagtttcatatgaatgtaacttgattttttactattataatctagataatatgatataagagggctaagaatttttaaattgaatcatatatatgatataatttgatccttcttgtatcttgaagttttgtacttgggatttctggactgataaatgaatcatcacattcttctggtaaatattttcttggagctctgtgtcaactttgatcctttgtctcccaggaaggtgtgacctctcctttgcctgcatacctcaaggccaggggaatatgcctcagtgatgcatttatctttgtatatcaggccgcatgattcccaactttctgccacacttaaattacgttcctccatttcagttttgtcttttctgtctaaagttcagtcaaagagtatcaaaaaattatgtttcagctagactggtgtaatgtataagtttttgtatcttgtattagaggatttcgtagcttttattagaggctcatttccacctcagcatacaagatcgttagtcttttggcatgtgtgccaattagaatactaaagcaagtccaagcacatttttctcttctcacgtttctaataagtgttagggactttgcctcttttacttaccacgtccccaaaagtgtcaggtagacatgtcacaaatggctctgtagagagccatgggaagagagaggaggtggatgtggaacataaagggttcagaaactccagaagaggagtgggttttggatagaagcatttgaggacagctgctccaaagccttatgtgtatgatgaaacttaaccacggggaagagactcttcagtagcctgttctgtctggtgatttttattttaagtgaacctttggatctatctttaactctctttattgtgagtctaaattccaattctgcagcagatcagtaaactcacagtatttttcctgtggaaatctattcaataaggaaaccaagacaggataataaaatttaaaaaaaaaacaactttgaattcccctgcctaggtcttccagttgttttccagcgcatacctcaggtatgactttgctagccggggacaaaattagcaccttccgattctctagtccaaatgaactttgtgctaaataaaaaattattatactacataataaagttacagatagcaggaaatgcaagagctaggagattcctagattatatctgccaagcaaataccttaaacatccacctgaaatcctactaccccctcttctgagataatttgcccagcccttctcttcccacacactcactcaatgtcacccccttctaatccccaaaactgtttttgtggtctttgtagcctatagtagttttctcacatctttccccctagacttttctgtttttcagtttcagacaaaaaaactcttcagctttttccagtgtgtctccttaacagtaactttaccacttgaaatcttatttcatagaaaaactaaattggtgtggaaaggctgcacacaataaagttatattattatccatgaaaatgaactcatatttctttcatactttaacgttaaaaccgaaatgcatgagagcaaaagcaccatggtgttctttctatttagggcctacctctaatatttaaaatctaccaaagagcagtcacaaaattaaaactcagcccgggcgcagtggctcatgcctgtaatcccagcactttgggaggccaaggcaggaggatcacctgaggtcagagttcaagaccagcatggtcaacatggtgaaaccctgtctctacaaaaatacaaaaagctgggcatgatgttgggttcctgtagtcccagctacttaggaggctgaggcaggagaatagcttgaacccgggaggtggaggttgcagtgagctgagatcatgccattgcactccagcctggacgacagagtgagattcagtctcaaaaaaaattaatactcaaagaattatctagcataatttaaaagaaaggactttttaaaaattctctagcataattcaaaagaaaggacttaactttttttttttttagtgtggtcatccgtctagttgttctttttttccagatcagagcagagaatatcactgacatgcttgaaatggtggataactatgtaaattgtaattggacaaatgtacactttagatttatggactgagccacatataataaggtctctcctggtaattgatccaggggatttaggcctctttcgggttttttgttttttttttaggcattgttatgttgtgaaggataaaatcttcaacatcttatgcaaatggatagtaggcatgatcctaaaggtttagttttacgatgctgcagagaagagaaatgtcttgacgttttgccacctgatgtagactttgtccccctctagtataaatgttgcatgttacctagataaacaactaaaaattgccttgagttatcacctgagctacttatgccaaggtcttgcctttctaaagctaataaggtgagaggtggatatctgtagctcttcggatgaaaaattgcattgtgggagataccaaaattgaggaaatagctcttcaaagaaaaattactgatatgatcattgtacttgtaaatgccttaagtagcaggcagtgactcaattttctactttaccattttacctttagcttttatgtatgaattataggtctgtggagattctgcctccccactaggccagtgtgtgtttaccatttattcattttctatcatacacaggtggattaaaatttacattaaaatttacattaaaataccatcatacttcaggcttctataacaaaatatcagactgggtggcttcaaaagcagacatttcttacagttctggaagctgggaagtcccacaatccacatgctggtaaatttggttcgtggtgaggcccctcttcctcttttactgaccacatccccaaaagtgtcaggtagacatgttacaaatagctctgtagagagccatgggaagagacaggaggcagatgtggaacataaagggtttagaaacttctgcaggcagcagtggcagggagcaagccctagagtgtctctttttacgagagcaggaatcccatcatgagagttccttcctcatgactttatctaaacccagtcacccccaacaaaggccccaccccctaaccccatcacattggctgttacggcttcaatgtaggggatggggcacaaacattcagtccataacgaatactgattcctcaaatagggtttaaacatagttaactgagcccccaaagaatgttaaaagagaaaatccattttatttgaatagatgcagtgaccacagcttcttccctcaaatcaacacattacagttagatgtctcccatctgaaattggatagcccactgaaattgaacatgccttctcttataaatgtgtggtgagaataaaagcaacaaagaaatgaatgtggtggctcacacctgtaatcctaacactttggaaggttgaggcaggaggatcctttgtgctcaagagtttgagaccagcctgagcaacacagtgagaccctgtctctacaaaaactaaaaaaattagctagggatggtggcacatgcctgtagtcccagctacttgggaggctgaggtgggaggattgcttgagcccaagaaggtcaaggctgccatgagccataatcacgccactgcactccagcctgggtgacagagaccctgtcttaaaataaaat

SEQ ID NO: 327897 - DNA, 6216 bp, Homo sapiens
gtggagctgccgcacgtgggagggcgctggccaggcagcactgtggcctctgcggctaggccggctcgagactcccgggcgccgaggcgctgccgcccgcctcgccgccccacgccgaaggaccacgcgcccgccgccgccagcctctcagcgctcccatgatcgcccggtgccttttggctgtgcgaagcctccgcagagttggtggttccaggattttactcagaatgacgttaggaagagaagtgatgtctcctcttcaggcaatgtcttcctatactgtggctggcagaaatgttttaagatgggatctttcaccagagcaaattaaaacaagaactgaggagctcattgtgcagaccaaacaggtgtacgatgctgttggaatgctcggtattgaggaagtaacttacgagaactgtctgcaggcactggcagatgtagaagtaaagtatatagtggaaaggaccatgctagactttccccagcatgtatcctctgacaaagaagtacgagcagcaagtacagaagcagacaaaagactttctcgttttgatattgagatgagcatgagaggagatatatttgagagaattgttcatttacaggaaacctgtgatctggggaagataaaacctgaggccagacgatacttggaaaagtcaattaaaatggggaaaagaaatgggctccatcttcctgaacaagtacagaatgaaatcaaatcaatgaagaaaagaatgagtgagctatgtattgattttaacaaaaacctcaatgaggatgataccttccttgtattttccaaggctgaacttggtgctcttcctgatgatttcattgacagtttagaaaagacagatgatgacaagtataaaattaccttaaaatatccacactatttccctgtcatgaagaaatgttgtatccctgaaaccagaagaaggatggaaatggcttttaatacaaggtgcaaagaggaaaacaccataattttgcagcagctactcccactgcgaaccaaggtggccaaactactcggttatagcacacatgctgacttcgtccttgaaatgaacactgcaaagagcacaagccgcgtaacagcctttctagatgatttaagccagaagttaaaacccttgggtgaagcagaacgagagtttattttgaatttgaagaaaaaggaatgcaaagacaggggttttgaatatgatgggaaaatcaatgcctgggatctatattactacatgactcagacagaggaactcaagtattccatagaccaagagttcctcaaggaatacttcccaattgaggtggtcactgaaggcttgctgaacacctaccaggagttgttgggactttcatttgaacaaatgacagatgctcatgtttggaacaagagtgttacactttatactgtgaaggataaagctacaggagaagtattgggacagttctatttggacctctatccaagggaaggaaaatacaatcatgcggcctgcttcggtctccagcctggctgccttctgcctgatggaagccggatgatggcagtggctgccctcgtggtgaacttctcacagccagtggcaggtcgtccctctctcctgagacacgacgagactgattttgcacgatttagcggaacaaatgtggaaactgactttgtagaggtgccatcgcaaatgcttgaaaattgggtgtgggacgtcgattccctccgaagattgtcaaaacattataaagatggaagccctattgcagacgatctgcttgaaaaacttgttgcttctaggctggtcaacacaggtcttctgaccctgcgccagattgttttgagcaaagttgatcagtctcttcataccaacacatcgctggatgctgcaagtgaatatgccaaatactgctcagaaatattaggagttgcagctactccaggcacaaatatgccagctacctttggacatttggcagggggatacgatggccaatattatggatatctttggagtgaagtattttccatggatatgttttacagctgttttaaaaaagaagggataatgaatccagaggttggaatgaaatacagaaacctaatcctgaaacctgggggatctctggacggcatggacatgctccacaatttcttgaaacgtgagccaaaccaaaaagcgttcctaatgagtagaggcctgcatgctccgtgaactggggatctttggtagccgtccatgtctggaggacaagtcgacatcaccatgtgttactggcctggaaactgaagggagttttgcaagtgaaaatttagatttctattgacatccttttgttttctaattttaaaaattataaagatgtaaatggaattataaatactgtgacctaagaaaagacccactagaaagtaattgtactataaaatttcataaaactggatttgatttctttttatgaaagtttcatatgaatgtaacttgattttttactattataatctagataatatgatataagagggctaagaatttttaaattgaatcatatatatgatataatttgatccttcttgtatcttgaagttttgtacttgggatttctggactgataaatgaatcatcacattcttctggtaaatattttcttggagctctgtgtcaactttgatcctttgtctcccaggaaggtgtgacctctcctttgcctgcatacctcaaggccaggggaatatgcctcagtgatgcatttatctttgtatatcaggccgcatgattcccaactttctgccacacttaaattacgttcctccatttcagttttgtcttttctgtctaaagttcagtcaaagagtatcaaaaaattatgtttcagctagactggtgtaatgtataagtttttgtatcttgtattagaggatttcgtagcttttattagaggctcatttccacctcagcatacaagatcgttagtcttttggcatgtgtgccaattagaatactaaagcaagtccaagcacatttttctcttctcacgtttctaataagtgttagggactttgcctcttttacttaccacgtccccaaaagtgtcaggtagacatgtcacaaatggctctgtagagagccatgggaagagagaggaggtggatgtggaacataaagggttcagaaactccagaagaggagtgggttttggatagaagcatttgaggacagctgctccaaagccttatgtgtatgatgaaacttaaccacggggaagagactcttcagtagcctgttctgtctggtgatttttattttaagtgaacctttggatctatctttaactctctttattgtgagtctaaattccaattctgcagcagatcagtaaactcacagtatttttcctgtggaaatctattcaataaggaaaccaagacaggataataaaatttaaaaaaaaaacaactttgaattcccctgcctaggtcttccagttgttttccagcgcatacctcaggtatgactttgctagccggggacaaaattagcaccttccgattctctagtccaaatgaactttgtgctaaataaaaaattattatactacataataaagttacagatagcaggaaatgcaagagctaggagattcctagattatatctgccaagcaaataccttaaacatccacctgaaatcctactaccccctcttctgagataatttgcccagcccttctcttcccacacactcactcaatgtcacccccttctaatccccaaaactgtttttgtggtctttgtagcctatagtagttttctcacatctttccccctagacttttctgtttttcagtttcagacaaaaaaactcttcagctttttccagtgtgtctccttaacagtaactttaccacttgaaatcttatttcatagaaaaactaaattggtgtggaaaggctgcacacaataaagttatattattatccatgaaaatgaactcatatttctttcatactttaacgttaaaaccgaaatgcatgagagcaaaagcaccatggtgttctttctatttagggcctacctctaatatttaaaatctaccaaagagcagtcacaaaattaaaactcagcccgggcgcagtggctcatgcctgtaatcccagcactttgggaggccaaggcaggaggatcacctgaggtcagagttcaagaccagcatggtcaacatggtgaaaccctgtctctacaaaaatacaaaaagctgggcatgatgttgggttcctgtagtcccagctacttaggaggctgaggcaggagaatagcttgaacccgggaggtggaggttgcagtgagctgagatcatgccattgcactccagcctggacgacagagtgagattcagtctcaaaaaaaattaatactcaaagaattatctagcataatttaaaagaaaggactttttaaaaattctctagcataattcaaaagaaaggacttaactttttttttttttagtgtggtcatccgtctagttgttctttttttccagatcagagcagagaatatcactgacatgcttgaaatggtggataactatgtaaattgtaattggacaaatgtacactttagatttatggactgagccacatataataaggtctctcctggtaattgatccaggggatttaggcctctttcgggttttttgttttttttttaggcattgttatgttgtgaaggataaaatcttcaacatcttatgcaaatggatagtaggcatgatcctaaaggtttagttttacgatgctgcagagaagagaaatgtcttgacgttttgccacctgatgtagactttgtccccctctagtataaatgttgcatgttacctagataaacaactaaaaattgccttgagttatcacctgagctacttatgccaaggtcttgcctttctaaagctaataaggtgagaggtggatatctgtagctcttcggatgaaaaattgcattgtgggagataccaaaattgaggaaatagctcttcaaagaaaaattactgatatgatcattgtacttgtaaatgccttaagtagcaggcagtgactcaattttctactttaccattttacctttagcttttatgtatgaattataggtctgtggagattctgcctccccactaggccagtgtgtgtttaccatttattcattttctatcatacacaggtggattaaaatttacattaaaatttacattaaaataccatcatacttcaggcttctataacaaaatatcagactgggtggcttcaaaagcagacatttcttacagttctggaagctgggaagtcccacaatccacatgctggtaaatttggttcgtggtgaggcccctcttcctcttttactgaccacatccccaaaagtgtcaggtagacatgttacaaatagctctgtagagagccatgggaagagacaggaggcagatgtggaacataaagggtttagaaacttctgcaggcagcagtggcagggagcaagccctagagtgtctctttttacgagagcaggaatcccatcatgagagttccttcctcatgactttatctaaacccagtcacccccaacaaaggccccaccccctaaccccatcacattggctgttacggcttcaatgtaggggatggggcacaaacattcagtccataacgaatactgattcctcaaatagggtttaaacatagttaactgagcccccaaagaatgttaaaagagaaaatccattttatttgaatagatgcagtgaccacagcttcttccctcaaatcaacacattacagttagatgtctcccatctgaaattggatagcccactgaaattgaacatgccttctcttataaatgtgtggtgagaataaaagcaacaaagaaatgaatgtggtggctcacacctgtaatcctaacactttggaaggttgaggcaggaggatcctttgtgctcaagagtttgagaccagcctgagcaacacagtgagaccctgtctctacaaaaactaaaaaaattagctagggatggtggcacatgcctgtagtcccagctacttgggaggctgaggtgggaggattgcttgagcccaagaaggtcaaggctgccatgagccataatcacgccactgcactccagcctgggtgacagagaccctgtcttaaaataaaat

SEQ ID NO: 327898 - DNA, 980 bp, Homo sapiens
ggtcccaatgcttgcggcgtcgcgagtgtgcgcgtgcggacccttcccgcggcggggaactgactcaaagtccaacactcccgagctttcgcggcgaggccgaccgccagcccgcccgtgggggcgaacaggagcccctccggcggccgccgtggacctagctgggctcccctcgcccgggcctctccccgcgcccccgagccagccgctgggggccgcggcgccactcccacggctctggacgcccaggctctggggggttagcacgggggtcgtccccctgcccgcccaccgccccggcctgtcggaacttgagcgcacctccgacctcgggcgccagaggcctgcgccccctctccttccgcccagcacctccatgccctcggtgcacgaacgcggcggcggcggccagaagtcccccgtggcttatgaatgacacggacagagagcccagcgacgtggatggggcagctaggggcagcagcttggatgcggaccctcagtcctcaggcagtccttcagctcctacttaatggaagcctcgcagatgcaagatggctccagcaggcccagcatcacttcttctcagtgtcccaaagccagaagagaggctgttgtttttaaaagcaggaaaactttcctaaacttggccagaattgcatcacagaccctttcctaaaacaatttccagcaaagggaatagacttaccatgtctggtacagatgaatcaaggtttgcccctgggggctggggaggggcttgtcccgctgaagcagactcttgcccagcagctgaacggagcctaggttcaccagacggaggaagagactggccactaacagtgcctgacacacagatgtgcttcctgtgatatcgctgctgccaccgttccaaatgtaagcagttggctgtctgggatactacctaccttcttttgtgttcttattaataaaattaaagattgctttctgggtagaga

SEQ ID NO: 327899 - DNA, 1829 bp, Homo sapiens
ggtcccaatgcttgcggcgtcgcgagtgtgcgcgtgcggacccttcccgcggcggggaactgactcaaagtccaacactcccgagctttcgcggcgaggccgaccgccagcccgcccgtgggggcgaacaggagcccctccggcggccgccgtggacctagctgggctcccctcgcccgggcctctccccgcgcccccgagccagccgctgggggccgcggcgccactcccacggctctggacgcccaggctctggggggttagcacgggggtcgtccccctgcccgcccaccgccccggcctgtcggaacttgagcgcacctccgacctcgggcgccagaggcctgcgccccctctccttccgcccagcacctccatgccctcggtgcacgaacgcggcggcggcggccagaagtcccccgtggcttatgaatgacacggacagagagcccagcgacgtggatggggcagctaggggcagcagcttggatgcggaccctcagtcctcaggcagggagaaagaacctctgaagtaagccctcacctctgcaggtggggctcaggcccagagactgggatcagctggctcaggcagctcaggtcctggttcgtcccctagcccaggaggatgctgtgggagctgcagcagcggcaagagggagaatggggggaagcagcactagagaagttcccagagctcatcctgtcactggctgctctgctgaaattatcaataagaaatgccagttggatctgtgacatgtctgcctgcagctggatgggagcaacggacagcttgtcctccgaatgtgttttctgtatgtgtgcaagcgcgtgtgttccaaacgggcagtagcgtgtgggaaggaaaaagcctgacacttgtttttatcaatttgctgatgctcagtcccggcggctgcctcctttgcccccagctgctctgccatttctctcttttcaatcctgcatgatcctgagcagagataaaagcagatttccgcttctgctcccagatccaggagcagaccctgcaggcagctgctcctgatgtctcacagctattagtcttcaaaaaccccccgtgcctctgtgcacacgcgtctctcctccccagccagcccccctcccagcccagcggcgatgtctctgcctggctggcccgtgcccttgacttccaggcagtagaagatggagttctctagacagcagcacttcagccgccactctgcctctgaagggaaggaagggaaaggggtgctggctactgtgaaataacaagagtccaagagcaaggtgtccagagtcagagctcctgggtttgaaccttgttccaccagcacatcctacctctgtggcctggtccttcagctcctacttaatggaagcctcgcagatgcaagatggctccagcaggcccagcatcacttcttctcagtgtcccaaagccagaagagaggctgttgtttttaaaagcaggaaaactttcctaaacttggccagaattgcatcacagaccctttcctaaaacaatttccagcaaagggaatagacttaccatgtctggtacagatgaatcaaggtttgcccctgggggctggggaggggcttgtcccgctgaagcagactcttgcccagcagctgaacggagcctaggttcaccagacggaggaagagactggccactaacagtgcctgacacacagatgtgcttcctgtgatatcgctgctgccaccgttccaaatgtaagcagttggctgtctgggatactacctaccttcttttgtgttcttattaataaaattaaagattgctttctgggtagaga

SEQ ID NO: 327900 - DNA, 1910 bp, Homo sapiens
ggtcccaatgcttgcggcgtcgcgagtgtgcgcgtgcggacccttcccgcggcggggaactgactcaaagtccaacactcccgagctttcgcggcgaggccgaccgccagcccgcccgtgggggcgaacaggagcccctccggcggccgccgtggacctagctgggctcccctcgcccgggcctctccccgcgcccccgagccagccgctgggggccgcggcgccactcccacggctctggacgcccaggctctggggggttagcacgggggtcgtccccctgcccgcccaccgccccggcctgtcggaacttgagcgcacctccgacctcagtgtgcggcacagatgtgccattgctgcccacctctcacttcctgcaccaatgcgacctaccatggccctctgtgttgcactgaaactgctgtgtctggctgtgctggcgcaagaatgtccaccctgatggctttattgaattgaccactgggacatgacgacgccccagctgactgttgcgattgtggtgccagcctatgtggtgcagcatgctttgtgactgcctggactcctcacgtcctcagtgcatgggacgaaactgggagaaagaacctctgaagtaagccctcacctctgcaggtggggctcaggcccagagactgggatcagctggctcaggcagctcaggtcctggttcgtcccctagcccaggaggatgctgtgggagctgcagcagcggcaagagggagaatggggggaagcagcactagagaagttcccagagctcatcctgtcactggctgctctgctgaaattatcaataagaaatgccagttggatctgtgacatgtctgcctgcagctggatgggagcaacggacagcttgtcctccgaatgtgttttctgtatgtgtgcaagcgcgtgtgttccaaacgggcagtagcgtgtgggaaggaaaaagcctgacacttgtttttatcaatttgctgatgctcagtcccggcggctgcctcctttgcccccagctgctctgccatttctctcttttcaatcctgcatgatcctgagcagagataaaagcagatttccgcttctgctcccagatccaggagcagaccctgcaggcagctgctcctgatgtctcacagctattagtcttcaaaaaccccccgtgcctctgtgcacacgcgtctctcctccccagccagcccccctcccagcccagcggcgatgtctctgcctggctggcccgtgcccttgacttccaggcagtagaagatggagttctctagacagcagcacttcagccgccactctgcctctgaagggaaggaagggaaaggggtgctggctactgtgaaataacaagagtccaagagcaaggtgtccagagtcagagctcctgggtttgaaccttgttccaccagcacatcctacctctgtggcctggtccttcagctcctacttaatggaagcctcgcagatgcaagatggctccagcaggcccagcatcacttcttctcagtgtcccaaagccagaagagaggctgttgtttttaaaagcaggaaaactttcctaaacttggccagaattgcatcacagaccctttcctaaaacaatttccagcaaagggaatagacttaccatgtctggtacagatgaatcaaggtttgcccctgggggctggggaggggcttgtcccgctgaagcagactcttgcccagcagctgaacggagcctaggttcaccagacggaggaagagactggccactaacagtgcctgacacacagatgtgcttcctgtgatatcgctgctgccaccgttccaaatgtaagcagttggctgtctgggatactacctaccttcttttgtgttcttattaataaaattaaagattgctttctgggtagaga

SEQ ID NO: 327901 - DNA, 1714 bp, Homo sapiens
ttcctccctactcttgcctcccacagagagcccagcgacgtggatggggcagctaggggcagcagcttggatgcggaccctcagtcctcaggcagggagaaagaacctctgaagtaagccctcacctctgcaggtggggctcaggcccagagactgggatcagctggctcaggcagctcaggtcctggttcgtcccctagcccaggaggatgctgtgggagctgcagcagcggcaagagggagaatggggggaagcagcactagagaagttcccagagctcatcctgtcactggctgctctgctgaaattatcaataagaaatgccagttggatctgtgacatgtctgcctgcagctggatgggagcaacggacagcttgtcctccgaatgtgttttctgtatgtgtgcaagcgcgtgtgttccaaacgggcagtagcgtgtgggaaggaaaaagcctgacacttgtttttatcaatttgctgatgctcagtcccggcggctgcctcctttgcccccagctgctctgccatttctctcttttcaatcctgcatgatcctgagcagagataaaagcagatttccgcttctgctcccagatccaggagcagaccctgcaggcagctgctcctgatgtctcacagctattagtcttcaaaaaccccccgtgcctctgtgcacacgcgtctctcctccccagccagcccccctcccagcccagcggcgatgtctctgcctggctggcccgtgcccttgacttccaggcagtagaagatggagttctctagacagcagcacttcagccgccactctgcctctgaagggaaggaagggaaagggtgagggatgccgcagagcagagggaaccgctggggaggcgctcagggtgggggaggaggtgcaccccgctggggagggcctgctggtacctcggggagcctggctggggtgtgtgcgaaggcagttctgtgggagcctctcaaagtagggcaggcaggaggcagggggaaagtcacactagggaaggagcctgcagaggcaaagccagagcgccagcctgacccaggccgtgagcccgtgatcgcctgtctcagctcctgtcagcctgtctctctctttggaggcatcggccttcctggtgacaggcctgtcaggctgagggccagagggcactgttcccgggacccagtctgtgttccccgatcctatctgcatttattctctatttgccatgttcctgtcacctcatccttgctgccatttccgagttgctcatctccttccactggtctgaggaattgtcaggccaaggtcatggagctggctcacggcccagacgcacttccccagggcagcgcccctccacgccactgttccgagaacctgcgcaggaggtggtggctgctccagggatccatccagaggaagggcgggaaaaagagaggaaggggctgctggcggccagcggggctgtggctgcctgggcttggaggttgcctgggcagctggggtgccatgtgggccgggtgggggggctgtctcccccagggagcaggctggctttggtgggagcagattgtgtttacaccttccccgcacacccagcccacgctcgcctcttattcccggggcctctcccacccctgggctctctgcgcagtctgcacatttgcagctcctgctgcagaaagttacctctctcagcctagagctccc

SEQ ID NO: 327902 - DNA, 2133 bp, Homo sapiens
ggtcccaatgcttgcggcgtcgcgagtgtgcgcgtgcggacccttcccgcggcggggaactgactcaaagtccaacactcccgagctttcgcggcgaggccgaccgccagcccgcccgtgggggcgaacaggagcccctccggcggccgccgtggacctagctgggctcccctcgcccgggcctctccccgcgcccccgagccagccgctgggggccgcggcgccactcccacggctctggacgcccaggctctggggggttagcacgggggtcgtccccctgcccgcccaccgccccggcctgtcggaacttgagcgcacctccgacctcgggcgccagaggcctgcgccccctctccttccgcccagcacctccatgccctcggtgcacgaacgcggcggcggcggccagaagtcccccgtggcttatgaatgacacggacagagagcccagcgacgtggatggggcagctaggggcagcagcttggatgcggaccctcagtcctcaggcagggagaaagaacctctgaagtaagccctcacctctgcaggtggggctcaggcccagagactgggatcagctggctcaggcagctcaggtcctggttcgtcccctagcccaggaggatgctgtgggagctgcagcagcggcaagagggagaatggggggaagcagcactagagaagttcccagagctcatcctgtcactggctgctctgctgaaattatcaataagaaatgccagttggatctgtgacatgtctgcctgcagctggatgggagcaacggacagcttgtcctccgaatgtgttttctgtatgtgtgcaagcgcgtgtgttccaaacgggcagtagcgtgtgggaaggaaaaagcctgacacttgtttttatcaatttgctgatgctcagtcccggcggctgcctcctttgcccccagctgctctgccatttctctcttttcaatcctgcatgatcctgagcagagataaaagcagatttccgcttctgctcccagatccaggagcagaccctgcaggcagctgctcctgatgtctcacagctattagtcttcaaaaaccccccgtgcctctgtgcacacgcgtctctcctccccagccagcccccctcccagcccagcggcgatgtctctgcctggctggcccgtgcccttgacttccaggcagtagaagatggagttctctagacagcagcacttcagccgccactctgcctctgaagggaaggaagggaaagggtgagggatgccgcagagcagagggaaccgctggggaggcgctcagggtgggggaggaggtgcaccccgctggggagggcctgctggtacctcggggagcctggctggggtgtgtgcgaaggcagttctgtgggagcctctcaaagtagggcaggcaggaggcagggggaaagtcacactagggaaggagcctgcagaggcaaagccagagcgccagcctgacccaggccgtgagcccgtgatcgcctgtctcagctcctgtcagcctgtctctctctttggaggcatcggccttcctggtgacaggcctgtcaggctgagggccagagggcactgttcccgggacccagtctgtgttccccgatcctatctgcatttattctctatttgccatgttcctgtcacctcatccttgctgccatttccgagttgctcatctccttccactggtctgaggaattgtcaggccaaggtcatggagctggctcacggcccagacgcacttccccagggcagcgcccctccacgccactgttccgagaacctgcgcaggaggtggtggctgctccagggatccatccagaggaagggcgggaaaaagagaggaaggggctgctggcggccagcggggctgtggctgcctgggcttggaggttgcctgggcagctggggtgccatgtgggccgggtgggggggctgtctcccccagggagcaggctggctttggtgggagcagattgtgtttacaccttccccgcacacccagcccacgctcgcctcttattcccggggcctctcccacccctgggctctctgcgcagtctgcacatttgcagctcctgctgcagaaagttacctctctcagcctagagctccc

SEQ ID NO: 327903 - DNA, 159 bp, Homo sapiens
ttggagtcaggaagatgtggatagtggttaagagtatggactctggatttaaacggcctgggttcaaatcccatctctgtaaccttgggcaaattacttattctcagtgtctcagtctcctcgtcagcaaaatggagatgctgctagcagccaactgtc

SEQ ID NO: 327904 - DNA, 665 bp, Homo sapiens
ttcaatatgagttctgtggcagtctcacatggaagtcaggagtaacagcctcaattcctaaatagctgtttaccactgcttttttgagcatatttaagtaatacagaatataaaggagcaaacaaaatatgaagtttataaaagatttcaaacacttttctaaaaataagaggcccacattttagaggtatttcattccttttctcaaacaatatggacatttataaatatgagaatatatagatatacagaccttaataaatgaagtgttcttgaaaattttatatggaaaaccagttagctttaatttcttcacaatttttatggatttatccagatcaaggacaactcctgtggcagctatccgaaaatcaggctaacaggagccccaaaatttgaaaataggaataatattagcaagagaaaaacttcaattctatgtgacacaataaattaccaaagtgaattttacttacaattagttaagaaaaacaagagagaccatctgaacttgcaacccattggtttgacaaaagcaatccaaaactttaaagttggtaagccaaactaacaagggtgacttgaggccaggcacagtggctcatacctgtaatcccagcactttgggaggccaaggcaggtggatcacctgaggtcagaagttt

SEQ ID NO: 327905 - DNA, 603 bp, Homo sapiens
gcaagcagaaaaggagttaactagtgtcacatttgaagacgagcactgaggatgaggaaccaactgaagaatatgaaaatgttggaaatgcagcatctaagtggccaaaagtggaggatcctatccctgaatctaaggttggtgacacatgtgtttgggatagcaaggtagagaatcaacagaaaaagcctgtggaaaacaggatgaaggaggacaaaagcagcatcagggaagcaatcagcaaagccaagagtacagcaaatataaagacagaacaggaaggtgaggcatctgagaagagcttgcatctgagcccacagcatatcacacaccagactatgcctataggacagagaggcagtgagcaaggcaaacgtgtggagaacattaatggaacctcctaccctagtctacagcagaaaaccaatgctgttaagaaattacataaatgtgatgaatgtgggaaatccttcaaatataattcccgccttgttcaacataaaattatgcacactggggaaaagcgctatgaatgtgatgactgtggagggactttccggagcagctcgagccttcgggtccacaaacggatccacactgggg

SEQ ID NO: 327906 - DNA, 1473 bp, Homo sapiens
gtgatgtgtgtgggaaaacgttcagaaacaatgcaggcctcaaagtccacaggaggctccatactggggaaaaaccatataagtgtgatgtgtgtgggaaagcctatatctcacgctctagccttaaaaatcacaaaggaatccaccttggggagaagccctataaatgtagctattgtgagaaatccttcaactacagctctgcccttgaacagcataaaaggattcataccagggaaaaaccctttgggtgtgatgagtgtggtaaagctttcagaaataattctggccttaaagtacataaacgaatccacactggggaacgaccttacaaatgtgaagaatgtgggaaagcatacatctctctctcgagccttataaatcataaaagtgtacaccctggggagaagccctttaagtgtgacgagtgtgagaaggccttcatcacataccgaacccttacaaaccacaaaaaagttcatcttggggagaagccctacaaatgtgatgtgtgtgagaaatcttttaattacacatcgctcctttctcagcacagaagggtccacactagagagaaaccctatgaatgtgacaggtgtgagaaggtcttcagaaacaactcaagccttaaagttcataaaagaatccatactggggagaggccctatgaatgtgatgtgtgtggaaaagcctacatctcacactcaagccttattaaccataagagtacccaccctggcaggacaccccatacatgtgatgaatgtggaaaagcttttttctcaagcagaactcttataagccataaaagagtccatcttggggagaaacccttcaagtgtgttgagtgtgggaaatctttcagttacagctctctcctttctcagcacaagaggatccacacaggggagaaaccctatgtgtgtgataggtgtgggaaggccttcaggaacagctcaggcctcacagtgcataaaaggatccacacagtttcagatgaactcccataatgaatgatgaatttgtgatgagggataacctggaagtggtattcacacattatgctacaataaaaggttctaccgtggagaggattttgacacattcagtaactaatggaacacaccgtcaacatgaattcgcaccttacatgacagaagtgattcagggattcctatgaatagaaatgctgagaaggaacgcattttattgcagaagctaaaaagctaaagtaccagtcatctagagagaaggaaattaatgtttcttaataatcctgttaaatgtttgattgtttttggaatgtgttattgtaaagatgtcatgcaggacatgtatatgttgtctgttgtaaaatgttaacgaatactttgttcagggctcactctctctttgtcatgaaagccagctccttgtggcgaggtaaagtggaattccaataaagaaattccttaaatcaaaaaaactgtgagt

SEQ ID NO: 327907 - DNA, 744 bp, Homo sapiens
cgcgggttcttccggccgtgcggtccgcgcttttgtcccgctggcggccgggttcccgcggcgccgccacagccagttgccttcttcctcatctctgcagtaactgtcttcatggtttcatagccttctccctgatacccctccccagtgtcacatttgaagacgagcactgaggatgaggaaccaactgaagaatatgaaaatgttggaaatgcagcatctaagtggccaaaagtggaggatcctatccctgaatctaagtttcagatgaactcccataatgaatgatgaatttgtgatgagggataacctggaagtggtattcacacattatgctacaataaaaggttctaccgtggagaggattttgacacattcagtaactaatggaacacaccgtcaacatgaattcgcaccttacatgacagaagtgattcagggattcctatgaatagaaatgctgagaaggaacgcattttattgcagaagctaaaaagctaaagtaccagtcatctagagagaaggaaattaatgtttcttaataatcctgttaaatgtttgattgtttttggaatgtgttattgtaaagatgtcatgcaggacatgtatatgttgtctgttgtaaaatgttaacgaatactttgttcagggctcactctctctttgtcatgaaagccagctccttgtggcgaggtaaagtggaattccaataaagaaattccttaaatcaaaaaaactgtgagt

SEQ ID NO: 327908 - DNA, 2544 bp, Homo sapiens
gtgatgtgtgtgggaaaacgttcagaaacaatgcaggcctcaaagtccacaggaggctccatactggggaaaaaccatataagtgtgatgtgtgtgggaaagcctatatctcacgctctagccttaaaaatcacaaaggaatccaccttggggagaagccctataaatgtagctattgtgagaaatccttcaactacagctctgcccttgaacagcataaaaggattcataccagggaaaaaccctttgggtgtgatgagtgtggtaaagctttcagaaataattctggccttaaagtacataaacgaatccacactggggaacgaccttacaaatgtgaagaatgtgggaaagcatacatctctctctcgagccttataaatcataaaagtgtacaccctggggagaagccctttaagtgtgacgagtgtgagaaggccttcatcacataccgaacccttacaaaccacaaaaaagttcatcttggggagaagccctacaaatgtgatgtgtgtgagaaatcttttaattacacatcgctcctttctcagcacagaagggtccacactagagagaaaccctatgaatgtgacaggtgtgagaaggtcttcagaaacaactcaagccttaaagttcataaaagaatccatactggggagaggccctatgaatgtgatgtgtgtggaaaagcctacatctcacactcaagccttattaaccataagagtacccaccctggcaggacaccccatacatgtgatgaatgtggaaaagcttttttctcaagcagaactcttataagccataaaagagtccatcttggggagaaacccttcaagtgtgttgagtgtgggaaatctttcagttacagctctctcctttctcagcacaagaggatccacacaggggagaaaccctatgtgtgtgataggtgtgggaaggccttcaggaacagctcaggcctcacagtgcataaaaggatccacacaggtgagaaaccctatgaatgtgatgagtgtgggaaggcatacatctcacactcaagtcttatcaatcataaaagtgtccaccaggggaagcagccctataattgtgagtgtgggaaatccttcaattatagatcagtccttgaccagcacaaaaggatccacactggaaagaagccataccgatgtaatgagtgtggtaaggcttttaatatcagatcaaatctcaccaagcataaaagaacccatactggagaggaatctttaaatgtgatatatgtgggaagttatagtggcacatcccagaagagaacctatgagggagggaatgccctggatgggggcaggatgaggatgcctctgtagcaggcagagcttaccaagtctctccgaactcaaatggaagaaataccttatgaatgtaagaatgtagggggtcatggcttgtaatttacacagtgtaaatgaaaccatcctagaggattatgaggaatcctttctatgtgattttcaatcatagcaagcaagaaaggctccagtgtcaaggtagttcagctcttacaggatataaaacagtccatacttgagagaaaaacttagatctgagtgatggaatgtgaagcaaatcttcaaaatcagtagacatttctggacataaaacacagatgaggaaagggcttcaattagaagttacgtaatcaccatcagaaagttcatgtttggtaaattctgttactagaaatgtaggaaattcaggtatagctttgaatcccaattacacattggtcagtgggaaaactaagggcctccaacaggcaaattcagggaggataggtttcagggaatataaatttatttaatattagtggtctttaagtataaacttgatgtaattggtttgggagggggcagtgatgatgacttctgaaacaaaatttggatttccttttaggaaaagtagaaagcatagacttacaagtctaacaggagataggagagagtcactcataaaaaatgcaaattgatgaacgtactattgtgatacattagttgaatggatgaaacttttttaaagtttcagatgaactcccataatgaatgatgaatttgtgatgagggataacctggaagtggtattcacacattatgctacaataaaaggttctaccgtggagaggattttgacacattcagtaactaatggaacacaccgtcaacatgaattcgcaccttacatgacagaagtgattcagggattcctatgaatagaaatgctgagaaggaacgcattttattgcagaagctaaaaagctaaagtaccagtcatctagagagaaggaaattaatgtttcttaataatcctgttaaatgtttgattgtttttggaatgtgttattgtaaagatgtcatgcaggacatgtatatgttgtctgttgtaaaatgttaacgaatactttgttcagggctcactctctctttgtcatgaaagccagctccttgtggcgaggtaaagtggaattccaataaagaaattccttaaatcaaaaaaactgtgagt

SEQ ID NO: 327909 - DNA, 2408 bp, Homo sapiens
gtgatgtgtgtgggaaaacgttcagaaacaatgcaggcctcaaagtccacaggaggctccatactggggaaaaaccatataagtgtgatgtgtgtgggaaagcctatatctcacgctctagccttaaaaatcacaaaggaatccaccttggggagaagccctataaatgtagctattgtgagaaatccttcaactacagctctgcccttgaacagcataaaaggattcataccagggaaaaaccctttgggtgtgatgagtgtggtaaagctttcagaaataattctggccttaaagtacataaacgaatccacactggggaacgaccttacaaatgtgaagaatgtgggaaagcatacatctctctctcgagccttataaatcataaaagtgtacaccctggggagaagccctttaagtgtgacgagtgtgagaaggccttcatcacataccgaacccttacaaaccacaaaaaagttcatcttggggagaagccctacaaatgtgatgtgtgtgagaaatcttttaattacacatcgctcctttctcagcacagaagggtccacactagagagaaaccctatgaatgtgacaggtgtgagaaggtcttcagaaacaactcaagccttaaagttcataaaagaatccatactggggagaggccctatgaatgtgatgtgtgtggaaaagcctacatctcacactcaagccttattaaccataagagtacccaccctggcaggacaccccatacatgtgatgaatgtggaaaagcttttttctcaagcagaactcttataagccataaaagagtccatcttggggagaaacccttcaagtgtgttgagtgtgggaaatctttcagttacagctctctcctttctcagcacaagaggatccacacaggggagaaaccctatgtgtgtgataggtgtgggaaggccttcaggaacagctcaggcctcacagtgcataaaaggatccacacaggtgagaaaccctatgaatgtgatgagtgtgggaaggcatacatctcacactcaagtcttatcaatcataaaagtgtccaccaggggaagcagccctataattgtgagtgtgggaaatccttcaattatagatcagtccttgaccagcacaaaaggatccacactggaaagaagccataccgatgtaatgagtgtggtaaggcttttaatatcagatcaaatctcaccaagcataaaagaacccatactggagaggaatctttaaatgtgatatatgtgggaagttatagtggcacatcccagaagagaacctatgagggagggaatgccctggatgggggcaggatgaggatgcctctgtagcaggcagagcttaccaagtctctccgaactcaaatggaagaaataccttatgaatgtaagaatgtagggggtcatggcttgtaatttacacagtgtaaatgaaaccatcctagaggattatgaggaatcctttctatgtgattttcaatcatagcaagcaagaaaggctccagtgtcaaggtagttcagctcttacaggatataaaacagtccatacttgagagaaaaacttagatctgagtgatggaatgtgaagcaaatcttcaaaatcagtagacatttctggacataaaacacagatgaggaaagggcttcaattagaagttacgtaatcaccatcagaaagttcatgtttggtaaattctgttactagaaatgtaggaaattcaggtatagctttgaatcccaattacacattggtcagtgggaaaactaagggcctccaacaggcaaattcagggaggataggtttcagggaatataaatttatttaatattagtggtctttaagtataaacttgatgtaattggtttgggagggggcagtgatgatgacttctgaaacaaaatttggatttccttttaggaaaagtagaaagcatagacttacaagtctaacaggagataggagagagtcactcataaaaaatgcaaattgatgaacgtactattgtgatacattagttgaatggatgaaacttttttaaagtttcagatgaactcccataatgaatgatgaatttgtgatgagggataacctggaagtggtattcacacattatgctacaataaaaggttctaccgtggagaggattttgacacattcagtaactaatggaacacaccgtcaacatgaattcgcaccttacatgacagaagtgattcagggattcctatgaatagtttatgctgtacagcataaactattatagacactggtatattttttccccaagtaaacaagatgagaatgacaggattcagcttgtctggcaaagttaggcttttcctttagaaaggcagtacgttgggagagaagttacatgtaatcaaccc

SEQ ID NO: 327910 - DNA, 529 bp, Homo sapiens
cccatgcaatcagtcacctccataaggtttaaagtgatgacctctgctctgtcgttctgttgcttggctcccacactaccagtccccactgctgaccagtcttcctgctgttccttctcagaatcttacaagggcccctctttctctgctttcccttgagcagggatattctgcaagctcatctgcctttccaattccatgtcctctccctgactgacttcattcctacctgtggcttgaaccatcaccgacagatggatgactctcaaacctgtatctcctattaaagtttctcccctgagcctcagaactttatattcatctgcctactgaacagctccatctagatactccaacggcatctcaccctccacatgtccacagataaactcatcttttaccctcagacctgatcatttcttcagcctctcccatcttacctgtggtgggaagtgggaacttatccagacccaaaacctctccctcccgctccagcaagctaccagctagttgtcctcatgcctggtcc

SEQ ID NO: 327911 - DNA, 1225 bp, Homo sapiens
ttggatatcttctagattcttcaaactcaatatatctaatgttgaatgctttccatctttcccttaaacatgttcttcctcctctattctcagtcttaatgaatataacagtttactcagtcacccaagccagagtctgggaatgatttttgagtccttctcctgtactattggcctcatccaatttttcacaaagtcgccatccctgcaggcttccatcatctctctccaggttattgctgcaatagtcatcttcacaactgttgctgcttgtattcactcttgccccagttcattctagcaccatggcacacacctgaaataccagctagtggggaggctgaggctggaggattgcttgaacccaggagttcaagaccagcctggacaatatagcaagaccctcttaagaaaaaatgcaaatctcatgtttctccattacttaaaatctgtcattggcttcctgttgcttttattttattttatttagttagtaattttgagacacagtctcattctgtcacccaggctggagtgcagtggtgcaatctcagctcactgcaacctctgcctcctgggttcaagcaattctcgtgcctcagcctcccaagtagctgggataacaggcgtgtgccatcatgcctggctcattttttttctttttgtatttttagtagaggcagggtttcatcttgttgaccaggctggtctcgaaccgctgacctcaaatgatccacccaccttggcctcccaaagtgctgggattacaggcatgagccactgcacccagccaacttcctattgcttttaaaataaagtccaacattattgatgaagctcaaaagccacttcataatctgaagaactccatttctctagatatattggattcctttccctgaaaaggagaaagttcttcccttttggtcctatttacattctgtttcctcagcttggaatattcttttccctaactcttctggtttactctatttacctttctgtttttaacttaaatattcctccttcaaggaatatttaatgaataaatacaggattggctatggaaaatcaacttcctcataattttgttacttgtttatagttatgccctcagagatattgcaggtttggttccagattgccacaacaaagtgaatatctcaataaagcaagtaatgtgaattttatggtttcccagtgcatataaacattgcttatacta

SEQ ID NO: 327912 - DNA, 598 bp, Homo sapiens
agtgcgatattctggtttcctatgtcactggaggtcagctactacagttttctacataaaaatgactgatcacaaaatgtgtcatatattatcagaagaacagaaggcaagctagttattggatttcaaaagctataaatctctacaatttaaacaagatctacaggatctcaagaaccttaaaagttctacatattttccattttaacttgttgctatctttgatcgcctaaaagattgcatatttttttaaagttatttttcctcttcctgttaatgacacctgctacaataagactttaaggccttttataaatgtatttataaggcaaaagttctaccaagctatatgagtttcaaattcctactaaaaaaaagactagaagaaaaatcaattcaatatccatactggccacaccaactacactgagaataaactccagggtttactttgtgggaagtgccatttactattagacaatgaaactttctacaacagatccttaaactataggaaaatgtcctcagggctctggcttagaaggtttaattattagctttaaaatccacactagggcaaagaagtctccaaattctg

SEQ ID NO: 327913 - DNA, 2599 bp, Homo sapiens
  misc_feature (1378)..(1378): n is a, c, g, or t
  misc_feature (1940)..(1940): n is a, c, g, or t
aaaattggatggaaagaaattctgtgtgctcccaggattccagttccttaccggaggttggtgccgtctgagtctgaaaagctgccctcttgccgtgttcatgctttggtagaacaccttcagagccttggcaagctctcggtcagagccagcttgctgtgtgcacatttggctcatctccccggcggatggcagttgcacagtcatcccgctgatcttcagagtgttggaaggcttcggggctgaggtggaaaaaggtaacattgatttatgtatctctttctctgggcatctctatatttattttggtggcattctactgcatcagcatttatcaggcaccagtttggatccatccaagggaaaggggaaatctcacagggcagaagaaatgtccggcattttttgtttatgaaagaagatacgaattaactcatttaaaagtttgtttcttaaaagacaaatacacatcccaaatgtaggagtctagggataagctaaacagccaagactggagcagtctctcaccttgaccagaagcagttttcgcaagtgatgctttgagaagcacgttctcctctctcagggctctgttaatgttcctgagcggttccgtctcctgctctagcttgagcagcttcagataaagttctggtatctggtttgatgctgcctaccagaaaacatgtcagtttcgtcttttgttgtatcatctgcatatcctttgagactggcaatgtttgctaccatgggaaaatcaaatgggatgggagtgtgtgtatggtgagcagagtttaagcccctcagggtacacaggagtaaataaagaaaacgtttgttaagggggaaggaacgtcaagcagccgtcctcagagattttctagccacctgggatgcccactttagtgtcctatgtacacacctggcttatatccttcacagtggaaattttcttggtgtctaccaggatgtggccttcacctgtgaccatgaggcccagctgagagcagctcagctcggtgcagccttctgtaatggggagagacacagtcaaagaaagaaacatcccagtcgcccagctccagtgtcagcttcatgcagtaggccagcgactggagccagatgtgagctgagcccaagcggacgacctcgacaggatcccagaaagggtcgtcatctcgagccacagggccgtgatctccatctagaaagcgctggtaaagttcctgcattaggaatttcctattgatgaacttggcttttgaccatatccacacctggaaacacagaggggtccacacccagtgcacagcagatccaggacaacagcctgccgctgtcttcctcctcactgggtgaggacagggcctctgtcagnactggctctggagaggaaacaaacctgaagccacaggaggagggattccagagggattccagccgccctctccagctggaagaagtcgtaatcgaacctgctcaggtcctcactgccccactccgaagaaaccccacgtacaggtgaggtcagaggagtgaagtgacttgcccaagaccacacagtgagtcaggagcaggcctgtccctccagcagtggtgccatgttgtccccaagccatggtggcagaggagctggtgtgaacgccccatcctgccacgtctgtgatgtgggcacctcacatgactgtcccctcccagctcttgggggggacctaggacattctgtgagcctgcaggaaagtttaccaaatgctgcagctttgtcctggtggtgatgggcaccccgttaacggcaaccttgcatttgctatgtggagtgaccgtcactttaccgtcggcatttgtgaaggaagcgtgtttatctgaaattctaagaagatgagagtcaaagacacccagcaaacggcggtttccgtgagcaggtaggctgacctttctcntgtgcacaggagggaaggtctacagctgcggaggatggcaggtggcatctcggggcctcctgtgtgctgtggcccatgatgcatggggacagcagcgggcgcagaaggaccctgcccttggggagcacggagagctgggagacagcaggcaagggcttcattaacagaacgaacaccagctgagggcctagcactgcggggagccggccaaggccacactggagtcctcccgctcccaggccagcgggatggggtggtgggaagatggcagcaagcaagcttcagaagagacgctcaggaggcgactcttaacgagcctcacctactccggggttggagcccaggaagcaaaccagcactgcaccctagatttcagccagaggacgaaagccctgccctcagctttctcagaccagccctggagtaggtggcccggggagacctgggcagtgtccctgcttgtcctgcagactgtgtggctctgcagacctctagatggaggaggcacaattctctaatgctggacgaggacactgatcatggaaactcaccccaaaccttgaatcgtgatagcatttgaggcagcctgaccggtgccacatgaacctgaaaggaatcaagatataatttattttgaaaataaatcagacactttcaga

SEQ ID NO: 327914 - DNA, 956 bp, Homo sapiens
atggggtttcccagggctcctgcggggcctcctgagggagcccttggggtcactccacagtctgggctttctgtagtccggtgggtcagggctccaagcaccaggagagatccagggatgcgcttatgtttgggccacccccggtgggcttgttcgttcagcccccttcgtttcctggcctgctctacttatatctgtttgtgaagaattattacacagaatctagaaaccagctttcccttttctcccagggttggagcccaggaagcaaaccagcactgcaccctagatttcagccagaggacgaaagccctgccctcagctttctcagaccagccctggagtaggtggcccggggagacctgggcagtgtccctgcttgtcctgcagactgtgtggctctgcagacctctagatggaggaggcacaattctctaatgctggacgaggacactgatcatggaaactcaccccaaaccttgaatcgtgatagcatttgaggcagcctgaccggtgccacatgaacctgaaaggaatcaagatataatttattttgaaaataaatcagacactttcagaatttgagcgtaagaagttaacatgtctgatgcgttggaagtgacgttttctctacagtgggatggtactgaagggatttttccagttgggattttcaatcataatggtacttagacatacttttctttctgccttgtgtgtggggggaagagcggggatgttcctaacttttaaaaagttccaccttcttcatgagcattctggaggaagacaccattaggtctgggccttaggagacccactgaatactggccacagcagaggttctggtgtttgaagctccgtttctgtgtagtgactgaccccaaggagtgcagacatgtcaccccccacatccccacatcccacggccatctcgcacggagccctcccggccg

SEQ ID NO: 327915 - DNA, 579 bp, Homo sapiens
atggggtttcccagggctcctgcggggcctcctgagggagcccttggggtcactccacagtctgggctttctgtagtccggtgggtcagggctccaagcaccaggagagatccagggatgcgcttatgtttgggccacccccggtgggcttgttcgttcagcccccttcgtttcctggcctgctctacttatatctgtttgtgaagaattattacacagaatctagaaaccagctttcccttttctcccagggttggagcccaggaagcaaaccagcactgcaccctagatttcagccagaggacgaaagccctgccctcagctttctcagaccagccctggagtaggtggcccggggagacctgggcagtgtccctgcttgtcctgcagactgtgtggctctgcagacctctagatggaggaggcacaattctctaatgctggacgaggacactgatcatggaaactcaccccaaaccttgaatcgtgatagcatttgaggcagcctgaccggtgccacatgaacctgaaaggaatcaagatataatttattttgaaaataaatcagacactttcaga

SEQ ID NO: 327916 - DNA, 2210 bp, Homo sapiens
aaaattggatggaaagaaattctgtgtgctcccaggattccagttccttaccggaggttggtgccgtctgagtctgaaaagctgccctcttgccgtgttcatgctttggtagaacaccttcagagccttggcaagctctcggtcagagccagcttgctgtgtgcacatttggctcatctccccggcggatggcagttgcacagtcatcccgctgatcttcagagtgttggaaggcttcggggctgaggtggaaaaaggtaacattgatttatgtatctctttctctgggcatctctatatttattttggtggcattctactgcatcagcatttatcaggcaccagtttggatccatccaagggaaaggggaaatctcacagggcagaagaaatgtccggcattttttgtttatgaaagaagatacgaattaactcatttaaaagtttgtttcttaaaagacaaatacacatcccaaatgtaggagtctagggataagctaaacagccaagactggagcagtctctcaccttgaccagaagcagttttcgcaagtgatgctttgagaagcacgttctcctctctcagggctctgttaatgttcctgagcggttccgtctcctgctctagcttgagcagcttcagataaagttctggtatctggtttgatgctgcctaccagaaaacatgtcagtttcgtcttttgttgtatcatctgcatatcctttgagactggcaatgtttgctaccatgggaaaatcaaatgggatgggagtgtgtgtatggtgagcagagtttaagcccctcagggtacacaggagtaaataaagaaaacgtttgttaagggggaaggaacgtcaagcagccgtcctcagagattttctagccacctgggatgcccactttagtgtcctatgtacacacctggcttatatccttcacagtggaaattttcttggtgtctaccaggatgtggccttcacctgtgaccatgaggcccagctgagagcagctcagctcggtgcagccttctgtaatggggagagacacagtcaaagaaagaaacatcccagtcgcccagctccagtgtcagcttcatgcagtaggccagcgactggagccagatgtgagctgagcccaagcggacgacctcgacaggatcccagaaagggtcgtcatctcgagccacagggccgtgatctccatctagaaagcgctggtaaagttcctgcattaggaatttcctattgatgaacttggcttttgaccatatccacacctggaaacacagaggaaagcagagagacacagtgtgaaatcgctgctctcagatcagcacacgggagaggccagcagtcaggagggggctcaccgagtttgtctgcactcgctccctccgcagccgccctctccagctggaagaagtcgtaatcgaacctgctcaggtcctcactgccccactccgaagaaaccccacgtacaggtgaggtcagaggagtgaagtgacttgcccaagaccacacagtgagtcaggagcaggcctgtccctccagcagtggtgccatgttgtccccaagccatggtggcagaggagctggtgtgaacgccccatcctgccacgtctgtgatgtgggcacctcacatgactgtcccctcccagctcttgggggggacctaggacattctgtgagcctgcaggaaagtttaccaaatgctgcagctttgtcctggtggtgatgggcaccccgttaacggcaaccttgcatttgctatgtggagtgaccgtcactttaccgtcggcatttgtgaaggaagcgtgtttatctgaaattctaagaagatgagagtcaaagacacccagcaaacggcggtttccgtgagcagggttggagcccaggaagcaaaccagcactgcaccctagatttcagccagaggacgaaagccctgccctcagctttctcagaccagccctggagtaggtggcccggggagacctgggcagtgtccctgcttgtcctgcagactgtgtggctctgcagacctctagatggaggaggcacaattctctaatgctggacgaggacactgatcatggaaactcaccccaaaccttgaatcgtgatagcatttgaggcagcctgaccggtgccacatgaacctgaaaggaatcaagatataatttattttgaaaataaatcagacactttcaga

SEQ ID NO: 327917 - DNA, 1144 bp, Homo sapiens
tcagaaactccacttgctcctccagcttcatgcagtaggccagcgactggagccagatgtgagctgagcccaagcggacgacctcgacaggatcccagaaagggtcgtcatctcgagccacagggccgtgatctccatctagaaagcgctggtaaagttcctgcattaggaatttcctattgatgaacttggcttttgaccatatccacacctggaaacacagaggaaagcagagagacacagtgtgaaatcgctgctctcagatcagcacacgggagaggccagcagtcaggagggggctcaccgagtttgtctgcactcgctccctccgcagccgccctctccagctggaagaagtcgtaatcgaacctgctcaggtcctcactgccccactccgaagaaaccccacgtacaggtgaggtcagaggagtgaagtgacttgcccaagaccacacagtgagtcaggagcaggcctgtccctccagcagtggtgccatgttgtccccaagccatggtggcagaggagctggtgtgaacgccccatcctgccacgtctgtgatgtgggcacctcacatgactgtcccctcccagctcttgggggggacctaggacattctgtgagcctgcaggaaagtttaccaaatgctgcagctttgtcctggtggtgatgggcaccccgttaacggcaaccttgcatttgctatgtggagtgaccgtcactttaccgtcggcatttgtgaaggaagcgtgtttatctgaaattctaagaagatgagagtcaaagacacccagcaaacggcggtttccgtgagcagggttggagcccaggaagcaaaccagcactgcaccctagatttcagccagaggacgaaagccctgccctcagctttctcagaccagccctggagtaggtggcccggggagacctgggcagtgtccctgcttgtcctgcagactgtgtggctctgcagacctctagatggaggaggcacaattctctaatgctggacgaggacactgatcatggaaactcaccccaaaccttgaatcgtgatagcatttgaggcagcctgaccggtgccacatgaacctgaaaggaatcaagatataatttattttgaaaataaatcagacactttcaga

SEQ ID NO: 327918 - DNA, 2587 bp, Homo sapiens
aaaattggatggaaagaaattctgtgtgctcccaggattccagttccttaccggaggttggtgccgtctgagtctgaaaagctgccctcttgccgtgttcatgctttggtagaacaccttcagagccttggcaagctctcggtcagagccagcttgctgtgtgcacatttggctcatctccccggcggatggcagttgcacagtcatcccgctgatcttcagagtgttggaaggcttcggggctgaggtggaaaaaggtaacattgatttatgtatctctttctctgggcatctctatatttattttggtggcattctactgcatcagcatttatcaggcaccagtttggatccatccaagggaaaggggaaatctcacagggcagaagaaatgtccggcattttttgtttatgaaagaagatacgaattaactcatttaaaagtttgtttcttaaaagacaaatacacatcccaaatgtaggagtctagggataagctaaacagccaagactggagcagtctctcaccttgaccagaagcagttttcgcaagtgatgctttgagaagcacgttctcctctctcagggctctgttaatgttcctgagcggttccgtctcctgctctagcttgagcagcttcagataaagttctggtatctggtttgatgctgcctaccagaaaacatgtcagtttcgtcttttgttgtatcatctgcatatcctttgagactggcaatgtttgctaccatgggaaaatcaaatgggatgggagtgtgtgtatggtgagcagagtttaagcccctcagggtacacaggagtaaataaagaaaacgtttgttaagggggaaggaacgtcaagcagccgtcctcagagattttctagccacctgggatgcccactttagtgtcctatgtacacacctggcttatatccttcacagtggaaattttcttggtgtctaccaggatgtggccttcacctgtgaccatgaggcccagctgagagcagctcagctcggtgcagccttctgtaatggggagagacacagtcaaagaaagaaacatcccagtcgcccagctccagtgtcagcttcatgcagtaggccagcgactggagccagatgtgagctgagcccaagcggacgacctcgacaggatcccagaaagggtcgtcatctcgagccacagggccgtgatctccatctagaaagcgctggtaaagttcctgcattaggaatttcctattgatgaacttggcttttgaccatatccacacctggaaacacagaggaaagcagagagacacagtgtgaaatcgctgctctcagatcagcacacgggagaggccagcagtcaggagggggctcaccgagtttgtctgcactcgctccctccgcagccgccctctccagctggaagaagtcgtaatcgaacctgctcaggtcctcactgccccactccgaagaaaccccacgtacaggtgaggtcagaggagtgaagtgacttgcccaagaccacacagtgagtcaggagcaggcctgtccctccagcagtggtgccatgttgtccccaagccatggtggcagaggagctggtgtgaacgccccatcctgccacgtctgtgatgtgggcacctcacatgactgtcccctcccagctcttgggggggacctaggacattctgtgagcctgcaggaaagtttaccaaatgctgcagctttgtcctggtggtgatgggcaccccgttaacggcaaccttgcatttgctatgtggagtgaccgtcactttaccgtcggcatttgtgaaggaagcgtgtttatctgaaattctaagaagatgagagtcaaagacacccagcaaacggcggtttccgtgagcagggttggagcccaggaagcaaaccagcactgcaccctagatttcagccagaggacgaaagccctgccctcagctttctcagaccagccctggagtaggtggcccggggagacctgggcagtgtccctgcttgtcctgcagactgtgtggctctgcagacctctagatggaggaggcacaattctctaatgctggacgaggacactgatcatggaaactcaccccaaaccttgaatcgtgatagcatttgaggcagcctgaccggtgccacatgaacctgaaaggaatcaagatataatttattttgaaaataaatcagacactttcagaatttgagcgtaagaagttaacatgtctgatgcgttggaagtgacgttttctctacagtgggatggtactgaagggatttttccagttgggattttcaatcataatggtacttagacatacttttctttctgccttgtgtgtggggggaagagcggggatgttcctaacttttaaaaagttccaccttcttcatgagcattctggaggaagacaccattaggtctgggccttaggagacccactgaatactggccacagcagaggttctggtgtttgaagctccgtttctgtgtagtgactgaccccaaggagtgcagacatgtcaccccccacatccccacatcccacggccatctcgcacggagccctcccggccg

SEQ ID NO: 327919 - DNA, 1667 bp, Homo sapiens
  misc_feature (1378)..(1378): n is a, c, g, or t
aaaattggatggaaagaaattctgtgtgctcccaggattccagttccttaccggaggttggtgccgtctgagtctgaaaagctgccctcttgccgtgttcatgctttggtagaacaccttcagagccttggcaagctctcggtcagagccagcttgctgtgtgcacatttggctcatctccccggcggatggcagttgcacagtcatcccgctgatcttcagagtgttggaaggcttcggggctgaggtggaaaaaggtaacattgatttatgtatctctttctctgggcatctctatatttattttggtggcattctactgcatcagcatttatcaggcaccagtttggatccatccaagggaaaggggaaatctcacagggcagaagaaatgtccggcattttttgtttatgaaagaagatacgaattaactcatttaaaagtttgtttcttaaaagacaaatacacatcccaaatgtaggagtctagggataagctaaacagccaagactggagcagtctctcaccttgaccagaagcagttttcgcaagtgatgctttgagaagcacgttctcctctctcagggctctgttaatgttcctgagcggttccgtctcctgctctagcttgagcagcttcagataaagttctggtatctggtttgatgctgcctaccagaaaacatgtcagtttcgtcttttgttgtatcatctgcatatcctttgagactggcaatgtttgctaccatgggaaaatcaaatgggatgggagtgtgtgtatggtgagcagagtttaagcccctcagggtacacaggagtaaataaagaaaacgtttgttaagggggaaggaacgtcaagcagccgtcctcagagattttctagccacctgggatgcccactttagtgtcctatgtacacacctggcttatatccttcacagtggaaattttcttggtgtctaccaggatgtggccttcacctgtgaccatgaggcccagctgagagcagctcagctcggtgcagccttctgtaatggggagagacacagtcaaagaaagaaacatcccagtcgcccagctccagtgtcagcttcatgcagtaggccagcgactggagccagatgtgagctgagcccaagcggacgacctcgacaggatcccagaaagggtcgtcatctcgagccacagggccgtgatctccatctagaaagcgctggtaaagttcctgcattaggaatttcctattgatgaacttggcttttgaccatatccacacctggaaacacagaggggtccacacccagtgcacagcagatccaggacaacagcctgccgctgtcttcctcctcactgggtgaggacagggcctctgtcagnactggctctggagaggaaacaaacctgaagccacaggaggagggattccagagggattccaggtaggtcgtttttagaccataaatatcaggtaaaactagcaactccttttctgagcaactggaaaagcaaaagcaaaaatcagcagacaagtcgttccatgtatgatgtctcttcataaaaaggacattctcaggactctgaaaacagattccatctttgttggccacatgaacctgaaaggaatcaagatataatttattttgaaaataaatcagacactttcaga

SEQ ID NO: 327920 - DNA, 335 bp, Homo sapiens
gacattctcaggactctgaaaacagattccatctttgttggcctcaaagtgaagaaccgtagtgctctcctagaggcggcaccaccattaaataagaatgtgggggggcgggcgcggtggctcacggctgtaatcccagcactgtgggaggccgaggcgggcggatcacgaggtcaggagatcgagaccagcctggctaacagtgaaaccccgtctctaccaaaaatacaaaaaattagccgggagtgctggcgggcacctgtagtcccagctacttgggaggctgaggcaggagaacgctttaacccaggagatggagcttgcagggagccaag

SEQ ID NO: 327921 - DNA, 421 bp, Homo sapiens
ggtgccaaaaaaatgggcctctggcgctgcaccgccctccttcctgagctctgctttcacgcccattcttccttttgctcccgctctgctccagtcgggcctgatttctgagcagagtgacatgctctcctttctggtccatggattcagggatggactcgattgccagctttcaccctgaaagctctctggagtggtttgcccagctgtggccccctcacctggactgaccagctcctccccgctgttgacctccttcttgcaagaagggtgttgtttcaatgtgctttgcaagagtggggtggggtgaggaacaaggatgagataaaagagtgacaaaagagtagcagctagaaaaaggacaaaggtagtgtctacccacacatgtctttaccttatctaaaaatacttcccattggca

SEQ ID NO: 327922 - DNA, 206 bp, Homo sapiens
ttgccacctggtgtggaggtcaggagcgtgggctctgggccctgcctgttggttctaatcccagttctgctatttgctggctgaatggctgtggacaggggacttgcttggggccttggttttcccctctattaagtgggttcatatcagtacctacttggtaaggctcttgtgagggtccccaaacacccataaagtgccaaggt

SEQ ID NO: 327923 - DNA, 145 bp, Homo sapiens
catgtatgccaatatggaataaaacactatctcactgccttagctgcttagttgtgggtaaagctgaacatctttaataagggtttttaatcttttgaaatcaaacttctctaacttttcctttaacgacttctgtaacattttt

SEQ ID NO: 327924 - DNA, 680 bp, Homo sapiens
atccttagattccacaattttgcagattattattagaaatatcaatccattgactcatctatttgatactttatttcaacataccaaattaaaagactgctagaggtaggcacaatgtcaacagtagcaagtggctggccagaatgcctgaccacgaagaagaagtgtttaagcgcaatggcctgggactatttaatgctagtgcaaataaccttatccatgccaatggctcttgacagcatctttgctttgcaatccatgacaataactggtgttctttcataagactcttcctaagtcatctcagaaagttatgctcagcattcttctctaagaagacaaagcaaatatccatctaaaatgattgcaagttgtgtcattaatttcattataatgctacataagtaaaggtgcatatgcttccttgagattggccacttgtccatacacattgtattacagtccttacctggtcaattttatccaaatcatcttcctcagtttacctaaattttgtgagttgtttactcattttttttcctttctgctttggacagctttttttatttttcttttttttttatttccataggttttggggggaacaggtggtatttggttccccatataccaccaaataagtaagttctttagtggtgatttgtgagattttgctgcac

SEQ ID NO: 327925 - DNA, 308 bp, Homo sapiens
ccatcataagtctgttaaggatagactagttactatgtttttgtggatttttctaggaatacccaatactgaactgtaaacagtaagcacagttgggggatcagattcaagttgatggttggctcagaagacaatggtgctggattaaggagacatggatttgtataatatgaaaatgggtattggttaagtgtagcaataatcgaggcaggaggttattgatagccttagaaagcagagatggcaagcataactacttagtgatgttgaaggttcactgggaacagaggggagttggaagacaggga

SEQ ID NO: 327926 - DNA, 349 bp, Homo sapiens
tcaggggaggcttctcaggtccgaaggaggaggaagacttactaggagaagatgagcaaggtgtgggtagagaggattctgggcaaatgcaaaggccccatggtgggagagagcctaatgtgtttgaaaacctaaaaggaaggcatttggcatctggactggagcccagagacaaatgtggggtgagaggtgctgtagaggtaagtggcaccagaccatgcaaggccagttcaagttctgtctattcttatgacgcagctggttttgcagggtgggtgatgtagtgtgtgtgcaatttatttgtgtgtttgagggaaagacagatggtttggagaacagatttgagggg

SEQ ID NO: 327927 - DNA, 517 bp, Homo sapiens
tactactactgctcgaattcaagcttctaacgatgtacggggacatgttataagacaaatggacagggagggcatgatcgaccttgctgggcacagaaaacaccctcgtggagtacactaatttgaactggactggtctcagtgtgagcacttggcacactttactaaacacatatacaaccccaccgtgagtcaactttaaagtaaacattaaagattcttgtgatacaatcatttttggaaaagtgtactttatcattttaacaaagcagtatggttgggaatgagacaattctctattttacagtgtatacagatacaactatttcccctaatagggtgggaaaaatcgctactcatgattactcctaaatttgtgaagtttatagttctattgtctttaaatgtaactcatgtttatttcaaaaacattcacaaatatagaaaagtatacaaaacaaaacagtaagattgtctgtaatcacatcatatgggaataaaaaacaaaaataatttc

SEQ ID NO: 327928 - DNA, 481 bp, Homo sapiens
tactactactgctcgaattcaagcttctaacgatgtacggggagaccttgctgggcacagaaaacaccctcgtggagtacactaatttgaactggactggtctcagtgtgagcacttggcacactttactaaacacatatacaaccccaccgtgagtcaactttaaagtaaacattaaagattcttgtgatacaatcatttttggaaaagtgtactttatcattttaacaaagcagtatggttgggaatgagacaattctctattttacagtgtatacagatacaactatttcccctaatagggtgggaaaaatcgctactcatgattactcctaaatttgtgaagtttatagttctattgtctttaaatgtaactcatgtttatttcaaaaacattcacaaatatagaaaagtatacaaaacaaaacagtaagattgtctgtaatcacatcatatgggaataaaaaacaaaaataatttc

SEQ ID NO: 327929 - DNA, 1932 bp, Homo sapiens
agcgggccgcgcgcagcaacgcgcacttcctctccaggaatccgcggagggagcgcaggctcgaagagctcctggacgcagaggccctgcccttgccagacggcgcagacatgtcagaacaaagtaaggatctgagcgaccctaactttgcagccgaggcccccaactccgaggtgcacagcagccctggggtttcggagggggttcctccgtccgcgaccctggcagagccgcagagccctcctctaggcccgacggccgctccgcaggccgcgccgcctccccaggccccgaacgacgagggcgacccgaaggccctgcagcaggctgcggaggagggccgcgcccaccaggccccgagcgcggcccagccgggcccggcaccgccagccccggcgcagctggtgcagaaggcgcacgagctcatgtggtacgtgctggtcaaggaccagaagaagatgatcatctggtttccagacatggtgaaagatgtcatcggcagctacaagaagtggtgcaggagcatcctccggcgcaccagcctcatcctcgcccgggtgttcgggctgcacctgaggctaaccagcctgcacaccatggagtttgcgctggtcaaagcgctggagcccgaggagctggacagggtggcgctgagcaaccgcatgcccatgacaggcctcctgctcatgatcctgagcctcatctacgtgaagggccgcggcgccagagagagcgccgtctggaacgtgctgcgcatcctggggctgcggccctggaagaagcactccaccttcggggacgtgcggaagctcatcactgaggagttcgtccaaatgaattacctgaagtaccagcgcgtcccatacgtggagccgcccgaatacgagttcttttggggctcccgggccagccgcgaaatcaccaagatgcaaatcatggagttcctggccagggtctttaagaaagacccccaggcctggccctcccgatacagagaagctctggaggaggccagagctctgcgggaggctaatcccactgcccactaccctcgcagcagtgtctctgaggactagcaaagtctggaggcagatgaatggtttctgaccctcaccagggctgtggaagggtgggggtgggtcattatagtattcaggatttacagtgcagtattcacgtgtaacttttaagttttcagtacagtgcttttatacctttaatgcaatgttgtattcatttgggtactattgtgtagtatttaggatgtatgcatgtttgtttatatgtaagcttggttggtgctttcgcttttgtgctacctttcttggatttttgtaccagagatgtgctaaactgatgaaatacattgagaaagtttccatcttattcttttatatgggactgatgatgtgtgttggggtagactgctcctgcagagtttggaagaagtcaccagcaaagccggcctaaccaagaaaagtcaaggcccttcatgaccttgctgggcacagaaaacaccctcgtggagtacactaatttgaactggactggtctcagtgtgagcacttggcacactttactaaacacatatacaaccccaccgtgagtcaactttaaagtaaacattaaagattcttgtgatacaatcatttttggaaaagtgtactttatcattttaacaaagcagtatggttgggaatgagacaattctctattttacagtgtatacagatacaactatttcccctaatagggtgggaaaaatcgctactcatgattactcctaaatttgtgaagtttatagttctattgtctttaaatgtaactcatgtttatttcaaaaacattcacaaatatagaaaagtatacaaaacaaaacagtaagattgtctgtaatcacatcatatgggaataaaaaacaaaaataatttc

SEQ ID NO: 327930 - DNA, 1386 bp, Homo sapiens
agcgggccgcgcgcagcaacgcgcacttcctctccaggaatccgcggagggagcgcaggctcgaagagctcctggacgcagaggccctgcccttgccagacggcgcagacatgtcagaacaaagtaaggatctgagcgaccctaactttgcagccgaggcccccaactccgaggtgcacagcagccctggggtttcggagggggttcctccgtccgcgaccctggcagagccgcagagccctcctctaggcccgacggccgctccgcaggccgcgccgcctccccaggccccgaacgacgagggcgacccgaaggccctgcagcaggctgcggaggagggccgcgcccaccaggccccgagcgcggcccagccgggcccggcaccgccagccccggcgcagctggtgcagaaggcgcacgagctcatgtggtacgtgctggtcaaggaccagaagaagatgatcatctggtttccagacatggtgaaagatgtcatcggcagctacaagaagtggtgcaggagcatcctccggcgcaccagcctcatcctcgcccgggtgttcgggctgcacctgaggctaaccagcctgcacaccatggagtttgcgctggtcaaagcgctggagcccgaggagctggacagggtggcgctgagcaaccgcatgcccatgacaggcctcctgctcatgatcctgagcctcatctacgtgaagggccgcggcgccagagagagcgccgtctggaacgtgctgcgcatcctggggctgcggccctggaagaagcactccaccttcggggacgtgcggaagctcatcactgaggagttcgtccaaatgaattacctgaagtaccagcgcgtcccatacgtggagccgcccgaatacgagttcttttggggctcccgggccagccgcgaaatcaccaagatgcaaatcatggagttcctggccagggtctttaagaaagacccccaggcctggccctcccgatacagagaagctctggaggaggccagagctctgcgggaggctaatcccactgcccactaccctcgcagcagtgtctctgaggactagcaaagtctggaggcagatgaatggtttctgaccctcaccagggctgtggaagggtgggggtgggtcattatagtattcaggatttacagtgcagtattcacgtgtaacttttaagttttcagtacagtgcttttatacctttaatgcaatgttgtattcatttgggtactattgtgtagtatttaggatgtatgcatgtttgtttatatgtaagcttggttggtgctttcgcttttgtgctacctttcttggatttttgtaccagagatgtgctaaactgatgaaatacattgagaaagtttccatctta

SEQ ID NO: 327931 - DNA, 1649 bp, Homo sapiens
agcgggccgcgcgcagcaacgcgcacttcctctccaggaatccgcggagggagcgcaggctcgaagagctcctggacgcagaggccctgcccttgccagacggcgcagacatgtcagaacaaagtaaggatctgagcgaccctaactttgcagccgaggcccccaactccgaggtgcacagcagccctggggtttcggagggggttcctccgtccgcgaccctggcagagccgcagagccctcctctaggcccgacggccgctccgcaggccgcgccgcctccccaggccccgaacgacgagggcgacccgaaggccctgcagcaggctgcggaggagggccgcgcccaccaggccccgagcgcggcccagccgggcccggcaccgccagccccggcgcagctggtgcagaaggcgcacgagctcatgtggtacgtgctggtcaaggaccagaagaagatgatcatctggtttccagacatggtgaaagatgtcatcggcagctacaagaagtggtgcaggagcatcctccggcgcaccagcctcatcctcgcccgggtgttcgggctgcacctgaggctaaccagcctgcacaccatggagtttgcgctggtcaaagcgctggagcccgaggagctggacagggtggcgctgagcaaccgcatgcccatgacaggcctcctgctcatgatcctgagcctcatctacgtgaagggccgcggcgccagagagagcgccgtctggaacgtgctgcgcatcctggggctgcggccctggaagaagcactccaccttcggggacgtgcggaagctcatcactgaggagttcgtccaaatgaattacctgaagtaccagcgcgtcccatacgtggagccgcccgaatacgagttcttttggggctcccgggccagccgcgaaatcaccaagatgcaaatcatggagttcctggccagggtctttaagaaagacccccaggcctggccctcccgatacagagaagctctggaggaggccagagctctgcgggaggctaatcccactgcccactaccctcgcagcagtgtctctgaggactagcaaagtctggaggcagatgaatggtttctgaccctcaccagggctgtggaagggtgggggtgggtcattatagtattcaggatttacagtgcagtattcacgtgtaacttttaagttttcagtacagtgcttttatacctttaatgcaatgttgtattcatttgggtactattgtgtagtatttaggatgtatgcatgtttgtttatatgtaagcttggttggtgctttcgcttttgtgctacctttcttggatttttgtaccagagatgtgctaaactgatgaaatacattgagaaagtttccatcttattcttttatatgggactgatgatgtgtgttggggtagactgctcctgcagagtttggaagaagtcaccagcaaagccggcctaaccaagaaaagtcaaggcccttcatgaccttgctgggcacagaaaacaccctcgtggagtacactaatttgaactggactggtctcagtgtgagcacttggcacactttactaaacacatatacaaccccaccgtgagtcaactttaaagtaaacattaaagattcttgtgatacaatca

SEQ ID NO: 327932 - DNA, 1664 bp, Homo sapiens
  misc_feature (1095)..(1095): n is a, c, g, or t
  misc_feature (1112)..(1112): n is a, c, g, or t
  misc_feature (1116)..(1116): n is a, c, g, or t
  misc_feature (1128)..(1128): n is a, c, g, or t
  misc_feature (1130)..(1130): n is a, c, g, or t
  misc_feature (1132)..(1132): n is a, c, g, or t
  misc_feature (1136)..(1136): n is a, c, g, or t
  misc_feature (1138)..(1138): n is a, c, g, or t
  misc_feature (1140)..(1140): n is a, c, g, or t
  misc_feature (1143)..(1143): n is a, c, g, or t
  misc_feature (1149)..(1149): n is a, c, g, or t
  misc_feature (1155)..(1155): n is a, c, g, or t
  misc_feature (1158)..(1158): n is a, c, g, or t
  misc_feature (1163)..(1163): n is a, c, g, or t
  misc_feature (1170)..(1170): n is a, c, g, or t
  misc_feature (1173)..(1173): n is a, c, g, or t
  misc_feature (1175)..(1175): n is a, c, g, or t
  misc_feature (1178)..(1179): n is a, c, g, or t
  misc_feature (1190)..(1190): n is a, c, g, or t
  misc_feature (1193)..(1193): n is a, c, g, or t
agcgggccgcgcgcagcaacgcgcacttcctctccaggaatccgcggagggagcgcaggctcgaagagctcctggacgcagaggccctgcccttgccagacggcgcagacatgtcagaacaaagtaaggatctgagcgaccctaactttgcagccgaggcccccaactccgaggtgcacagcagccctggggtttcggagggggttcctccgtccgcgaccctggcagagccgcagagccctcctctaggcccgacggccgctccgcaggccgcgccgcctccccaggccccgaacgacgagggcgacccgaaggccctgcagcaggctgcggaggagggccgcgcccaccaggccccgagcgcggcccagccgggcccggcaccgccagccccggcgcagctggtgcagaaggcgcacgagctcatgtggtacgtgctggtcaaggaccagaagaagatgatcatctggtttccagacatggtgaaagatgtcatcggcagctacaagaagtggtgcaggagcatcctccggcgcaccagcctcatcctcgcccgggtgttcgggctgcacctgaggctaaccagcctgcacaccatggagtttgcgctggtcaaagcgctggagcccgaggagctggacagggtggcgctgagcaaccgcatgcccatgacaggcctcctgctcatgatcctgagcctcatctacgtgaagggccgcggcgccagagagagcgccgtctggaacgtgctgcgcatcctggggctgcggccctggaagaagcactccaccttcggggacgtgcggaagctcatcactgaggagttcgtccaaatgaattacctgaagtaccagcgcgtcccatacgtggagccgcccgaatacgagttcttttggggctcccgggccagccgcgaaatcaccaagatgcaaatcatggagttcctggccagggtctttaagaaagacccccaggcctggccctcccgatacagagaagctctggaggaggccagagctctgcgggaggctaatcccactgcccactaccctcgcagcagtgtctctgaggaaaaaaaaaaaaatgaaaaaaaanaaataatataaataaanaaanaaaaaaagaaanananaaanananaanaatganaaaaanaanaaaanaaaaaanaananaannagaaaaataanaanaataaattttaagttttcagtacagtgcttttatacctttaatgcaatgttgtattcatttgggtactattgtgtagtatttaggatgtatgcatgtttgtttatatgtaagcttggttggtgctttcgcttttgtgctacctttcttggatttttgtaccagagatgtgctaaactgatgaaatacattgagaaagtttccatcttattcttttatatgggactgatgatgtgtgttggggtagactgctcctgcagagtttggaagaagtcaccagcaaagccggcctaaccaagaaaagtcaaggcccttcatgaccttgctgggcacagaaaacaccctcgtggagtacactaatttgaactggactggtctcagtgtgagcacttggcacactttactaaacacatatacaaccccaccgtgagtcaactttaaagtaaacattaaagattcttgtgatacaatca

SEQ ID NO: 327933 - DNA, 584 bp, Homo sapiens
agaggaggggccaggagacagcacaacagcaaaggctacagagtcatgggttcagagttcagaggaggggccaggagacagcgcgacagcaaaggctacagagacacggggtcagagttcagaggaggggccaggagacagcacaacagcaaaggctacagagacatgggttcagagttcagaggagggcccaggagacagcgcgacagcaaaggctacagagacacgggcatctttgaggaagagaatgggatagaaggacagggaggaagtctaactggttccagcccacagacggcccatagcacagcagcagagccgcctggggaagtgaccgctgcaagactcctagactcggaaaggaggggggcgagacggaatcacagggagaaatgtcacccaaacttcgagctttgaatccatttaatgactggtcattttccaagaactttctgaagcttcatggtttctaactgtattttcaaactgcccatacggcccttgtgacaggggctgcgggggagtgggggtgcatctgaattcactgtgcgaactcgaacccagtgtggcgatcctctagatca

SEQ ID NO: 327934 - DNA, 149 bp, Homo sapiens
acaggtgaggggagacaggtgaaggcaggtttgacactgaggaatagtaagagaagtaaattgcaccctcagagtacagcaatatttatagcatttgaataagatgttaaagaacattttcttttaaggaagaaattcctgtgggtctt

SEQ ID NO: 327935 - DNA, 902 bp, Homo sapiens
ctctctcctcccgccgcccaagatgccgaaaggaaagaaggccaagggaaagaaggtggctccggccccagctgtcgtgaagaagcaggaggctaagaaagtggtgaatcccctgtttgagaaaaggcctaagaattttggcattggacaggacatccagcccaaaagagacctcacccgctttgtgaaatggccccgctatatcaggttgcagcggcagagagccatcctctataagcggctgaaagtgcctcctgcgattaaccagttcacccaggccctggaccgccaaacagctactcagctgcttaagctggcccacaagtacagaccagagacaaagcaagagaagaagcagagactgttggcccgggccgagaagaaggctgctggcaaaggggacgtcccaacgaagagaccacctgtccttcgagcaggagttaacaccgtcaccaccttggtggagaacaagaaagctcagctggtggtgattgcacacgacgtggatcccatcgagctggttgtcttcttgcctgccctgtgtcgtaaaatgggggtcccttactgcattatcaagggaaaggcaagactgggacgtctagtccacaggaagacctgcaccactgtcgccttcacacaggtgaactcggaagacaaaggcgctttggctaagctggtggaagctatcaggaccaattacaatgacagatacgatgagatccgccgtcactggggtggcaatgtcctgggtcctaagtctgtggctcgtatcgccaagctcgaaaaggcaaaggctaaagaacttgccactaaactgggttaaatgtacactgttgagttttctgtacataaaaataattgaaataatacaaattttccttcagccagtaaaaaaaaaaaaa

SEQ ID NO: 327936 - DNA, 989 bp, Homo sapiens
  misc_feature (29)..(29): n is a, c, g, or t
  misc_feature (811)..(811): n is a, c, g, or t
aaacataggctaggtacgaggctgggtgntaatcggccgagggaaaggaaagaaggccaagggaaagaaggtggctccggccccagctgtcgtgaagaagcaggaggctaagaaagtggtgaatcccctgtttgagaaaaggcctaagaattttggcattggacaggacatccagcccaaaagagacctcacccgctttgtgaaatggccccgctatatcaggttgcagcggcagagagccatcctctataagcggctgaaagtgcctcctgcgattaaccagttcacccaggccctggaccgccaaacagctactcagctgcttaagctggcccacaagtacagaccagagacaaagcaagagaagaagcagagactgttggcccgggccgagaagaaggctgctggcaaaggggacgtcccaacgaagagaccacctgtccttcgagcaggagttaacaccgtcaccaccttggtggagaacaagaaagctcagctggtggtgattgcacacgacgtggatcccatcgagctggttgtcttcttgcctgccctgtgtcgtaaaatgggggtcccttactgcattatcaagggaaaggcaagactgggacgtctagtccacaggaagacctgcaccactgtcgccttcacacaggtgaactcggaagacaaaggcgctttggctaagctggtggaagctatcaggaccaattacaatgacagatacgatgagatccgccgtcactggggtggcaatgtcctgggtcctaagtctgtggctcgtatcgccagtcgaaaggaaggtaagaantgccttaactggtgaatgtccgtgggttttgtctcaaaattggataacaatttttcaaaaaaaaaaaaaaaaaagaccgaaaatacagggagaaaaacaaagagaaagattttaataagtatagtgtggaaaaagagaaggtggccaccacacatttttgtttttatttcagacgaac

SEQ ID NO: 327937 - DNA, 917 bp, Homo sapiens
  misc_feature (29)..(29): n is a, c, g, or t
aaacataggctaggtacgaggctgggtgntaatcggccgagggaaaggaaagaaggccaagggaaagaaggtggctccggccccagctgtcgtgaagaagcaggaggctaagaaagtggtgaatcccctgtttgagaaaaggcctaagaattttggcattggacaggacatccagcccaaaagagacctcacccgctttgtgaaatggccccgctatatcaggttgcagcggcagagagccatcctctataagcggctgaaagtgcctcctgcgattaaccagttcacccaggccctggaccgccaaacagctactcagctgcttaagctggcccacaagtacagaccagagacaaagcaagagaagaagcagagactgttggcccgggccgagaagaaggctgctggcaaaggggacgtcccaacgaagagaccacctgtccttcgagcaggagttaacaccgtcaccaccttggtggagaacaagaaagctcagctggtggtgattgcacacgacgtggatcccatcgagctggttgtcttcttgcctgccctgtgtcgtaaaatgggggtcccttactgcattatcaagggaaaggcaagactgggacgtctagtccacaggaagacctgcaccactgtcgccttcacacaggtgaactcggaagacaaaggcgctttggctaagctggtggaagctatcaggaccaattacaatgacagatacgatgagatccgccgtcactggggtggcaatgtcctgggtcctaagtctgtggctcgtatcgccaagctcgaaaaggcaaaggctaaagaacttgccactaaactgggttaaatgtacactgttgagttttctgtacataaaaataattgaaataatacaaattttccttcagccagtaaaaaaaaaaaaa

SEQ ID NO: 327938 - DNA, 800 bp, Homo sapiens
ctctctcctcccgccgcccaagatgccgaaaggaaagaaggccaagggaaagaaggtggctccggccccagctgtcgtgaagaagcaggaggctaagaaagtggtgaatcccctgtttgagaaaaggcctaagaattttggcattggacaggacatccagcccaaaagagacctcacccgctttgtgaaatggccccgctatatcaggttgcagcggcagagagccatcctctataagcggctgaaagtgcctcctgcgattaaccagttcacccaggccctggaccgccaaacagctactcagctgcttaagctggcccacaagtacagaccagagacaaagcaagagaagaagcagagactgttggcccgggccgagaagaaggctgctggcaaaggggacgtcccaacgaagagaccacctgtccttcgagcaggagttaacaccgtcaccaccttggtggagaacaagaaagctcagctggtggtgattgcacacgacgtggatcccatcgagctggttgtcttcttgcctgccctgtgtcgtaaaatgggggtcccttactgcattatcaagggaaaggcaagactgggacgtctagtccacaggaagacctgcaccactgtcgccttcacacaggtgaactcggaagacaaaggcgctttggctaagctggtggaagctatcaggaccaattacaatgacagatacgatgagatccgccgtcactggggtggtctggtctaagctgggtcgatgccagtcgaaggaagtatgcctaacggtgtacgagatgtgt

SEQ ID NO: 327939 - DNA, 1037 bp, Homo sapiens
ctctctcctcccgccgcccaagatgccgaaaggaaagaaggccaagggaaagaaggtggctccggccccagctgtcgtgaagaagcaggaggctaagaaagtggtgaatcccctgtttgagaaaaggcctaagaattttggcattggacaggacatccagcccaaaagagacctcacccgctttgtgaaatggccccgctatatcaggttgcagcggcagagagccatcctctataagcggctgaaagtgcctcctgcgattaaccagttcacccaggccctggaccgccaaacagctactcagctgcttaagctggcccacaagtacagaccagagacaaagcaagagaagaagcagagactgttggcccgggccgagaagaaggctgctggcaaaggggacgtcccaacgaagagaccacctgtccttcgagcaggagttaacaccgtcaccaccttggtggagaacaagaaagctcagctggtggtgattgcacacgacgtggatcccatcgagctggttgtcttcttgcctgccctgtgtcgtaaaatgggggtcccttactgcattatcaagggaaaggcaagactgggacgtctagtccacaggaagacctgcaccactgtcgccttcacacaggtgaactcggaagacaaaggcgctttggctaagctggtggaagctatcaggaccaattacaatgacagatacgatgagatccgccgtcactggggtgtgggcagcgctgcccacgaagtgtacctccacactcttgacacaccagctcttgtggaccctcggaccactgcacgcaggctaagcacagggctagagactggccgagcatggggccaggtcctgagcagctgctgcctggaatgactgctcttcccagcacttccccagctgtctccctggcttctttcagatcacgactttcgtgcgttacactcctcagaaacgtagcccgtgggtcgtgtgctccacctctaccaaattctggcattcctcttcactacaccccacttcgtgcagg

SEQ ID NO: 327940 - DNA, 1003 bp, Homo sapiens
  misc_feature (838)..(838): n is a, c, g, or t
  misc_feature (844)..(844): n is a, c, g, or t
  misc_feature (961)..(961): n is a, c, g, or t
ctctctcctcccgccgcccaagatgccgaaaggaaagaaggccaagggaaagaaggtggctccggccccagctgtcgtgaagaagcaggaggctaagaaagtggtgaatcccctgtttgagaaaaggcctaagaattttggcattggacaggacatccagcccaaaagagacctcacccgctttgtgaaatggccccgctatatcaggttgcagcggcagagagccatcctctataagcggctgaaagtgcctcctgcgattaaccagttcacccaggccctggaccgccaaacagctactcagctgcttaagctggcccacaagtacagaccagagacaaagcaagagaagaagcagagactgttggcccgggccgagaagaaggctgctggcaaaggggacgtcccaacgaagagaccacctgtccttcgagcaggagttaacaccgtcaccaccttggtggagaacaagaaagctcagctggtggtgattgcacacgacgtggatcccatcgagctggttgtcttcttgcctgccctgtgtcgtaaaatgggggtcccttactgcattatcaagggaaaggcaagactgggacgtctagtccacaggaagacctgcaccactgtcgccttcacacaggtgaactcggaagacaaaggcgctttggctaagctggtggaagctatcaggaccaattacaatgacagatacgatgagatccgccgtcactggggtggcaatgtcctgggtcctaagtctgtggctcgtatcgccaagctcgaaaaggcaaaggctaaagaacttgccactaaactgggttaaatgtccctggagaantctggnacatacatactccgaccataccaatttcctcagcagggaacaaacaaaaaaaaccggggacaaagcgggggcggaaaagggatcaaagcgacggcacacggtcagaccatctgcaanaggaacggcgcccaaggggagatacgacacccatcagcgcag

SEQ ID NO: 327941 - DNA, 1052 bp, Homo sapiens
  misc_feature (29)..(29): n is a, c, g, or t
aaacataggctaggtacgaggctgggtgntaatcggccgagggaaaggaaagaaggccaagggaaagaaggtggctccggccccagctgtcgtgaagaagcaggaggctaagaaagtggtgaatcccctgtttgagaaaaggcctaagaattttggcattggacaggacatccagcccaaaagagacctcacccgctttgtgaaatggccccgctatatcaggttgcagcggcagagagccatcctctataagcggctgaaagtgcctcctgcgattaaccagttcacccaggccctggaccgccaaacagctactcagctgcttaagctggcccacaagtacagaccagagacaaagcaagagaagaagcagagactgttggcccgggccgagaagaaggctgctggcaaaggggacgtcccaacgaagagaccacctgtccttcgagcaggagttaacaccgtcaccaccttggtggagaacaagaaagctcagctggtggtgattgcacacgacgtggatcccatcgagctggttgtcttcttgcctgccctgtgtcgtaaaatgggggtcccttactgcattatcaagggaaaggcaagactgggacgtctagtccacaggaagacctgcaccactgtcgccttcacacaggtgaactcggaagacaaaggcgctttggctaagctggtggaagctatcaggaccaattacaatgacagatacgatgagatccgccgtcactggggtgtgggcagcgctgcccacgaagtgtacctccacactcttgacacaccagctcttgtggaccctcggaccactgcacgcaggctaagcacagggctagagactggccgagcatggggccaggtcctgagcagctgctgcctggaatgactgctcttcccagcacttccccagctgtctccctggcttctttcagatcacgactttcgtgcgttacactcctcagaaacgtagcccgtgggtcgtgtgctccacctctaccaaattctggcattcctcttcactacaccccacttcgtgcagg

SEQ ID NO: 327942 - DNA, 974 bp, Homo sapiens
  misc_feature (796)..(796): n is a, c, g, or t
ctctctcctcccgccgcccaagatgccgaaaggaaagaaggccaagggaaagaaggtggctccggccccagctgtcgtgaagaagcaggaggctaagaaagtggtgaatcccctgtttgagaaaaggcctaagaattttggcattggacaggacatccagcccaaaagagacctcacccgctttgtgaaatggccccgctatatcaggttgcagcggcagagagccatcctctataagcggctgaaagtgcctcctgcgattaaccagttcacccaggccctggaccgccaaacagctactcagctgcttaagctggcccacaagtacagaccagagacaaagcaagagaagaagcagagactgttggcccgggccgagaagaaggctgctggcaaaggggacgtcccaacgaagagaccacctgtccttcgagcaggagttaacaccgtcaccaccttggtggagaacaagaaagctcagctggtggtgattgcacacgacgtggatcccatcgagctggttgtcttcttgcctgccctgtgtcgtaaaatgggggtcccttactgcattatcaagggaaaggcaagactgggacgtctagtccacaggaagacctgcaccactgtcgccttcacacaggtgaactcggaagacaaaggcgctttggctaagctggtggaagctatcaggaccaattacaatgacagatacgatgagatccgccgtcactggggtggcaatgtcctgggtcctaagtctgtggctcgtatcgccagtcgaaaggaaggtaagaantgccttaactggtgaatgtccgtgggttttgtctcaaaattggataacaatttttcaaaaaaaaaaaaaaaaaagaccgaaaatacagggagaaaaacaaagagaaagattttaataagtatagtgtggaaaaagagaaggtggccaccacacatttttgtttttatttcagacgaac

SEQ ID NO: 327943 - DNA, 406 bp, Homo sapiens
agtaaaattcacagggaataatcctgcattcaaatacctctcttacagtcaagtctgcctttatcttggctgttctggctgaagtttatagcactttttcctgttaaaatgaatgtgagggactttccagattcttttgttttactggaattaggctttgaaataataggttatttattagtccagaatgttttcttatcctgagaatttctggtacacaaattattcttaaaacagaaaagtatttttatgttttgaaagaaaaattttacatttgaagaggatttaaataaataaattataacaatattcttgattccaagaactttagataatagtatttcttctgagatatgagagaaaaagtgttcaagttgttagggaagcagcttgttttttagtgcat

SEQ ID NO: 327944 - DNA, 220 bp, Homo sapiens
tatacagaaattaaatagattttgtatgttgatattgtaccctgtgaccttgctgaactcacttgttaattctaggaggtttttgtatagatttcttggggttttctatggaggccatcatatcatctgcaaataaggatagttttatttattgtttttataccaatgccttatatttctttttcttgtcttatcgtgctggctggaacttccaatatgt

SEQ ID NO: 327945 - DNA, 900 bp, Homo sapiens
tgttacgcgagaatcgcagatattggggaattggttgagtggaaggtttatagccagagcaaacggttatatataatgctcatagcgcgactatagcagtaacaattagcaatgcaagagaaaaactagctgaccagattcgttcacactctaattttctactcactcgcttatgtaatcccaacgttttatgtcctcgatcttctttccctggctcgcttacgctgccacggtgacgcgtacagaaagcacgggaaacaataagattggaaagtgaaaaagactgggtggtagtgttttacaattacatcaccattagtaataagggatagttgatatgagtagtaacacccggatttttgggaataatgacacacacctggtctgggacgtgatagaattgctgaatgatgaaaggaaattttaatttttattgggttccaaggaccaccaatagaaaataagattaaatatgcggtattcttgacattacatccgtcctaagaggtgaagtatttttgatccggggaaaacatttgttaaccttgtttttaatacttagaggagtgccctggagcctgtctgccctcatgattgtctggagaggtgagaagaccaggagtagtaaaacagaccaaagatttcccaatttctcttggggaagtggctgggattggggatggtggccaatgggagcccaactttattggtaaaattctgattattttatgagaagaatgtatttttgtatcatttgtgtaattaaaaaattaagcaaatgaataatatgaacacttcagttcttaaacattgacaatgtatatactggatgtaataaaacgggatgctgtcaagaggatctggctcttgcaataacatacggatcgtctgtattataaa

SEQ ID NO: 327946 - DNA, 886 bp, Homo sapiens
catagttagtggttggttctaccgagcgaagtttgacttggagggaacatgggaccagggacacctgcggctccaggtcagagatgcacctgctagtcctgcctctacaggacccaacccatcagttcctagcttgtccttctggtgagaattgagcacactatactgtggacataaagacaaaccttgctggaactgactggtggaatgtagcaggaatcggagggaagctttactcatcattccagtccagggaccaacataggaaattatattaaaattggttcttctctgcttacttccgtcctctagttgcatattcttaatcaggtaaagcatttgttaaccttgtttttaatacttagaggagtgccctggagcctgtctgccctcatgattgtctggagaggtgagaagaccaggagtagtaaaacagaccaaagatttcccaatttctcttggggaagtggctgggattggggatggtggccaatggggaaccaccttgagggggagactggcgctataggaggagaaaacgagtgggagggcgacagggggacggagaaaaggagcgagcgagagatcgaagcctgcgcgtgctaggcactgactagtagagagctcagaagggaggagccggcaaccgacagaaccatttatgaaaagtggtggatggtagtggcatactgagtcatctggcgggatgcgtagtcgcgggtccctttaatactatagtatattgataagcgagatagggcaagttgacgcgggtggcgtttgaaccgttctgggtagtctgcgatattgtgactcaagtcctcagagtggcataccgcgtccccctatgctcgcgagtccaaaaaacgtgaggatagggcgcggg

SEQ ID NO: 327947 - DNA, 918 bp, Homo sapiens
caaccaacgcggcattcgtgccccgatcgcgaacgccggtggtgacatccgttctacatacgctcaccctcctcaccttccgctcggtcacaaatcacccactcaactctaaacatcgacacgatctgtgtataagcaaattggatctatatcagaaacctctaaacatgttcggttcgagggcattggtatgatcaagcggccggacatcccgtacttctcttggcccaaaaggcacgaacctggtaagctgtccagagtgaggaacccaagggacacctgcggctccaggtcagagatgcacctgctagtcctgcctctacaggacccaacccatcagttcctagcttgtccttctggtgagaattgagcacactatactgtggacataaagacaaaccttgctggaactgactggtggaatgtagcaggaatcggagggaagctttactcatcattccagtccagggaccaacataggaaattatattaaaattggttcttctctgcttacttccgtcctctagttgcatattcttaatcaggtaaagcatttgttaaccttgtttttaatacttagaggagtgccctggagcctgtctgccctcatgattgtctggagaggtgagaagaccaggagtagtaaaacagaccaaagatttcccaatttctcttggggaagtggctgggattggggatggtggccaatgggagcccaactttattggtaaaattctgattattttatgagaagaatgtatttttgtatcatttgtgtaattaaaaaattaagcaaatgaataatatgaacacttcagttcttaaacattgacaatgtatatactggatgtaataaaacgggatgctgtcaagaggatctggctcttgcaataacatacggatcgtctgtattataaa

SEQ ID NO: 327948 - DNA, 894 bp, Homo sapiens
gtgtttgatggtacaggcgctaatgcgatcatctcctgttacaacgacgaaaatgccgacttccccgtcacctgcgcggccccccagcccccacttcaaactcaaactccagggacatggctgcgtaaggccattgaccccccgcctaaaccccccaaatttttttggcagcccttggataaaacccgggtgggaatccaagaatttttggcccaaaaggcccgaagccgtcagtgttcccaaagaaggggacacctgcggctccaggtcagagatgcacctgctagtcctgcctctacaggacccaacccatcagttcctagcttgtccttctggtgagaattgagcacactatactgtggacataaagacaaaccttgctggaactgactggtggaatgtagcaggaatcggagggaagctttactcatcattccagtccagggaccaacataggaaattatattaaaattggttcttctctgcttacttccgtcctctagttgcatattcttaatcaggtaaagcatttgttaaccttgtttttaatacttagaggagtgccctggagcctgtctgccctcatgattgtctggagaggtgagaagaccaggagtagtaaaacagaccaaagatttcccaatttctcttggggaagtggctgggattggggatggtggccaatgggagcccaactttattggtaaaattctgattattttatgagaagaatgtatttttgtatcatttgtgtaattaaaaaattaagcaaatgaataatatgaacacttcagttcttaaacattgacaatgtatatactggatgtaataaaacgggatgctgtcaagaggatctggctcttgcaataacatacggatcgtctgtattataaa

SEQ ID NO: 327949 - DNA, 871 bp, Homo sapiens
aggatagagaaaatatataatggcgggggttcactgaaggtataacaagaggaggatgcacaacataaagatatggtaagaggaccatggctactcggaggcggaggccccgcaaggtcctaatacacaccattgctatccaccccgggtggaataccaaccccttccgtggccctagaggcgcagactggtcagttgttcaaacaaaggatccaggtacgcccatggacacctgcggctccaggtcagagatgcacctgctagtcctgcctctacaggacccaacccatcagttcctagcttgtccttctggtgagaattgagcacactatactgtggacataaagacaaaccttgctggaactgactggtggaatgtagcaggaatcggagggaagctttactcatcattccagtccagggaccaacataggaaattatattaaaattggttcttctctgcttacttccgtcctctagttgcatattcttaatcaggtaaagcatttgttaaccttgtttttaatacttagaggagtgccctggagcctgtctgccctcatgattgtctggagaggtgagaagaccaggagtagtaaaacagaccaaagatttcccaatttctcttggggaagtggctgggattggggatggtggccaatgggagcccaactttattggtaaaattctgattattttatgagaagaatgtatttttgtatcatttgtgtaattaaaaaattaagcaaatgaataatatgaacacttcagttcttaaacattgacaatgtatatactggatgtaataaaacgggatgctgtcaagaggatctggctcttgcaataacatacggatcgtctgtattataaa

SEQ ID NO: 327950 - DNA, 1140 bp, Homo sapiens
caaccaacgcggcattcgtgccccgatcgcgaacgccggtggtgacatccgttctacatacgctcaccctcctcaccttccgctcggtcacaaatcacccactcaactctaaacatcgacacgatctgtgtataagcaaattggatctatatcagaaacctctaaacatgttcggttcgagggcattggtatgatcaagcggccggacatcccgtacttctcttggcccaaaaggcacgaacctggtaagctgtccagagtgaggaacccaagggacacctgcggctccaggtcagagatgcacctgctagtcctgcctctacaggacccaacccatcagttcctagcttgtccttctggtgagaattgagcacactatactgtggacataaagacaaaccttgctggaactgactggtggaatgtagcaggaatcggagggaagctttactcatcattccagtccagggaccaacataggaaattatattaaaattggttcttctctgcttacttccgtcctctagttgcatattcttaatcaggtaaagcatttgttaaccttgtttttaatacttagaggagtgccctggagcctgtctgccctcatgattgtctggagaggtgagaagaccaggagtagtaaaacagaccaaagatttcccaatttctcttggggaagtggctgggattggggatggtggccaatgggagcccaactttattggtaaaattctgattattttatgagaagaatgtatttttgtatcattgggggagtggaaaaactgagccgatcgaaggttgtgaacccttggaggtgttaagcattgagcatgacgttagcaggatggaatcaagagaccattcacacgcttgactcttgagggaggggggattaggatgagactggagtaagttgactaagcaagccaccgaaaagtttgacaaagaagccatggggacaagatcactaaacactgcactccccgctcccccctgtgtacgcgcagtgaagactgtaagcaccggtataggagaacacctctctttggctactcggcctcaccagcatacgagttatacgcgcctcaagtatcgccctcgactctgtctccgtaattagccacacgccaatca

SEQ ID NO: 327951 - DNA, 946 bp, Homo sapiens
gccgcatgcggcgtattgcggcgatacgcgctaatcactatcggtccccatccacactaactcgacccttcatcgtatcccactacacatcccttcaacccccttgctcctttaccttacatcctctacttgacccctcgctctcctctattgctccttcttgctcccatcatcacatgggcagactgttcttcctcgccccccatcgcatctactctccgtgactttctccctcgcttttcttgccgatcagcgccctcggcccgcgccctgtccaacagcgagggaataaagacacactttcaggtataaattcataggtggcacatatatatcattgcctttacaggcacccaacccaatcagttcccgctatgtccttcgtggtgagattggagcacccctcactgaggacataaaaaacgaaccttgctggaactgactggtggaatgtagcaggaatcggagggaagctttactcatcattccagtccagggaccaacataggaaattatattaaaattggttcttctctgcttacttccgtcctctagttgcatattcttaatcaggtaaagcatttgttaaccttgtttttaatacttagaggagtgccctggagcctgtctgccctcatgattgtctggagaggtgagaagaccaggagtagtaaaacagaccaaagatttcccaatttctcttggggaagtggctgggattggggatggtggccaatgggagcccaactttattggtaaaattctgattattttatgagaagaatgtatttttgtatcatttgtgtaattaaaaaattaagcaaatgaataatatgaacacttcagttcttaaacattgacaatgtatatactggatgtaataaaacgggatgctgtcaagaggatctggctcttgcaataacatacggatcgtctgtattataaa

SEQ ID NO: 327952 - DNA, 1098 bp, Homo sapiens
caaccaacgcggcattcgtgccccgatcgcgaacgccggtggtgacatccgttctacatacgctcaccctcctcaccttccgctcggtcacaaatcacccactcaactctaaacatcgacacgatctgtgtataagcaaattggatctatatcagaaacctctaaacatgttcggttcgagggcattggtatgatcaagcggccggacatcccgtacttctcttggcccaaaaggcacgaacctggtaagctgtccagagtgaggaacccaagggacacctgcggctccaggtcagagatgcacctgctagtcctgcctctacaggacccaacccatcagttcctagcttgtccttctggtgagaattgagcacactatactgtggacataaagacaaaccttgctggaactgactggtggaatgtagcaggaatcggagggaagctttactcatcattccagtccagggaccaacataggaaattatattaaaattggttcttctctgcttacttccgtcctctagttgcatattcttaatcaggtaaagcatttgttaaccttgtttttaatacttagaggagtgccctggagcctgtctgccctcatgattgtctggagaggtgagaagaccaggagtagtaaaacagaccaaagatttcccaatttctcttggggaagtggctgggattggggatggtggccaatgggagcccaactttattggtaaaattctgattattttatgagaagaatgtatttttgtatcatttgtgtaattaaaaaattaagcaaatgaatatttggaccctgaagtgttgaactttgccattggtatgaccggatggttaagaccgatccgcccctggcctctgatgagggtaattgataatcctggtcacttgctcattgcggttgggcacgtgtttgtgggtatcggattatgtccttgagtgcgtgggtccggttggcctgcatggggggtttctccagaaaaacatgggaggaatgccgcggtaggcggccgcccccgaaagcctggatagctccatctcactaggtccctgagcggagtgctcggagaaagaaccgcagag

SEQ ID NO: 327953 - DNA, 761 bp, Homo sapiens
tttgtatgtacttggctgcctgtaacggaaaacacaagtcaaactgacttaagcagtaacgcatttactggctcacataaaaaagaaatctagacgtaggcttcagagatttttgatttagggacgtaactatgtcaagggctcagatgctttccatctttacactcttgccatcaaaatcatcctcatcctaaactagtccttaaagatgaatgcgaagtagctgttaaggctgcttgcttcttcactcaggttcagtgggagggagagaaagaagtttcacatcattctctcaagaataaggaaatactttcatagatgccaccagtgaactttgtttctacttttattggcttttttggaaccaattgcttacccaagaatggaattactgttaggccaaaaaggcccatcactgttgctacagatggggttggcttgacctgagtcatctggactctgagaggaatagtagataactgaataaaatcggagttctcttaaaaggaaggctgtggtttctggggtaacttatatcctctgtagttctcaataaaaatgtatggaatgagtgaattcatgtagtaaaaatgtattgaattgtcaggcgtatgctcagcaccataatagttaagtagaatacaaaatcaaatagaatgtggtccttgccttcaaataatttaaaatctagtgagagagccaaattaacggaatattaaaattgttttaaaaatcagttgattaaaataatttaaaagatg

SEQ ID NO: 327954 - DNA, 4340 bp, Homo sapiens
gcccccgcctcgcgccgcgcgcacgtgactgcgcccccggccccgcccccggcctgccccccgcccccactggccgctcggccgcgcgcgggtcggccggctctatggggaaagcggcggctccgagccgaggcggcggctgtggcggccgctcccgcgggctctcgtcgctgttcacggttgtcccctgcctgtcgtgccacacggcggcgccgggcatgagcgcttccacgtccggctccgggccggagcccaagccccagccccagcccgtgcccgaaccggagcggggaccgctgtcagaacaggtgtcggaggcagtttcggaggcagtgccaagatcggaacctgtgtccgagacgacgtctgagccggagccaggggctgggcagccatcggaactgctgcaggggtcgcggccggggtcagagtcaagctcaggtgtaggggctgggcccttcactaaggccgcatcggagccgctctcccgggcggtggggagcgcgacctttctcagacccgagtcaggatcgctgccagcgttaaagcccctgcctcttctgcgaccaggacaggcgaagactcctcttggggttccaatgtcggggactggcacgacctccagtgccccactggccttactgcctctggacagcttcgagggctggcttctcaagtggaccaactatctgaagggctaccagcgccgctggttcgtgctgggcaatggtttgctctcttactacagaaatcagggtgaaatggcccacacgtgccgtggaaccatcaacctgtccaccgcgcacattgacacggaggactcttgtggtatcttgctgaccagtggggccaggagctaccacctcaaggccagctcagaggtggaccggcagcagtggatcaccgccctggagctggccaaggccaaggctgtccgcgtgatgaacactcattcagatgactctggggacgacgacgaggctaccaccccagccgacaagagcgagctgcaccacaccctgaagaatctttccctgaagttagatgacctcagcacgtgcaatgacctcatcgccaagcacggcgccgcactccagcgctccctgacagagctggacggcctcaagatcccatctgagagtggggagaagctgaaggtggtgaatgagcgggccaccctcttccgcatcacatccaatgctatgatcaacgcctgcagggacttcttggaactagcagagatacacagtcggaaatggcagcgggcactgcagtatgagcaggagcagcgcgtgcacttggaggaaaccattgagcagctggcgaagcagcacaacagcctcgagcgggccttccacagtgcccctggccggccggccaacccctccaagagcttcattgagggaagcctcttgactcccaaaggagaggacagtgaggaagatgaagataccgagtactttgatgccatggaagactccacatccttcatcaccgtgatcaccgaggccaaggaagacagcagaaaagctgaaggtagcaccgggacaagttccgtggactggagctcagcagacaatgtactagatggtgcctcgctcgtgcccaagggttcatccaaagtcaagaggcgagtccgcattcccaacaagcccaactacagccttaacctctggagcatcatgaagaactgcatcggccgggagctctccaggatccccatgccggtgaacttcaatgagcccctgtccatgctccagcggctgacagaggacctggagtaccaccacctgctggacaaggcagtgcactgcaccagctcagtggagcagatgtgcctggtggccgccttctctgtgtcctcctactccaccacagtgcaccgcatcgccaagcccttcaaccccatgctgggggagaccttcgagctggaccgcctcgacgacatgggcctgcgctccctctgtgagcaggtgagccaccaccccccctcagctgcgcactacgtgttctccaagcatggctggagcctctggcaggagatcaccatctccagcaagttccggggaaaatacatctccatcatgccgctaggtgccatccacttagaattccaggccagtgggaatcactacgtgtggaggaagagcacctcaactgttcacaacatcatcgtgggcaagctctggatcgaccagtcaggggacatcgagattgtgaaccataagaccaatgaccggtgccagctgaagttcctgccctacagctacttctccaaagaggcagcccggaaggtgacaggagtggtgagtgacagccagggcaaggcccattacgtgctgtccggctcgtgggatgaacaaatggagtgctccaaggtcatgcatagcagtcccagcagccccagctctgacgggaagcagaagacagtgtaccagaccctgtcagccaagctgctgtggaagaagtacccgctgccggagaacgcggagaacatgtactacttctcagagctggccctgaccctcaacgagcacgaggagggcgtagcgccaaccgacagccgcctgcggcccgaccagcggctgatggagaagggccgttgggacgaggccaataccgagaagcagcggctggaggagaagcagcgcctgtcgcggcgccggcggctggaggcctgcgggccgggcagcagctgcagctcggaggaagagaaggaggcggatgcctacacgccactgtggtttgagaagaggctggatccgctgaccggggagatggcctgtgtgtacaagggcggctactgggaggccaaggagaagcaagactggcatatgtgccccaacatcttctgagcgccacccttgcaacaaatacaggcgcctgcacagcctggcccacctgttcattaatgcactcaatttagtactgaatggtctttctcccagcccattcccagcccttcctatttcctttcctattttttttttctccccacactttcttgggactcccaccttggaaggaggaagggctgacctgggttctctccagcccccaggtgcgccgggtcacccgtgccccttcattatggacctgggccctaccggaacccctgccccagttaccacaactcaggccggctggcccgggccatgggctgcgcaaatcaccagcccccaacccagggaggaactggcccctcctagggagcctcttcgacttttttagaaaaatgatctccatttctttccagccatgatgtttagtaaatatttttagtaccgcacttagcagacagctttccaagtgtgctttcttgccacaaaagtgtcctggcaagagccccttatttttaagacatcaggaagccagaccgctttgagttgggagaattttgtagctcaacatatcaagtcctcgatggtatctgagctgcccacacccccacctgccaaggccccacagagcccaaaacagaagggggctgccccagcccagcagagcacagagtttctggagctcccatccacagatgcaggagggggtactgatggtaacccccatgtggatttgagggcagcagtccctggcctcaccctagccagcctgggtggctccctagccccaagaggccaggaagggctggaaggcagggcctgcaggtgctccccgccctgagacccaggccccaaatcagcaataatgaacaaacccttggcccagcctgggctggtgacctgggcaccagagaccttgcatccctcctcatcctaggaggcccctaggggtgccccatctcagtgtcccctgaactctttatttgcctaatttatatatatatatatgagatatataaatatatataaaatagctattttgcttaaatttctacagtatgtaaaagtgaaaaaatgatgaagacgggtgcacctgtctgagtttggccctcatgtgagctgtgcccttccctctcctcatgcccccttccagcggcttctgccaaccatggggggctggaccaccatggccactgacccagcccctcagaatcccacactccaatcctttccatttcagtttagtcctaaaagttcatcacagggtctttctttctactccaggactggttttgtttttatatatataaaaaaaaaaagtgaaaacaccaatgtgtgaaatgccttacaatgcccactggagaggcggggcggggtggggcaggatggccccactggggctcctacagagctgtggaatgtacctctccccaacactgttttgttagcgagcaccttttgaccagtaataaaaaaccttggctttggagttttccactg

SEQ ID NO: 327955 - DNA, 4155 bp, Homo sapiens
gcccccgcctcgcgccgcgcgcacgtgactgcgcccccggccccgcccccggcctgccccccgcccccactggccgctcggccgcgcgcgggtcggccggctctatggggaaagcggcggctccgagccgaggcggcggctgtggcggccgctcccgcgggctctcgtcgctgttcacggttgtcccctgcctgtcgtgccacacggcggcgccgggcatgagcgcttccacgtccggctccgggccggagcccaagccccagccccagcccgtgcccgaaccggagcggggaccgctgtcagaacaggtgtcggaggcagtttcggaggcagtgccaagatcggaacctgtgtccgagacgacgtctgagccggagccaggggctgggcagccatcggaactgctgcaggggtcgcggccggggtcagagtcaagctcaggtgtaggggctgggcccttcactaaggccgcatcggagccgctctcccgggcggtggggagcgcgacctttctcagacccgagtcaggatcgctgccagcgttaaagcccctgcctcttctgcgaccaggacaggcgaagactcctcttggggttccaatgtcggggactggcacgacctccagtgccccactggccttactgcctctggacagcttcgagggctggcttctcaagtggaccaactatctgaagggctaccagcgccgctggttcgtgctgggcaatggtttgctctcttactacagaaatcagggtgaaatggcccacacgtgccgtggaaccatcaacctgtccaccgcgcacattgacacggaggactcttgtggtatcttgctgaccagtggggccaggagctaccacctcaaggccagctcagaggtggaccggcagcagtggatcaccgccctggagctggccaaggccaaggctgtccgcgtgatgaacactcattcagatgactctggggacgacgacgaggctaccaccccagccgacaagagcgagctgcaccacaccctgaagaatctttccctgaagttagatgacctcagcacgtgcaatgacctcatcgccaagcacggcgccgcactccagcgctccctgacagagctggacggcctcaagatcccatctgagagtggggagaagctgaaggtggtgaatgagcgggccaccctcttccgcatcacatccaatgctatgatcaacgcctgcagggacttcttggaactagcagagatacacagtcggaaatggcagcgggcactgcagtatgagcaggagcagcgcgtgcacttggaggaaaccattgagcagctggcgaagcagcacaacagcctcgagcgggccttccacagtgcccctggccggccggccaacccctccaagagcttcattgagggaagcctcttgactcccaaaggagaggacagtgaggaagatgaagataccgagtactttgatgccatggaagactccacatccttcatcaccgtgatcaccgaggccaaggaagacagcagaaaagctgaaggtagcaccgggacaagttccgtggactggagctcagcagacaatgtactagatggtgcctcgctcgtgcccaagggttcatccaaagtcaagaggcgagtccgcattcccaacaagcccaactacagccttaacctctggagcatcatgaagaactgcatcggccgggagctctccaggatccccatgccggtgaacttcaatgagcccctgtccatgctccagcggctgacagaggacctggagtaccaccacctgctggacaaggcagtgcactgcaccagctcagtggagcagatgtgcctggtggccgccttctctgtgtcctcctactccaccacagtgcaccgcatcgccaagcccttcaaccccatgctgggggagaccttcgagctggaccgcctcgacgacatgggcctgcgctccctctgtgagcaggtgagccaccaccccccctcagctgcgcactacgtgttctccaagcatggctggagcctctggcaggagatcaccatctccagcaagttccggggaaaatacatctccatcatgccgctaggtgccatccacttagaattccaggccagtgggaatcactacgtgtggaggaagagcacctcaactgttcacaacatcatcgtgggcaagctctggatcgaccagtcaggggacatcgagattgtgaaccataagaccaatgaccggtgccagctgaagttcctgccctacagctacttctccaaagaggcagcccggaagggagaacgcggagaacatgtactacttctcagagctggccctgaccctcaacgagcacgaggagggcgtagcgccaaccgacagccgcctgcggcccgaccagcggctgatggagaagggccgttgggacgaggccaataccgagaagcagcggctggaggagaagcagcgcctgtcgcggcgccggcggctggaggcctgcgggccgggcagcagctgcagctcggaggaagagaaggaggcggatgcctacacgccactgtggtttgagaagaggctggatccgctgaccggggagatggcctgtgtgtacaagggcggctactgggaggccaaggagaagcaagactggcatatgtgccccaacatcttctgagcgccacccttgcaacaaatacaggcgcctgcacagcctggcccacctgttcattaatgcactcaatttagtactgaatggtctttctcccagcccattcccagcccttcctatttcctttcctattttttttttctccccacactttcttgggactcccaccttggaaggaggaagggctgacctgggttctctccagcccccaggtgcgccgggtcacccgtgccccttcattatggacctgggccctaccggaacccctgccccagttaccacaactcaggccggctggcccgggccatgggctgcgcaaatcaccagcccccaacccagggaggaactggcccctcctagggagcctcttcgacttttttagaaaaatgatctccatttctttccagccatgatgtttagtaaatatttttagtaccgcacttagcagacagctttccaagtgtgctttcttgccacaaaagtgtcctggcaagagccccttatttttaagacatcaggaagccagaccgctttgagttgggagaattttgtagctcaacatatcaagtcctcgatggtatctgagctgcccacacccccacctgccaaggccccacagagcccaaaacagaagggggctgccccagcccagcagagcacagagtttctggagctcccatccacagatgcaggagggggtactgatggtaacccccatgtggatttgagggcagcagtccctggcctcaccctagccagcctgggtggctccctagccccaagaggccaggaagggctggaaggcagggcctgcaggtgctccccgccctgagacccaggccccaaatcagcaataatgaacaaacccttggcccagcctgggctggtgacctgggcaccagagaccttgcatccctcctcatcctaggaggcccctaggggtgccccatctcagtgtcccctgaactctttatttgcctaatttatatatatatatatgagatatataaatatatataaaatagctattttgcttaaatttctacagtatgtaaaagtgaaaaaatgatgaagacgggtgcacctgtctgagtttggccctcatgtgagctgtgcccttccctctcctcatgcccccttccagcggcttctgccaaccatggggggctggaccaccatggccactgacccagcccctcagaatcccacactccaatcctttccatttcagtttagtcctaaaagttcatcacagggtctttctttctactccaggactggttttgtttttatatatataaaaaaaaaaagtgaaaacaccaatgtgtgaaatgccttacaatgcccactggagaggcggggcggggtggggcaggatggccccactggggctcctacagagctgtggaatgtacctctccccaacactgttttgttagcgagcaccttttgaccagtaataaaaaaccttggctttggagttttccactg

SEQ ID NO: 327956 - DNA, 3052 bp, Homo sapiens
agcagggccacgccaggcgcctgcctctccccacagcacagccaggatggggcctggagaaggccggcagcagcagaggagaccctgggagtcagggatggacaccaggcctgcagggacttcttggaactagcagagatacacagtcggaaatggcagcgggcactgcagtatgagcaggagcagcgcgtgcacttggaggaaaccattgagcagctggcgaagcagcacaacagcctcgagcgggccttccacagtgcccctggccggccggccaacccctccaagagcttcattgagggaagcctcttgactcccaaaggagaggacagtgaggaagatgaagataccgagtactttgatgccatggaagactccacatccttcatcaccgtgatcaccgaggccaaggaagacagcagaaaagctgaaggtagcaccgggacaagttccgtggactggagctcagcagacaatgtactagatggtgcctcgctcgtgcccaagggttcatccaaagtcaagaggcgagtccgcattcccaacaagcccaactacagccttaacctctggagcatcatgaagaactgcatcggccgggagctctccaggatccccatgccggtgaacttcaatgagcccctgtccatgctccagcggctgacagaggacctggagtaccaccacctgctggacaaggcagtgcactgcaccagctcagtggagcagatgtgcctggtggccgccttctctgtgtcctcctactccaccacagtgcaccgcatcgccaagcccttcaaccccatgctgggggagaccttcgagctggaccgcctcgacgacatgggcctgcgctccctctgtgagcaggtgagccaccaccccccctcagctgcgcactacgtgttctccaagcatggctggagcctctggcaggagatcaccatctccagcaagttccggggaaaatacatctccatcatgccgctaggtgccatccacttagaattccaggccagtgggaatcactacgtgtggaggaagagcacctcaactgttcacaacatcatcgtgggcaagctctggatcgaccagtcaggggacatcgagattgtgaaccataagaccaatgaccggtgccagctgaagttcctgccctacagctacttctccaaagaggcagcccggaagggagaacgcggagaacatgtactacttctcagagctggccctgaccctcaacgagcacgaggagggcgtagcgccaaccgacagccgcctgcggcccgaccagcggctgatggagaagggccgttgggacgaggccaataccgagaagcagcggctggaggagaagcagcgcctgtcgcggcgccggcggctggaggcctgcgggccgggcagcagctgcagctcggaggaagagaaggaggcggatgcctacacgccactgtggtttgagaagaggctggatccgctgaccggggagatggcctgtgtgtacaagggcggctactgggaggccaaggagaagcaagactggcatatgtgccccaacatcttctgagcgccacccttgcaacaaatacaggcgcctgcacagcctggcccacctgttcattaatgcactcaatttagtactgaatggtctttctcccagcccattcccagcccttcctatttcctttcctattttttttttctccccacactttcttgggactcccaccttggaaggaggaagggctgacctgggttctctccagcccccaggtgcgccgggtcacccgtgccccttcattatggacctgggccctaccggaacccctgccccagttaccacaactcaggccggctggcccgggccatgggctgcgcaaatcaccagcccccaacccagggaggaactggcccctcctagggagcctcttcgacttttttagaaaaatgatctccatttctttccagccatgatgtttagtaaatatttttagtaccgcacttagcagacagctttccaagtgtgctttcttgccacaaaagtgtcctggcaagagccccttatttttaagacatcaggaagccagaccgctttgagttgggagaattttgtagctcaacatatcaagtcctcgatggtatctgagctgcccacacccccacctgccaaggccccacagagcccaaaacagaagggggctgccccagcccagcagagcacagagtttctggagctcccatccacagatgcaggagggggtactgatggtaacccccatgtggatttgagggcagcagtccctggcctcaccctagccagcctgggtggctccctagccccaagaggccaggaagggctggaaggcagggcctgcaggtgctccccgccctgagacccaggccccaaatcagcaataatgaacaaacccttggcccagcctgggctggtgacctgggcaccagagaccttgcatccctcctcatcctaggaggcccctaggggtgccccatctcagtgtcccctgaactctttatttgcctaatttatatatatatatatgagatatataaatatatataaaatagctattttgcttaaatttctacagtatgtaaaagtgaaaaaatgatgaagacgggtgcacctgtctgagtttggccctcatgtgagctgtgcccttccctctcctcatgcccccttccagcggcttctgccaaccatggggggctggaccaccatggccactgacccagcccctcagaatcccacactccaatcctttccatttcagtttagtcctaaaagttcatcacagggtctttctttctactccaggactggttttgtttttatatatataaaaaaaaaaagtgaaaacaccaatgtgtgaaatgccttacaatgcccactggagaggcggggcggggtggggcaggatggccccactggggctcctacagagctgtggaatgtacctctccccaacactgttttgttagcgagcaccttttgaccagtaataaaaaaccttggctttggagttttccactg

SEQ ID NO: 327957 - DNA, 3269 bp, Homo sapiens
tccaccatgattgtgagatctccccagccacgtggagctcttgaagaacttcctttaacatctcttatggaatgactctggggacgacgacgaggctaccaccccagccgacaagagcgagctgcaccacaccctgaagaatctttccctgaagttagatgacctcagcacgtgcaatgacctcatcgccaagcacggcgccgcactccagcgctccctgacagagctggacggcctcaagatcccatctgagagtggggagaagctgaaggtggtgaatgagcgggccaccctcttccgcatcacatccaatgctatgatcaacgcctgcagggacttcttggaactagcagagatacacagtcggaaatggcagcgggcactgcagtatgagcaggagcagcgcgtgcacttggaggaaaccattgagcagctggcgaagcagcacaacagcctcgagcgggccttccacagtgcccctggccggccggccaacccctccaagagcttcattgagggaagcctcttgactcccaaaggagaggacagtgaggaagatgaagataccgagtactttgatgccatggaagactccacatccttcatcaccgtgatcaccgaggccaaggaagacagcagaaaagctgaaggtagcaccgggacaagttccgtggactggagctcagcagacaatgtactagatggtgcctcgctcgtgcccaagggttcatccaaagtcaagaggcgagtccgcattcccaacaagcccaactacagccttaacctctggagcatcatgaagaactgcatcggccgggagctctccaggatccccatgccggtgaacttcaatgagcccctgtccatgctccagcggctgacagaggacctggagtaccaccacctgctggacaaggcagtgcactgcaccagctcagtggagcagatgtgcctggtggccgccttctctgtgtcctcctactccaccacagtgcaccgcatcgccaagcccttcaaccccatgctgggggagaccttcgagctggaccgcctcgacgacatgggcctgcgctccctctgtgagcaggtgagccaccaccccccctcagctgcgcactacgtgttctccaagcatggctggagcctctggcaggagatcaccatctccagcaagttccggggaaaatacatctccatcatgccgctaggtgccatccacttagaattccaggccagtgggaatcactacgtgtggaggaagagcacctcaactgttcacaacatcatcgtgggcaagctctggatcgaccagtcaggggacatcgagattgtgaaccataagaccaatgaccggtgccagctgaagttcctgccctacagctacttctccaaagaggcagcccggaagggagaacgcggagaacatgtactacttctcagagctggccctgaccctcaacgagcacgaggagggcgtagcgccaaccgacagccgcctgcggcccgaccagcggctgatggagaagggccgttgggacgaggccaataccgagaagcagcggctggaggagaagcagcgcctgtcgcggcgccggcggctggaggcctgcgggccgggcagcagctgcagctcggaggaagagaaggaggcggatgcctacacgccactgtggtttgagaagaggctggatccgctgaccggggagatggcctgtgtgtacaagggcggctactgggaggccaaggagaagcaagactggcatatgtgccccaacatcttctgagcgccacccttgcaacaaatacaggcgcctgcacagcctggcccacctgttcattaatgcactcaatttagtactgaatggtctttctcccagcccattcccagcccttcctatttcctttcctattttttttttctccccacactttcttgggactcccaccttggaaggaggaagggctgacctgggttctctccagcccccaggtgcgccgggtcacccgtgccccttcattatggacctgggccctaccggaacccctgccccagttaccacaactcaggccggctggcccgggccatgggctgcgcaaatcaccagcccccaacccagggaggaactggcccctcctagggagcctcttcgacttttttagaaaaatgatctccatttctttccagccatgatgtttagtaaatatttttagtaccgcacttagcagacagctttccaagtgtgctttcttgccacaaaagtgtcctggcaagagccccttatttttaagacatcaggaagccagaccgctttgagttgggagaattttgtagctcaacatatcaagtcctcgatggtatctgagctgcccacacccccacctgccaaggccccacagagcccaaaacagaagggggctgccccagcccagcagagcacagagtttctggagctcccatccacagatgcaggagggggtactgatggtaacccccatgtggatttgagggcagcagtccctggcctcaccctagccagcctgggtggctccctagccccaagaggccaggaagggctggaaggcagggcctgcaggtgctccccgccctgagacccaggccccaaatcagcaataatgaacaaacccttggcccagcctgggctggtgacctgggcaccagagaccttgcatccctcctcatcctaggaggcccctaggggtgccccatctcagtgtcccctgaactctttatttgcctaatttatatatatatatatgagatatataaatatatataaaatagctattttgcttaaatttctacagtatgtaaaagtgaaaaaatgatgaagacgggtgcacctgtctgagtttggccctcatgtgagctgtgcccttccctctcctcatgcccccttccagcggcttctgccaaccatggggggctggaccaccatggccactgacccagcccctcagaatcccacactccaatcctttccatttcagtttagtcctaaaagttcatcacagggtctttctttctactccaggactggttttgtttttatatatataaaaaaaaaaagtgaaaacaccaatgtgtgaaatgccttacaatgcccactggagaggcggggcggggtggggcaggatggccccactggggctcctacagagctgtggaatgtacctctccccaacactgttttgttagcgagcaccttttgaccagtaataaaaaaccttggctttggagttttccactg

SEQ ID NO: 327958 - DNA, 4367 bp, Homo sapiens
gcccccgcctcgcgccgcgcgcacgtgactgcgcccccggccccgcccccggcctgccccccgcccccactggccgctcggccgcgcgcgggtcggccggctctatggggaaagcggcggctccgagccgaggcggcggctgtggcggccgctcccgcgggctctcgtcgctgttcacggttgtcccctgcctgtcgtgccacacggcggcgccgggcatgagcgcttccacgtccggctccgggccggagcccaagccccagccccagcccgtgcccgaaccggagcggggaccgctgtcagaacaggtgtcggaggcagtttcggaggcagtgccaagatcggaacctgtgtccgagacgacgtctgagccggagccaggggctgggcagccatcggaactgctgcaggggtcgcggccggggtcagagtcaagctcaggtgtaggggctgggcccttcactaaggccgcatcggagccgctctcccgggcggtggggagcgcgacctttctcagacccgagtcaggatcgctgccagcgttaaagcccctgcctcttctgcgaccaggacaggcgaagactcctcttggggttccaatgtcggggactggcacgacctccagtgccccactggccttactgcctctggacagcttcgagggctggcttctcaagtggaccaactatctgaagggctaccagcgccgctggttcgtgctgggcaatggtttgctctcttactacagaaatcagggtgaaatggcccacacgtgccgtggaaccatcaacctgtccaccgcgcacattgacacggaggactcttgtggtatcttgctgaccagtggggccaggagctaccacctcaaggccagctcagaggtggaccggcagcagtggatcaccgccctggagctggccaaggccaaggctgtccgcgtgatgaacactcattcagatgactctggggacgacgacgaggctaccaccccagccgacaagagcgagctgcaccacaccctgaagaatctttccctgaagttagatgacctcagcacgtgcaatgacctcatcgccaagcacggcgccgcactccagcgctccctgacagagctggacggcctcaagatcccatctgagagtggggagaagctgaaggtggtgaatgagcgggccaccctcttccgcatcacatccaatgctatgatcaacgcctgcagggacttcttggaactagcagagatacacagtcggaaatggcagcgggcactgcagtatgagcaggagcagcgcgtgcacttggaggaaaccattgagcagctggcgaagcagcacaacagcctcgagcgggccttccacagtgcccctggccggccggccaacccctccaagagcttcattgagggaagcctcttgactcccaaaggagaggacagtgaggaagatgaagataccgagtactttgatgccatggaagactccacatccttcatcaccgtgatcaccgaggccaaggaagacagcagaaaagctgaaggtagcaccgggacaagttccgtggactggagctcagcagacaatgtactagatggtgcctcgctcgtgcccaagggttcatccaaagtcaagaggcgagtccgcattcccaacaagcccaactacagccttaacctctggagcatcatgaagaactgcatcggccgggagctctccaggatccccatgccggtgaacttcaatgagcccctgtccatgctccagcggctgacagaggacctggagtaccaccacctgctggacaaggcagtgcactgcaccagctcagtggagcagatgtgcctggtggccgccttctctgtgtcctcctactccaccacagtgcaccgcatcgccaagcccttcaaccccatgctgggggagaccttcgagctggaccgcctcgacgacatgggcctgcgctccctctgtgagcagcctctggcaggagatcaccatctccagcaagttccggggaaaatacatctccatcatgccgctaggtgccatccacttagaattccaggccagtgggaatcactacgtgtggaggaagagcacctcaactgttcacaacatcatcgtgggcaagctctggatcgaccagtcaggggacatcgagattgtgaaccataagaccaatgaccggtgccagctgaagttcctgccctacagctacttctccaaagaggcagcccggaaggtaagcaggaccagccacctctaagcaccccagggggcccagggcagagtctgcacctacgctggtcctgccaatgtccacaggtgacaggagtggtgagtgacagccagggcaaggcccattacgtgctgtccggctcgtgggatgaacaaatggagtgctccaaggtcatgcatagcagtcccagcagccccagctctgacgggaagcagaagacagtgtaccagaccctgtcagccaagctgctgtggaagaagtacccgctgccggagaacgcggagaacatgtactacttctcagagctggccctgaccctcaacgagcacgaggagggcgtagcgccaaccgacagccgcctgcggcccgaccagcggctgatggagaagggccgttgggacgaggccaataccgagaagcagcggctggaggagaagcagcgcctgtcgcggcgccggcggctggaggcctgcgggccgggcagcagctgcagctcggaggaagagaaggaggcggatgcctacacgccactgtggtttgagaagaggctggatccgctgaccggggagatggcctgtgtgtacaagggcggctactgggaggccaaggagaagcaagactggcatatgtgccccaacatcttctgagcgccacccttgcaacaaatacaggcgcctgcacagcctggcccacctgttcattaatgcactcaatttagtactgaatggtctttctcccagcccattcccagcccttcctatttcctttcctattttttttttctccccacactttcttgggactcccaccttggaaggaggaagggctgacctgggttctctccagcccccaggtgcgccgggtcacccgtgccccttcattatggacctgggccctaccggaacccctgccccagttaccacaactcaggccggctggcccgggccatgggctgcgcaaatcaccagcccccaacccagggaggaactggcccctcctagggagcctcttcgacttttttagaaaaatgatctccatttctttccagccatgatgtttagtaaatatttttagtaccgcacttagcagacagctttccaagtgtgctttcttgccacaaaagtgtcctggcaagagccccttatttttaagacatcaggaagccagaccgctttgagttgggagaattttgtagctcaacatatcaagtcctcgatggtatctgagctgcccacacccccacctgccaaggccccacagagcccaaaacagaagggggctgccccagcccagcagagcacagagtttctggagctcccatccacagatgcaggagggggtactgatggtaacccccatgtggatttgagggcagcagtccctggcctcaccctagccagcctgggtggctccctagccccaagaggccaggaagggctggaaggcagggcctgcaggtgctccccgccctgagacccaggccccaaatcagcaataatgaacaaacccttggcccagcctgggctggtgacctgggcaccagagaccttgcatccctcctcatcctaggaggcccctaggggtgccccatctcagtgtcccctgaactctttatttgcctaatttatatatatatatatgagatatataaatatatataaaatagctattttgcttaaatttctacagtatgtaaaagtgaaaaaatgatgaagacgggtgcacctgtctgagtttggccctcatgtgagctgtgcccttccctctcctcatgcccccttccagcggcttctgccaaccatggggggctggaccaccatggccactgacccagcccctcagaatcccacactccaatcctttccatttcagtttagtcctaaaagttcatcacagggtctttctttctactccaggactggttttgtttttatatatataaaaaaaaaaagtgaaaacaccaatgtgtgaaatgccttacaatgcccactggagaggcggggcggggtggggcaggatggccccactggggctcctacagagctgtggaatgtacctctccccaacactgttttgttagcgagcaccttttgaccagtaataaaaaaccttggctttggagttttccactg

SEQ ID NO: 327959 - DNA, 228 bp, Homo sapiens
aatggtttgctctcttactacaggtatggaagcgccagggtgggacatgggggttggagggtggtgatgctgcagggatggtgatggagggcctccatggttggcggacactgccactagtctagagatgtttaggggcatgcattccagcaggccaagtcacgcttctggcccgccgccaagggccgggggccctgacctctggcaagggtgaatgtgatctgcgga

SEQ ID NO: 327960 - DNA, 359 bp, Homo sapiens
tgacccacatgttgagagatcgggggggcttccagaaagaggctcctgtgcggtgaatgcgttgaaagcacatgattctagcagagggagcaagggtggccgcagcccagggaatcagggctgcccaggtgactgaagcaggaggggagtgaggccagatgggggttgggggagcccttggctctggacttagggaggcgagattgagccttttgtgaggttacaaattaaagctctgtctgtgtctctaggaagcctcttgactcccaaaggagaggacagtgaggaagatgaagataccgagtactttgatgccatggaagactccacatccttcatcaccgtgatcaccgaggcca

SEQ ID NO: 327961 - DNA, 404 bp, Homo sapiens
gcgggtagggggcttcaggtcagcccgtctctcctcctgctcacagctgagcacgagtctcctggccccaggtagagttgtcacacagcctcagagaaatgagaccacgttcaggcctgggctgggtcagccaggccctccctgggcccctgggaacctccccctgccagtccctctgccgggccccaagcctaatccagcttatcaagcacacagcacacagcccagctcagcattctgagaacagcagggccacgccaggcgcctgcctctccccacagcacagccaggatggggcctggagaaggccggcagcagcagaggagaccctgggagtcagggatggacaccaggtgggtgcatccgggctgggggaggtggacgggctctctgcatccatgggg

SEQ ID NO: 327962 - DNA, 415 bp, Homo sapiens
tgacataataatgcgtttgtatttccctgtccctcccagaagccactgccggaggcttcccaggcactgcctccctacccgagaccaaaactgctttgtcttgaataagcagttttggcttttccgagataatgagcgtctcagctggctgccgtcttgcacagtcttttatcagacatcagaggctcatctgtgtttacgaagccatcagaacagctccaagtttaagtgcctaatgaattgttttatgagaaacacaaccccctggggttggtcacgattcctttctgcagctccagcatccggggaacatggcggcagagtcagccctgagtgacggaagctgtgccctgggctgggttctgccaaacctgctggtgttagcctgccatgagggcccctccccaagctcctg

SEQ ID NO: 327963 - DNA, 707 bp, Homo sapiens
tgacctgtcccctgcctccaggtgccatccacttagaattccaggccagtgggaatcactacgtgtggaggaagagcacctcaactgttcacaacatcatcgtgggcaagctctggatcgaccagtcaggggacatcgagattgtgaaccataagaccaatgaccggtgccagctgaagttcctgccctacagctacttctccaaagaggcagcccggaaggtaagcaggaccagccacctctaagcaccccagggggcccagggcagagtctgcacctacgctggtcctgccaatgtccacaggtgacaggagtggtgagtgacagccagggcaaggcccattacgtgctgtccggctcgtgggatgaacaaatggagtgctccaaggtcatgcatagcagtcccagcagccccagctctgacgggaagcagaagacagtgtaccagaccctgtcagccaagctgctgtggaagaagtacccgctgccgtgagtagggctggcaggggccccgccacaggcaaaggagagggaaggaggacagtggacagaaagcaactgacaggcacaggaggtcgggagggttcagtccacacatgggcagagaacagtattatgcagccgacatcccagtgtgaaggcagacaccgaacagtaaataaatgtgaaactatcaaacactatgcacagactttaagcgaggtgat

SEQ ID NO: 327964 - DNA, 3279 bp, Homo sapiens
cggcggcagcagcagcagctgcaagagccctcgcagcctcggggcaggacccacgtccacacccgagagcccctccctgggatgactctggggacgacgacgaggctaccaccccagccgacaagagcgagctgcaccacaccctgaagaatctttccctgaagttagatgacctcagcacgtgcaatgacctcatcgccaagcacggcgccgcactccagcgctccctgacagagctggacggcctcaagatcccatctgagagtggggagaagctgaaggtggtgaatgagcgggccaccctcttccgcatcacatccaatgctatgatcaacgcctgcagggacttcttggaactagcagagatacacagtcggaaatggcagcgggcactgcagtatgagcaggagcagcgcgtgcacttggaggaaaccattgagcagctggcgaagcagcacaacagcctcgagcgggccttccacagtgcccctggccggccggccaacccctccaagagcttcattgagggaagcctcttgactcccaaaggagaggacagtgaggaagatgaagataccgagtactttgatgccatggaagactccacatccttcatcaccgtgatcaccgaggccaaggaagacagcagaaaagctgaaggtagcaccgggacaagttccgtggactggagctcagcagacaatgtactagatggtgcctcgctcgtgcccaagggttcatccaaagtcaagaggcgagtccgcattcccaacaagcccaactacagccttaacctctggagcatcatgaagaactgcatcggccgggagctctccaggatccccatgccggtgaacttcaatgagcccctgtccatgctccagcggctgacagaggacctggagtaccaccacctgctggacaaggcagtgcactgcaccagctcagtggagcagatgtgcctggtggccgccttctctgtgtcctcctactccaccacagtgcaccgcatcgccaagcccttcaaccccatgctgggggagaccttcgagctggaccgcctcgacgacatgggcctgcgctccctctgtgagcaggtgagccaccaccccccctcagctgcgcactacgtgttctccaagcatggctggagcctctggcaggagatcaccatctccagcaagttccggggaaaatacatctccatcatgccgctaggtgccatccacttagaattccaggccagtgggaatcactacgtgtggaggaagagcacctcaactgttcacaacatcatcgtgggcaagctctggatcgaccagtcaggggacatcgagattgtgaaccataagaccaatgaccggtgccagctgaagttcctgccctacagctacttctccaaagaggcagcccggaagggagaacgcggagaacatgtactacttctcagagctggccctgaccctcaacgagcacgaggagggcgtagcgccaaccgacagccgcctgcggcccgaccagcggctgatggagaagggccgttgggacgaggccaataccgagaagcagcggctggaggagaagcagcgcctgtcgcggcgccggcggctggaggcctgcgggccgggcagcagctgcagctcggaggaagagaaggaggcggatgcctacacgccactgtggtttgagaagaggctggatccgctgaccggggagatggcctgtgtgtacaagggcggctactgggaggccaaggagaagcaagactggcatatgtgccccaacatcttctgagcgccacccttgcaacaaatacaggcgcctgcacagcctggcccacctgttcattaatgcactcaatttagtactgaatggtctttctcccagcccattcccagcccttcctatttcctttcctattttttttttctccccacactttcttgggactcccaccttggaaggaggaagggctgacctgggttctctccagcccccaggtgcgccgggtcacccgtgccccttcattatggacctgggccctaccggaacccctgccccagttaccacaactcaggccggctggcccgggccatgggctgcgcaaatcaccagcccccaacccagggaggaactggcccctcctagggagcctcttcgacttttttagaaaaatgatctccatttctttccagccatgatgtttagtaaatatttttagtaccgcacttagcagacagctttccaagtgtgctttcttgccacaaaagtgtcctggcaagagccccttatttttaagacatcaggaagccagaccgctttgagttgggagaattttgtagctcaacatatcaagtcctcgatggtatctgagctgcccacacccccacctgccaaggccccacagagcccaaaacagaagggggctgccccagcccagcagagcacagagtttctggagctcccatccacagatgcaggagggggtactgatggtaacccccatgtggatttgagggcagcagtccctggcctcaccctagccagcctgggtggctccctagccccaagaggccaggaagggctggaaggcagggcctgcaggtgctccccgccctgagacccaggccccaaatcagcaataatgaacaaacccttggcccagcctgggctggtgacctgggcaccagagaccttgcatccctcctcatcctaggaggcccctaggggtgccccatctcagtgtcccctgaactctttatttgcctaatttatatatatatatatgagatatataaatatatataaaatagctattttgcttaaatttctacagtatgtaaaagtgaaaaaatgatgaagacgggtgcacctgtctgagtttggccctcatgtgagctgtgcccttccctctcctcatgcccccttccagcggcttctgccaaccatggggggctggaccaccatggccactgacccagcccctcagaatcccacactccaatcctttccatttcagtttagtcctaaaagttcatcacagggtctttctttctactccaggactggttttgtttttatatatataaaaaaaaaaagtgaaaacaccaatgtgtgaaatgccttacaatgcccactggagaggcggggcggggtggggcaggatggccccactggggctcctacagagctgtggaatgtacctctccccaacactgttttgttagcgagcaccttttgaccagtaataaaaaaccttggctttggagttttccactg

SEQ ID NO: 327965 - DNA, 3051 bp, Homo sapiens
gcccccgcctcgcgccgcgcgcacgtgactgcgcccccggccccgcccccggcctgccccccgcccccactggccgctcggccgcgcgcgggtcggccggctctatggggaaagcggcggctccgagccgaggcggcggctgtggcggccgctcccgcgggctctcgtcgctgttcacggttgtcccctgcctgtcgtgccacacggcggcgccgggcatgagcgcttccacgtccggctccgggccggagcccaagccccagccccagcccgtgcccgaaccggagcggggaccgctgtcagaacaggtgtcggaggcagtttcggaggcagtgccaagatcggaacctgtgtccgagacgacgtctgagccggagccaggggctgggcagccatcggaactgctgcaggggtcgcggccggggtcagagtcaagctcaggtgtaggggctgggcccttcactaaggccgcatcggagccgctctcccgggcggtggggagcgcgacctttctcagacccgagtcaggatcgctgccagcgttaaagcccctgcctcttctgcgaccaggacaggcgaagactcctcttggggttccaatgtcggggactggcacgacctccagtgccccactggccttactgcctctggacagcttcgagggctggcttctcaagtggaccaactatctgaagggctaccagcgccgctggttcgtgctgggcaatggtttgctctcttactacagaaatcagggtgaaatggcccacacgtgccgtggaaccatcaacctgtccaccgcgcacattgacacggaggactcttgtggtatcttgctgaccagtggggccaggagctaccacctcaaggccagctcagaggtggaccggcagcagtggatcaccgccctggagctggccaaggccaaggctgtccgcgtgatgaacactcattcagatgactctggggacgacgacgaggctaccaccccagccgacaagagcgagctgcaccacaccctgaagaatctttccctgaagttagatgacctcagcacgtgcaatgacctcatcgccaagcacggcgccgcactccagcgctccctgacagagctggacggcctcaagatcccatctgagagtggggagaagctgaaggtggtgaatgagcgggccaccctcttccgcatcacatccaatgctatgatcaacgcctgcagggacttcttggaactagcagagatacacagtcggaaatggcagcgggcactgcagtatgagcaggagcagcgcgtgcacttggaggaaaccattgagcagctggcgaagcagcacaacagcctcgagcgggccttccacagtgcccctggccggccggccaacccctccaagagcttcattgagggaagcctcttgactcccaaaggagaggacagtgaggaagatgaagataccgagtactttgatgccatggaagactccacatccttcatcaccgtgatcaccgaggccaaggaagacagcagaaaagctgaaggtagcaccgggacaagttccgtggactggagctcagcagacaatgtactagatggtgcctcgctcgtgcccaagggttcatccaaagtcaagaggcgagtccgcattcccaacaagcccaactacagccttaacctctggagcatcatgaagaactgcatcggccgggagctctccaggatccccatgccggtgaacttcaatgagcccctgtccatgctccagcggctgacagaggacctggagtaccaccacctgctggacaaggcagtgcactgcaccagctcagtggagcagatgtgcctggtggccgccttctctgtgtcctcctactccaccacagtgcaccgcatcgccaagcccttcaaccccatgctgggggagaccttcgagctggaccgcctcgacgacatgggcctgcgctccctctgtgagcaggtgagccaccaccccccctcagctgcgcactacgtgttctccaagcatggctggagcctctggcaggagatcaccatctccagcaagttccggggaaaatacatctccatcatgccgctaggtgccatccacttagaattccaggccagtgggaatcactacgtgtggaggaagagcacctcaactgttcacaacatcatcgtgggcaagctctggatcgaccagtcaggggacatcgagattgtgaaccataagaccaatgaccggtgccagctgaagttcctgccctacagctacttctccaaagaggcagcccggaaggtgacaggagtggtgagtgacagccagggcaaggcccattacgtgctgtccggctcgtgggatgaacaaatggagtgctccaaggtcatgcatagcagtcccagcagccccagctctgacgggaagcagaagacagtgtaccagaccctgtcagccaagctgctgtggaagaagtacccgctgccggagaacgcggagaacatgtactacttctcagagctggccctgaccctcaacgagcacgaggagggcgtagcgccaaccgacagccgcctgcggcccgaccagcggctgatggagaagggccgttgggacgaggccaataccgagaagcagcggctggaggagaagcagcgcctgtcgcggcgccggcggctggaggcctgcgggccgggcagcagctgcagctcggaggaagagaaggaggcggatgcctacacgccactgtggtttgagaagaggctggatccgctgaccggggagatggcctgtgtgtacaagggcggctactgggaggccaaggagaagcaagactggcatatgtgccccaacatcttctgagcgccacccttgcaacaaatacaggcgcctgcacagcctggcccacctgttcattaatgcactcaatttagtactgaatggtctttctcccagcccattcccagcccttcctatttcctttcctattttttttttctcccgtaacagttggcatttgtttgtgtgtgtgtgtgtgtgtgtgtgtgtgtgttttaag

SEQ ID NO: 327966 - DNA, 1427 bp, Homo sapiens
gcccccgcctcgcgccgcgcgcacgtgactgcgcccccggccccgcccccggcctgccccccgcccccactggccgctcggccgcgcgcgggtcggccggctctatggggaaagcggcggctccgagccgaggcggcggctgtggcggccgctcccgcgggctctcgtcgctgttcacggttgtcccctgcctgtcgtgccacacggcggcgccgggcatgagcgcttccacgtccggctccgggccggagcccaagccccagccccagcccgtgcccgaaccggagcggggaccgctgtcagaacaggtgtcggaggcagtttcggaggcagtgccaagatcggaacctgtgtccgagacgacgtctgagccggagccaggggctgggcagccatcggaactgctgcaggggtcgcggccggggtcagagtcaagctcaggtgtaggggctgggcccttcactaaggccgcatcggagccgctctcccgggcggtggggagcgcgacctttctcagacccgagtcaggatcgctgccagcgttaaagcccctgcctcttctgcgaccaggacaggcgaagactcctcttggggttccaatgtcggggactggcacgacctccagtgccccactggccttactgcctctggacagcttcgagggctggcttctcaagtggaccaactatctgaagggctaccagcgccgctggttcgtgctgggcaatggtttgctctcttactacagaaatcagggtgaaatggcccacacgtgccgtggaaccatcaacctgtccaccgcgcacattgacacggaggactcttgtggtatcttgctgaccagtggggccaggagctaccacctcaaggccagctcagaggtggaccggcagcagtggatcaccgccctggagctggccaaggccaaggctgtccgcgtgatgaacactcattcagatgactctggggacgacgacgaggctaccaccccagccgacaagagcgagctgcaccacaccctgaagaatctttccctgaagttagatgacctcagcacgtgcaatgacctcatcgccaagcacggcgccgcactccagcgctccctgacagagctggacggcctcaagatcccatctgagagtggggagaagctgaaggtggtgaatgagcgggccaccctcttccgcatcacatccaatgctatgatcaacaagccactgccggaggcttcccaggcactgcctccctacccgagaccaaaactgctttgtcttgaataagcagttttggcttttccgagataatgagcgtctcagctggctgccgtcttgcacagtcttttatcagacatcagaggctcatctgtgtttacgaagccatcagaacagctccaagtttaagtgcctaatgaattgttttatgagaaa

SEQ ID NO: 327967 - DNA, 381 bp, Homo sapiens
caaacttcccataaatttaaaatctgactgtaaggcattaaaataaatccgtttaaacaaggtaaatacatttttccttatgttgaaaaagtaaaaaaagaatgggaattggaaaaacattttttgcttgctttagggtgacagaatataactttccctaccagtttttgtggctaaaaggcaaaaagtaatacagtccactattaaggaacttaagattaagattttaataattttttttttttttttaaacagacagggtctcactctgttgcctaggctggtctcaaactcctggcctcaagcaatccttccgccttggcctcccaaagtgctgggattacaggcgtgagctactgtgcatggccaggaaaaccttct

SEQ ID NO: 327968 - DNA, 450 bp, Homo sapiens
cagcatttgacagcgaggaattgggcacagagaggttaagtcatctgccagtggtctcataactaggaaatggtggagccagggttggaagcaatgcaacagcttgtgttgtctcaaatgaaatgctttctgtggttcctaggcttacagggaatgactaagacattgtttggcctcaaaaaagcaactaataatttgtgtatttatttctgttaactgtatacttatttttgttaacttatttcatgtctctcctgctaccctataagcttcctgaaagccaagtttatcttctttttgctcacctatatattctttgctggaaaagcaccataaggtgcttagttattgttggccgaatgaatgaatagcttaatcataataggagaagtctctcagaagtcacttttgtccccttgcagctctatggcagactgagctcagtaaggc

SEQ ID NO: 327969 - DNA, 447 bp, Homo sapiens
aggcagtatttgataaacagttggaaagtgatatgtatccaggcagcagattaatgtgaggccaaagcatggaaagtgagttcctgctgcagccccctggaggtgtcacgttaggggagaactttgtctccaggagctgccaccaggaccctttcaaatcttgccattgaatttagcctggcatccaggtttctttgtgatgggtcccttttcagccacatcttccactacaacattctgctgccccagaatgtcactcattccctgaacatacttttcttccttgtgggcgtgctgagagggtttcctcctccacggccccaaatcccaccccttcctcagtgccctcctccataaaaccatcagttctgactaagttctctgtcctgtgaagtcctcgtgtggacttactctcctgctgaatgcacgtttacttttctgaatggc

SEQ ID NO: 327970 - DNA, 800 bp, Homo sapiens
gcccaattttaatttgtggaatattcccgttaataatgagatctaattaagacatccattaaaagcccgttaaagttaatttaacgtaaaaattccaatagaactgtattagattttctccattaaattaacgttatggatttttaacggatgtcttaattatacgttattattaacgggaatactgtattacacagattaaaatcaggtcctaagtcaacttggaagagctaagagcatgttttaatattaaaagtcttgcatacctagtgcacagtttggagacgcaaggatagatctgtttactctagttgaacattttctatacaattgaaagcaacctataatagataaatccatcattgcatttaaacaatgaatttccttattctcaaaggacaaatacgtctggattatgtggtaaattgctactcagctatggtgaaatatttatactattctaggcacaacactaggaactaggtgattctgaaacaaaaggaatattttctgttgttgctttaattaccaaggttatttttttttaatctcaacactgacaaaatgaaaccaaatatctcttcctcaccatttctcaaggaggctgcctgttggaattgttttggaaattttgacatgatccctaaattcaacattgggattaaaaaaaaaaaaaacttcttatttacctcctagggaaagtgttgcccttatgccacatataatagcaaattgctttttttatggcatgcataacctagatgggaaaaaatatggcgcttcggggaaggagggaaaaa

SEQ ID NO: 327971 - DNA, 654 bp, Homo sapiens
taaatgaagttccaggaatgtcattctgaagtaatgaggcatggacagaaaatatacccctcacatcatcggattgagatggcagtcgaaatagcttcattgaagtgtcagcactcatccatcaatcaatcacccacaaggaaaaatagcaacagtacaacggggtggcttttatgggatttactcatgggcatagggaatagcggctcaaatgtagttctgacatgaaaagcaaggtgctgatattattttttatgatgggaggatcataaagtgaattgagaacagtgaggtctgtctttgcttaacctattcaaccagaaatgaatggagctcgactggaaaggaacagtcttcagatgggttaagattgaagggtggactggactctactgagcaccgtccttcaacaaggaaattctattaaaggaaaatcaatgcattagtattggggttcttgtagctgttaaaaattgtctgctccaatccagggttattaggccaaagttacataattcagatctcactgcaaccatccaaaagtggattctcgagcccttgctccaatggggggaggagatcaatacaattcccaattccatggaaattgtttcccttctaaggaagaaaaaataaatcatctgcttcaacata

SEQ ID NO: 327972 - DNA, 567 bp, Homo sapiens
tcatgggcatagggaatagcggctcaaatgtagttctgacatgaaaagcaaggtgctgatattattttttatgatgggaggatcataaagtgaattgagaacagtgaggtctgtctttgcttaacctattcaaccagaaatgaatggagctcgactggaaaggaacagtcttcagatgggttaagattgaagggtggactggactctactgagcaccgtccttcaacaaggaaattctattaaaggaaaatcaatgcattagtattggggttcttgtagctgttaaaaattgtctgctccaatccagggttattaggccaaagttacataattcagatctcactgcaaccatccaaaagtggattctcgagcccttgctccaatggggggaggagatcaatacaattcccaattccatggaaattgtttcccttctaaggaagaaaaaataaatcatctgcttcaacatataatcgatatggttttgttagcgtaatttctatggtgggtggggtgggaggtgagagaaaaaaatattgataaatttggtaagacaggtgaattgcc

SEQ ID NO: 327973 - DNA, 758 bp, Homo sapiens
taaatgaagttccaggaatgtcattctgaagtaatgaggcatggacagaaaatatacccctcacatcatcggattgagatggcagtcgaaatagcttcattgaagtgtcagcactcatccatcaatcaatcacccacaaggaaaaatagcaacagtacaacggggtggcttttatgggatttactcatgggcatagggaatagcggctcaaatgtagttctgacatgaaaagcaaggtgctgatattattttttatgatgggaggatcataaagtgaattgagaacagtgaggtctgtctttgcttaacctattcaaccagaaatgaatggagctcgactggaaaggaacagtcttcagatgggttaagattgaagggtggactggactctactgagcaccgtccttcaacaaggaaattctattaaaggaaaatcaatgcattagtattggggttcttgtagctgttaaaaattgtctgctccaatccagggttattaggccaaagttacataattcagatctcactgcaaccatccaaaagtggattctcgagcccttgctccaatggggggaggagatcaatacaattcccaattccatggaaattgtttcccttctaaggaagaaaaaataaatcatctgcttcaacataacaaaaacacaccctccctctcccctaccactctctcccctccctccaaaaaaaaaacctcaggggggggcccggacccaaattcgcctttagggagccgtata

SEQ ID NO: 327974 - DNA, 337 bp, Homo sapiens
  misc_feature (1)..(1): n is a, c, g, or t
  misc_feature (287)..(289): n is a, c, g, or t
  misc_feature (321)..(321): n is a, c, g, or t
nacgctgggcgatcaacccataagttttttgaatgaggattttaacctgtatcatagggtgaagatgaagccatgtttgtagaatatagaaaacaactgaagttactgttggacaggcttgctcaagtttcaccagagttactactggcctctgttcgcagagtttttagttctacactgcagtaagtttgtcattacttttgtaacaagcctacttctttcttttgctctttgatatgggtcaaaataaatgattcatatgacttattaatccatgttacttattnnnatcttatgtgtatctctggaaacaatgcacangtcttcttgatttatc

SEQ ID NO: 327975 - DNA, 393 bp, Homo sapiens
tgatagggaagatgtttataaattcttctgtgggatcagagggcacgcctattacaaccagaaaactacaagtataacagcgaggatggatgaacaggctctattagggctaaatccaaatgctgattcagactttagacaaagggtaagttactctgctgaatcattttttaatcatgtcaccacagattggcattagaggacttgaatataaatgcacttggcaaatttttactttgggtagaaatgaacagatacttttaaatttgaggtatttgaatatattttgaatatagaaacagtgagtgttgtgatttattttctgtttacttggccaaacaaaagtattaaaatctatatgattcaaggcagtgaagccgtagtaggcagtga

SEQ ID NO: 327976 - DNA, 3481 bp, Homo sapiens
  misc_feature (3292)..(3292): n is a, c, g, or t
tgatagggaagatgtttataaattcttctgtgggatcagagggcacgcctattacaaccagaaaactacaagtataacagcgaggatggatgaacaggctctattagggctaaatccaaatgctgattcagactttagacaaagggccctggcctattttgagcagttaaaaatttccccagatgcctggcaggtgtgtgcagaagctctagcccagaggacatacagtgatgatcatgtgaagtttttctgctttcaagtactggaacatcaagttaaatacaaatactcagaactaaccactgttcaacaacagctaattagggagacgctcatatcatggctgcaagctcagatgctgaatccccaaccagagaagacctttatacgaaataaagccgcccaagtcttcgccttgctttttgttacagagtatctcactaagtggcccaagtttttttttgacattctctcagtagtggacctaaatccaaggggagtagatctctacctgcgaatcctcatggctattgattcagagttggtggatcgtgatgtggtgcatacatcagaggaggctcgtaggaatactctcataaaagataccatgagggaacagtgcattccaaatctggtggaatcatggtaccaaatattacaaaattatcagtttactaattctgaagtgacgtgtcagtgccttgaagtagttggggcttatgtctcttggatagacttatcccttatagccaatgataggtttataaatatgctgctaggtcatatgtcaatagaagttctacgggaagaagcatgtgactgtttatttgaagttgtaaataaaggaatggaccctgttgataaaatgaaactagtggaatctttgtgtcaagtattacagtctgctgggtttttcagcattgaccaggaagaagatgttgacttcctggccagattttctaagttggtaaatggaatgggacagtcattgatagttagttggagtaaattaattaagaatggggatattaagaatgctcaagaggcactacaagctattgaaacaaaagtggcactgatgttgcagctactaattcatgaggatgatgatatttcttctaatattattggattttgttacgattatcttcatattttgaaacagcttacagtgctctcggatcagcaaaaagctaatgtagaggcaatcatgttggccgttatgaaaaaattgacttacgatgaagaatataactttgaaaatgagggtgaagatgaagccatgtttgtagaatatagaaaacaactgaagttactgttggacaggcttgctcaagtttcaccagagttactactggcctctgttcgcagagtttttagttctacactgcagaattggcagactacacggtttatggaagttgaagtagcaataagattgctgtatatgttggcagaagctcttccagtatctcatggtgctcacttctcagtctggtaacatcaggagtcagttcctatcagcatacatctgtgacattggagttcttcgaaactgttgttagatatgaaaagtttttcacagttgaacctcagcacattccatgtgtactaatggctttcttagatcacagaggtctgcggcattccagtgcaaaagttcggagcaggacggcttacctgttttctagatttgtcaaatctctcaataagcaaatgaatcctttcattgaggatattttgaatagaatacaagatttattagagctttctccacctgagaatggccaccagtccttactgagcagcgatgatcaactttttatttatgagacagctggagtgctgattgttaatagtgaatatccggcagaaaggaaacaagccttaatgaggaatctgttgactccactaatggagaagtttaaaattctgttagaaaagttgatgctggcacaagatgaagaaaggcaagcctctctagcagactgtcttaaccatgctgttggatttgcaagtcgaaccagtaaagctttcagcaacaaacagactgtgaaacaatgtggctgttccgaagtttatctggactgtttacagacattcttgccagccctcagttgtcccttacaaaaggatattctcagaagtggagtccgtactttccttcatcgaatgattatttgcctggaggaagaagttcttccgttcattccatctgcttcagaacatatgctcaaagattgtgaagcaaaagatctccaggagttcattcctcttatcaaccagattacggccaaattcaagatacaggtatccccgtttttacaacagatgttcatgcccctgcttcatgcaatttttgaagtgctgctccggccagcagaagaaaatgaccagtctgctgctttagagaagcagatgttgcggaggagttactttgctttcctgcaaacagtcacaggcagtgggatgagcgaagttatagcaaatcaaggtgcagagaatgtagaaagagtgttggttactgttatccaaggagcagttgaatatccagatccaattgcacagaaaacatgttttatcatcctctcaaagttggtagaactctggggaggtaaagatggaccagtgggatttgctgattttgtttataagcacattgtccccgcatgtttcctagcacctttaaaacaaacctttgacctggcagatgcacaaacagtattggctttatctgagtgtgcagtgacactgaaaacaattcatctcaaacggggcccagaatgtgttcagtatcttcaacaagaatacctgccctccttgcaagtagctccagaaataattcaggagttttgtcaagcgcttcagcagcctgatgctaaagtttttaaaaattacttaaaggtgttcttccagagagcaaagccctgaggactggatttccctgtgcctacttcatgatcatgaattccagttaatttataaagaggcgatttttgtgtgccattcacactggtctttttcacattgttttgagcttattgcagtatatgttttgggatttttctgtaaaatgggtgtaattttcctaatacaggtatgtaacaacaaaagaagttgcctgcatgccggtccaaattgttctgtataaagatgctcttaaaagacacaagagttatcctagaaccttaattcttttttatttgaaattttaagtcaagtcctttataaagaccatagcagtggaaaacagtgtactttttaaaaaattgctgaatataaaatctttganaattttctttatgtgtgaagacacaaagtatgggggaagacagcaatcaaaactaactttttgtagatagccatttcatttctttaaactgtttcaacgccaatatgtattctacaaaagagaatggttttaggctccagtgttatacttttttttatatatatatataaaaataaactttacgtagtg

SEQ ID NO: 327977 - DNA, 3470 bp, Homo sapiens
  misc_feature (3281)..(3281): n is a, c, g, or t
tgatagggaagatgtttataaattcttctgtgggatcagagggcacgcctattacaaccagaaaactacaagtataacagcgaggatggatgaacaggctctattagggctaaatccaaatgctgattcagactttagacaaagggccctggcctattttgagcagttaaaaatttccccagatgcctggcaggtgtgtgcagaagctctagcccagaggacatacagtgatgatcatgtgaagtttttctgctttcaagtactggaacatcaagttaaatacaaatactcagaactaaccactgttcaacaacagctaattagggagacgctcatatcatggctgcaagctcagatgctgaatccccaaccagagaagacctttatacgaaataaagccgcccaagtcttcgccttgctttttgttacagagtatctcactaagtggcccaagtttttttttgacattctctcagtagtggacctaaatccaaggggagtagatctctacctgcgaatcctcatggctattgattcagagttggtggatcgtgatgtggtgcatacatcagaggaggctcgtaggaatactctcataaaagataccatgagggaacagtgcattccaaatctggtggaatcatggtaccaaatattacaaaattatcagtttactaattctgaagtgacgtgtcagtgccttgaagtagttggggcttatgtctcttggatagacttatcccttatagccaatgataggtttataaatatgctgctaggtcatatgtcaatagaagttctacgggaagaagcatgtgactgtttatttgaagttgtaaataaaggaatggaccctgttgataaaatgaaactagtggaatctttgtgtcaagtattacagtctgctgggtttttcagcattgaccaggaagaagatgttgacttcctggccagattttctaagttggtaaatggaatgggacagtcattgatagttagttggagtaaattaattaagaatggggatattaagaatgctcaagaggcactacaagctattgaaacaaaagtggcactgatgttgcagctactaattcatgaggatgatgatatttcttctaatattattggattttgttacgattatcttcatattttgaaacagcttacagtgctctcggatcagcaaaaagctaatgtagaggcaatcatgttggccgttatgaaaaaattgacttacgatgaagaatataactttgaaaatgagggtgaagatgaagccatgtttgtagaatatagaaaacaactgaagttactgttggacaggcttgctcaagtttcaccagagttactactggcctctgttcgcagagtttttagttctacactgcagaattggcagactacacggtttatggaagttgaagtagcaataagattgctgtatatgttggcagaagctcttccagtatctcatggtgctcacttctcaggtgatgtttcaaaagctagtgctttgcaggatatgatgcgaactctggtaacatcaggagtcagttcctatcagcatacatctgtgacattggagttcttcgaaactgttgttagatatgaaaagtttttcacagttgaacctcagcacattccatgtgtactaatggctttcttagatcacagaggtctgcggcattccagtgcaaaacaaatgaatcctttcattgaggatattttgaatagaatacaagatttattagagctttctccacctgagaatggccaccagtccttactgagcagcgatgatcaactttttatttatgagacagctggagtgctgattgttaatagtgaatatccggcagaaaggaaacaagccttaatgaggaatctgttgactccactaatggagaagtttaaaattctgttagaaaagttgatgctggcacaagatgaagaaaggcaagcctctctagcagactgtcttaaccatgctgttggatttgcaagtcgaaccagtaaagctttcagcaacaaacagactgtgaaacaatgtggctgttccgaagtttatctggactgtttacagacattcttgccagccctcagttgtcccttacaaaaggatattctcagaagtggagtccgtactttccttcatcgaatgattatttgcctggaggaagaagttcttccgttcattccatctgcttcagaacatatgctcaaagattgtgaagcaaaagatctccaggagttcattcctcttatcaaccagattacggccaaattcaagatacaggtatccccgtttttacaacagatgttcatgcccctgcttcatgcaatttttgaagtgctgctccggccagcagaagaaaatgaccagtctgctgctttagagaagcagatgttgcggaggagttactttgctttcctgcaaacagtcacaggcagtgggatgagcgaagttatagcaaatcaaggtgcagagaatgtagaaagagtgttggttactgttatccaaggagcagttgaatatccagatccaattgcacagaaaacatgttttatcatcctctcaaagttggtagaactctggggaggtaaagatggaccagtgggatttgctgattttgtttataagcacattgtccccgcatgtttcctagcacctttaaaacaaacctttgacctggcagatgcacaaacagtattggctttatctgagtgtgcagtgacactgaaaacaattcatctcaaacggggcccagaatgtgttcagtatcttcaacaagaatacctgccctccttgcaagtagctccagaaataattcaggagttttgtcaagcgcttcagcagcctgatgctaaagtttttaaaaattacttaaaggtgttcttccagagagcaaagccctgaggactggatttccctgtgcctacttcatgatcatgaattccagttaatttataaagaggcgatttttgtgtgccattcacactggtctttttcacattgttttgagcttattgcagtatatgttttgggatttttctgtaaaatgggtgtaattttcctaatacaggtatgtaacaacaaaagaagttgcctgcatgccggtccaaattgttctgtataaagatgctcttaaaagacacaagagttatcctagaaccttaattcttttttatttgaaattttaagtcaagtcctttataaagaccatagcagtggaaaacagtgtactttttaaaaaattgctgaatataaaatctttganaattttctttatgtgtgaagacacaaagtatgggggaagacagcaatcaaaactaactttttgtagatagccatttcatttctttaaactgtttcaacgccaatatgtattctacaaaagagaatggttttaggctccagtgttatacttttttttatatatatatataaaaataaactttacgtagtg

SEQ ID NO: 327978 - DNA, 3524 bp, Homo sapiens
  misc_feature (3335)..(3335): n is a, c, g, or t
tgatagggaagatgtttataaattcttctgtgggatcagagggcacgcctattacaaccagaaaactacaagtataacagcgaggatggatgaacaggctctattagggctaaatccaaatgctgattcagactttagacaaagggccctggcctattttgagcagttaaaaatttccccagatgcctggcaggtgtgtgcagaagctctagcccagaggacatacagtgatgatcatgtgaagtttttctgctttcaagtactggaacatcaagttaaatacaaatactcagaactaaccactgttcaacaacagctaattagggagacgctcatatcatggctgcaagctcagatgctgaatccccaaccagagaagacctttatacgaaataaagccgcccaagtcttcgccttgctttttgttacagagtatctcactaagtggcccaagtttttttttgacattctctcagtagtggacctaaatccaaggggagtagatctctacctgcgaatcctcatggctattgattcagagttggtggatcgtgatgtggtgcatacatcagaggaggctcgtaggaatactctcataaaagataccatgagggaacagtgcattccaaatctggtggaatcatggtaccaaatattacaaaattatcagtttactaattctgaagtgacgtgtcagtgccttgaagtagttggggcttatgtctcttggatagacttatcccttatagccaatgataggtttataaatatgctgctaggtcatatgtcaatagaagttctacgggaagaagcatgtgactgtttatttgaagttgtaaataaaggaatggaccctgttgataaaatgaaactagtggaatctttgtgtcaagtattacagtctgctgggtttttcagcattgaccaggaagaagatgttgacttcctggccagattttctaagttggtaaatggaatgggacagtcattgatagttagttggagtaaattaattaagaatggggatattaagaatgctcaagaggcactacaagctattgaaacaaaagtggcactgatgttgcagctactaattcatgaggatgatgatatttcttctaatattattggattttgttacgattatcttcatattttgaaacagcttacagtgctctcggatcagcaaaaagctaatgtagaggcaatcatgttggccgttatgaaaaaattgacttacgatgaagaatataactttgaaaatgagggtgaagatgaagccatgtttgtagaatatagaaaacaactgaagttactgttggacaggcttgctcaagtttcaccagagttactactggcctctgttcgcagagtttttagttctacactgcagaattggcagactacacggtttatggaagttgaagtagcaataagattgctgtatatgttggcagaagctcttccagtatctcatggtgctcacttctcaggtgatgtttcaaaagctagtgctttgcaggatatgatgcgaactctggtaacatcaggagtcagttcctatcagcatacatctgtgacattggagttcttcgaaactgttgttagatatgaaaagtttttcacagttgaacctcagcacattccatgtgtactaatggctttcttagatcacagaggtctgcggcattccagtgcaaaagttcggagcaggacggcttacctgttttctagatttgtcaaatctctcaataagcaaatgaatcctttcattgaggatattttgaatagaatacaagatttattagagctttctccacctgagaatggccaccagtccttactgagcagcgatgatcaactttttatttatgagacagctggagtgctgattgttaatagtgaatatccggcagaaaggaaacaagccttaatgaggaatctgttgactccactaatggagaagtttaaaattctgttagaaaagttgatgctggcacaagatgaagaaaggcaagcctctctagcagactgtcttaaccatgctgttggatttgcaagtcgaaccagtaaagctttcagcaacaaacagactgtgaaacaatgtggctgttccgaagtttatctggactgtttacagacattcttgccagccctcagttgtcccttacaaaaggatattctcagaagtggagtccgtactttccttcatcgaatgattatttgcctggaggaagaagttcttccgttcattccatctgcttcagaacatatgctcaaagattgtgaagcaaaagatctccaggagttcattcctcttatcaaccagattacggccaaattcaagatacaggtatccccgtttttacaacagatgttcatgcccctgcttcatgcaatttttgaagtgctgctccggccagcagaagaaaatgaccagtctgctgctttagagaagcagatgttgcggaggagttactttgctttcctgcaaacagtcacaggcagtgggatgagcgaagttatagcaaatcaaggtgcagagaatgtagaaagagtgttggttactgttatccaaggagcagttgaatatccagatccaattgcacagaaaacatgttttatcatcctctcaaagttggtagaactctggggaggtaaagatggaccagtgggatttgctgattttgtttataagcacattgtccccgcatgtttcctagcacctttaaaacaaacctttgacctggcagatgcacaaacagtattggctttatctgagtgtgcagtgacactgaaaacaattcatctcaaacggggcccagaatgtgttcagtatcttcaacaagaatacctgccctccttgcaagtagctccagaaataattcaggagttttgtcaagcgcttcagcagcctgatgctaaagtttttaaaaattacttaaaggtgttcttccagagagcaaagccctgaggactggatttccctgtgcctacttcatgatcatgaattccagttaatttataaagaggcgatttttgtgtgccattcacactggtctttttcacattgttttgagcttattgcagtatatgttttgggatttttctgtaaaatgggtgtaattttcctaatacaggtatgtaacaacaaaagaagttgcctgcatgccggtccaaattgttctgtataaagatgctcttaaaagacacaagagttatcctagaaccttaattcttttttatttgaaattttaagtcaagtcctttataaagaccatagcagtggaaaacagtgtactttttaaaaaattgctgaatataaaatctttganaattttctttatgtgtgaagacacaaagtatgggggaagacagcaatcaaaactaactttttgtagatagccatttcatttctttaaactgtttcaacgccaatatgtattctacaaaagagaatggttttaggctccagtgttatacttttttttatatatatatataaaaataaactttacgtagtg

SEQ ID NO: 327979 - DNA, 1315 bp, Homo sapiens
tgatagggaagatgtttataaattcttctgtgggatcagagggcacgcctattacaaccagaaaactacaagtataacagcgaggatggatgaacaggctctattagggctaaatccaaatgctgattcagactttagacaaagggccctggcctattttgagcagttaaaaatttccccagatgcctggcaggtgtgtgcagaagctctagcccagaggacatacagtgatgatcatgtgaagtttttctgctttcaagtactggaacatcaagttaaatacaaatactcagaactaaccactgttcaacaacagctaattagggagacgctcatatcatggctgcaagctcagatgctgaatccccaaccagagaagacctttatacgaaataaagccgcccaagtcttcgccttgctttttgttacagagtatctcactaagtggcccaagtttttttttgacattctctcagtagtggacctaaatccaaggggagtagatctctacctgcgaatcctcatggctattgattcagagttggtggatcgtgatgtggtgcatacatcagaggaggctcgtaggaatactctcataaaagataccatgagggaacagtgcattccaaatctggtggaatcatggtaccaaatattacaaaattatcagtttactaattctgaagtgacgtgtcagtgccttgaagtagttggggcttatgtctcttggatagacttatcccttatagccaatgataggtttataaatatgctgctaggtcatatgtcaatagaagttctacgggaagaagcatgtgactgtttatttgaagttgtaaataaaggaatggaccctgttgataaaatgaaactagtggaatctttgtgtcaagtattacagtctgctgggtttttcagcattgaccaggaagaagatgttgacttcctggccagattttctaagttggtaaatggaatgggacagtcattgatagttagttggagtaaattaattaagaatggggatattaagaatgctcaagaggcactacaagctattgaaacaaaagtggcactgatgttgcagctactaattcatgaggatgatgatatttcttctaatattattggattttgttacgattatcttcatattttgaaacaggtaagtttttgttttattctttttgctcaatacataatacaaaggagccatggagaagtggaaaatatggaaaaattaaaaatgagaaaatacccataattctactacctaaagatatttactgttaaatactaatgtatttccatctta

SEQ ID NO: 327980 - DNA, 586 bp, Homo sapiens
ccggcggtggtgtgaggacagagctggctgaagccaggctggggtagacacagggcagtaggttccccaccgtgaccgaccatcccctctaaccgtctgccacacagcgggggctcccgggaggtaggggaggtggccagaccggtggggggctccgccatgccgtgcaaatgctcagggccgcctcaccctccatctggccccagcccatgccggccttccctctggggagcgacttttccagaaggccggccaggcgagagggtcttcctgacggcggagctgacctgcccggcccaccagctgcatgtcagctccgagccaccgggtccccgtccaaggctgctctgctaagttaaagacacccgaaagcgcttgactcaggtccccggagtccctggccagggccccagcccctcgcttgccctgcactgtgtggactctggggatgcaggtgtaaggggagtgtggctgggcagcccctggtcagccagggtcacgcctgtcctgggggccccaccctgctgcccgacaccccccatgggaggctgcgggcggcagttgctgtctcagagaggggagtgtg

SEQ ID NO: 327981 - DNA, 619 bp, Homo sapiens
tctcaagaaaggcctactgatgagtgagctgatgctctcaatgactctgaatttttttttaatttaggataaattgattaaatataacataaaagtaatgtcagctacaataaactttgtaatgatggagaaattagccctggtaaatggaattatagttcaaactttctaatcaaggtagtatttgtcagtactattaaaataaaaccaaaataacaagaaaaccttaggagttaaatggaaaacatgttttccaccttttcatgcgtctataccccttgagctattttctaagaaacgcatactcttcagtataccctgggtaaagtagccagacacttcatttaaaacaaataaatcatggcccggcacagtgcctcacgcctgtaatcccagcactttgggaggccaaggcgggccgatcacctgagatcaggagtttgagaccagcctggccaacatggtgaatgaaaccctgtctctactaaaaacacaaaaattaatcgggcgtggtggcaggtgcctgtaatcccagctacttgggaggttgaggcaggagaatcgcttgaacccgggaggcagaggttgcagtgagcggagatcatgccactacactcca

SEQ ID NO: 327982 - DNA, 838 bp, Homo sapiens
aagtggcaacaccattttacattcccactactaatgtacaaaggttctgtattagtctgttctcatgctgctaataaagacatagccatgactgggtaatttataaaggaaagaggcttaatggactcacagatccacatgactagggaggcctcacgatcatggtagaaggcaaagtagaagcaattttactgtgttacatggcagcaagcaagagggcgtgtgcaggggaactcccctttataaatctgatctcacatcagatcttgtgagacttattcactatcacaagaacagcacaggaaagacctgctcccatgattcaattacctcccactgggtccctcccatgacacgtggaattatgggagctacaattcaagatgagatttgggtggggacacagccaaacggtatcaggttccaattgctctgtatcctcaccaacacttatttttcttttttattatagccatcctactagttgtaaatggttttgacttgaattttttctaatggctaatgatgttgagtgtcattactcttttatgtacttattggccatttgtatatcttctttggagaaataactattccaaccctttgaccatttttaaattaggttgtatttatttatttatttatttatttatttattagaggcagatgacaagaccccataataaaaaaattagcagggtgtggtggtgtccaactgtggttccagccacttgggaggctgagatgggaaaatcacctgagtccaggaggtcaaggctgcagtgagctgtgattgtaccattgcactccagcctgggcgacatggcaaaccctgtct

SEQ ID NO: 327983 - DNA, 2894 bp, Homo sapiens
ggaattcggcacgagggacggcgggccccgcttccggcccgggcgtcgtgcgtgacccagcggcgtcacagccgaggaagcggcccggccgggagggcggggagggcgcgcggcgatcggacacgatggcgggaggaggcgggagtagcgacggcagcgggcgggcagctggcaggcgggcgtcccgcagtagcgggcgggcccggcgggggcgccacgagccggggctggggggcccggcggagcgcggcgcgggggaggcacggctggaagaggcagtcaatcgctgggtgctcaagttctacttccacgaggcgctgcgggcctttcggggtagccggtacggggacttcagacagatccgggacatcatgcaggctttgcttgtcaggcccttggggaaggagcacaccgtgtcccgattgctgcgggttatgcagtgtctgtcgcggattgaagaaggggaaaatttagactgttcctttgatatggaggctgagctcacaccactggaatcagctatcaatgtgctggagatgattaaaacggaatttacactgacagaagcagtggtcgaatccagtagaaaactggtcaaggaagctgctgtcattatttgtatcaaaaacaaagaatttgaaaaggcttcaaaaattttgaaaaaacatatgtccaaggaccccacaactcagaagctgagaaatgatctcctgaatattattcgagaaaagaacttggcccatcctgttatccagaacttttcatatgagaccttccagcagaagatgctgcgcttcctggagagccacctggatgacgccgagccctacctcctcacgatggccaaaaaggctttgaaatctgagtccgctgcctcaagtacagggaaggaagataaacagccagcaccagggcctgtggaaaagccacccagagaacccgcaaggcagctacggaatcctccaaccaccattggaatgatgactctgaaagcagctttcaagactctgtctggtgcacaggattctgaggcagcctttgcaaaactggaccagaaggatctggttcttcctactcaagctctcccagcatcaccagccctcaaaaacaagagacccagaaaagatgaaaacgaaagttcagccccggctgacggtgagggtggctcggaactgcagcccaagaacaagcgcatgacaataagcagattggtcttggaggaggacagccagagtactgagcccagcgcaggcctcaactcctcccaggaggccgcttcagcgccaccatccaagcccaccgttctcaaccaacccctccctggagagaagaatcccaaagtacccaaaggcaagtggaacagctctaatggggttgaagaaaaggagacttgggtggaagaggatgaactgtttcaagttcaggcagcaccagatgaagacagtacaaccaatataacaaaaaagcagaagtggactgtagaagaaagcgagtgggtcaaggctggagtgcagaaatatggggaaggaaactgggctgccatttctaaaaattacccatttgttaaccgaacagctgtgatgattaaggatcgctggcggaccatgaaaagacttggcatgaactgaaacaggctttcatttccacagaattcacaggagcatggttcctaataatagcccctgatagtctgctctttctttctttttcttttttttttttttttgagacagagtctcgctctgtcacccaggctggagtgcagtggcgtgatctcggctcactgcgacctccgtctcccgggctcacgccattctcctgcctcagcctcccgagtagctgggactacaggcgcccgccatcacgcccggctaatgttttgtatttttagtaaagacggggtttcaccgtgttagccaggatggtctcgatctcctgacctcgtgatccacccaactcggcctcccaaagtgctgggattacaggcatgagccaccgcgcctggcatctgctgtttctttcagaagctgggctgggatgagaattttgggcaacctccttcgacgtgggggaggtcccatttccacttcatcactgttggagatcatggagctaagaagcagagccaagtccacccatgtccttggcagagatgacaggcacacagcttgtgcagtgccagaatatcattagcgtttcccttctttagtggtttgcttaaatttaaatccctggtaatctgtagaaccttctcctaggaaatggtgaagtctattaggagccacttgtgactccatgacctgttaaaaccagcaatgtgagtattatttggagtaaatttgttccacgtcaagttctggccttctgatgcaaatgcaaaggaacttagtctgttatgaacccaggttgatgacagaccagtccttgtggaataagattccctttaaaaactctttagccagtcgtgacatcaaccctagacctgtctgccttggcatttgctgtcaacatctgctgggctatgtaggcaggttaatcctccacttctcatgtggttgaaccagtgtgttttttggtaaaatggtgattgtagataagattagttccctgatcccctgccccctgtcccctgcctcttttcccaattcccttccttatgctggacttttaaagcttaaaaaaaatccgattgaatataaatgcctaatttcattctttgtgaaatggttgcttcctcctgattccctaattgtgctgtgttcgtgtcttgcactggaattcaacattcccttctccttttgtactgtgttgtgcttgctgtctctcccggacacccttaaagactgtctttttagcaaaaaatttcagtaaagtgttttctgtaatcttttttt

SEQ ID NO: 327984 - DNA, 137 bp, Homo sapiens
taggtactgtggggcagtggctagaatactttaattttgctccccattgtgattctcatcctggctttgagttttgcttccctttgtgtcctgtggtggatcctccctccaggcagactggcctgcttgctctctgg

SEQ ID NO: 327985 - DNA, 2968 bp, Homo sapiens
ggaattcggcacgagggacggcgggccccgcttccggcccgggcgtcgtgcgtgacccagcggcgtcacagccgaggaagcggcccggccgggagggcggggagggcgcgcggcgatcggacacgatggcgggaggaggcgggagtagcgacggcagcgggcgggcagctggcaggcgggcgtcccgcagtagcgggcgggcccggcgggggcgccacgagccggggctggggggcccggcggagcgcggcgcgggggaggcacggctggaagaggcagtcaatcgctgggtgctcaagttctacttccacgaggcgctgcgggcctttcggggtagccggtacggggacttcagacagatccgggacatcatgcaggctttgcttgtcaggcccttggggaaggagcacaccgtgtcccgattgctgcgggttatgcagtgtctgtcgcggattgaagaaggggaaaatttagactgttcctttgatatggaggctgagctcacaccactggaatcagctatcaatgtgctggagatgattaaaacggaatttacactgacagaagcagtggtcgaatccagtagaaaactggtcaaggaagctgctgtcattatttgtatcaaaaacaaagaatttgaaaaggcttcaaaaattttgaaaaaacatatgtccaaggaccccacaactcagaagctgagaaatgatctcctgaatattattcgagaaaagaacttggcccatcctgttatccagaacttttcatatgagaccttccagcagaagatgctgcgcttcctggagagccacctggatgacgccgagccctacctcctcacgatggccaaaaaggctttgaaatctgagtccgctgcctcaagtacagggaaggaagataaacagccagcaccagggcctgtggaaaagccacccagagaacccgcaaggcagctacggaatcctccaaccaccattggaatgatgactctgaaagcagctttcaagactctgtctggtgcacaggattctgaggcagcctttgcaaaactggaccagaaggatctggttcttcctactcaagctctcccagcatcaccagccctcaaaaacaagagacccagaaaagatgaaaacgaaagttcagccccggctgacggtgagggtggctcggaactgcagcccaagaacaagcgcatgacaataagcagattggtcttggaggaggacagccagagtactgagcccagcgcaggcctcaactcctcccaggaggccgcttcagcgccaccatccaagcccaccgttctcaaccaacccctccctggagagaagaatcccaaagtacccaaaggcaagtggaacagctctaatggggttgaagaaaaggagacttgggtggaagaggatgaactgtttcaagttcaggcagcaccagatgaagacagtacaaccaatataacaaaaaagcagaagtggactgtagaagaaagcgagtgggtcaaggctggagtgcagaaatatggggaaggaaactgggctgccatttctaaaaattacccatttgttaaccgaacagctgtgatgattaaggatcgctggcggaccatgaaaagacttggcatgaactgaaacaggctttcatttccacagaattcacaggagcatggttcctaataatagcccctgatagtctgctctttctttctttttcttttttttttttttttgagacagagtctcgctctgtcacccaggctggagtgcagtggcgtgatctcggctcactgcgacctccgtctcccgggctcacgccattctcctgcctcagcctcccgagtagctgggactacaggcgcccgccatcacgcccggctaatgttttgtatttttagtaaagacggggtttcaccgtgttagccaggatggtctcgatctcctgacctcgtgatccacccaactcggcctcccaaagtgctgggattacaggcatgagccaccgcgcctggcatctgctgtttctttcagaagctgggctgggatgagaattttgggcaacctccttcgacgtgggggaggtcccatttccacttcatcactgttggagatcatggagctaagaagcagagccaagtccacccatgtccttggcagagatgacaggcacacagcttgtgcagtgccagaatatcattagcgtttcccttctttagtggtttgcttaaatttaaatccctggtaatctgtagaaccttctcctaggaaatggtgaagtctattaggagccacttgtgactccatgacctgttaaaaccagcaatgtgagtattatttggagtaaatttgttccacgtcaagttctggccttctgatgcaaatgcaaaggaacttagtctgttatgaacccaggttgatgacagaccagtccttgtggaataagattccctttaaaaactctttagccagtcgtgacatcaaccctagacctgtctgccttggcatttgctgtcaacatctgctgggctatgtaggcaggttaatcctccacttctcatgtggttgaaccagtgtgttttttggtaaaatggtgattgtagataagattagttccctgatcccctgccccctgtcccctgcctcttttcccaattcccttccttatgctggacttttaaagcttaaaaaaaatccgattgaatataaatgcctaatttcattctttgtgaaatggttgcttcctcctgattccctaattgtgctgtgttcgtgtcttgcactggaattcaacattcccttctccttttgtactgtgttgtgcttgctgtctctcccggacacccttaaagactgtctttttagcaaaaaatttcagtaaagtgttttctgtaatctttttttaaaaggtgagaactaattattgtccatacttgtagcattcttcattaaagtcttgcttctctcaaaaaaaagta

SEQ ID NO: 327986 - DNA, 2423 bp, Homo sapiens
agactgttcgaccagggttggcagtggtcgaatccagtagaaagctggtcaagggaagctgctgtcattatttgtatcaaaaacaaagaatttgaaaaggcttcaaaaattttgaaaaaacatatgtccaaggaccccacaactcagaagctgagaaatgatctcctgaatattattcgagaaaagaacttggcccatcctgttatccagaacttttcatatgagaccttccagcagaagatgctgcgcttcctggagagccacctggatgacgccgagccctacctcctcacgatggccaaaaaggctttgaaatctgagtccgctgcctcaagtacagggaaggaagataaacagccagcaccagggcctgtggaaaagccacccagagaacccgcaaggcagctacggaatcctccaaccaccattggaatgatgactctgaaagcagctttcaagactctgtctggtgcacaggattctgaggcagcctttgcaaaactggaccagaaggatctggttcttcctactcaagctctcccagcatcaccagccctcaaaaacaagagacccagaaaagatgaaaacgaaagttcagccccggctgacggtgagggtggctcggaactgcagcccaagaacaagcgcatgacaataagcagattggtcttggaggaggacagccagagtactgagcccagcgcaggcctcaactcctcccaggaggccgcttcagcgccaccatccaagcccaccgttctcaaccaacccctccctggagagaagaatcccaaagtacccaaaggcaagtggaacagctctaatggggttgaagaaaaggagacttgggtggaagaggatgaactgtttcaagttcaggcagcaccagatgaagacagtacaaccaatataacaaaaaagcagaagtggactgtagaagaaagcgagtgggtcaaggctggagtgcagaaatatggggaaggaaactgggctgccatttctaaaaattacccatttgttaaccgaacagctgtgatgattaaggatcgctggcggaccatgaaaagacttggcatgaactgaaacaggctttcatttccacagaattcacaggagcatggttcctaataatagcccctgatagtctgctctttctttctttttcttttttttttttttttgagacagagtctcgctctgtcacccaggctggagtgcagtggcgtgatctcggctcactgcgacctccgtctcccgggctcacgccattctcctgcctcagcctcccgagtagctgggactacaggcgcccgccatcacgcccggctaatgttttgtatttttagtaaagacggggtttcaccgtgttagccaggatggtctcgatctcctgacctcgtgatccacccaactcggcctcccaaagtgctgggattacaggcatgagccaccgcgcctggcatctgctgtttctttcagaagctgggctgggatgagaattttgggcaacctccttcgacgtgggggaggtcccatttccacttcatcactgttggagatcatggagctaagaagcagagccaagtccacccatgtccttggcagagatgacaggcacacagcttgtgcagtgccagaatatcattagcgtttcccttctttagtggtttgcttaaatttaaatccctggtaatctgtagaaccttctcctaggaaatggtgaagtctattaggagccacttgtgactccatgacctgttaaaaccagcaatgtgagtattatttggagtaaatttgttccacgtcaagttctggccttctgatgcaaatgcaaaggaacttagtctgttatgaacccaggttgatgacagaccagtccttgtggaataagattccctttaaaaactctttagccagtcgtgacatcaaccctagacctgtctgccttggcatttgctgtcaacatctgctgggctatgtaggcaggttaatcctccacttctcatgtggttgaaccagtgtgttttttggtaaaatggtgattgtagataagattagttccctgatcccctgccccctgtcccctgcctcttttcccaattcccttccttatgctggacttttaaagcttaaaaaaaatccgattgaatataaatgcctaatttcattctttgtgaaatggttgcttcctcctgattccctaattgtgctgtgttcgtgtcttgcactggaattcaacattcccttctccttttgtactgtgttgtgcttgctgtctctcccggacacccttaaagactgtctttttagcaaaaaatttcagtaaagtgttttctgtaatctttttttaaaaggtgagaactaattattgtccatacttgtagcattcttcattaaagtcttgcttctctcaaaaaaaagta

SEQ ID NO: 327987 - DNA, 2688 bp, Homo sapiens
acgcgagcggcgagccggagcgcggagcccggctcccgcaccatggaggaggacgacagctacgttcccagtgacctgacagcagaggagcgtcaagaactggagaacatccgacggagaaaacaggagctgctggctgacattcagaggctgaaggatgagatagcagaagtagctaatgaaattgaaaacctgggatccacagaggaaaggctgtcattatttgtatcaaaaacaaagaatttgaaaaggcttcaaaaattttgaaaaaacatatgtccaaggaccccacaactcagaagctgagaaatgatctcctgaatattattcgagaaaagaacttggcccatcctgttatccagaacttttcatatgagaccttccagcagaagatgctgcgcttcctggagagccacctggatgacgccgagccctacctcctcacgattggatttgtaagtgaacttgtttgcatattgagtatattcttggtgaaagaagcagagaattaatgcaattctgtggcctcttcttcctgatgacatccttcctttcccagatggccaaaaaggctttgaaatctgagtccgctgcctcaagtacagggaaggaagataaacagccagcaccagggcctgtggaaaagccacccagagaacccgcaaggcagctacggaatcctccaaccaccattggaatgatgactctgaaagcagctttcaagactctgtctggtgcacaggattctgaggcagcctttgcaaaactggaccagaaggatctggttcttcctactcaagctctcccagcatcaccagccctcaaaaacaagagacccagaaaagatgaaaacgaaagttcagccccggctgacggtgagggtggctcggaactgcagcccaagaacaagcgcatgacaataagcagattggtcttggaggaggacagccagagtactgagcccagcgcaggcctcaactcctcccaggaggccgcttcagcgccaccatccaagcccaccgttctcaaccaacccctccctggagagaagaatcccaaagtacccaaaggcaagtggaacagctctaatggggttgaagaaaaggagacttgggtggaagaggatgaactgtttcaagttcaggcagcaccagatgaagacagtacaaccaatataacaaaaaagcagaagtggactgtagaagaaagcgagtgggtcaaggctggagtgcagaaatatggggaaggaaactgggctgccatttctaaaaattacccatttgttaaccgaacagctgtgatgattaaggatcgctggcggaccatgaaaagacttggcatgaactgaaacaggctttcatttccacagaattcacaggagcatggttcctaataatagcccctgatagtctgctctttctttctttttcttttttttttttttttgagacagagtctcgctctgtcacccaggctggagtgcagtggcgtgatctcggctcactgcgacctccgtctcccgggctcacgccattctcctgcctcagcctcccgagtagctgggactacaggcgcccgccatcacgcccggctaatgttttgtatttttagtaaagacggggtttcaccgtgttagccaggatggtctcgatctcctgacctcgtgatccacccaactcggcctcccaaagtgctgggattacaggcatgagccaccgcgcctggcatctgctgtttctttcagaagctgggctgggatgagaattttgggcaacctccttcgacgtgggggaggtcccatttccacttcatcactgttggagatcatggagctaagaagcagagccaagtccacccatgtccttggcagagatgacaggcacacagcttgtgcagtgccagaatatcattagcgtttcccttctttagtggtttgcttaaatttaaatccctggtaatctgtagaaccttctcctaggaaatggtgaagtctattaggagccacttgtgactccatgacctgttaaaaccagcaatgtgagtattatttggagtaaatttgttccacgtcaagttctggccttctgatgcaaatgcaaaggaacttagtctgttatgaacccaggttgatgacagaccagtccttgtggaataagattccctttaaaaactctttagccagtcgtgacatcaaccctagacctgtctgccttggcatttgctgtcaacatctgctgggctatgtaggcaggttaatcctccacttctcatgtggttgaaccagtgtgttttttggtaaaatggtgattgtagataagattagttccctgatcccctgccccctgtcccctgcctcttttcccaattcccttccttatgctggacttttaaagcttaaaaaaaatccgattgaatataaatgcctaatttcattctttgtgaaatggttgcttcctcctgattccctaattgtgctgtgttcgtgtcttgcactggaattcaacattcccttctccttttgtactgtgttgtgcttgctgtctctcccggacacccttaaagactgtctttttagcaaaaaatttcagtaaagtgttttctgtaatctttttttaaaaggtgagaactaattattgtccatacttgtagcattcttcattaaagtcttgcttctctcaaaaaaaagta

SEQ ID NO: 327988 - DNA, 1488 bp, Homo sapiens
ggaattcggcacgagggacggcgggccccgcttccggcccgggcgtcgtgcgtgacccagcggcgtcacagccgaggaagcggcccggccgggagggcggggagggcgcgcggcgatcggacacgatggcgggaggaggcgggagtagcgacggcagcgggcgggcagctggcaggcgggcgtcccgcagtagcgggcgggcccggcgggggcgccacgagccggggctggggggcccggcggagcgcggcgcgggggaggcacggctggaagaggcagtcaatcgctgggtgctcaagttctacttccacgaggcgctgcgggcctttcggggtagccggtacggggacttcagacagatccgggacatcatgcaggctttgcttgtcaggcccttggggaaggagcacaccgtgtcccgattgctgcgggttatgcagtgtctgtcgcggattgaagaaggggaaaatttagactgttcctttgatatggaggctgagctcacaccactggaatcagctatcaatgtgctggagatgattaaaacggaatttacactgacagaagcagtggtcgaatccagtagaaaactggtcaaggaagctgctgtcattatttgtatcaaaaacaaagaatttgaaaaggcttcaaaaattttgaaaaaacatatgtccaaggaccccacaactcagaagctgagaaatgatctcctgaatattattcgagaaaagaacttggcccatcctgttatccagaacttttcatatgagaccttccagcagaagatgctgcgcttcctggagagccacctggatgacgccgagccctacctcctcacgatggccaaaaaggctttgaaatctgagtccgctgcctcaagtacagggaaggaagataaacagccagcaccagggcctgtggaaaagccacccagagaacccgcaaggcagctacggaatcctccaaccaccattggaatgatgactctgaaagcagctttcaagactctgtctggtgcacaggattctgaggcagcctttgcaaaactggaccagaaggatctggttcttcctactcaagctctcccagcatcaccagccctcaaaaacaagagacccagaaaagatgaaaacgaaagttcagccccggctgacggtgagggtggctcggaactgcagcccaagaacaagcgcatgacaataagcagattggtcttggaggaggacagccagagtactgagcccagcgcaggcctcaactcctcccaggaggccgcttcagcgccaccatccaagcccaccgttctcaaccaacccctccctggagagaagaatcccaaagtacccaaaggcaagtggaacagctctaatggggttgaagaaaaggagacttgggtggaagaggatgaactgtttcaagttcagggtaagcagaagattctccttggcctcttcttgatgcttgctgaagtacagatgcgtgttactg

SEQ ID NO: 327989 - DNA, 416 bp, Homo sapiens
gcactagggcatgagtgggaatggaaaggtttcagagcctcctactcatcgctgctttcatttttagcaaacatctgagtgtcttgacttctaaacattagtcttgtgtgttaaaagaaatttgtttgcattgggccacattatactttgacccttaaaaagagactgatgaatatgtataattttgcacccttctgagcatttgagacttggcaagttcagtgaatacttactaatctcccatgtcctgctaggtactgtggggcagtggctagaatactttaattttgctccccattgtgattctcatcctggctttgagttttgcttccctttgtgtcctgtggtggatcctccctccaggcagactggcctgcttgctctctggaacatgttgtttgtttctaccactgtac

SEQ ID NO: 327990 - DNA, 381 bp, Homo sapiens
cttctcatatgaggccttccagcagaagatactgcgcttcctggagagccacctggatgacgccgagccctacctcctcacggctgtcattatttgtatcaaaaacaaagaatttgaaaaggcttcaaaaattttgaaaaaacatatgtccaaggaccccacaactcagaagctgagaaatgatctcctgaatattattcgagaaaagaacttggcccatcctgttatccagaacttttcatatgagaccttccagcagaagatgctgcgcttcctggagagccacctggatgacgccgagccctacctcctcacgctgtcattatttgtatcaaaaacaaagaattgaaaaggcttcaaaaatttgaaaaacatattcca

SEQ ID NO: 327991 - DNA, 2930 bp, Homo sapiens
ggaattcggcacgagggacggcgggccccgcttccggcccgggcgtcgtgcgtgacccagcggcgtcacagccgaggaagcggcccggccgggagggcggggagggcgcgcggcgatcggacacgatggcgggaggaggcgggagtagcgacggcagcgggcgggcagctggcaggcgggcgtcccgcagtagcgggcgggcccggcgggggcgccacgagccggggctggggggcccggcggagcgcggcgcgggggaggcacggctggaagaggcagtcaatcgctgggtgctcaagttctacttccacgaggcgctgcgggcctttcggggtagccgctttgcttgtcaggcccttggggaaggagcacaccgtgtcccgattgctgcgggttatgcagtgtctgtcgcggattgaagaaggggaaaatttagactgttcctttgatatggaggctgagctcacaccactggaatcagctatcaatgtgctggagatgattaaaacggaatttacactgacagaagcagtggtcgaatccagtagaaaactggtcaaggaagctgctgtcattatttgtatcaaaaacaaagaatttgaaaaggcttcaaaaattttgaaaaaacatatgtccaaggaccccacaactcagaagctgagaaatgatctcctgaatattattcgagaaaagaacttggcccatcctgttatccagaacttttcatatgagaccttccagcagaagatgctgcgcttcctggagagccacctggatgacgccgagccctacctcctcacgatggccaaaaaggctttgaaatctgagtccgctgcctcaagtacagggaaggaagataaacagccagcaccagggcctgtggaaaagccacccagagaacccgcaaggcagctacggaatcctccaaccaccattggaatgatgactctgaaagcagctttcaagactctgtctggtgcacaggattctgaggcagcctttgcaaaactggaccagaaggatctggttcttcctactcaagctctcccagcatcaccagccctcaaaaacaagagacccagaaaagatgaaaacgaaagttcagccccggctgacggtgagggtggctcggaactgcagcccaagaacaagcgcatgacaataagcagattggtcttggaggaggacagccagagtactgagcccagcgcaggcctcaactcctcccaggaggccgcttcagcgccaccatccaagcccaccgttctcaaccaacccctccctggagagaagaatcccaaagtacccaaaggcaagtggaacagctctaatggggttgaagaaaaggagacttgggtggaagaggatgaactgtttcaagttcaggcagcaccagatgaagacagtacaaccaatataacaaaaaagcagaagtggactgtagaagaaagcgagtgggtcaaggctggagtgcagaaatatggggaaggaaactgggctgccatttctaaaaattacccatttgttaaccgaacagctgtgatgattaaggatcgctggcggaccatgaaaagacttggcatgaactgaaacaggctttcatttccacagaattcacaggagcatggttcctaataatagcccctgatagtctgctctttctttctttttcttttttttttttttttgagacagagtctcgctctgtcacccaggctggagtgcagtggcgtgatctcggctcactgcgacctccgtctcccgggctcacgccattctcctgcctcagcctcccgagtagctgggactacaggcgcccgccatcacgcccggctaatgttttgtatttttagtaaagacggggtttcaccgtgttagccaggatggtctcgatctcctgacctcgtgatccacccaactcggcctcccaaagtgctgggattacaggcatgagccaccgcgcctggcatctgctgtttctttcagaagctgggctgggatgagaattttgggcaacctccttcgacgtgggggaggtcccatttccacttcatcactgttggagatcatggagctaagaagcagagccaagtccacccatgtccttggcagagatgacaggcacacagcttgtgcagtgccagaatatcattagcgtttcccttctttagtggtttgcttaaatttaaatccctggtaatctgtagaaccttctcctaggaaatggtgaagtctattaggagccacttgtgactccatgacctgttaaaaccagcaatgtgagtattatttggagtaaatttgttccacgtcaagttctggccttctgatgcaaatgcaaaggaacttagtctgttatgaacccaggttgatgacagaccagtccttgtggaataagattccctttaaaaactctttagccagtcgtgacatcaaccctagacctgtctgccttggcatttgctgtcaacatctgctgggctatgtaggcaggttaatcctccacttctcatgtggttgaaccagtgtgttttttggtaaaatggtgattgtagataagattagttccctgatcccctgccccctgtcccctgcctcttttcccaattcccttccttatgctggacttttaaagcttaaaaaaaatccgattgaatataaatgcctaatttcattctttgtgaaatggttgcttcctcctgattccctaattgtgctgtgttcgtgtcttgcactggaattcaacattcccttctccttttgtactgtgttgtgcttgctgtctctcccggacacccttaaagactgtctttttagcaaaaaatttcagtaaagtgttttctgtaatctttttttaaaaggtgagaactaattattgtccatacttgtagcattcttcattaaagtcttgcttctctcaaaaaaaagta

SEQ ID NO: 327992 - DNA, 1786 bp, Homo sapiens
ggaattcggcacgagggacggcgggccccgcttccggcccgggcgtcgtgcgtgacccagcggcgtcacagccgaggaagcggcccggccgggagggcggggagggcgcgcggcgatcggacacgatggcgggaggaggcgggagtagcgacggcagcgggcgggcagctggcaggcgggcgtcccgcagtagcgggcgggcccggcgggggcgccacgagccggggctggggggcccggcggagcgcggcgcgggggaggcacggctggaagaggcagtcaatcgctgggtgctcaagttctacttccacgaggcgctgcgggcctttcggggtagccggtacggggacttcagacagatccgggacatcatgcaggctttgcttgtcaggcccttggggaaggagcacaccgtgtcccgattgctgcgggttatgcagtgtctgtcgcggattgaagaaggggaaaatttagactgttcctttgatatggaggctgagctcacaccactggaatcagctatcaatgtgctggagatgattaaaacggaatttacactgacagaagcagtggtcgaatccagtagaaaactggtcaaggaagctgctgtcattatttgtatcaaaaacaaagaatttgaaaaggcttcaaaaattttgaaaaaacatatgtccaaggaccccacaactcagaagctgagaaatgatctcctgaatattattcgagaaaagaacttggcccatcctgttatccagaacttttcatatgagaccttccagcagaagatgctgcgcttcctggagagccacctggatgacgccgagccctacctcctcacgatggccaaaaaggctttgaaatctgagtccgctgcctcaagtacagggaaggaagataaacagccagcaccagggcctgtggaaaagccacccagagaacccgcaaggcagctacggaatcctccaaccaccattggaatgatgactctgaaagcagctttcaagactctgtctggtgcacaggattctgaggcagcctttgcaaaactggaccagaaggatctggttcttcctactcaagctctcccagcatcaccagccctcaaaaacaagagacccagaaaagatgaaaacgaaagttcagccccggctgacggtgagggtggctcggaactgcagcccaagaacaagcgcatgacaataagcagattggtcttggaggaggacagccagagtactgagcccagcgcaggcctcaactcctcccaggaggccgcttcagcgccaccatccaagcccaccgttctcaaccaacccctccctggagagaagaatcccaagtatgaagaccttctttgtagaaattttggggctggttggtggtcctggttgggcctggtattacttccgtgaatgaagtaactttcagctaagttactcaccaccaaggcttgctcagactgctagaacttgacgcaggagtggccagtgacgacgtagccatccctgccggttctgaagccccgcatgtgggcttccaagccttgcactagggcatgagtgggaatggaaaggtttcagagcctcctactcatcgctgctttcatttttagcaaacatctgagtgtcttgacttctaaacattagtcttgtgtgttaaaagaaatttgtttgcattgggccacattatactttgacccttaaaaagagactgatgaatatgtataattttgcacccttctgagcatttgagacttggcaagttcagtgaatacttactaatctcc

SEQ ID NO: 327993 - DNA, 275 bp, Homo sapiens
gtctcagcactgggtgcatcgtcccacaggaatgacacctagacacccaacatacaactgcagggccctaaactatgggccagcccacccctaaatgcccttctctctacccttgcccatatcaaatattacaagcctctcacacatatttaccagtcatactgggaaaaaaatagtcctttatcattttaacatttcacaagtaactaaaacaaataataaacatgctaacacttgggaatggtctatttcttttctttttttttttttttgag

SEQ ID NO: 327994 - DNA, 344 bp, Homo sapiens
cagaaagaggtctccactcagacccagcgagaggcttcttggatgtcgcgtaggaaagaattcggggcgagtccacggactaaagtgaaagcaagtgtattagagaagtgagaaagcaaaagaatggcagagcagggcattcctgaaagcgggaggaggaaggcgcccgccttaggtacagtgcttgttcaaatctaaggtaacacagccaaagaaatcttgggggacatgggctctaccacgagggcccacgaccaaggtttcatgcgcgtccgtgtgaagagaccaccaaacaggatttgtgtgagcaacatggctgtttatttcacctgggtgcaggcggg

SEQ ID NO: 327995 - DNA, 438 bp, Homo sapiens
tgcatcccacatcgtcaagccaagatctgtcccacgaaacatttccagttatgtgatgggtgtgtgggtctcggactgttccaggaagtgtggtctgtgttggtcgggggctcacagccgtgaagaggctagtccggctgctcaggactgggagggaggctggagaatgtctgccaggctcttctgctctccaggaagagtggaggtgcctcagttagtggggatacgtgggatggggaggggctgctagagcactgccctggaggtggaggtgggtcagccaggccggtgcagacaggaggaagggcctgtggccctcgtggggtccggctcgagggactggacttgtttggggaagtctaggccttctgtttggacgggtctcatttgggatcacctttcagcacccacggggagacatgggtgtgacggggtgtg

SEQ ID NO: 327996 - DNA, 2486 bp, Homo sapiens
  misc_feature (1904)..(1904): n is a, c, g, or t
  misc_feature (1906)..(1906): n is a, c, g, or t
  misc_feature (1908)..(1909): n is a, c, g, or t
  misc_feature (1942)..(1942): n is a, c, g, or t
  misc_feature (1953)..(1953): n is a, c, g, or t
  misc_feature (1960)..(1960): n is a, c, g, or t
ggagtccagtgctggaggggcaggacggcggcggcgcagctcggaacccgccaggtccagggtccaggttccagcgcccggcggcccaggcaccccccgagcccagctccacacaccgttcctggatctcctctccccaggcggagcgtgcccctgcccagtccagtgaccttcgcctgttggagccctggttaatttttgcccagtctgcctgttgtggggctcctcccctttggggatataagcccggcctggggctgctccgttctctgcctggcctgaggctccctgagccgcctccccaccatcaccatggccaagggcttctatatttccaagtccctgggcatcctggggatcctcctgggcgtggcagccgtgtgcacaatcatcgcactgtcagtggtgtactcccaggagaagaacaagaacgccaacagctcccccgtggcctccaccaccccgtccgcctcagccaccaccaaccccgcctcggccaccaccttggaccaaagtaaagcgtggaatcgttaccgcctccccaacacgctgaaacccgattcctaccgggtgacgctgagaccgtacctcacccccaatgacaggggcctgtacgtttttaagggctccagcaccgtccgtttcacctgcaaggaggccactgacgtcatcatcatccacagcaagaagctcaactacaccctcagccaggggcacagggtggtcctgcgtggtgtgggaggctcccagccccccgacattgacaagactgagctggtggagcccaccgagtacctggtggtgcacctcaagggctccctggtgaaggacagccagtatgagatggacagcgagttcgagggggagttggcagatgacctggcgggcttctaccgcagcgagtacatggagggcaatgtcagaaaggtggtggccactacacagatgcaggctgcagatgcccggaagtccttcccatgcttcgatgagccggccatgaaggccgagttcaacatcacgcttatccaccccaaggacctgacagccctgtccaacatgcttcccaaaggtcccagcaccccacttccagaagaccccaactggaatgtcactgagttccacaccacgcccaagatgtccacgtacttgctggccttcattgtcagtgagttcgactacgtggagaagcaggcatccaatggtgtcttgatccggatctgggcccggcccagtgccattgcggcgggccacggcgattatgccctgaacgtgacgggccccatccttaacttctttgctggtcattatgacacaccctaaccaatcccaaaatcagaccagattggcctgccagaacttcaacgccggcgccatggagaactggggactggtgacctaccgggagaactccctgctgttcgaccccctgtcctcctccagcagcaacaaggagcgggtggtcactgtgattgctcatgagctggcccaccagtggttcgggaacctggtgaccatagagtggtggaatgacctgtggctgaacgagggcttcgcctcctacgtggagtacctgggtgctgactatgcggagcccacctggaacttgaaagacctcatggtgctgaatgatgtgtaccgcgtgatggcagtggatgcactggcctcctcccacccgctgtccacacccgcctcggagatcaacacgccggcccagatcagtgagctgtttgacgccatctcctacagcaagggcgcctcagtcctcaggatgctctccagcttcctgtccgaggacgtattcaagcagggcctggcgtcctacctccacacctttgcctaccagaacaccatctacctgaacctgtgggaccacctgcaggaggctgtgaacaaccggtccatcnantnnccaccaccgtgcgggacatcatgaaccgtggancctgcagatgngcttccnggtatcacggtgggataccagcacgggggaaccctttacccaggaaagaatttcctcctttgaacccggatcccaatggtacccggccctcaaattcagtacgtgtggattgtgcccattaaatccattcgagatggcagacagacagcgggactctggggtggtaagtgggaaaagccaaacggaccttcaggcatcaggcagagtggggcctagcggaaccacaatgtgatgaggcaatcccggggagccaacacaagaaactgttataacacacactggccggagcaagaacactgcgcaccacgatgtataggggagacaaaaatagaactaacaacggagccagacgacagtactgcaggtgcacaccaccacttgtaggtaagacacgcagcagcagcgacagagactagctgcacacgtgcacagccaaacagcatcgtactgcatcgcagcggtcgcgcgctacgatcgtatcttgcagagctgagtgacgagcgaagcaagaccgcacgagcggagc

SEQ ID NO: 327997 - DNA, 2526 bp, Homo sapiens
  misc_feature (1944)..(1944): n is a, c, g, or t
  misc_feature (1946)..(1946): n is a, c, g, or t
  misc_feature (1948)..(1949): n is a, c, g, or t
  misc_feature (1982)..(1982): n is a, c, g, or t
  misc_feature (1993)..(1993): n is a, c, g, or t
  misc_feature (2000)..(2000): n is a, c, g, or t
gagcgacagagcgagactctgtctcaaaaacaaataaaggaaaaagaaaaaaatgagaagcgcgtgttcccgactccggtgctttttcgcaaggtcgtgctactgcgccttctgaactacgagtcccaggcaccccccgagcccagctccacacaccgttcctggatctcctctccccaggcggagcgtgcccctgcccagtccagtgaccttcgcctgttggagccctggttaatttttgcccagtctgcctgttgtggggctcctcccctttggggatataagcccggcctggggctgctccgttctctgcctggcctgaggctccctgagccgcctccccaccatcaccatggccaagggcttctatatttccaagtccctgggcatcctggggatcctcctgggcgtggcagccgtgtgcacaatcatcgcactgtcagtggtgtactcccaggagaagaacaagaacgccaacagctcccccgtggcctccaccaccccgtccgcctcagccaccaccaaccccgcctcggccaccaccttggaccaaagtaaagcgtggaatcgttaccgcctccccaacacgctgaaacccgattcctaccgggtgacgctgagaccgtacctcacccccaatgacaggggcctgtacgtttttaagggctccagcaccgtccgtttcacctgcaaggaggccactgacgtcatcatcatccacagcaagaagctcaactacaccctcagccaggggcacagggtggtcctgcgtggtgtgggaggctcccagccccccgacattgacaagactgagctggtggagcccaccgagtacctggtggtgcacctcaagggctccctggtgaaggacagccagtatgagatggacagcgagttcgagggggagttggcagatgacctggcgggcttctaccgcagcgagtacatggagggcaatgtcagaaaggtggtggccactacacagatgcaggctgcagatgcccggaagtccttcccatgcttcgatgagccggccatgaaggccgagttcaacatcacgcttatccaccccaaggacctgacagccctgtccaacatgcttcccaaaggtcccagcaccccacttccagaagaccccaactggaatgtcactgagttccacaccacgcccaagatgtccacgtacttgctggccttcattgtcagtgagttcgactacgtggagaagcaggcatccaatggtgtcttgatccggatctgggcccggcccagtgccattgcggcgggccacggcgattatgccctgaacgtgacgggccccatccttaacttctttgctggtcattatgacacaccctaaccaatcccaaaatcagaccagattggcctgccagaacttcaacgccggcgccatggagaactggggactggtgacctaccgggagaactccctgctgttcgaccccctgtcctcctccagcagcaacaaggagcgggtggtcactgtgattgctcatgagctggcccaccagtggttcgggaacctggtgaccatagagtggtggaatgacctgtggctgaacgagggcttcgcctcctacgtggagtacctgggtgctgactatgcggagcccacctggaacttgaaagacctcatggtgctgaatgatgtgtaccgcgtgatggcagtggatgcactggcctcctcccacccgctgtccacacccgcctcggagatcaacacgccggcccagatcagtgagctgtttgacgccatctcctacagcaagggcgcctcagtcctcaggatgctctccagcttcctgtccgaggacgtattcaagcagggcctggcgtcctacctccacacctttgcctaccagaacaccatctacctgaacctgtgggaccacctgcaggaggctgtgaacaaccggtccatcnantnnccaccaccgtgcgggacatcatgaaccgtggancctgcagatgngcttccnggtatcacggtgggataccagcacgggggaaccctttacccaggaaagaatttcctcctttgaacccggatcccaatggtacccggccctcaaattcagtacgtgtggattgtgcccattaaatccattcgagatggcagacagacagcgggactctggggtggtaagtgggaaaagccaaacggaccttcaggcatcaggcagagtggggcctagcggaaccacaatgtgatgaggcaatcccggggagccaacacaagaaactgttataacacacactggccggagcaagaacactgcgcaccacgatgtataggggagacaaaaatagaactaacaacggagccagacgacagtactgcaggtgcacaccaccacttgtaggtaagacacgcagcagcagcgacagagactagctgcacacgtgcacagccaaacagcatcgtactgcatcgcagcggtcgcgcgctacgatcgtatcttgcagagctgagtgacgagcgaagcaagaccgcacgagcggagc

SEQ ID NO: 327998 - DNA, 2431 bp, Homo sapiens
  misc_feature (1849)..(1849): n is a, c, g, or t
  misc_feature (1851)..(1851): n is a, c, g, or t
  misc_feature (1853)..(1854): n is a, c, g, or t
  misc_feature (1887)..(1887): n is a, c, g, or t
  misc_feature (1898)..(1898): n is a, c, g, or t
  misc_feature (1905)..(1905): n is a, c, g, or t
ggagtccagtgctggaggggcaggacggcggcggcgcagctcggaacccgccaggtccagggtccaggttccagcgcccggcggcccaggcaccccccgagcccagctccacacaccgttcctggatctcctctccccaggcggagcgtgcccctgcccagtccagtgaccttcgcctgttggagccctggttaatttttgcccagtctgcctgttgtggggctcctcccctttggggatataagcccggcctggggctgctccgttctctgcctggcctgaggctccctgagccgcctccccaccatcaccatggccaagggcttctatatttccaagtccctgggcatcctggggatcctcctgggcgtggcagccgtgtgcacaatcatcgcactgtcagtggtgtactcccaggagaagaacaagaacgccaacagctcccccgtggcctccaccaccccgtccgcctcagccaccaccaaccccgcctcggccaccaccttggaccaaagtaaagcgtggaatcgttaccgcctccccaacacgctgaaacccgattcctaccgggtgacgctgagaccgtacctcacccccaatgacaggggcctgtacgtttttaagggctccagcaccgtccgtttcacctgcaaggaggccactgacgtcatcatcatccacagcaagaagctcaactacaccctcagccaggggcacagggtggtcctgcgtggtgtgggaggctcccagccccccgacattgacaagactgagctggtggagcccaccgagtacctggtggtgcacctcaagggctccctggtgaaggacagccagtatgagatggacagcgagttcgagggggagttggcagatgacctggcgggcttctaccgcagcgagtacatggagggcaatgtcagaaaggtggtggccactacacagatgcaggctgcagatgcccggaagtccttcccatgcttcgatgagccggccatgaaggccgagttcaacatcacgcttatccaccccaaggacctgacagccctgtccaacatgcttcccaaaggtcccagcaccccacttccagaagaccccaactggaatgtcatgagttcgactacgtggagaagcaggcatccaatggtgtcttgatccggatctgggcccggcccagtgccattgcggcgggccacggcgattatgccctgaacgtgacgggccccatccttaacttctttgctggtcattatgacacaccctaaccaatcccaaaatcagaccagattggcctgccagaacttcaacgccggcgccatggagaactggggactggtgacctaccgggagaactccctgctgttcgaccccctgtcctcctccagcagcaacaaggagcgggtggtcactgtgattgctcatgagctggcccaccagtggttcgggaacctggtgaccatagagtggtggaatgacctgtggctgaacgagggcttcgcctcctacgtggagtacctgggtgctgactatgcggagcccacctggaacttgaaagacctcatggtgctgaatgatgtgtaccgcgtgatggcagtggatgcactggcctcctcccacccgctgtccacacccgcctcggagatcaacacgccggcccagatcagtgagctgtttgacgccatctcctacagcaagggcgcctcagtcctcaggatgctctccagcttcctgtccgaggacgtattcaagcagggcctggcgtcctacctccacacctttgcctaccagaacaccatctacctgaacctgtgggaccacctgcaggaggctgtgaacaaccggtccatcnantnnccaccaccgtgcgggacatcatgaaccgtggancctgcagatgngcttccnggtatcacggtgggataccagcacgggggaaccctttacccaggaaagaatttcctcctttgaacccggatcccaatggtacccggccctcaaattcagtacgtgtggattgtgcccattaaatccattcgagatggcagacagacagcgggactctggggtggtaagtgggaaaagccaaacggaccttcaggcatcaggcagagtggggcctagcggaaccacaatgtgatgaggcaatcccggggagccaacacaagaaactgttataacacacactggccggagcaagaacactgcgcaccacgatgtataggggagacaaaaatagaactaacaacggagccagacgacagtactgcaggtgcacaccaccacttgtaggtaagacacgcagcagcagcgacagagactagctgcacacgtgcacagccaaacagcatcgtactgcatcgcagcggtcgcgcgctacgatcgtatcttgcagagctgagtgacgagcgaagcaagaccgcacgagcggagc

SEQ ID NO: 327999 - DNA, 407 bp, Homo sapiens
gacattgacaagactgagctggtggagcccaccgagtacctggtggtgcacctcaagggctccctggtgaaggacagccagtatgagatggacagcgagttcgagggggagttggcagatgacctggcgggcttctaccgcagcgagtacatggagggcaatgtcagaaagtgagttccggctgggctgcccggtggggtggatccgaggtgctgaggcaaggctggattctgagggccaaggaaggacttagcttgcaggcctttgaaccctgtggagcccgagactggcccattgcttcacctccagctgctggcaaagcagctgcaaatgcaccgaactgggagggcttccccacccctcaccagggagctggggatgagggacagagcgtcccttggacagac

SEQ ID NO: 328000 - DNA, 1919 bp, Homo sapiens
ggagtccagtgctggaggggcaggacggcggcggcgcagctcggaacccgccaggtccagggtccaggttccagcgcccggcggcccaggcaccccccgagcccagctccacacaccgttcctggatctcctctccccaggcggagcgtgcccctgcccagtccagtgaccttcgcctgttggagccctggttaatttttgcccagtctgcctgttgtggggctcctcccctttggggatataagcccggcctggggctgctccgttctctgcctggcctgaggctccctgagccgcctccccaccatcaccatggccaagggcttctatatttccaagtccctgggcatcctggggatcctcctgggcgtggcagccgtgtgcacaatcatcgcactgtcagtggtgtactcccaggagaagaacaagaacgccaacagctcccccgtggcctccaccaccccgtccgcctcagccaccaccaaccccgcctcggccaccaccttggaccaaagtaaagcgtggaatcgttaccgcctccccaacacgctgaaacccgattcctaccgggtgacgctgagaccgtacctcacccccaatgacaggggcctgtacgtttttaagggctccagcaccgtccgtttcacctgcaaggaggccactgacgtcatcatcatccacagcaagaagctcaactacaccctcagccaggggcacagggtggtcctgcgtggtgtgggaggctcccagccccccgacattgacaagactgagctggtggagcccaccgagtacctggtggtgcacctcaagggctccctggtgaaggacagccagtatgagatggacagcgagttcgagggggagttggcagatgacctggcgggcttctaccgcagcgagtacatggagggcaatgtcagaaaggtggtggccactacacagatgcaggctgcagatgcccggaagtccttcccatgcttcgatgagccggccatgaaggccgagttcaacatcacgcttatccaccccaaggacctgacagccctgtccaacatgcttcccaaaggtcccagcaccccacttccagaagaccccaactggaatgtcactgagttccacaccacgcccaagatgtccacgtacttgctggccttcattgtcagtgagttcgactacgtggagaagcaggcatccaatggtgtcttgatccggatctgggcccggcccagtgccattgcggcgggccacggcgattatgccctgaacgtgacgggccccatccttaacttctttgctggtcattatgacacaccctaaccaatcccaaaatcagaccagattggcctgccagaacttcaacgccggcgccatggagaactggggactggtgacctaccgggagaactccctgctgttcgaccccctgtcctcctccagcagcaacaaggagcgggtggtcactgtgattgctcatgagctggcccaccagtggttcgggaacctggtgaccatagagtggtggaatgacctgtggctgaacgagggcttcgcctcctacgtggagtacctgggtgctgactatgcggagcccacctggaacttgaaagacctcatggtgctgaatgatgtgtaccgcgtgatggcagtggatgcactggcctcctcccacccgctgtccacacccgcctcggagatcaacacgccggcccagatcagtgagctgtttgacgccatctcctacagcaagggcgcctcagtcctcaggatgctctccagcttcctgtccgaggacgtattcaagcagggcctggcgtcctacctccacacctttgcctaccagaacaccatctacctgaacctgtgggaccacctgggaggccagcaccacctgggagccagtcaccacctgggagcca

SEQ ID NO: 328001 - DNA, 2055 bp, Homo sapiens
  misc_feature (1473)..(1473): n is a, c, g, or t
  misc_feature (1475)..(1475): n is a, c, g, or t
  misc_feature (1477)..(1478): n is a, c, g, or t
  misc_feature (1511)..(1511): n is a, c, g, or t
  misc_feature (1522)..(1522): n is a, c, g, or t
  misc_feature (1529)..(1529): n is a, c, g, or t
ggagtccagtgctggaggggcaggacggcggcggcgcagctcggaacccgccaggtccagggtccaggttccagcgcccggcggcccagatctcgctcctcggtctaaagcctccgccgcagctctcagtgaagaggaaggggaactctaggtgctcaacgcccgcgttacagtcgcgttctccctcgctcctacaacccggccaagatgccggggcatggatggggaccgaggtttgggggttgtggagcctattccacgccctccctggcaccccccgagcccagctccacacaccgttcctggatctcctctccccaggcggagcgtgcccctgcccagtccagtgaccttcgcctgttggagccctggttaatttttgcccagtctgcctgttgtggggctcctcccctttggggatataagcccggcctggggctgctccgttctctgcctggcctgaggctccctgagccgcctccccaccatcaccatggccaagggcttctatatttccaagtccctgggcatcctggggatcctcctgggcgtggcagccgtgtgcacaatcatcgcactgtcagtggtgtactcccaggagaagaacaagaacgccaacagctcccccgtggcctccagtcccagcaccccacttccagaagaccccaactggaatgtcactgagttccacaccacgcccaagatgtccacgtacttgctggccttcattgtcagtgagttcgactacgtggagaagcaggcatccaatggtgtcttgatccggatctgggcccggcccagtgccattgcggcgggccacggcgattatgccctgaacgtgacgggccccatccttaacttctttgctggtcattatgacacaccctaaccaatcccaaaatcagaccagattggcctgccagaacttcaacgccggcgccatggagaactggggactggtgacctaccgggagaactccctgctgttcgaccccctgtcctcctccagcagcaacaaggagcgggtggtcactgtgattgctcatgagctggcccaccagtggttcgggaacctggtgaccatagagtggtggaatgacctgtggctgaacgagggcttcgcctcctacgtggagtacctgggtgctgactatgcggagcccacctggaacttgaaagacctcatggtgctgaatgatgtgtaccgcgtgatggcagtggatgcactggcctcctcccacccgctgtccacacccgcctcggagatcaacacgccggcccagatcagtgagctgtttgacgccatctcctacagcaagggcgcctcagtcctcaggatgctctccagcttcctgtccgaggacgtattcaagcagggcctggcgtcctacctccacacctttgcctaccagaacaccatctacctgaacctgtgggaccacctgcaggaggctgtgaacaaccggtccatcnantnnccaccaccgtgcgggacatcatgaaccgtggancctgcagatgngcttccnggtatcacggtgggataccagcacgggggaaccctttacccaggaaagaatttcctcctttgaacccggatcccaatggtacccggccctcaaattcagtacgtgtggattgtgcccattaaatccattcgagatggcagacagacagcgggactctggggtggtaagtgggaaaagccaaacggaccttcaggcatcaggcagagtggggcctagcggaaccacaatgtgatgaggcaatcccggggagccaacacaagaaactgttataacacacactggccggagcaagaacactgcgcaccacgatgtataggggagacaaaaatagaactaacaacggagccagacgacagtactgcaggtgcacaccaccacttgtaggtaagacacgcagcagcagcgacagagactagctgcacacgtgcacagccaaacagcatcgtactgcatcgcagcggtcgcgcgctacgatcgtatcttgcagagctgagtgacgagcgaagcaagaccgcacgagcggagc

SEQ ID NO: 328002 - DNA, 904 bp, Homo sapiens
cagtttaaatcctttccaaaatttatgtagctagtgcatatttttatctaataccaattcttaaaaagaaagaagcactataaagactaaaaagtaataatttataattaactcatcaacttgtatgagaaaattttttcccaaaggatttgcaacaatatatattcactcaggaggtaaaaacagtagcctccctacatatttttggacattactaatttgttttctttccataagtagcaaagtaataaacttatacctagccctttttctgaattaaatatttaagtaatggtggtctaagcaatgaggttgagctctgcacaccacaaatattgcaggattgatcgattatcttgttcagtttttgccttcctaaaatttaacagcaggctgcaactttttgtgagatattaattataacatatctctgactgctttgacctgatgaataaaataccatcattttgttttctccttaaggatgtgagtgacaaactgagcctccgattccctgggttatacatagtgggacaaagagacttactattcaactataagagattctttgtaagcttgttgcatggggtcctaacatcgatgatcctcttcttcatacctcttggagcttatctgcaaaccgtagggcaggatggagaggcaccttccgactaccagtcttttgccgtcaccattgcctctgctcttgtaataacagtcaatttccaggtacgtggctttcattggccgtattcagtgtctattggtacctacttatatttctgtatatagggtggcatgcacatccacctgactcccactgcacctgtgccacttacaaaatataaatgctattttcatctcttataccaagcacattttctatttcttgcctgagtcaagg

SEQ ID NO: 328003 - DNA, 255 bp, Homo sapiens
tcctggaccctatagaagtttagaaaagcaaagtctattataaagtgatgtttaggctgggtgcagtggctcatgcctgtaatcccagcacgctgggaggctgagttgggcagatcacatgagctcgtgagttcaagaccagcatgatgaaacccatctctactaaaaatacaaaaattagctggaaatcgcttgaacctgggaggtggaggttccagtgagccgagatcgccggcactgcactcctacctgagc

SEQ ID NO: 328004 - DNA, 6176 bp, Homo sapiens
atgagtacagaaagagactcagaaacgacatttgacgaggattctcagcctaatgacgaagtggttccctacagtgatgatgaaacagaagatgaacttgatgaccaggggtctgctgttgaaccagaacaaaaccgagtcaacagggaagcagaggagaaccgggagccattcagaaaagaatgtacatggcaagtcaaagcaaacgatcgcaagtaccacgaacaacctcactttatgaacacaaaattcttgtgtattaaggagagtaaatatgcgaataatgcaattaaaacatacaagtacaacgcatttacctttataccaatgaatctgtttgagcagtttaagagagcagccaatttatatttcctggctcttcttatcttacaggcagttcctcaaatctctaccctggcttggtacaccacactagtgcccctgcttgtggtgctgggcgtcactgcaatcaaagacctggtggacgatgtggctcgccataaaatggataaggaaatcaacaataggacgtgtgaagtcattaaggatggcaggttcaaagttgctaagtggaaagaaattcaagttggagacgtcattcgtctgaaaaaaaatgattttgttccagctgacattctcctgctgtctagctctgagcctaacagcctctgctatgtggaaacagcagaactggacggagaaaccaatttaaaatttaagatgtcacttgaaatcacagaccagtacctccaaagagaagatacattggctacatttgatggttttattgaatgtgaagaacccaataaccgactagataagtttacaggaacactattttggagaaacacaagttttcctttggatgctgataaaattttgttacgtggctgtgtaattaggaacaccgatttctgccacggcttagtcatttttgcaggtgctgacactaaaataatgaagaatagtgggaaaaccagatttaaaagaactaaaattgattacttgatgaactacatggtttacacgatctttgttgttcttattctgctttctgctggtcttgccatcggccatgcttattgggaagcacaggtgggcaattcctcttggtacctctatgatggagaagacgatacaccctcctaccgtggattcctcattttctggggctatatcattgttctcaacaccatggtacccatctctctctatgtcagcgtggaagtgattcgtcttggacagagtcacttcatcaactgggacctgcaaatgtactatgctgagaaggacacacccgcaaaagctagaaccaccacactcaatgaacagctcgggcagatccattatatcttctctgataagacggggacactcacacaaaatatcatgacctttaaaaagtgctgtatcaacgggcagatatatggggaccatcgggatgcctctcaacacaaccacaacaaaatagagcaagttgattttagctggaatacatatgctgatgggaagcttgcattttatgaccactatcttattgagcaaatccagtcagggaaagagccagaagtacgacagttcttcttcttgctcgcagtttgccacacagtcatggtggataggactgatggtcagctcaactaccaggcagcctctcccgatgaaggtgccctggtaaacgctgccaggaactttggctttgccttcctcgccaggacccagaacaccatcaccatcagtgaactgggcactgaaaggacttacaatgttcttgccattttggacttcaacagtgaccggaagcgaatgtctatcattgtaagaaccccagaaggcaatatcaagctttactgtaaaggtgctgacactgttatttatgaacggttacatcgaatgaatcctactaagcaagaaacacaggatgccctggatatctttgcaaatgaaactcttagaaccctatgcctttgctacaaggaaattgaagaaaaagaatttacagaatggaataaaaagtttatggctgccagtgtggcctccaccaaccgggacgaagctctggataaagtatatgaggagattgaaaaagacttaattctcctgggagctacagctattgaagacaagctacaggatggagttccagaaaccatttcaaaacttgcaaaagctgacattaagatctgggtgcttactggagacaaaaaggaaactgctgaaaatataggatttgcttgtgaacttctgactgaagacaccaccatctgctatggggaggatattaattctcttcttcatgcaaggatggaaaaccagaggaatagaggtggcgtctacgcaaagtttgcacctcctgtgcaggaatctttttttccacccggtggaaaccgtgccttaatcatcactggttcttggttgaatgaaattcttctcgagaaaaagaccaagagaaataagattctgaagctgaagttcccaagaacagaagaagaaagacggatgcggacccaaagtaaaaggaggctagaagctaagaaagagcagcggcagaaaaactttgtggacctggcctgcgagtgcagcgcagtcatctgctgccgcgtcacccccaagcagaaggccatggtggtggacctggtgaagaggtacaagaaagccatcacgctggccatcggagatggggcccaatgacgtgaacatgatcaaaactgcccacattggcgttggaataagtggacaagaaggaatgcaagctgtcatgtcgagtgactattcctttgctcagttccgatatctgcagaggctactgctggtgcatggccgatggtcttacataaggatgtgcaagttcctacgatacttcttttacaaaaactttgcctttactttggttcatttctggtactccttcttcaatggctactctgcgcagactgcatacgaggattggttcatcaccctctacaacgtgctgtacaccagcctgcccgtgctcctcatggggctgctcgaccaggatgtgagtgacaaactgagcctccgattccctgggttatacatagtgggacaaagagacttactattcaactataagagattctttgtaagcttgttgcatggggtcctaacatcgatgatcctcttcttcatacctcttggagcttatctgcaaaccgtagggcaggatggagaggcaccttccgactaccagtcttttgccgtcaccattgcctctgctcttgtaataacagtcaatttccagattggcttggatacttcttattggacttttgtgaatgctttttcaatttttggaagcattgcactttattttggcatcatgtttgactttcatagtgctggaatacatgttctctttccatctgcatttcaatttacaggcacagcttcaaacgctctgagacagccatacatttggttaactatcatcctgactgttgctgtgtgcttactacccgtcgttgccattcgattcctgtcaatgaccatctggccatcagaaagtgataagatccagaagcatcgcaagcggttgaaggcggaggagcagtggcagcgacggcagcaggtgttccgccggggcgtgtcaacgcggcgctcggcctacgccttctcgcaccagcggggctacgcggacctcatctcctccgggcgcagcatccgcaagaagcgctcgccgcttgatgccatcgtggcggatggcaccgcggagtacaggcgcaccggggacagctgatcccttacccccaggctgggatgcggccacaaagcacgtctatttttttatgaaagactctcaggactttgtgtgtgtgtgtgaattgcattcatcacaaagatattgaagacaataaataatctttataacaaactccttgggttggactattaaacaatagcagagccaagaaataggacttttaaaagtcctattattcggccgggcgtggtggctcaggtctgtaatcccagcactttaggaggctgaggaggggagatcacctgaggccaggagttcgagaccagcccagccaacatggtgaaaccctgtctctaccataaattaaaaattagccgggcttggtggtgggcacccgtaatcccacctatttgagaagctgaagcagaagaatcgcttgaacctgggagatggaggttacagtgagccgagattgcgccactgcactccagcctgggtgacagagcaagactctgtcttaagaaaaatttaaaaataggccgggcatggtggctcatgcctgtcatcctagcactttgggaggccaaggcaggtggatcacttgaggtcaggagaccagcccggccaacatggtgaaaccccatctctactaaaaatacaaaaattagctggaaatcgcttgaacctgggaggtggaggttccagtgagccgagatcgtggcactgcactccaacctgagcaacagagtgagacaccagctcaaaaaaaattttttaataataataaaagtcctattattcaactggttatgtacattatggttgaaagggaacgttttaatccagtctcaatccagggcaatagaattacaaagcatgttgtatttcagttcaaatggtattgtattataaaattacagttacattttcctttcggtgatcttcagcataatttcccagaggcccctttttcctccctataggccatcttattaacagattttaaaatttatagtaatgacaaatgacttatcagtgttcatcatctgaaagctaagtggttcgttcaatcactttttcaaagttgatagtagattgcatggtttcatgtttcctcatattggtttattaattctatttaatcaaggaaaataacttcagattccataaagtttcagtttatttttagtttactactaggtgagatagcacattacatacttttactatcaaatattattttagcagcttcccatagtaccaaatgatttgattccctactctcattttttaaagcatataaatatttatgggcttaaaaagggggtttttaaaaactgaggatatcagtaataaattgcagaatattttgcaaagctttcttttggaaagcaaacttttgtgcctgcctatatgcaaagtattttatcagggacttgaacaaagacctcactctttttcacttgtcttatgtcgagagaaaaggttattggcagccacattcctaagactggggaatggtgtgtccttttaaatttgaagataactttaggtaattatggaaactcctcaaagaggagaaagtaatttttttccagacatttttctcattctgtgtctttcacacactagtttccatagttcgagaattctgttttttaccattgggctgtgaatgttcacaatatcagtcctgttgaattcctatgaggtaatcacaatgtgtatatgttcattttctaggtatgataaaagaatgtatggctttttattctgtggaagtaaaatcctgaacgtttacaacttttccttaacttgtaaataaaaaattgtaagttttttctttttttacagaaaacttagcttgtgtaattctgttagtttcagatttctctcctgtttttgcaaattgtgggaaagattgacaatgcaaatgtgtcaaagacatactgttgggtgcaatattaacaattttaaatgcaaatttctttggataaattatttctatattctgtaaatctgagatttaatgtatattttgtttaaaaaaatgatttagtaaaatctttgaaaagtaaaaaaaaaaaacaggagcagcaccagacacaactaacgacacagcaacggacaccacacacacgatacccagaagaacagaaaaaggaggagcaccgtcaacaaaacaccgtgagaagaaaccgaaacgccccaacaatgaagaaagaagaggccccacgagacagagaaaaaaagacgacgcggacacacacagaacgtaggaggcagagcaaaccaaggaagtaggaggaccacgttgtggtgataatagacgaaacccatagactcacgaacgaaaacatctgataaggataccaaccgccgcgaacgctcaataaaaacgcatgagaagacagagaacaagaaaaagaaggagacaaacgaacgagatacaacg

SEQ ID NO: 328005 - DNA, 3889 bp, Homo sapiens
atgagtacagaaagagactcagaaacgacatttgacgaggattctcagcctaatgacgaagtggttccctacagtgatgatgaaacagaagatgaacttgatgaccaggggtctgctgttgaaccagaacaaaaccgagtcaacagggaagcagaggagaaccgggagccattcagaaaagaatgtacatggcaagtcaaagcaaacgatcgcaagtaccacgaacaacctcactttatgaacacaaaattcttgtgtattaaggagagtaaatatgcgaataatgcaattaaaacatacaagtacaacgcatttacctttataccaatgaatctgtttgagcagtttaagagagcagccaatttatatttcctggctcttcttatcttacaggcagttcctcaaatctctaccctggcttggtacaccacactagtgcccctgcttgtggtgctgggcgtcactgcaatcaaagacctggtggacgatgtggctcgccataaaatggataaggaaatcaacaataggacgtgtgaagtcattaaggatggcaggttcaaagttgctaagtggaaagaaattcaagttggagacgtcattcgtctgaaaaaaaatgattttgttccagctgacattctcctgctgtctagctctgagcctaacagcctctgctatgtggaaacagcagaactggacggagaaaccaatttaaaatttaagatgtcacttgaaatcacagaccagtacctccaaagagaagatacattggctacatttgatggttttattgaatgtgaagaacccaataaccgactagataagtttacaggaacactattttggagaaacacaagttttcctttggatgctgataaaattttgttacgtggctgtgtaattaggaacaccgatttctgccacggcttagtcatttttgcaggtgctgacactaaaataatgaagaatagtgggaaaaccagatttaaaagaactaaaattgattacttgatgaactacatggtttacacgatctttgttgttcttattctgctttctgctggtcttgccatcggccatgcttattgggaagcacaggtgggcaattcctcttggtacctctatgatggagaagacgatacaccctcctaccgtggattcctcattttctggggctatatcattgttctcaacaccatggtacccatctctctctatgtcagcgtggaagtgattcgtcttggacagagtcacttcatcaactgggacctgcaaatgtactatgctgagaaggacacacccgcaaaagctagaaccaccacactcaatgaacagctcgggcagatccattatatcttctctgataagacggggacactcacacaaaatatcatgacctttaaaaagtgctgtatcaacgggcagatatatggggaccatcgggatgcctctcaacacaaccacaacaaaatagagcaagttgattttagctggaatacatatgctgatgggaagcttgcattttatgaccactatcttattgagcaaatccagtcagggaaagagccagaagtacgacagttcttcttcttgctcgcagtttgccacacagtcatggtggataggactgatggtcagctcaactaccaggcagcctctcccgatgaaggtgccctggtaaacgctgccaggaactttggctttgccttcctcgccaggacccagaacaccatcaccatcagtgaactgggcactgaaaggacttacaatgttcttgccattttggacttcaacagtgaccggaagcgaatgtctatcattgtaagaaccccagaaggcaatatcaagctttactgtaaaggtgctgacactgttatttatgaacggttacatcgaatgaatcctactaagcaagaaacacaggatgccctggatatctttgcaaatgaaactcttagaaccctatgcctttgctacaaggaaattgaagaaaaagaatttacagaatggaataaaaagtttatggctgccagtgtggcctccaccaaccgggacgaagctctggataaagtatatgaggagattgaaaaagacttaattctcctgggagctacagctattgaagacaagctacaggatggagttccagaaaccatttcaaaacttgcaaaagctgacattaagatctgggtgcttactggagacaaaaaggaaactgctgaaaatataggatttgcttgtgaacttctgactgaagacaccaccatctgctatggggaggatattaattctcttcttcatgcaaggatggaaaaccagaggaatagaggtggcgtctacgcaaagtttgcacctcctgtgcaggaatctttttttccacccggtggaaaccgtgccttaatcatcactggttcttggttgaatgaaattcttctcgagaaaaagaccaagagaaataagattctgaagctgaagttcccaagaacagaagaagaaagacggatgcggacccaaagtaaaaggaggctagaagctaagaaagagcagcggcagaaaaactttgtggacctggcctgcgagtgcagcgcagtcatctgctgccgcgtcacccccaagcagaaggccatggtggtggacctggtgaagaggtacaagaaagccatcacgctggccatcggagatggggcccaatgacgtgaacatgatcaaaactgcccacattggcgttggaataagtggacaagaaggaatgcaagctgtcatgtcgagtgactattcctttgctcagttccgatatctgcagaggctactgctggtgcatggccgatggtcttacataaggatgtgcaagttcctacgatacttcttttacaaaaactttgcctttactttggttcatttctggtactccttcttcaatggctactctgcgcagactgcatacgaggattggttcatcaccctctacaacgtgctgtacaccagcctgcccgtgctcctcatggggctgctcgaccaggatgtgagtgacaaactgagcctccgattccctgggttatacatagtgggacaaagagacttactattcaactataagagattctttgtaagcttgttgcatggggtcctaacatcgatgatcctcttcttcatacctcttggagcttatctgcaaaccgtagggcaggatggagaggcaccttccgactaccagtcttttgccgtcaccattgcctctgctcttgtaataacagtcaatttccagattggcttggatacttcttattggacttttgtgaatgctttttcaatttttggaagcattgcactttattttggcatcatgtttgactttcatagtgctggaatacatgttctctttccatctgcatttcaatttacaggcacagcttcaaacgctctgagacagccatacatttggttaactatcatcctgactgttgctgtgtgcttactacccgtcgttgccattcgattcctgtcaatgaccatctggccatcagaaagtgataagatccagaagcatcgcaagcggttgaaggcggaggagcagtggcagcgacggcagcaggtgttccgccggggcgtgtcaacgcggcgctcggcctacgccttctcgcaccagcggggctacgcggacctcatctcctccgggcgcagcatccgcaagaagcgctcgccgcttgatgccatcgtggcggatggcaccgcggagtacaggcgcaccggggacagctgatcccttacccccaggctgggatgcggccacaaagcacgtctatttttttatgaaagactctcaggactttgtgtgtgtgtgtgaattgcattcatcacaaagatattgaagacaataaataatctttataac

SEQ ID NO: 328006 - DNA, 6575 bp, Homo sapiens
atgagtacagaaagagactcagaaacgacatttgacgaggattctcagcctaatgacgaagtggttccctacagtgatgatgaaacagaagatgaacttgatgaccaggggtctgctgttgaaccagaacaaaaccgagtcaacagggaagcagaggagaaccgggagccattcagaaaagaatgtacatggcaagtcaaagcaaacgatcgcaagtaccacgaacaacctcactttatgaacacaaaattcttgtgtattaaggagagtaaatatgcgaataatgcaattaaaacatacaagtacaacgcatttacctttataccaatgaatctgtttgagcagtttaagagagcagccaatttatatttcctggctcttcttatcttacaggcagttcctcaaatctctaccctggcttggtacaccacactagtgcccctgcttgtggtgctgggcgtcactgcaatcaaagacctggtggacgatgtggctcgccataaaatggataaggaaatcaacaataggacgtgtgaagtcattaaggatggcaggttcaaagttgctaagtggaaagaaattcaagttggagacgtcattcgtctgaaaaaaaatgattttgttccagctgacattctcctgctgtctagctctgagcctaacagcctctgctatgtggaaacagcagaactggacggagaaaccaatttaaaatttaagatgtcacttgaaatcacagaccagtacctccaaagagaagatacattggctacatttgatggttttattgaatgtgaagaacccaataaccgactagataagtttacaggaacactattttggagaaacacaagttttcctttggatgctgataaaattttgttacgtggctgtgtaattaggaacaccgatttctgccacggcttagtcatttttgcaggtgctgacactaaaataatgaagaatagtgggaaaaccagatttaaaagaactaaaattgattacttgatgaactacatggtttacacgatctttgttgttcttattctgctttctgctggtcttgccatcggccatgcttattgggaagcacaggtgggcaattcctcttggtacctctatgatggagaagacgatacaccctcctaccgtggattcctcattttctggggctatatcattgttctcaacaccatggtacccatctctctctatgtcagcgtggaagtgattcgtcttggacagagtcacttcatcaactgggacctgcaaatgtactatgctgagaaggacacacccgcaaaagctagaaccaccacactcaatgaacagctcgggcagatccattatatcttctctgataagacggggacactcacacaaaatatcatgacctttaaaaagtgctgtatcaacgggcagatatatggggaccatcgggatgcctctcaacacaaccacaacaaaatagagcaagttgattttagctggaatacatatgctgatgggaagcttgcattttatgaccactatcttattgagcaaatccagtcagggaaagagccagaagtacgacagttcttcttcttgctcgcagtttgccacacagtcatggtggataggactgatggtcagctcaactaccaggcagcctctcccgatgaaggtgccctggtaaacgctgccaggaactttggctttgccttcctcgccaggacccagaacaccatcaccatcagtgaactgggcactgaaaggacttacaatgttcttgccattttggacttcaacagtgaccggaagcgaatgtctatcattgtaagaaccccagaaggcaatatcaagctttactgtaaaggtgctgacactgttatttatgaacggttacatcgaatgaatcctactaagcaagaaacacaggatgccctggatatctttgcaaatgaaactcttagaaccctatgcctttgctacaaggaaattgaagaaaaagaatttacagaatggaataaaaagtttatggctgccagtgtggcctccaccaaccgggacgaagctctggataaagtatatgaggagattgaaaaagacttaattgtgagttttagccttaataactttttctttgatattctaagcagaattgaaatttttattaagttttattgaatatttgatctcatgcttaagagataattgtaacttcagcatttgacactggcacaatggaagaaggttatttcttttattcaccaaaataggagcagaacagaagttgccattatgagaaaccaaaagacaaaatacattaggagaagttctaatttaattccataatttgtatatcacttattaaaatttattataatttttaaacaataacaaacctgcatctaatacttattacattgggggaattaccgaaacaattcatattctgcaaaatcttgaaataagaaaaatatattgtttctaaaagttttccaaatttaatacatagtttttgtagggtttagataagtggaaaatattcaacaaatagctagtattgcaactggtttacggtttatgtcagtataaagccacaaatacacaagaaaagtgtatttttaacatccttgattttgtacttgcatttttgtcttggtaaattaaatagttcatcctttagggaaaaagtttttaggtgtgttggtttgcagtaattgtgaaacatggcagccttccctgttaacactggccattggccccaggagagcagcaaccaggatgtataattagcccttctttttacaggttggcaacctgtaattacagaaaacttttggtttgtttgctaattccttttttttttttttttaatatacattctagctcctgggagctacagctattgaagacaagctacaggatggagttccagaaaccatttcaaaacttgcaaaagctgacattaagatctgggtgcttactggagacaaaaaggaaactgctgaaaatataggatttgcttgtgaacttctgactgaagacaccaccatctgctatggggaggatattaattctcttcttcatgcaaggatggaaaaccagaggaatagaggtggcgtctacgcaaagtttgcacctcctgtgcaggaatctttttttccacccggtggaaaccgtgccttaatcatcactggttcttggttgaatgaaattcttctcgagaaaaagaccaagagaaataagattctgaagctgaagttcccaagaacagaagaagaaagacggatgcggacccaaagtaaaaggaggctagaagctaagaaagagcagcggcagaaaaactttgtggacctggcctgcgagtgcagcgcagtcatctgctgccgcgtcacccccaagcagaaggccatggtggtggacctggtgaagaggtacaagaaagccatcacgctggccatcggagatggggcccaatgacgtgaacatgatcaaaactgcccacattggcgttggaataagtggacaagaaggaatgcaagctgtcatgtcgagtgactattcctttgctcagttccgatatctgcagaggctactgctggtgcatggccgatggtcttacataaggatgtgcaagttcctacgatacttcttttacaaaaactttgcctttactttggttcatttctggtactccttcttcaatggctactctgcgcagactgcatacgaggattggttcatcaccctctacaacgtgctgtacaccagcctgcccgtgctcctcatggggctgctcgaccaggatgtgagtgacaaactgagcctccgattccctgggttatacatagtgggacaaagagacttactattcaactataagagattctttgtaagcttgttgcatggggtcctaacatcgatgatcctcttcttcatacctcttggagcttatctgcaaaccgtagggcaggatggagaggcaccttccgactaccagtcttttgccgtcaccattgcctctgctcttgtaataacagtcaatttccagattggcttggatacttcttattggacttttgtgaatgctttttcaatttttggaagcattgcactttattttggcatcatgtttgactttcatagtgctggaatacatgttctctttccatctgcatttcaatttacaggcacagcttcaaacgctctgagacagccatacatttggttaactatcatcctgactgttgctgtgtgcttactacccgtcgttgccattcgattcctgtcaatgaccatctggccatcagaaagtgataagatccagaagcatcgcaagcggttgaaggcggaggagcagtggcagcgacggcagcaggtgttccgccggggcgtgtcaacgcggcgctcggcctacgccttctcgcaccagcggggctacgcggacctcatctcctccgggcgcagcatccgcaagaagcgctcgccgcttgatgccatcgtggcggatggcaccgcggagtacaggcgcaccggggacagctgatcccttacccccaggctgggatgcggccacaaagcacgtctatttttttatgaaagactctcaggactttgtgtgtgtgtgtgaattgcattcatcacaaagatattgaagacaataaataatctttataacaaactccttgggttggactattaaacaatagcagagccaagaaataggacttttaaaagtcctattattcggccgggcgtggtggctcaggtctgtaatcccagcactttaggaggctgaggaggggagatcacctgaggccaggagttcgagaccagcccagccaacatggtgaaaccctgtctctaccataaattaaaaattagccgggcttggtggtgggcacccgtaatcccacctatttgagaagctgaagcagaagaatcgcttgaacctgggagatggaggttacagtgagccgagattgcgccactgcactccagcctgggtgacagagcaagactctgtcttaagaaaaatttaaaaataggccgggcatggtggctcatgcctgtcatcctagcactttgggaggccaaggcaggtggatcacttgaggtcaggagaccagcccggccaacatggtgaaaccccatctctactaaaaatacaaaaattagctggaaatcgcttgaacctgggaggtggaggttccagtgagccgagatcgtggcactgcactccaacctgagcaacagagtgagacaccagctcaaaaaaaattttttaataataataaaagtcctattattcaactggttatgtacattatggttgaaagggaacgttttaatccagtctcaatccagggcaatagaattacaaagcatgttgtatttcagttcaaatggtattgtattataaaattacagttacattttcctttcggtgatcttcagcataatttcccagaggcccctttttcctccctataggccatcttattaacagattttaaaatttatagtaatgacaaatgacttatcagtgttcatcatctgaaagctaagtggttcgttcaatcactttttcaaagttgatagtagattgcatggtttcatgtttcctcatattggtttattaattctatttaatcaaggaaaataacttcagattccataaagtttcagtttatttttagtttactactaggtgagatagcacattacatacttttactatcaaatattattttagcagcttcccatagtaccaaatgatttgattccctactctcattttttaaagcatataaatatttatgggcttaaaaagggggtttttaaaaactgaggatatcagtaataaattgcagaatattttgcaaagctttcttttggaaagcaaacttttgtgcctgcctatatgcaaagtattttatcagggacttgaacaaagacctcactctttttcacttgtcttatgtcgagagaaaaggttattggcagccacattcctaagactggggaatggtgtgtccttttaaatttgaagataactttaggtaattatggaaactcctcaaagaggagaaagtaatttttttccagacatttttctcattctgtgtctttcacacactagtttccatagttcgagaattctgttttttaccattgggctgtgaatgttcacaatatcagtcctgttgaattcctatgaggtaatcacaatgtgtatatgttcattttctaggtatgataaaagaatgtatggctttttattctgtggaagtaaaatcctgaacgtttacaacttttccttaacttgtaaataaaaaattgtaagttttttctttttttacagaaaacttagcttgtgtaattctgttagtttcagatttctctcctgtttttgcaaattgtgggaaagattgacaatgcaaatgtgtcaaagacatactgttgggtgcaatattaacaattttaaatgcaaatttctttggataaattatttctatattctgtaaatctgagatttaatgtatattttgtttaaaaaaatgatttagtaaaatctttgaaaagta

SEQ ID NO: 328007 - DNA, 3812 bp, Homo sapiens
atgagtacagaaagagactcagaaacgacatttgacgaggattctcagcctaatgacgaagtggttccctacagtgatgatgaaacagaagatgaacttgatgaccaggggtctgctgttgaaccagaacaaaaccgagtcaacagggaagcagaggagaaccgggagccattcagaaaagaatgtacatggcaagtcaaagcaaacgatcgcaagtaccacgaacaacctcactttatgaacacaaaattcttgtgtattaaggagagtaaatatgcgaataatgcaattaaaacatacaagtacaacgcatttacctttataccaatgaatctgtttgagcagtttaagagagcagccaatttatatttcctggctcttcttatcttacaggcagttcctcaaatctctaccctggcttggtacaccacactagtgcccctgcttgtggtgctgggcgtcactgcaatcaaagacctggtggacgatgtggctcgccataaaatggataaggaaatcaacaataggacgtgtgaagtcattaaggatggcaggttcaaagttgctaagtggaaagaaattcaagttggagacgtcattcgtctgaaaaaaaatgattttgttccagctgacattctcctgctgtctagctctgagcctaacagcctctgctatgtggaaacagcagaactggacggagaaaccaatttaaaatttaagatgtcacttgaaatcacagaccagtacctccaaagagaagatacattggctacatttgatggttttattgaatgtgaagaacccaataaccgactagataagtttacaggaacactattttggagaaacacaagttttcctttggatgctgataaaattttgttacgtggctgtgtaattaggaacaccgatttctgccacggcttagtcatttttgcaggtgctgacactaaaataatgaagaatagtgggaaaaccagatttaaaagaactaaaattgattacttgatgaactacatggtttacacgatctttgttgttcttattctgctttctgctggtcttgccatcggccatgcttattgggaagcacaggtgggcaattcctcttggtacctctatgatggagaagacgatacaccctcctaccgtggattcctcattttctggggctatatcattgttctcaacaccatggtacccatctctctctatgtcagcgtggaagtgattcgtcttggacagagtcacttcatcaactgggacctgcaaatgtactatgctgagaaggacacacccgcaaaagctagaaccaccacactcaatgaacagctcgggcagatccattatatcttctctgataagacggggacactcacacaaaatatcatgacctttaaaaagtgctgtatcaacgggcagatatatggggaccatcgggatgcctctcaacacaaccacaacaaaatagagcaagttgattttagctggaatacatatgctgatgggaagcttgcattttatgaccactatcttattgagcaaatccagtcagggaaagagccagaagtacgacagttcttcttcttgctcgcagtttgccacacagtcatggtggataggactgatggtcagctcaactaccaggcagcctctcccgatgaaggtgccctggtaaacgctgccaggaactttggctttgccttcctcgccaggacccagaacaccatcaccatcagtgaactgggcactgaaaggacttacaatgttcttgccattttggacttcaacagtgaccggaagcgaatgtctatcattgtaagaaccccagaaggcaatatcaagctttactgtaaaggtgctgacactgttatttatgaacggttacatcgaatgaatcctactaagcaagaaacacaggatgccctggatatctttgcaaatgaaactcttagaaccctatgcctttgctacaaggaaattgaagaaaaagaatttacagaatggaataaaaagtttatggctgccagtgtggcctccaccaaccgggacgaagctctggataaagtatatgaggagattgaaaaagacttaattgtgagttttagccttaataactttttctttgatattctaagcagaattgaaatttttattaagttttattgaatatttgatctcatgcttaagagataattgtaacttcagcatttgacactggcacaatggaagaaggttatttcttttattcaccaaaataggagcagaacagaagttgccattatgagaaaccaaaagacaaaatacattaggagaagttctaatttaattccataatttgtatatcacttattaaaatttattataatttttaaacaataacaaacctgcatctaatacttattacattgggggaattaccgaaacaattcatattctgcaaaatcttgaaataagaaaaatatattgtttctaaaagttttccaaatttaatacatagtttttgtagggtttagataagtggaaaatattcaacaaatagctagtattgcaactggtttacggtttatgtcagtataaagccacaaatacacaagaaaagtgtatttttaacatccttgattttgtacttgcatttttgtcttggtaaattaaatagttcatcctttagggaaaaagtttttaggtgtgttggtttgcagtaattgtgaaacatggcagccttccctgttaacactggccattggccccaggagagcagcaaccaggatgtataattagcccttctttttacaggttggcaacctgtaattacagaaaacttttggtttgtttgctaattccttttttttttttttttaatatacattctagctcctgggagctacagctattgaagacaagctacaggatggagttccagaaaccatttcaaaacttgcaaaagctgacattaagatctgggtgcttactggagacaaaaaggaaactgctgaaaatataggatttgcttgtgaacttctgactgaagacaccaccatctgctatggggaggatattaattctcttcttcatgcaaggatggaaaaccagaggaatagaggtggcgtctacgcaaagtttgcacctcctgtgcaggaatctttttttccacccggtggaaaccgtgccttaatcatcactggttcttggttgaatgaaattcttctcgagaaaaagaccaagagaaataagattctgaagctgaagttcccaagaacagaagaagaaagacggatgcggacccaaagtaaaaggaggctagaagctaagaaagagcagcggcagaaaaactttgtggacctggcctgcgagtgcagcgcagtcatctgctgccgcgtcacccccaagcagaaggccatggtggtggacctggtgaagaggtacaagaaagccatcacgctggccatcggagatggggcccaatgacgtgaacatgatcaaaagtgagtcatgcacccacggccagtgaggcccaacgtgcctagagaggagaaatggctggaatgtgtagggggtggattttctttttttagattttacagcttaggttttcatagagcagatgtttcataaagtcacttaaccatgacaacgcctgtgaccctacccccagaaagcccacagcccatcaggaggaaagagtatcactgacagggcttctgaaggatgcgaagaggaaaataaggtctatggggggaaatttatccttatatttttattcttttatatagatgttgtgtatttttttctctcttactggttctcttccc

SEQ ID NO: 328008 - DNA, 5798 bp, Homo sapiens
atgagtacagaaagagactcagaaacgacatttgacgaggattctcagcctaatgacgaagtggttccctacagtgatgatgaaacagaagatgaacttgatgaccaggggtctgctgttgaaccagaacaaaaccgagtcaacagggaagcagaggagaaccgggagccattcagaaaagaatgtacatggcaagtcaaagcaaacgatcgcaagtaccacgaacaacctcactttatgaacacaaaattcttgtgtattaaggagagtaaatatgcgaataatgcaattaaaacatacaagtacaacgcatttacctttataccaatgaatctgtttgagcagtttaagagagcagccaatttatatttcctggctcttcttatcttacaggcagttcctcaaatctctaccctggcttggtacaccacactagtgcccctgcttgtggtgctgggcgtcactgcaatcaaagacctggtggacgatgtggctcgccataaaatggataaggaaatcaacaataggacgtgtgaagtcattaaggatggcaggttcaaagttgctaagtggaaagaaattcaagttggagacgtcattcgtctgaaaaaaaatgattttgttccagctgacattctcctgctgtctagctctgagcctaacagcctctgctatgtggaaacagcagaactggacggagaaaccaatttaaaatttaagatgtcacttgaaatcacagaccagtacctccaaagagaagatacattggctacatttgatggttttattgaatgtgaagaacccaataaccgactagataagtttacaggaacactattttggagaaacacaagttttcctttggatgctgataaaattttgttacgtggctgtgtaattaggaacaccgatttctgccacggcttagtcatttttgcaggtgctgacactaaaataatgaagaatagtgggaaaaccagatttaaaagaactaaaattgattacttgatgaactacatggtttacacgatctttgttgttcttattctgctttctgctggtcttgccatcggccatgcttattgggaagcacaggtgggcaattcctcttggtacctctatgatggagaagacgatacaccctcctaccgtggattcctcattttctggggctatatcattgttctcaacaccatggtacccatctctctctatgtcagcgtggaagtgattcgtcttggacagagtcacttcatcaactgggacctgcaaatgtactatgctgagaaggacacacccgcaaaagctagaaccaccacactcaatgaacagctcgggcagatccattatatcttctctgataagacggggacactcacacaaaatatcatgacctttaaaaagtgctgtatcaacgggcagatatatggggaccatcgggatgcctctcaacacaaccacaacaaaatagagcaagttgattttagctggaatacatatgctgatgggaagcttgcattttatgaccactatcttattgagcaaatccagtcagggaaagagccagaagtacgacagttcttcttcttgctcgcagtttgccacacagtcatggtggataggactgatggtcagctcaactaccaggcagcctctcccgatgaaggtgccctggtaaacgctgccaggaactttggctttgccttcctcgccaggacccagaacaccatcaccatcagtgaactgggcactgaaaggacttacaatgttcttgccattttggacttcaacagtgaccggaagcgaatgtctatcattgtaagaaccccagaaggcaatatcaagctttactgtaaaggtgctgacactgttatttatgaacggttacatcgaatgaatcctactaagcaagaaacacaggatgccctggatatctttgcaaatgaaactcttagaaccctatgcctttgctacaaggaaattgaagaaaaagaatttacagaatggaataaaaagtttatggctgccagtgtggcctccaccaaccgggacgaagctctggataaagtatatgaggagattgaaaaagacttaattctcctgggagctacagctattgaagacaagctacaggatggagttccagaaaccatttcaaaacttgcaaaagctgacattaagatctgggtgcttactggagacaaaaaggaaactgctgaaaatataggatttgcttgtgaacttctgactgaagacaccaccatctgctatggggaggatattaattctcttcttcatgcaaggatggaaaaccagaggaatagaggtggcgtctacgcaaagtttgcacctcctgtgcaggaatctttttttccacccggtggaaaccgtgccttaatcatcactggttcttggttgaatgaaattcttctcgagaaaaagaccaagagaaataagattctgaagctgaagttcccaagaacagaagaagaaagacggatgcggacccaaagtaaaaggaggctagaagctaagaaagagcagcggcagaaaaactttgtggacctggcctgcgagtgcagcgcagtcatctgctgccgcgtcacccccaagcagaaggccatggtggtggacctggtgaagaggtacaagaaagccatcacgctggccatcggagatggggcccaatgacgtgaacatgatcaaaactgcccacattggcgttggaataagtggacaagaaggaatgcaagctgtcatgtcgagtgactattcctttgctcagttccgatatctgcagaggctactgctggtgcatggccgatggtcttacataaggatgtgcaagttcctacgatacttcttttacaaaaactttgcctttactttggttcatttctggtactccttcttcaatggctactctgcgcagactgcatacgaggattggttcatcaccctctacaacgtgctgtacaccagcctgcccgtgctcctcatggggctgctcgaccaggatgtgagtgacaaactgagcctccgattccctgggttatacatagtgggacaaagagacttactattcaactataagagattctttgtaagcttgttgcatggggtcctaacatcgatgatcctcttcttcatacctcttggagcttatctgcaaaccgtagggcaggatggagaggcaccttccgactaccagtcttttgccgtcaccattgcctctgctcttgtaataacagtcaatttccagattggcttggatacttcttattggacttttgtgaatgctttttcaatttttggaagcattgcactttattttggcatcatgtttgactttcatagtgctggaatacatgttctctttccatctgcatttcaatttacaggcacagcttcaaacgctctgagacagccatacatttggttaactatcatcctgactgttgctgtgtgcttactacccgtcgttgccattcgattcctgtcaatgaccatctggccatcagaaagtgataagatccagaagcatcgcaagcggttgaaggcggaggagcagtggcagcgacggcagcaggtgttccgccggggcgtgtcaacgcggcgctcggcctacgccttctcgcaccagcggggctacgcggacctcatctcctccgggcgcagcatccgcaagaagcgctcgccgcttgatgccatcgtggcggatggcaccgcggagtacaggcgcaccggggacagctgatcccttacccccaggctgggatgcggccacaaagcacgtctatttttttatgaaagactctcaggactttgtgtgtgtgtgtgaattgcattcatcacaaagatattgaagacaataaataatctttataacaaactccttgggttggactattaaacaatagcagagccaagaaataggacttttaaaagtcctattattcggccgggcgtggtggctcaggtctgtaatcccagcactttaggaggctgaggaggggagatcacctgaggccaggagttcgagaccagcccagccaacatggtgaaaccctgtctctaccataaattaaaaattagccgggcttggtggtgggcacccgtaatcccacctatttgagaagctgaagcagaagaatcgcttgaacctgggagatggaggttacagtgagccgagattgcgccactgcactccagcctgggtgacagagcaagactctgtcttaagaaaaatttaaaaataggccgggcatggtggctcatgcctgtcatcctagcactttgggaggccaaggcaggtggatcacttgaggtcaggagaccagcccggccaacatggtgaaaccccatctctactaaaaatacaaaaattagctggaaatcgcttgaacctgggaggtggaggttccagtgagccgagatcgtggcactgcactccaacctgagcaacagagtgagacaccagctcaaaaaaaattttttaataataataaaagtcctattattcaactggttatgtacattatggttgaaagggaacgttttaatccagtctcaatccagggcaatagaattacaaagcatgttgtatttcagttcaaatggtattgtattataaaattacagttacattttcctttcggtgatcttcagcataatttcccagaggcccctttttcctccctataggccatcttattaacagattttaaaatttatagtaatgacaaatgacttatcagtgttcatcatctgaaagctaagtggttcgttcaatcactttttcaaagttgatagtagattgcatggtttcatgtttcctcatattggtttattaattctatttaatcaaggaaaataacttcagattccataaagtttcagtttatttttagtttactactaggtgagatagcacattacatacttttactatcaaatattattttagcagcttcccatagtaccaaatgatttgattccctactctcattttttaaagcatataaatatttatgggcttaaaaagggggtttttaaaaactgaggatatcagtaataaattgcagaatattttgcaaagctttcttttggaaagcaaacttttgtgcctgcctatatgcaaagtattttatcagggacttgaacaaagacctcactctttttcacttgtcttatgtcgagagaaaaggttattggcagccacattcctaagactggggaatggtgtgtccttttaaatttgaagataactttaggtaattatggaaactcctcaaagaggagaaagtaatttttttccagacatttttctcattctgtgtctttcacacactagtttccatagttcgagaattctgttttttaccattgggctgtgaatgttcacaatatcagtcctgttgaattcctatgaggtaatcacaatgtgtatatgttcattttctaggtatgataaaagaatgtatggctttttattctgtggaagtaaaatcctgaacgtttacaacttttccttaacttgtaaataaaaaattgtaagttttttctttttttacagaaaacttagcttgtgtaattctgttagtttcagatttctctcctgtttttgcaaattgtgggaaagattgacaatgcaaatgtgtcaaagacatactgttgggtgcaatattaacaattttaaatgcaaatttctttggataaattatttctatattctgtaaatctgagatttaatgtatattttgtttaaaaaaatgatttagtaaaatctttgaaaagta

SEQ ID NO: 328009 - DNA, 3265 bp, Homo sapiens
cagtttaaatcctttccaaaatttatgtagctagtgcatatttttatctaataccaattcttaaaaagaaagaagcactataaagactaaaaagtaataatttataattaactcatcaacttgtatgagaaaattttttcccaaaggatttgcaacaatatatattcactcaggaggtaaaaacagtagcctccctacatatttttggacattactaatttgttttctttccataagtagcaaagtaataaacttatacctagccctttttctgaattaaatatttaagtaatggtggtctaagcaatgaggttgagctctgcacaccacaaatattgcaggattgatcgattatcttgttcagtttttgccttcctaaaatttaacagcaggctgcaactttttgtgagatattaattataacatatctctgactgctttgacctgatgaataaaataccatcattttgttttctccttaaggatgtgagtgacaaactgagcctccgattccctgggttatacatagtgggacaaagagacttactattcaactataagagattctttgtaagcttgttgcatggggtcctaacatcgatgatcctcttcttcatacctcttggagcttatctgcaaaccgtagggcaggatggagaggcaccttccgactaccagtcttttgccgtcaccattgcctctgctcttgtaataacagtcaatttccagattggcttggatacttcttattggacttttgtgaatgctttttcaatttttggaagcattgcactttattttggcatcatgtttgactttcatagtgctggaatacatgttctctttccatctgcatttcaatttacaggcacagcttcaaacgctctgagacagccatacatttggttaactatcatcctgactgttgctgtgtgcttactacccgtcgttgccattcgattcctgtcaatgaccatctggccatcagaaagtgataagatccagaagcatcgcaagcggttgaaggcggaggagcagtggcagcgacggcagcaggtgttccgccggggcgtgtcaacgcggcgctcggcctacgccttctcgcaccagcggggctacgcggacctcatctcctccgggcgcagcatccgcaagaagcgctcgccgcttgatgccatcgtggcggatggcaccgcggagtacaggcgcaccggggacagctgatcccttacccccaggctgggatgcggccacaaagcacgtctatttttttatgaaagactctcaggactttgtgtgtgtgtgtgaattgcattcatcacaaagatattgaagacaataaataatctttataacaaactccttgggttggactattaaacaatagcagagccaagaaataggacttttaaaagtcctattattcggccgggcgtggtggctcaggtctgtaatcccagcactttaggaggctgaggaggggagatcacctgaggccaggagttcgagaccagcccagccaacatggtgaaaccctgtctctaccataaattaaaaattagccgggcttggtggtgggcacccgtaatcccacctatttgagaagctgaagcagaagaatcgcttgaacctgggagatggaggttacagtgagccgagattgcgccactgcactccagcctgggtgacagagcaagactctgtcttaagaaaaatttaaaaataggccgggcatggtggctcatgcctgtcatcctagcactttgggaggccaaggcaggtggatcacttgaggtcaggagaccagcccggccaacatggtgaaaccccatctctactaaaaatacaaaaattagctggaaatcgcttgaacctgggaggtggaggttccagtgagccgagatcgtggcactgcactccaacctgagcaacagagtgagacaccagctcaaaaaaaattttttaataataataaaagtcctattattcaactggttatgtacattatggttgaaagggaacgttttaatccagtctcaatccagggcaatagaattacaaagcatgttgtatttcagttcaaatggtattgtattataaaattacagttacattttcctttcggtgatcttcagcataatttcccagaggcccctttttcctccctataggccatcttattaacagattttaaaatttatagtaatgacaaatgacttatcagtgttcatcatctgaaagctaagtggttcgttcaatcactttttcaaagttgatagtagattgcatggtttcatgtttcctcatattggtttattaattctatttaatcaaggaaaataacttcagattccataaagtttcagtttatttttagtttactactaggtgagatagcacattacatacttttactatcaaatattattttagcagcttcccatagtaccaaatgatttgattccctactctcattttttaaagcatataaatatttatgggcttaaaaagggggtttttaaaaactgaggatatcagtaataaattgcagaatattttgcaaagctttcttttggaaagcaaacttttgtgcctgcctatatgcaaagtattttatcagggacttgaacaaagacctcactctttttcacttgtcttatgtcgagagaaaaggttattggcagccacattcctaagactggggaatggtgtgtccttttaaatttgaagataactttaggtaattatggaaactcctcaaagaggagaaagtaatttttttccagacatttttctcattctgtgtctttcacacactagtttccatagttcgagaattctgttttttaccattgggctgtgaatgttcacaatatcagtcctgttgaattcctatgaggtaatcacaatgtgtatatgttcattttctaggtatgataaaagaatgtatggctttttattctgtggaagtaaaatcctgaacgtttacaacttttccttaacttgtaaataaaaaattgtaagttttttctttttttacagaaaacttagcttgtgtaattctgttagtttcagatttctctcctgtttttgcaaattgtgggaaagattgacaatgcaaatgtgtcaaagacatactgttgggtgcaatattaacaattttaaatgcaaatttctttggataaattatttctatattctgtaaatctgagatttaatgtatattttgtttaaaaaaatgatttagtaaaatctttgaaaagta

SEQ ID NO: 328010 - DNA, 3264 bp, Homo sapiens
atgagtacagaaagagactcagaaacgacatttgacgaggattctcagcctaatgacgaagtggttccctacagtgatgatgaaacagaagatgaacttgatgaccaggggtctgctgttgaaccagaacaaaaccgagtcaacagggaagcagaggagaaccgggagccattcagaaaagaatgtacatggcaagtcaaagcaaacgatcgcaagtaccacgaacaacctcactttatgaacacaaaattcttgtgtattaaggagagtaaatatgcgaataatgcaattaaaacatacaagtacaacgcatttacctttataccaatgaatctgtttgagcagtttaagagagcagccaatttatatttcctggctcttcttatcttacaggcagttcctcaaatctctaccctggcttggtacaccacactagtgcccctgcttgtggtgctgggcgtcactgcaatcaaagacctggtggacgatgtggctcgccataaaatggataaggaaatcaacaataggacgtgtgaagtcattaaggatggcaggttcaaagttgctaagtggaaagaaattcaagttggagacgtcattcgtctgaaaaaaaatgattttgttccagctgacattctcctgctgtctagctctgagcctaacagcctctgctatgtggaaacagcagaactggacggagaaaccaatttaaaatttaagatgtcacttgaaatcacagaccagtacctccaaagagaagatacattggctacatttgatggttttattgaatgtgaagaacccaataaccgactagataagtttacaggaacactattttggagaaacacaagttttcctttggatgctgataaaattttgttacgtggctgtgtaattaggaacaccgatttctgccacggcttagtcatttttgcaggtgctgacactaaaataatgaagaatagtgggaaaaccagatttaaaagaactaaaattgattacttgatgaactacatggtttacacgatctttgttgttcttattctgctttctgctggtcttgccatcggccatgcttattgggaagcacaggtgggcaattcctcttggtacctctatgatggagaagacgatacaccctcctaccgtggattcctcattttctggggctatatcattgttctcaacaccatggtacccatctctctctatgtcagcgtggaagtgattcgtcttggacagagtcacttcatcaactgggacctgcaaatgtactatgctgagaaggacacacccgcaaaagctagaaccaccacactcaatgaacagctcgggcagatccattatatcttctctgataagacggggacactcacacaaaatatcatgacctttaaaaagtgctgtatcaacgggcagatatatggggaccatcgggatgcctctcaacacaaccacaacaaaatagagcaagttgattttagctggaatacatatgctgatgggaagcttgcattttatgaccactatcttattgagcaaatccagtcagggaaagagccagaagtacgacagttcttcttcttgctcgcagtttgccacacagtcatggtggataggactgatggtcagctcaactaccaggcagcctctcccgatgaaggtgccctggtaaacgctgccaggaactttggctttgccttcctcgccaggacccagaacaccatcaccatcagtgaactgggcactgaaaggacttacaatgttcttgccattttggacttcaacagtgaccggaagcgaatgtctatcattgtaagaaccccagaaggcaatatcaagctttactgtaaaggtgctgacactgttatttatgaacggttacatcgaatgaatcctactaagcaagaaacacaggatgccctggatatctttgcaaatgaaactcttagaaccctatgcctttgctacaaggaaattgaagaaaaagaatttacagaatggaataaaaagtttatggctgccagtgtggcctccaccaaccgggacgaagctctggataaagtatatgaggagattgaaaaagacttaattgtgagttttagccttaataactttttctttgatattctaagcagaattgaaatttttattaagttttattgaatatttgatctcatgcttaagagataattgtaacttcagcatttgacactggcacaatggaagaaggttatttcttttattcaccaaaataggagcagaacagaagttgccattatgagaaaccaaaagacaaaatacattaggagaagttctaatttaattccataatttgtatatcacttattaaaatttattataatttttaaacaataacaaacctgcatctaatacttattacattgggggaattaccgaaacaattcatattctgcaaaatcttgaaataagaaaaatatattgtttctaaaagttttccaaatttaatacatagtttttgtagggtttagataagtggaaaatattcaacaaatagctagtattgcaactggtttacggtttatgtcagtataaagccacaaatacacaagaaaagtgtatttttaacatccttgattttgtacttgcatttttgtcttggtaaattaaatagttcatcctttagggaaaaagtttttaggtgtgttggtttgcagtaattgtgaaacatggcagccttccctgttaacactggccattggccccaggagagcagcaaccaggatgtataattagcccttctttttacaggttggcaacctgtaattacagaaaacttttggtttgtttgctaattccttttttttttttttttaatatacattctagctcctgggagctacagctattgaagacaagctacaggatggagttccagaaaccatttcaaaacttgcaaaagctgacattaagatctgggtgcttactggagacaaaaagggtaattcattgtgcagggaagcatatctgttaattcacaaatatttatagctgccgtttcctttgcccaagatgacctcctcagacttttcatcctgtacaaacactgtttctttggacggaagatgctttttctgagaaaccctcctctgtttttccagcacattcttctgcatcctttcctgatccccctcagtagcagtttcttccttataatttagctcctggccatgtcttgctgattataattggtcttatctctccagccagacgtgggtt

SEQ ID NO: 328011 - DNA, 569 bp, Homo sapiens
gggggcggacacccgggtgacacattctttcggagagggagggcaagacttttctccggagcctctggcaactcgtggagtctatataagggtcagccagcagccggcccggggtgtcagccaccccacccaagtccccggtctacctggacctggcctacctgcccagcgggagcagcgcccacctggtggatgaggagttcttccagcgcgtgcgcgcgctctgctacgtcatcagtggccaggaccagcgcaaggaggaaggcatgcgggccgtcctggacgcgctactggccagcaagcagcattgggaccgtgacctgcaggtgaccctgatccccactttcgactcggtggccatgcatacgtggtacgcagagacgcacgcccggcaccaggcgctgggcatcacggtgttgggcagcaacagcatggtgtccatgcaggatgacgccttcccggcctgcaaggtggagttctagccccatcgccgacacgccccccactcagcccagcccgcctgtccctagattcagccacatcagaaataaactgtgactacacttggc

SEQ ID NO: 328012 - DNA, 3233 bp, Homo sapiens
cggggcggcccgaagatggcggcggtggctggatctggggctgccgcggctccgagctcactgctcctcgtggtgggcagcgagttcgggagcccggggctcctcacctacgtcctggaggagctcgaaagagctcaaggtctttgtgtcccgacactctgccaccttctccagcattgtgaaaggccagcggagcctgcaccaccgtggagacaacctggagaccctggtcctcctgaacccatcagacaagtccctgtatgatgagctccggaaccttctgttggaccctgcctctcacaagctactggtgttggctgggccctgcctggaggagacgggggagctgctgctacagacagggggcttctcgcctcaccacttcctccaggtcctgaaggacagagagatccgggacatcctggccaccacgcccccacctgtgcagccgcccatactcaccatcacctgccccaccttcggtgactgggctcagctggcacccgctgtgcctggccttcagggggcgctccggctccagctgcggctgaaccccccggcgcagctgccccaactctgagggcctgtgcgaattcctggagtacgtggctgagtctctggagccaccgtcccccttcgagctgctggagcccccgacctccgggggcttcctcaggctgggccggccctgctgctacatcttccctggaggcctcggggatgccgccttcttcgccgtcaatggcttcactgtgctggtcaacggtggctcaaaccccaagtccagtttctggaagctggtgcggcacctggaccgcgtggatgccgtgctggtgacccaccctggcgccgacagcctccccggcctcaacagcctgctgcggcgcaaactggcggagcgctccgaggtggctgctggtgggggctcctgggacgacaggctgcgcaggctcatctcccccaacctgggggtcgtgttcttcaacgcctgcgaggccgcgtcgcggctggcgcgcggcgaggatgaggcggagctggcgctgagcctcctggcgcagctgggcatcacgcctctgccactcagccgcggccccgtgccagccaaacccaccgtgctcttcgagaagatgggcgtgggccggctggacatgtatgtgctgcacccgccctccgccggcgccgagcgcacgctggcctctgtgtgcgccctgctggtgtggcaccccgccggccccggcgagaaggtggtgcgcgtgctgttccccggttgcaccccgcccgcctgcctcctggacggcctggtccgcctgcagcacttgaggttcctgcgagagcccgtggtgacgccccaggacctggaggggccggggcgagccgagagcaaagagagcgtgggctcccgggacagctcgaagagagagggcctcctggccacccaccctagacctggccaggagcgccctggggtggcccgcaaggagccagcacgggctgaggccccacgcaagactgagaaagaagccaagaccccccgggagttgaagaaagaccccaaaccgagtgtctcccggacccagccgcgggaggtgcgccgggcagcctcttctgtgcccaacctcaagaagacgaatgcccaggcggcacccaagccccgcaaagcgcccagcacgtcccactctggcttcccgccggtggcaaatggaccccgcagcccgcccagcctccgatgtggagaagccagcccccccagtgcagcctgcggctctccggcctcccagctggtggccacgcccagcctggagctggggccgatcccagccggggaggagaaggcactggagctgcctttggccgccagctcaatcccaaggccacgcacaccctcccctgagtcccaccggagccccgcagagggcagcgagcggctgtcgctgagcccactgcggggcggggaggccgggccagacgcctcacccacagtgaccacacccacggtgaccacgccctcactacccgcagaggtgggctccccgcactcgaccgaggtggacgagtccctgtcggtgtcctttgagcaggtgctgccgccatccgcccccaccagtgaggctgggctgagcctcccgctgcgtggcccccgggcgcggcgctcggcttccccacacgatgtggacctgtgcctggtgtcaccctgtgaatttgagcatcgcaaggcggtgccaatggcaccggcacctgcgtcccccggcagctcgaatgacagcagtgcccggtcacaggaacgggcaggtgggctgggggccgaggagacgccacccacatcggtcagcgagtccctgcccaccctgtctgactcggatcccgtgcccctggcccccggtgcggcagactcagacgaagacacagagggctttggagtccctcgccacgaccctttgcctgaccccctcaaggtccccccaccactgcctgacccatccagcatctgcatggtggaccccgagatgctgccccccaagacagcacggcaaacggagaacgtcagccgcacccggaagcccctggcccgccccaactcacgcgctgccgcccccaaagccactccagtggctgctgccaaaaccaaggggcttgctggtggggaccgtgccagccgaccactcagtgcccggagtgagcccagtgagaagggaggccgggcacccctgtccagaaagtcctcaacccccaagactgccactcgaggcccgtcggggtcagccagcagccggcccggggtgtcagccaccccacccaagtccccggtctacctggacctggcctacctgcccagcgggagcagcgcccacctggtggatgaggagttcttccagcgcgtgcgcgcgctctgctacgtcatcagtggccaggaccagcgcaaggaggaaggcatgcgggccgtcctggacgcgctactggccagcaagcagcattgggaccgtgacctgcaggtgaccctgatccccactttcgactcggtggccatgcatacgtggtacgcagagacgcacgcccggcaccaggcgctgggcatcacggtgttgggcagcaacagcatggtgtccatgcaggatgacgccttcccggcctgcaaggtggagttctagccccatcgccgacacgccccccactcagcccagcccgcctgtccctagattcagccacatcagaaataaactgtgactacacttggc

SEQ ID NO: 328013 - DNA, 1651 bp, Homo sapiens
  misc_feature (1610)..(1610): n is a, c, g, or t
  misc_feature (1614)..(1614): n is a, c, g, or t
  misc_feature (1645)..(1645): n is a, c, g, or t
cggggcggcccgaagatggcggcggtggctggatctggggctgccgcggctccgagctcactgctcctcgtggtgggcagcgagttcgggagcccggggctcctcacctacgtcctggaggagctcgaaagaggcatccggtcttgggatgtcgatcctggcgtctgcaaccttgatgaacagctcaaggtctttgtgtcccgacactctgccaccttctccagcattgtgaaaggccagcggagcctgcaccaccgtggagacaacctggagaccctggtcctcctgaacccatcagacaagtccctgtatgatgagctccggaaccttctgttggaccctgcctctcacaagctactggtgttggctgggccctgcctggaggagacgggggagctgctgctacagacagggggcttctcgcctcaccacttcctccaggtcctgaaggacagagagatccgggacatcctggccaccacgcccccacctgtgcagccgcccatactcaccatcacctgccccaccttcggtgactgggctcagctggcacccgctgtgcctggccttcagggggcgctccggctccagctgcggctgaaccccccggcgcagctgccccaactctgagggcctgtgcgaattcctggagtacgtggctgagtctctggagccaccgtcccccttcgagctgctggagcccccgacctccgggggcttcctcaggctgggccggccctgctgctacatcttccctggaggcctcggggatgccgccttcttcgccgtcaatggcttcactgtgctggtcaacggtggctcaaaccccaagtccagtttctggaagctggtgcggcacctggaccgcgtggatgccgtgctggtgacccaccctggcgccgacagcctccccggcctcaacagcctgctgcggcgcaaactggcggagcgctccgaggtggctgctggtgggggctcctgggacgacaggctgcgcaggctcatctcccccaacctgggggtcgtgttcttcaacgcctgcgaggccgcgtcgcggctggcgcgcggcgaggatgaggcggagctggcgctgagcctcctggcgcagctgggcatcacgcctctgccactcagccgcggccccgtgccagccaaacccaccgtgctcttcgagaagatgggcgtgggccggctggacatgtatgtgctgcacccgccctccgccggcgccgagcgcacgctggcctctgtgtgcgccctgctggtgtggcaccccgccggccccggcgagaaggtggtgcgcgtgctgttccccggttgcaccccgcccgcctgcctcctggacggcctggtccgcctgcagcacttgaggttcctgcgagagcccgtggtgacgccccaggacctggaggggccggggcgagccgagagcaaagagagcgtgggctcccgggacagctcgaagagagagggcctcctggccacccaccctagacctggccaggagcgccctggggtggcccgcaaggagccagcacgggctgaggccccacgcaagactgagaaagaagccaagaccccggagtaagaaaccaacatgtccgacacgngagncggactttggcactaaaaatcaggacagccnaggcag

SEQ ID NO: 328014 - DNA, 326 bp, Homo sapiens
cacctgccaggttcacctgcagccacttggctcagtgggactggcgggcgtgatgcgcccgtgggtggagatgggtgttcatcccccatccctcggagcatctggacctggcgtttcattgcatgtaaaatgggacaggaacacgcacctcggttcatgtgcttgaggagtgtttagtgagcacctgctatgcgccaggcctttgggcagtggacacagggatatggccgggatgatagacaggttcagccctgccaacacaggtctggtttggggatggacccaaagcgagtgaggagatggaacaagcttccagctcacatggt

SEQ ID NO: 328015 - DNA, 3283 bp, Homo sapiens
cggggcggcccgaagatggcggcggtggctggatctggggctgccgcggctccgagctcactgctcctcgtggtgggcagcgagttcgggagcccggggctcctcacctacgtcctggaggagctcgaaagaggcatccggtcttgggatgtcgatcctggcgtctgcaaccttgatgaacagctcaaggtctttgtgtcccgacactctgccaccttctccagcattgtgaaaggccagcggagcctgcaccaccgtggagacaacctggagaccctggtcctcctgaacccatcagacaagtccctgtatgatgagctccggaaccttctgttggaccctgcctctcacaagctactggtgttggctgggccctgcctggaggagacgggggagctgctgctacagacagggggcttctcgcctcaccacttcctccaggtcctgaaggacagagagatccgggacatcctggccaccacgcccccacctgtgcagccgcccatactcaccatcacctgccccaccttcggtgactgggctcagctggcacccgctgtgcctggccttcagggggcgctccggctccagctgcggctgaaccccccggcgcagctgccccaactctgagggcctgtgcgaattcctggagtacgtggctgagtctctggagccaccgtcccccttcgagctgctggagcccccgacctccgggggcttcctcaggctgggccggccctgctgctacatcttccctggaggcctcggggatgccgccttcttcgccgtcaatggcttcactgtgctggtcaacggtggctcaaaccccaagtccagtttctggaagctggtgcggcacctggaccgcgtggatgccgtgctggtgacccaccctggcgccgacagcctccccggcctcaacagcctgctgcggcgcaaactggcggagcgctccgaggtggctgctggtgggggctcctgggacgacaggctgcgcaggctcatctcccccaacctgggggtcgtgttcttcaacgcctgcgaggccgcgtcgcggctggcgcgcggcgaggatgaggcggagctggcgctgagcctcctggcgcagctgggcatcacgcctctgccactcagccgcggccccgtgccagccaaacccaccgtgctcttcgagaagatgggcgtgggccggctggacatgtatgtgctgcacccgccctccgccggcgccgagcgcacgctggcctctgtgtgcgccctgctggtgtggcaccccgccggccccggcgagaaggtggtgcgcgtgctgttccccggttgcaccccgcccgcctgcctcctggacggcctggtccgcctgcagcacttgaggttcctgcgagagcccgtggtgacgccccaggacctggaggggccggggcgagccgagagcaaagagagcgtgggctcccgggacagctcgaagagagagggcctcctggccacccaccctagacctggccaggagcgccctggggtggcccgcaaggagccagcacgggctgaggccccacgcaagactgagaaagaagccaagaccccccgggagttgaagaaagaccccaaaccgagtgtctcccggacccagccgcgggaggtgcgccgggcagcctcttctgtgcccaacctcaagaagacgaatgcccaggcggcacccaagccccgcaaagcgcccagcacgtcccactctggcttcccgccggtggcaaatggaccccgcagcccgcccagcctccgatgtggagaagccagcccccccagtgcagcctgcggctctccggcctcccagctggtggccacgcccagcctggagctggggccgatcccagccggggaggagaaggcactggagctgcctttggccgccagctcaatcccaaggccacgcacaccctcccctgagtcccaccggagccccgcagagggcagcgagcggctgtcgctgagcccactgcggggcggggaggccgggccagacgcctcacccacagtgaccacacccacggtgaccacgccctcactacccgcagaggtgggctccccgcactcgaccgaggtggacgagtccctgtcggtgtcctttgagcaggtgctgccgccatccgcccccaccagtgaggctgggctgagcctcccgctgcgtggcccccgggcgcggcgctcggcttccccacacgatgtggacctgtgcctggtgtcaccctgtgaatttgagcatcgcaaggcggtgccaatggcaccggcacctgcgtcccccggcagctcgaatgacagcagtgcccggtcacaggaacgggcaggtgggctgggggccgaggagacgccacccacatcggtcagcgagtccctgcccaccctgtctgactcggatcccgtgcccctggcccccggtgcggcagactcagacgaagacacagagggctttggagtccctcgccacgaccctttgcctgaccccctcaaggtccccccaccactgcctgacccatccagcatctgcatggtggaccccgagatgctgccccccaagacagcacggcaaacggagaacgtcagccgcacccggaagcccctggcccgccccaactcacgcgctgccgcccccaaagccactccagtggctgctgccaaaaccaaggggcttgctggtggggaccgtgccagccgaccactcagtgcccggagtgagcccagtgagaagggaggccgggcacccctgtccagaaagtcctcaacccccaagactgccactcgaggcccgtcggggtcagccagcagccggcccggggtgtcagccaccccacccaagtccccggtctacctggacctggcctacctgcccagcgggagcagcgcccacctggtggatgaggagttcttccagcgcgtgcgcgcgctctgctacgtcatcagtggccaggaccagcgcaaggaggaaggcatgcgggccgtcctggacgcgctactggccagcaagcagcattgggaccgtgacctgcaggtgaccctgatccccactttcgactcggtggccatgcatacgtggtacgcagagacgcacgcccggcaccaggcgctgggcatcacggtgttgggcagcaacagcatggtgtccatgcaggatgacgccttcccggcctgcaaggtggagttctagccccatcgccgacacgccccccactcagcccagcccgcctgtccctagattcagccacatcagaaataaactgtgactacacttggc

SEQ ID NO: 328016 - DNA, 3298 bp, Homo sapiens
ggctcagtgggactggcgggcgtgatgcgcccgtgggtggagatgggtgttcatcccccatccctcggagcatctggacctggcgtttcattgcatgtaaaatgggacaggaacacgcacctcggttcatgtgcttgaggagtgtttagcatccggtcttgggatgtcgatcctggcgtctgcaaccttgatgaacagctcaaggtctttgtgtcccgacactctgccaccttctccagcattgtgaaaggccagcggagcctgcaccaccgtggagacaacctggagaccctggtcctcctgaacccatcagacaagtccctgtatgatgagctccggaaccttctgttggaccctgcctctcacaagctactggtgttggctgggccctgcctggaggagacgggggagctgctgctacagacagggggcttctcgcctcaccacttcctccaggtcctgaaggacagagagatccgggacatcctggccaccacgcccccacctgtgcagccgcccatactcaccatcacctgccccaccttcggtgactgggctcagctggcacccgctgtgcctggccttcagggggcgctccggctccagctgcggctgaaccccccggcgcagctgccccaactctgagggcctgtgcgaattcctggagtacgtggctgagtctctggagccaccgtcccccttcgagctgctggagcccccgacctccgggggcttcctcaggctgggccggccctgctgctacatcttccctggaggcctcggggatgccgccttcttcgccgtcaatggcttcactgtgctggtcaacggtggctcaaaccccaagtccagtttctggaagctggtgcggcacctggaccgcgtggatgccgtgctggtgacccaccctggcgccgacagcctccccggcctcaacagcctgctgcggcgcaaactggcggagcgctccgaggtggctgctggtgggggctcctgggacgacaggctgcgcaggctcatctcccccaacctgggggtcgtgttcttcaacgcctgcgaggccgcgtcgcggctggcgcgcggcgaggatgaggcggagctggcgctgagcctcctggcgcagctgggcatcacgcctctgccactcagccgcggccccgtgccagccaaacccaccgtgctcttcgagaagatgggcgtgggccggctggacatgtatgtgctgcacccgccctccgccggcgccgagcgcacgctggcctctgtgtgcgccctgctggtgtggcaccccgccggccccggcgagaaggtggtgcgcgtgctgttccccggttgcaccccgcccgcctgcctcctggacggcctggtccgcctgcagcacttgaggttcctgcgagagcccgtggtgacgccccaggacctggaggggccggggcgagccgagagcaaagagagcgtgggctcccgggacagctcgaagagagagggcctcctggccacccaccctagacctggccaggagcgccctggggtggcccgcaaggagccagcacgggctgaggccccacgcaagactgagaaagaagccaagaccccccgggagttgaagaaagaccccaaaccgagtgtctcccggacccagccgcgggaggtgcgccgggcagcctcttctgtgcccaacctcaagaagacgaatgcccaggcggcacccaagccccgcaaagcgcccagcacgtcccactctggcttcccgccggtggcaaatggaccccgcagcccgcccagcctccgatgtggagaagccagcccccccagtgcagcctgcggctctccggcctcccagctggtggccacgcccagcctggagctggggccgatcccagccggggaggagaaggcactggagctgcctttggccgccagctcaatcccaaggccacgcacaccctcccctgagtcccaccggagccccgcagagggcagcgagcggctgtcgctgagcccactgcggggcggggaggccgggccagacgcctcacccacagtgaccacacccacggtgaccacgccctcactacccgcagaggtgggctccccgcactcgaccgaggtggacgagtccctgtcggtgtcctttgagcaggtgctgccgccatccgcccccaccagtgaggctgggctgagcctcccgctgcgtggcccccgggcgcggcgctcggcttccccacacgatgtggacctgtgcctggtgtcaccctgtgaatttgagcatcgcaaggcggtgccaatggcaccggcacctgcgtcccccggcagctcgaatgacagcagtgcccggtcacaggaacgggcaggtgggctgggggccgaggagacgccacccacatcggtcagcgagtccctgcccaccctgtctgactcggatcccgtgcccctggcccccggtgcggcagactcagacgaagacacagagggctttggagtccctcgccacgaccctttgcctgaccccctcaaggtccccccaccactgcctgacccatccagcatctgcatggtggaccccgagatgctgccccccaagacagcacggcaaacggagaacgtcagccgcacccggaagcccctggcccgccccaactcacgcgctgccgcccccaaagccactccagtggctgctgccaaaaccaaggggcttgctggtggggaccgtgccagccgaccactcagtgcccggagtgagcccagtgagaagggaggccgggcacccctgtccagaaagtcctcaacccccaagactgccactcgaggcccgtcggggtcagccagcagccggcccggggtgtcagccaccccacccaagtccccggtctacctggacctggcctacctgcccagcgggagcagcgcccacctggtggatgaggagttcttccagcgcgtgcgcgcgctctgctacgtcatcagtggccaggaccagcgcaaggaggaaggcatgcgggccgtcctggacgcgctactggccagcaagcagcattgggaccgtgacctgcaggtgaccctgatccccactttcgactcggtggccatgcatacgtggtacgcagagacgcacgcccggcaccaggcgctgggcatcacggtgttgggcagcaacagcatggtgtccatgcaggatgacgccttcccggcctgcaaggtggagttctagccccatcgccgacacgccccccactcagcccagcccgcctgtccctagattcagccacatcagaaataaactgtgactacacttggc

SEQ ID NO: 328017 - DNA, 454 bp, Homo sapiens
tctttgggtgctggttgggaggaacagggacctcacagacgggctgaccacccattgcagacctcaaggtggagcacacaagatcagggaaaagccaggaggggtctcaaatgccaggaaaggaaggcgacttgggcccaggccagaagggcagggggcacccccctcactggtggtccactctccccacacaccccccctccacctgcaggtgaccctgatccccactttcgactcggtggccatgcatacgtggtacgcagagacgcacgcccggcaccaggcgctgggcatcacggtgttgggcagcaacagcatggtgtccatgcaggatgacgccttcccggcctgcaaggtggagttctagccccatcgccgacacgccccccactcagcccagcccgcctgtccctagattcagccacatcagaaataaactgtgactacacttggc

SEQ ID NO: 328018 - DNA, 436 bp, Homo sapiens
tgcccctgcccctcaggctctactgtcctatctgtcccatctgtcccccacccacacacttctcccaagctactccaggcaggcatggtcttctctcttaatttcctatctcaccccatagtttttccaccatcttcaaaactcttccctgatctcagcaaaccaagactctcctaattgtctctggcgcccaaaatctgcatgtaccaccctcctacgctcactcctcagtgttttccccaagttactctttccacgctgaccctctccacgcttcactcctcccagcctactccctcggcgtccaccccccgttaccggccccttcttactctcctgggcccttcttccccgccatccgtcggtcaggccttctctaggtcaccgcttgcctccccgggccaaccgccgccgcccagtgttagctgctgagcct

SEQ ID NO: 328019 - DNA, 446 bp, Homo sapiens
tcgggttaaaaaagagtccagacaatgtgatttaaaatgaaaataatttaagcttatttgtggtgagagttaaaaataaagttggctccaggtatcatttgtggaactgatttgttttagcataattgtttttgaactagctcgtttttaacttgtatttttaaagttacacttttaaaatgtaggagtctgttttgtaaacttgtacagcccctgctaacttttagaagagtagagtggcttatttcttcatgtgtgtttattctgggctgtcatctgatgaagttaccagtttgtggtcagaaattgagaaagaggagtgaggaaacgaaaaatattgacacgtacacatcaccttgcagtgcatgagagtgcccttttggactggttaggaaactaacatttgagcatatttgctcagcagaaactttttatgtgtgaaagtt

SEQ ID NO: 328020 - DNA, 470 bp, Homo sapiens
aacccctcttgtttttctctccacacgtgaaagtcaggaagaaaaccatctgcttagtgtctgaacctaacttcagttcttactttcaaaatcaccttagccaaaccatacccccagggcaaatactctccagccccaactcatctctccttcttaggcacatgggctgacacaccagctccttagcatggccattcctctttttacattttctcattatttcaacccatgcatcctagaatctcatatggcttctcccttctgaacttcaacttgtcctctaagaaaataaacagtccagaatcccaaactgtcagacctgaaaaagacgtcagagatcactcgattcgaaccttgcaacatacagctggggaaactgaggtccaaagaaaggtaggcactggcccagagccacacagctgctaggcagtgtgggaggaggggctaaaaacctggcttttgaggctggg

SEQ ID NO: 328021 - DNA, 420 bp, Homo sapiens
tcagttcttactttcaaaatcaccttagccaaaccatacccccagggcaaatactctccagccccaactcatctctccttcttaggcacatgggctgacacaccagctccttagcatggccattcctctttttacattttctcattatttcaacccatgcatcctagaatctcatatggcttctcccttctgaacttcaacttgtcctctaagaaaataaacagtccagaatcccaaactgtcagacctgaaaaagacgtcagagatcactcgattcgaaccttgcaacatacagctggggaaactgaggtccaaagaaaggtaggcactggcccagagccacacagctgctaggcagtgtgggaggaggggctaaaaacctggcttttgaggctgggcgcggtggctcacacttgtaat

SEQ ID NO: 328022 - DNA, 2689 bp, Homo sapiens
ctcctccaggtgcccagatgactatcatgagccaagcttgtgcagaaaggtgtaacataatgagactggtggaccgtcggtgggcagggattgccaaaggagtgggcacccagaagattattggaagggtacatctagctcaggttcagattgaaggagattttttgccatgttccttctctatacttgaggaacagcccatggacatgcttctgggactggacatgcttaaacggcaccagtgttccatcgacctgaagaaaaatgtactcgtgatcggcaccacaggctcccagaccacctttcttcctgagggagagctaccagagtgtgcccggttggcatatggggctggaagagaggatgtacggccagaggagattgcagaccaagaattagcagaagcccttcaaaaatcagcagaggatgcagagcgtcagaagccatgatgcatgtagtgtgtgtgtactgcagctggagtgggccccagaccagagaaaagtggtaaagaatctacctcactgggaatgtcatcattaccaacttcagatgggtttaaccatcccgcccgttcttcaggacagagtcctgatgttggtaatcctatgagtcttgctcgctctgtctctgcttcagtctgccctatcaagcccagtgactcagatcgcattgaacctaaagctgtgaaggctttgaaggcttcagctgaattccagctaaactctgaaaagaaagaacatctttctttacaagatctttctgatcatgcttcctcagcagaccatgctccaacagaccagagtccagctatgcctatgcagaattcatccgaagaaataactgttgcaggtaatctggagaaatctgctgaaagaagcacccagggcctcaaatttcatctccatacaagacaggaagctagtttatctgtcacatctactaggatgcatgaaccacagatgtttctaggtgaaaaggattggcatccagaaaatcagaacctgagtcaagtgagtgaccctcagcagcacgaagaaccagggaatgaacagtatgaggttgcacaacaaaaagcttcacatgaccaagaatatctttgtaacataggggaccttgagcttcctgaagaaaggcaacagaatcaacacaaaattgttgatttggaagctacgatgaaaggaaatgggctcccacagaatgtggatcctccaagtgcgaagaaaagtattccatcttcagaatgcagtggctgctcaaattcagaaacatttatggaaatcgatacagctcaacagtccctagttactttgcttaattcaacaggcaggcagaatgccaatgtcaagaacattggtgcattggatctcactttagataatcccttgatggaagtagaaacatcaaaatgtaacccttcatctgaaattttgaatgattccatttccactcaggatttacagcccccagaaactaatgttgaaatacctggaacaaataaagaatatggccattactcctctccaagtctctgtggcagttgtcagccttctgtggagtcagcagaagaatcttgcccgtctataacggcagccttgaaagaacttcatgaacttttggttgttagcagtaaaccagcttcagaaaatacatctgaagaagtaatctgtcaatcagaaaccatagctgagggccaaaccagtattaaagacctttctgaaagatggacccaaaatgagcatcttacccagaatgaacagtgtccacaagtctcctttcatcaggccatatctgtatcagtggagacagaaaaattaacaggtacttcatctgacactggaagagaagctgtagaaaatgtaaacttcaggagtctaggtgatggcctgtcaaccgataaggaaggtgtccccaaatctagggaatccataaataagaaccgttctgtcactgtaacctcagctaaaacatccaatcagttacactgcaccttaggtgtagaaatttcacccaaacttttagcaggtgaggaggatgcactcaatcagacttctgagcaaactaagtctttgtcatccaatttcatattggttaaagacttaggtcagggcatacagaattcagtaacagacaggcctgaaaccagagaaaatgtctgtcctgatgcttcgaggccattacttgaatatgaaccacctaccagccatccatcatcaagtcctgccattcttccaccattgatttttcctgccacagatattgaccgcattctccgtgctggctttactttgcaggaagctcttggagctttgcatcgagttggtgggaatgcagaccttgcacttcttgttttgctcgcaaaaaacatcgtagttcctacatgactgtgggaaagtgggctagaccgttctccattccctttaaacaaaagaaagctctctctatatacacgcacacatacacactcaccacatatacagtatatatagaaacctgcaagcagaatgttgagccagattttttttaaagatttttttcggccaaagtaatttatgatcttttgtctgatgaatttgtctatcctacttgttaaaatttaggcctttttaaatgtattggcagtatgtgcatacagaagctttttattctcattaagatgtatcctggaataaaatggatggttttgtgtgta

SEQ ID NO: 328023 - DNA, 2885 bp, Homo sapiens
ctcctccaggtgcccagatgactatcatgagccaagcttgtgcagaaaggtgtaacataatgagactggtggaccgtcggtgggcagggattgccaaaggagtgggcacccagaagattattggaagggtacatctagctcaggttcagattgaaggagattttttgccatgttccttctctatacttgaggaacagcccatggacatgcttctgggactggacatgcttaaacggcaccagtgttccatcgacctgaagaaaaatgtactcgtgatcggcaccacaggctcccagaccacctttcttcctgagggagagctaccagagtgtgcccggttggcatatggggctggaagagaggatgtacggccagaggagattgcagaccaagaattagcagaagcccttcaaaaatcagcagaggatgcagattgctgtgtgtattgtgagagaatggaagcaaccaacaaatattttggatgtccaaactacagaaacatccctcaacttggaatctaccagttcctgattttaaagatggcaaaagaacggaaactataaccctgcatgctgtgtggtttgcattgttaacccaagtttgcttgtctgtttcctaattcacacagagcgtcagaagccatgatgcatgtagtgtgtgtgtactgcagctggagtgggccccagaccagagaaaagtggtaaagaatctacctcactgggaatgtcatcattaccaacttcagatgggtttaaccatcccgcccgttcttcaggacagagtcctgatgttggtaatcctatgagtcttgctcgctctgtctctgcttcagtctgccctatcaagcccagtgactcagatcgcattgaacctaaagctgtgaaggctttgaaggcttcagctgaattccagctaaactctgaaaagaaagaacatctttctttacaagatctttctgatcatgcttcctcagcagaccatgctccaacagaccagagtccagctatgcctatgcagaattcatccgaagaaataactgttgcaggtaatctggagaaatctgctgaaagaagcacccagggcctcaaatttcatctccatacaagacaggaagctagtttatctgtcacatctactaggatgcatgaaccacagatgtttctaggtgaaaaggattggcatccagaaaatcagaacctgagtcaagtgagtgaccctcagcagcacgaagaaccagggaatgaacagtatgaggttgcacaacaaaaagcttcacatgaccaagaatatctttgtaacataggggaccttgagcttcctgaagaaaggcaacagaatcaacacaaaattgttgatttggaagctacgatgaaaggaaatgggctcccacagaatgtggatcctccaagtgcgaagaaaagtattccatcttcagaatgcagtggctgctcaaattcagaaacatttatggaaatcgatacagctcaacagtccctagttactttgcttaattcaacaggcaggcagaatgccaatgtcaagaacattggtgcattggatctcactttagataatcccttgatggaagtagaaacatcaaaatgtaacccttcatctgaaattttgaatgattccatttccactcaggatttacagcccccagaaactaatgttgaaatacctggaacaaataaagaatatggccattactcctctccaagtctctgtggcagttgtcagccttctgtggagtcagcagaagaatcttgcccgtctataacggcagccttgaaagaacttcatgaacttttggttgttagcagtaaaccagcttcagaaaatacatctgaagaagtaatctgtcaatcagaaaccatagctgagggccaaaccagtattaaagacctttctgaaagatggacccaaaatgagcatcttacccagaatgaacagtgtccacaagtctcctttcatcaggccatatctgtatcagtggagacagaaaaattaacaggtacttcatctgacactggaagagaagctgtagaaaatgtaaacttcaggagtctaggtgatggcctgtcaaccgataaggaaggtgtccccaaatctagggaatccataaataagaaccgttctgtcactgtaacctcagctaaaacatccaatcagttacactgcaccttaggtgtagaaatttcacccaaacttttagcaggtgaggaggatgcactcaatcagacttctgagcaaactaagtctttgtcatccaatttcatattggttaaagacttaggtcagggcatacagaattcagtaacagacaggcctgaaaccagagaaaatgtctgtcctgatgcttcgaggccattacttgaatatgaaccacctaccagccatccatcatcaagtcctgccattcttccaccattgatttttcctgccacagatattgaccgcattctccgtgctggctttactttgcaggaagctcttggagctttgcatcgagttggtgggaatgcagaccttgcacttcttgttttgctcgcaaaaaacatcgtagttcctacatgactgtgggaaagtgggctagaccgttctccattccctttaaacaaaagaaagctctctctatatacacgcacacatacacactcaccacatatacagtatatatagaaacctgcaagcagaatgttgagccagattttttttaaagatttttttcggccaaagtaatttatgatcttttgtctgatgaatttgtctatcctacttgttaaaatttaggcctttttaaatgtattggcagtatgtgcatacagaagctttttattctcattaagatgtatcctggaataaaatggatggttttgtgtgta

SEQ ID NO: 328024 - DNA, 997 bp, Homo sapiens
ctcctccaggtgcccagatgactatcatgagccaagcttgtgcagaaaggtgtaacataatgagactggtggaccgtcggtgggcagggattgccaaaggagtgggcacccagaagattattggaagggtacatctagctcaggttcagattgaaggagattttttgccatgttccttctctatacttgaggaacagcccatggacatgcttctgggactggacatgcttaaacggcaccagtgttccatcgacctgaagaaaaatgtactcgtgatcggcaccacaggctcccagaccacctttcttcctgagggagagctaccagagtgtgcccggttggcatatggggctggaagagaggatgtacggccagaggagattgcagaccaagaattagcagaagcccttcaaaaatcagcagaggatgcagattgctgtgtgtattgtgagagaatggaagcaaccaacaaatattttggatgtccaaactacagaaacatccctcaacttggaatctaccagttcctgattttaaagatggcaaaagaacggaaactataaccctgcatgctgtgtggtttgcattgttaacccaagtttgcttgtctgtttcctaattcacacagagcgtcagaagccatgatgcatgtagtgtgtgtgtactgcagctggagtgggccccagaccaggtatttatagacaccatgttaagccttccatccagttgtcatctgtgatctgacagtctgtatccgcagcagtttgggaagttagcatttgtcattcaccatttcaccttgttcaatctggttacaactagcctatatgcatttgtattttggcatgcatacatggatatgtaacataaactcctgtttaaaaatggattcgttattagaaccatccaacagggagaaaatcccagttaaaacagtgtctattatatctaccccatcttggctactataaatatcacatcaagaatattggcctca

SEQ ID NO: 328025 - DNA, 692 bp, Homo sapiens
gaccgcattctccgtgctggctttactttgcaggaagctcttggagctttgcatcgagttggtgggaatgcagaccttgcacttcttgttttgctcgcaaaaaacatcgtagttcctacatgactgtgggaaagtgggctagaccgttctccattccctttaaacaaaagaaagctctctctatatacacgcacacatacacactcaccacatatacagtatatatagaaacctgcaagcagaatgttgagccagattttttttaaagatttttttcggccaaagtaatttatgatcttttgtctgatgaatttgtctatcctacttgttaaaatttaggcctttttaaatgtattggcagtatgtgcatacagaagctttttattctcattaagatgtatcctggaataaaatggatggttttgtgtgtagcatactgttttagaatgagagtaaatgctttgaaaagcagaagccatgagaaatcccactacccatccagctaaaaacagatgaactctccacactgtgactgtgtgtctgtgctgatggcaaggtatggtttgctggctcagttgtcaatttagaaacttttgaccacataatttggtgtttggaattctacccagtgctctgtgtatacatgattcattaattataacaggaaattggagaataattgaatatcttat

SEQ ID NO: 328026 - DNA, 2925 bp, Homo sapiens
ctcctccaggtgcccagatgactatcatgagccaagcttgtgcagaaaggtgtaacataatgagactggtggaccgtcggtgggcagggattgccaaaggagtgggcacccagaagattattggaagggtacatctagctcaggttcagattgaaggagattttttgccatgttccttctctatacttgaggaacagcccatggacatgcttctgggactggacatgcttaaacggcaccagtgttccatcgacctgaagaaaaatgtactcgtgatcggcaccacaggctcccagaccacctttcttcctgagggagagctaccagagtgtgcccggttggcatatggggctggaagagaggatgtacggccagaggagattgcagaccaagaattagcagaagcccttcaaaaatcagcagaggatgcagagcgtcagaagccatgatgcatgtagtgtgtgtgtactgcagctggagtgggccccagaccagagaaaagtggtaaagaatctacctcactgggaatgtcatcattaccaacttcagatgggtttaaccatcccgcccgttcttcaggacagagtcctgatgttggtaatcctatgagtcttgctcgctctgtctctgcttcagtctgccctatcaagcccagtgactcagatcgcattgaacctaaagctgtgaaggctttgaaggcttcagctgaattccagctaaactctgaaaagaaagaacatctttctttacaagatctttctgatcatgcttcctcagcagaccatgctccaacagaccagagtccagctatgcctatgcagaattcatccgaagaaataactgttgcaggtaatctggagaaatctgctgaaagaagcacccagggcctcaaatttcatctccatacaagacaggaagctagtttatctgtcacatctactaggatgcatgaaccacagatgtttctaggtgaaaaggattggcatccagaaaatcagaacctgagtcaagtgagtgaccctcagcagcacgaagaaccagggaatgaacagtatgaggttgcacaacaaaaagcttcacatgaccaagaatatctttgtaacataggggaccttgagcttcctgaagaaaggcaacagaatcaacacaaaattgttgatttggaagctacgatgaaaggaaatgggctcccacagaatgtggatcctccaagtgcgaagaaaagtattccatcttcagaatgcagtggctgctcaaattcagaaacatttatggaaatcgatacagctcaacagtccctagttactttgcttaattcaacaggcaggcagaatgccaatgtcaagaacattggtgcattggatctcactttagataatcccttgatggaagtagaaacatcaaaatgtaacccttcatctgaaattttgaatgattccatttccactcaggatttacagcccccagaaactaatgttgaaatacctggaacaaataaagaatatggccattactcctctccaagtctctgtggcagttgtcagccttctgtggagtcagcagaagaatcttgcccgtctataacggcagccttgaaagaacttcatgaacttttggttgttagcagtaaaccagcttcagaaaatacatctgaagaagtaatctgtcaatcagaaaccatagctgagggccaaaccagtattaaagacctttctgaaagatggacccaaaatgagcatcttacccagaatgaacagtgtccacaagtctcctttcatcaggccatatctgtatcagtggagacagaaaaattaacaggtacttcatctgacactggaagagaagctgtagaaaatgtaaacttcaggagtctaggtgatggcctgtcaaccgataaggaaggtgtccccaaatctagggaatccataaataagaaccgttctgtcactgtaacctcagctaaaacatccaatcagttacactgcaccttaggtgtagaaatttcacccaaacttttagcaggtgaggaggatgcactcaatcagacttctgagcaaactaagtctttgtcatccaatttcatattggttaaagacttaggtcagggcatacagaattcagtaacagacaggcctgaaaccagagaaaatgtctgtcctgatgcttcgaggccattacttgaatatgaaccacctaccagccatccatcatcaagtcctgccattcttccaccattgatttttcctgccacagatattgaccgcattctccgtgctggctttactttgcaggaagctcttggagctttgcatcgagttggtgggaatgcagaccttgcacttcttgttttgctcgcaaaaaacatcgtagttcctacatgactgtgggaaagtgggctagaccgttctccattccctttaaacaaaagaaagctctctctatatacacgcacacatacacactcaccacatatacagtatatatagaaacctgcaagcagaatgttgagccagattttttttaaagatttttttcggccaaagtaatttatgatcttttgtctgatgaatttgtctatcctacttgttaaaatttaggcctttttaaatgtattggcagtatgtgcatacagaagctttttattctcattaagatgtatcctggaataaaatggatggttttgtgtgtagcatactgttttagaatgagagtaaatgctttgaaaagcagaagccatgagaaatcccactacccatccagctaaaaacagatgaactctccacactgtgactgtgtgtctgtgctgatggcaaggtatggtttgctggctcagttgtcaatttagaaacttttgaccacataatttggtgtttggaattctacccagtgctctgtgtatacatgacctgggacctctagacaccc

SEQ ID NO: 328027 - DNA, 508 bp, Homo sapiens
ctcctccaggtgcccagatgactatcatgagccaagcttgtgcagaaaggtgtaacataatgagactggtggaccgtcggtgggcagggattgccaaaggagtgggcacccagaagattattggaagggtacatctagctcaggttcagattgaaggagattttttgccatgttccttctctatacttgaggaacagcccatggacatgcttctgggactggacatgcttaaacggcaccagtgttccatcgacctgaagaaaaatgtactcgtgatcggcaccacaggctcccagaccacctttcttcctgagggagagctaccagagtgtgcccggttggcatatggggctggaagagaggatgtacggccagaggagattgcagaccaagaattagcagaagcccttcaaaaatcagcagaggatgcaggtatttgggatggccaaactcttcaatacttgttattgatgggtaagcccgggaagtgtgggcttcagaaggggta

SEQ ID NO: 328028 - DNA, 237 bp, Homo sapiens
gctctctagctacgcctgcctcagcagccagatgagaggttacgcacatgaagagcatgcctgccgtgggtcattgtcactcagcaattaggcatcagacacccgaatctccctttcttgctccattttcctctgcacctgagtagaaacatgcttcccctgcaaaatgtctccagggtggtgtgtcccaattatgatccagacatttccgagcgccctggattcttgagccaccag

SEQ ID NO: 328029 - DNA, 238 bp, Homo sapiens
agaagaagaggtgggcagcaagcatcctagctcaggaccttaaagccaggctgaaaaactctttgcaaagtgagatatggtaaatattttcagtttgatgggctaccacagtgggaaagtagccaaaggtaatatgaacgggtgtggctgtgttccaataaaactttatttacaaaaataagctgtgggtgagtgggtgagatgtggcccacaggcagtggttggccaacccctgcct

SEQ ID NO: 328030 - DNA, 259 bp, Homo sapiens
aaagaaagaaggaaagaaggaaggaaaggaagaaagaaaggagggagggagggggaaggagagagaggaaggaagagaaagaaagagaaaaagaaaaggaaagaaaaaagagaaagaaagaaagaaggaaagaaaagaaaagaagaaaattcttttatatattgaagttggcaacttctctggtgccttcctctctttctctttctttcttttctcttcccctctctccttcctcccttcttcctctttctctttcttt

SEQ ID NO: 328031 - DNA, 326 bp, Homo sapiens
agcatttgctgtgtgcatcattattttactgcatgcatggccaggagggtgtggtaatgtcttgattgatcacaagccactgcagaggtcctcaatcaggacagatggatggatggatacatggatgcatggaagaatgcacagacagaatccccagtgtgacacaggctcaccaatggctgactggttgaataggtatgaatgaatacacgaaccaattctagtaaggtcaattgttccatttcttagtccctaactggtagaagcatgaaattgggaaggacacacacacacacacacacacacacacacacacacacacacac

SEQ ID NO: 328032 - DNA, 501 bp, Homo sapiens
tgggcgaactcacttgaggtcagggagtgcgagaccagcctggccaagcagggtgaaaccccgtctctcctaaaaatacaaaaattagttgagtgtagtggcacacgcctgtaatcccagctactcgggaggctgagctaggaggattgcttgagcctgggagtttgaggttgtagtgagctatgatcatgccactggactctagccaggagcctgggcaacagagcaagaccttgtctctaaacaaggcaaaacaaaaacaaaaaaacaaaaatcaattgcatttttatatattagcagtgaacacatggaaatacatgcaataccatttataacagttcaatcaaaagaaatacttgagcatatatctaacaaaacgtatataggacttacttgtatactgaaactgcaaaatgctaatgttagaaatacggaccaaaatagtgagagatactgtgttcatgattggaagactcaacatagtaaagatgtcagttctcc

SEQ ID NO: 328033 - DNA, 1318 bp, Homo sapiens
tttttttttttagacggagtctcgctctttccccccagactggagtgcagtggcgcaatctctgctcactgcaagctccgcctcctggcttcacaccattctcctgcctcagcctcctgagtagctgagactacaggcgcccaccactgcacccagctattttttctatatttttatgtagttcattgagggtaataattttatcctacaacaaacatgtaagttattgaagaatattggagttttatgataatgctgtcataaatataaaaggtagggtaagagggatccaaatagagctcacttatattgtcactgataggcagtcacgctgtgctgatagaatgtggcctgacacttgatggagtgcagcatatgtatacttgggcaatttgagcagatatatacggtcccgagtttaaagaagagaacaaacaccagtgcacagctatagtattcctaatataggatgcattttaaagaatttcacattctacaaatggagagagatggcaggagaagccttattttaagtcctgcactaaggcaggttaacctcatgggtgtaattacctggacctttttgtaaggacaaaatatttaatcattaaaaggccctctgtagggtttgaaatatctatattttatatatgaatgcttcttttattaatatttatggtaagatattttatactgctgataaacggacattaatgatatatagcctattgtttgaaaaaagcattttggattatagcccaaaactggaaataaccaacagataaataaatggtggtatattcatacaataaaatactactcagataaaaaagatgaacttaatctcataaacattatgggcaacatagtgagaacccatctcttttaaaaaaaaaaaaagaaaagctgggtgtggtgatgcgtgtcatagtcccagctactcgggaggctgagctaggaggattgcttgagcctgggagtttgaggttgtagtgagctatgatcatgccactggactctagccaggagcctgggcaacagagcaagaccttgtctctaaacaaggcaaaacaaaaacaaaaaaacaaaaatcaattgcatttttatatattagcagtgaacacatggaaatacatgcaataccatttataacagttcaatcaaaagaaatacttgagcatatatctaacaaaacgtatataggacttacttgtatactgaaactgcaaaatgctaatgttagaaatacggaccaaaatagtgagagatactgtgttcatgattggaagactcaacatagtaaagatgtcagttctcc

SEQ ID NO: 328034 - DNA, 856 bp, Homo sapiens
  misc_feature (5)..(6): n is a, c, g, or t
  misc_feature (9)..(10): n is a, c, g, or t
  misc_feature (12)..(13): n is a, c, g, or t
  misc_feature (16)..(18): n is a, c, g, or t
ggcannatnngnnacnnnttttttttaaatatatacttgattttacagactttctgcagaaaacctattgggaatttttgtaaagagaaaagttgggttgtggtaaaaatgcataaacacatatctcctaatatctaaatttgtaaatatatatctacaatattattttaaatctgttttgttttccaagacccaccaatgacatgagatacccaatgaagtcagaaaaaatacatggcttaggatggagacctaaagtgccttggaaagaaggaataaagaaaacaagtatgttttgaattaatcattttgggggcaagtcagaaaaatttaaaggaaaaataacttatttccagaacattatacaaaccagtggaatattgtgttgaatcattcgtacttttcaaattgccacatttcatatatttctagtagcagtcctgtgtttcctaagcatcttgaattttataaaccaacctctgatcaatcttcccatatcttgttagcattaatcaaatacctgtattatttattctgaggtacatattttttcactttcttcacactcctaaaaggtatgtatttttataatcactggtgtcttataattattattgtagcttttttcttttttacatgtatgtaaaataatgatccatcagtggcatcttagagttggtgaaatatagatgcagtcttttttgtgtcttgaggctttttatattgaaaccaacagaggaaataaatttagtatgtgcagaaaaatctattaaaataagtgcatataaagtctgtgtatacatgttaaagctgtatttagaaatgtattcatgagaaaagctctacccagatgtag

SEQ ID NO: 328035 - DNA, 1278 bp, Homo sapiens
gttgatgtcacactagaatgcagttggacaggctgactgggagcaatataagtttccagttgtcatcacaagaagcagtaatgtttatggaccacatcaatatccagaaaaggttattccaaaatttatatctttgctacagcacaacaggaaatgttgcattcatgggtcagggcttcaaacaagaaacttcctttatgctactgatgttgtagaagcatttctcactgtcctcaaaaaagggaaaccaggtgaaatttataacatcggaaccaattttgaaatgtcagttgtccagcttgccaaagaactaatacaactgatcaaagagaccaattcagagtctgaaatggaaaattgggttgattatgttaatgatagacccaccaatgacatgagatacccaatgaagtcagaaaaaatacatggcttaggatggagacctaaagtgccttggaaagaaggaataaagaaaacaattgaatggtacagagagaattttcacaactggaagaatgtggaaaaggcattagaaccctttccggtataatcaccatttatatagtcgagacagttgtcaaagaagaaagttatcctacctcgccaagtggtatgaaattaagtgaccaaatgaagtgcactcttttcttttggaattagattcatgactttctgtataaaattcaaatgcagaatgcctcaatctttgggagagtttcagtactggcatagaatttaaatgtcaaaattctttctgaaaccctttctcctagaaactaggaaataataggtgtagaagactctccctaagggtagccaggaagaagtctcctgattcggacaaccatgaggggtagtggtgctagggagaaggcaaccttcactggttttgaactcagtgcctaagaaagtctctgaaatgttcgtttttaggcaatataggatgtcttaggccctaattcaccatttcttttttaagatctgatatgctatcattgccttaataatggaacaaaatagaagcatatctaacactttttaaattgataattttgtaaaattgattacgttgaatgctttttaagagaagtgtgtaaagtttttatattttcacaattaacgtatgtaaaaccttgtatcagaaatttatcatgtttactgtttaaaatgattgtatttataaaattgtcaatatcttaatgtatttaatgtagaatattgctttttaaaataatgtttttattttgctgtagaaaaataaaaaaaaatttgattata

SEQ ID NO: 328036 - DNA, 1915 bp, Homo sapiens
tccggaagctgcctctggctgctctgttaacgtgtcccgcgagcgaggcgcgtcgcaaaaggtcgcggcggaacttccctgcgcttttcagaccatactctttacggtactaggcactgctgagctgggagatgtcggcggcgtgttgggaggaaccgtggggtcttcccggcggctttgcgaagcgggtcctggtgaccggcggtgctggtttcattgcatcacatatgattgtctctttagtggaagattatccaaactatatgatcataaatctagacaagctggattactgtgcaagcttgaagaatcttgaaaccatttctaacaaacagaactacaaatttatacagggtgacatatgtgattctcactttgtgaaactgctttttgaaacagagaaaatagatatagtactacattttgccgcacaaacacatgtagatctttcattcgtacgtgcctttgagtttacctatgttaatgtttatggcactcacgttttggtaagtgctgctcatgaagccagagtggagaagtttatttatgtcagcacagatgaagtatatggtggcagtcttgataaggaatttgatgaatcttcacccaaacaacctacaaatccttatgcatcatctaaagcagctgctgaatgttttgtacagtcttactgggaacaatataagtttccagttgtcatcacaagaagcagtaatgtttatggaccacatcaatatccagaaaaggttattccaaaatttatatctttgctacagcacaacaggaaatgttgcattcatgggtcagggcttcaaacaagaaacttcctttatgctactgatgttgtagaagcatttctcactgtcctcaaaaaagggaaaccaggtgaaatttataacatcggaaccaattttgaaatgtcagttgtccagcttgccaaagaactaatacaactgatcaaagagaccaattcagagtctgaaatggaaaattgggttgattatgttaatgatagacccaccaatgacatgagatacccaatgaagtcagaaaaaatacatggcttaggatggagacctaaagtgccttggaaagaaggaataaagaaaacaattgaatggtacagagagaattttcacaactggaagaatgtggaaaaggcattagaaccctttccggtataatcaccatttatatagtcgagacagttgtcaaagaagaaagttatcctacctcgccaagtggtatgaaattaagtgaccaaatgaagtgcactcttttcttttggaattagattcatgactttctgtataaaattcaaatgcagaatgcctcaatctttgggagagtttcagtactggcatagaatttaaatgtcaaaattctttctgaaaccctttctcctagaaactaggaaataataggtgtagaagactctccctaagggtagccaggaagaagtctcctgattcggacaaccatgaggggtagtggtgctagggagaaggcaaccttcactggttttgaactcagtgcctaagaaagtctctgaaatgttcgtttttaggcaatataggatgtcttaggccctaattcaccatttcttttttaagatctgatatgctatcattgccttaataatggaacaaaatagaagcatatctaacactttttaaattgataattttgtaaaattgattacgttgaatgctttttaagagaagtgtgtaaagtttttatattttcacaatttatcatgtttactgtttaaaatgattgtatttataaaattgtcaatatcttaatgtatttaatgtagaatattgctttttaaaataatgtttttattttgctgtagaaaaataaaaaaaaatttgattatatatttttaatcgttctttgccctaaagacttt

SEQ ID NO: 328037 - DNA, 1988 bp, Homo sapiens
tccggaagctgcctctggctgctctgttaacgtgtcccgcgagcgaggcgcgtcgcaaaaggtcgcggcggaacttccctgcgcttttcagaccatactctttacggtactaggcactgctgagctgggagatgtcggcggcgtgttgggaggaaccgtggggtcttcccggcggctttgcgaagcgggtcctggtgaccggcggtgctggtttcatgtaggtaatggcgccgctagccaagcagtggctccccagaaacccctaccttttcccgcagctctgcttgccctagtgcatcacatatgattgtctctttagtggaagattatccaaactatatgatcataaatctagacaagctggattactgtgcaagcttgaagaatcttgaaaccatttctaacaaacagaactacaaatttatacagggtgacatatgtgattctcactttgtgaaactgctttttgaaacagagaaaatagatatagtactacattttgccgcacaaacacatgtagatctttcattcgtacgtgcctttgagtttacctatgttaatgtttatggcactcacgttttggtaagtgctgctcatgaagccagagtggagaagtttatttatgtcagcacagatgaagtatatggtggcagtcttgataaggaatttgatgaatcttcacccaaacaacctacaaatccttatgcatcatctaaagcagctgctgaatgttttgtacagtcttactgggaacaatataagtttccagttgtcatcacaagaagcagtaatgtttatggaccacatcaatatccagaaaaggttattccaaaatttatatctttgctacagcacaacaggaaatgttgcattcatgggtcagggcttcaaacaagaaacttcctttatgctactgatgttgtagaagcatttctcactgtcctcaaaaaagggaaaccaggtgaaatttataacatcggaaccaattttgaaatgtcagttgtccagcttgccaaagaactaatacaactgatcaaagagaccaattcagagtctgaaatggaaaattgggttgattatgttaatgatagacccaccaatgacatgagatacccaatgaagtcagaaaaaatacatggcttaggatggagacctaaagtgccttggaaagaaggaataaagaaaacaattgaatggtacagagagaattttcacaactggaagaatgtggaaaaggcattagaaccctttccggtataatcaccatttatatagtcgagacagttgtcaaagaagaaagttatcctacctcgccaagtggtatgaaattaagtgaccaaatgaagtgcactcttttcttttggaattagattcatgactttctgtataaaattcaaatgcagaatgcctcaatctttgggagagtttcagtactggcatagaatttaaatgtcaaaattctttctgaaaccctttctcctagaaactaggaaataataggtgtagaagactctccctaagggtagccaggaagaagtctcctgattcggacaaccatgaggggtagtggtgctagggagaaggcaaccttcactggttttgaactcagtgcctaagaaagtctctgaaatgttcgtttttaggcaatataggatgtcttaggccctaattcaccatttcttttttaagatctgatatgctatcattgccttaataatggaacaaaatagaagcatatctaacactttttaaattgataattttgtaaaattgattacgttgaatgctttttaagagaagtgtgtaaagtttttatattttcacaattaacgtatgtaaaaccttgtatcagaaatttatcatgtttactgtttaaaatgattgtatttataaaattgtcaatatcttaatgtatttaatgtagaatattgctttttaaaataatgtttttattttgctgtagaaaaataaaaaaaaatttgattata

SEQ ID NO: 328038 - DNA, 1821 bp, Homo sapiens
tccggaagctgcctctggctgctctgttaacgtgtcccgcgagcgaggcgcgtcgcaaaaggtcgcggcggaacttccctgcgcttttcagaccatactctttacggtactaggcactgctgagctgggagatgtcggcggcgtgttgggaggaaccgtggggtcttcccggcggctttgcgaagcgggtcctggtgaccggcggtgctggtttcattgcatcacatatgattgtctctttagtggaagattatccaaactatatgatcataaatctagacaagctggattactgtgcaagcttgaagaatcttgaaaccatttctaacaaacagaactacaaatttatacagatctttcattcgtacgtgcctttgagtttacctatgttaatgtttatggcactcacgttttggtaagtgctgctcatgaagccagagtggagaagtttatttatgtcagcacagatgaagtatatggtggcagtcttgataaggaatttgatgaatcttcacccaaacaacctacaaatccttatgcatcatctaaagcagctgctgaatgttttgtacagtcttactgggaacaatataagtttccagttgtcatcacaagaagcagtaatgtttatggaccacatcaatatccagaaaaggttattccaaaatttatatctttgctacagcacaacaggaaatgttgcattcatgggtcagggcttcaaacaagaaacttcctttatgctactgatgttgtagaagcatttctcactgtcctcaaaaaagggaaaccaggtgaaatttataacatcggaaccaattttgaaatgtcagttgtccagcttgccaaagaactaatacaactgatcaaagagaccaattcagagtctgaaatggaaaattgggttgattatgttaatgatagacccaccaatgacatgagatacccaatgaagtcagaaaaaatacatggcttaggatggagacctaaagtgccttggaaagaaggaataaagaaaacaattgaatggtacagagagaattttcacaactggaagaatgtggaaaaggcattagaaccctttccggtataatcaccatttatatagtcgagacagttgtcaaagaagaaagttatcctacctcgccaagtggtatgaaattaagtgaccaaatgaagtgcactcttttcttttggaattagattcatgactttctgtataaaattcaaatgcagaatgcctcaatctttgggagagtttcagtactggcatagaatttaaatgtcaaaattctttctgaaaccctttctcctagaaactaggaaataataggtgtagaagactctccctaagggtagccaggaagaagtctcctgattcggacaaccatgaggggtagtggtgctagggagaaggcaaccttcactggttttgaactcagtgcctaagaaagtctctgaaatgttcgtttttaggcaatataggatgtcttaggccctaattcaccatttcttttttaagatctgatatgctatcattgccttaataatggaacaaaatagaagcatatctaacactttttaaattgataattttgtaaaattgattacgttgaatgctttttaagagaagtgtgtaaagtttttatattttcacaattaacgtatgtaaaaccttgtatcagaaatttatcatgtttactgtttaaaatgattgtatttataaaattgtcaatatcttaatgtatttaatgtagaatattgctttttaaaataatgtttttattttgctgtagaaaaataaaaaaaaatttgattata

SEQ ID NO: 328039 - DNA, 1949 bp, Homo sapiens
cgtcacagtgtggccgagacaggaaggagcaaatatgcttctttgcgggaaggatctggaaagatgcggccgaccagtcttttgcacattggcttccaaggggagggttggggaaatggaaaccagctttcaggtgcggaacacgatcactagtggcgagaggccgctgcctggggctggaaagccgcaccagcggggttggcaaggaacgcatcccaccattcgcggcagctgctgcaacgctggaggtccagtgcatcacatatgattgtctctttagtggaagattatccaaactatatgatcataaatctagacaagctggattactgtgcaagcttgaagaatcttgaaaccatttctaacaaacagaactacaaatttatacagggtgacatatgtgattctcactttgtgaaactgctttttgaaacagagaaaatagatatagtactacattttgccgcacaaacacatgtagatctttcattcgtacgtgcctttgagtttacctatgttaatgtttatggcactcacgttttggtaagtgctgctcatgaagccagagtggagaagtttatttatgtcagcacagatgaagtatatggtggcagtcttgataaggaatttgatgaatcttcacccaaacaacctacaaatccttatgcatcatctaaagcagctgctgaatgttttgtacagtcttactgggaacaatataagtttccagttgtcatcacaagaagcagtaatgtttatggaccacatcaatatccagaaaaggttattccaaaatttatatctttgctacagcacaacaggaaatgttgcattcatgggtcagggcttcaaacaagaaacttcctttatgctactgatgttgtagaagcatttctcactgtcctcaaaaaagggaaaccaggtgaaatttataacatcggaaccaattttgaaatgtcagttgtccagcttgccaaagaactaatacaactgatcaaagagaccaattcagagtctgaaatggaaaattgggttgattatgttaatgatagacccaccaatgacatgagatacccaatgaagtcagaaaaaatacatggcttaggatggagacctaaagtgccttggaaagaaggaataaagaaaacaattgaatggtacagagagaattttcacaactggaagaatgtggaaaaggcattagaaccctttccggtataatcaccatttatatagtcgagacagttgtcaaagaagaaagttatcctacctcgccaagtggtatgaaattaagtgaccaaatgaagtgcactcttttcttttggaattagattcatgactttctgtataaaattcaaatgcagaatgcctcaatctttgggagagtttcagtactggcatagaatttaaatgtcaaaattctttctgaaaccctttctcctagaaactaggaaataataggtgtagaagactctccctaagggtagccaggaagaagtctcctgattcggacaaccatgaggggtagtggtgctagggagaaggcaaccttcactggttttgaactcagtgcctaagaaagtctctgaaatgttcgtttttaggcaatataggatgtcttaggccctaattcaccatttcttttttaagatctgatatgctatcattgccttaataatggaacaaaatagaagcatatctaacactttttaaattgataattttgtaaaattgattacgttgaatgctttttaagagaagtgtgtaaagtttttatattttcacaattaacgtatgtaaaaccttgtatcagaaatttatcatgtttactgtttaaaatgattgtatttataaaattgtcaatatcttaatgtatttaatgtagaatattgctttttaaaataatgtttttattttgctgtagaaaaataaaaaaaaatttgattata

SEQ ID NO: 328040 - DNA, 1768 bp, Homo sapiens
tccggaagctgcctctggctgctctgttaacgtgtcccgcgagcgaggcgcgtcgcaaaaggtcgcggcggaacttccctgcgcttttcagaccatactctttacggtactaggcactgctgagctgggagatgtcggcggcgtgttgggaggaaccgtggggtcttcccggcggctttgcgaagcgggtcctggtgaccggcggtgctggtttcattgcatcacatatgattgtctctttagtggaagattatccaaactatatgatcataaatctagacaagctggattactgtgcaagcttgaagaatcttgaaaccatttctaacaaacagaactacaaatttatacagggtgacatatgtgattctcactttgtgaaactgctttttgaaacagagaaaatagatatagtactacattttgccgcacaaacacatgtagatctttcattcgtacgtgcctttgagtttacctatgttaatgtttatggcactcacgttttggtaagtgctgctcatgaagccagagtggagaagtttatttatgtcagcacagatgaagtatatggtggcagtcttgataaggaatttgatgaatcttcacccaaacaacctacaaatccttatgcatcatctaaagcagctgctgaatgttttgtacagtcttactgggaacaatataagtttccagttgtcatcacaagaagcagtaatgtttatggaccacatcaatatccagaaaaggttattccaaaatttatatctttgctacagcacaacaggaaatgttgcattcatgggtcagggcttcaaacaagaaacttcctttatgctactgatgttgtagaagcatttctcactgtcctcaaaaaagggaaaccaggtgaaatttataacatcggaaccaattttgaaatgtcagttgtccagcttgccaaagaactaatacaactgatcaaagagaccaattcagagtctgaaatggaaaattgggttgattatgttaatgatagacccaccaatgacatgagatacccaatgaagtcagaaaaaatacatggcttaggatggagacctaaagtgccttggaaagaaggaataaagaaaacaagtatgttttgaattaatcattttgggggcaagtcagaaaaatttaaaggaaaaataacttatttccagaacattatacaaaccagtggaatattgtgttgaatcattcgtacttttcaaattgccacatttcatatatttctagtagcagtcctgtgtttcctaagcatcttgaattttataaaccaacctctgatcaatcttcccatatcttgttagcattaatcaaatacctgtattatttattctgaggtacatattttttcactttcttcacactcctaaaaggtatgtatttttataatcactggtgtcttataattattattgtagcttttttcttttttacatgtatgtaaaataatgatccatcagtggcatcttagagttggtgaaatatagatgcagtcttttttgtgtcttgaggctttttatattgaaaccaacagaggaaataaatttagtatgtgcagaaaaatctattaaaataagtgcatataaagtctgtgtatacatgttaaagctgtatttagaaatgtattcatgaggcttttacccacttgcatgactaccaagttcgatttagacgtctgaattcctctccttaagtcaattattatccatcatctctcttttacctttcgcttctctctcct

SEQ ID NO: 328041 - DNA, 148 bp, Homo sapiens
gttatcttagaaaaaattaaagttatctttgagtattttcctagtactcaacaccttaggaaaatattcaagagtttagggaagttaaagtttttcactaacaagatatactttttttccatagtgcatcacatatgattgtctcttt

SEQ ID NO: 328042 - DNA, 1912 bp, Homo sapiens
tccggaagctgcctctggctgctctgttaacgtgtcccgcgagcgaggcgcgtcgcaaaaggtcgcggcggaacttccctgcgcttttcagaccatactctttacggtactaggcactgctgagctgggagatgtcggcggcgtgttgggaggaaccgtggggtcttcccggcggctttgcgaagcgggtcctggtgaccggcggtgctggtttcattgcatcacatatgattgtctctttagtggaagattatccaaactatatgatcataaatctagacaagctggattactgtgcaagcttgaagaatcttgaaaccatttctaacaaacagaactacaaatttatacagggtgacatatgtgattctcactttgtgaaactgctttttgaaacagagaaaatagatatagtactacattttgccgcacaaacacatgtagatctttcattcgtacgtgcctttgagtttacctatgttaatgtttatggcactcacgttttggtaagtgctgctcatgaagccagagtggagaagtttatttatgtcagcacagatgaagtatatggtggcagtcttgataaggaatttgatgaatcttcacccaaacaacctacaaatccttatgcatcatctaaagcagctgctgaatgttttgtacagtcttactgggaacaatataagtttccagttgtcatcacaagaagcagtaatgtttatggaccacatcaatatccagaaaaggttattccaaaatttatatctttgctacagcacaacaggaaatgttgcattcatgggtcagggcttcaaacaagaaacttcctttatgctactgatgttgtagaagcatttctcactgtcctcaaaaaagggaaaccaggtgaaatttataacatcggaaccaattttgaaatgtcagttgtccagcttgccaaagaactaatacaactgatcaaagagaccaattcagagtctgaaatggaaaattgggttgattatgttaatgatagacccaccaatgacatgagatacccaatgaagtcagaaaaaatacatggcttaggatggagacctaaagtgccttggaaagaaggaataaagaaaacaattgaatggtacagagagaattttcacaactggaagaatgtggaaaaggcattagaaccctttccggtataatcaccatttatatagtcgagacagttgtcaaagaagaaagttatcctacctcgccaagtggtatgaaattaagtgaccaaatgaagtgcactcttttcttttggaattagattcatgactttctgtataaaattcaaatgcagaatgcctcaatctttgggagagtttcagtactggcatagaatttaaatgtcaaaattctttctgaaaccctttctcctagaaactaggaaataataggtgtagaagactctccctaagggtagccaggaagaagtctcctgattcggacaaccatgaggggtagtggtgctagggagaaggcaaccttcactggttttgaactcagtgcctaagaaagtctctgaaatgttcgtttttaggcaatataggatgtcttaggccctaattcaccatttcttttttaagatctgatatgctatcattgccttaataatggaacaaaatagaagcatatctaacactttttaaattgataattttgtaaaattgattacgttgaatgctttttaagagaagtgtgtaaagtttttatattttcacaattaacgtatgtaaaaccttgtatcagaaatttatcatgtttactgtttaaaatgattgtatttataaaattgtcaatatcttaatgtatttaatgtagaatattgctttttaaaataatgtttttattttgctgtagaaaaataaaaaaaaatttgattata

SEQ ID NO: 328043 - DNA, 859 bp, Homo sapiens
tccggaagctgcctctggctgctctgttaacgtgtcccgcgagcgaggcgcgtcgcaaaaggtcgcggcggaacttccctgcgcttttcagaccatactctttacggtactaggcactgctgagctgggagatgtcggcggcgtgttgggaggaaccgtggggtcttcccggcggctttgcgaagcgggtcctggtgaccggcggtgctggtttcattgcatcacatatgattgtctctttagtggaagattatccaaactatatgatcataaatctagacaagctggattactgtgcaagcttgaagaatcttgaaaccatttctaacaaacagaactacaaatttatacagggtgacatatgtgattctcactttgtgaaactgctttttgaaacagagaaaatagatatagtactacattttgccgcacaaacacatgtagatctttcattcgtacgtgcctttgagtttacctatgttaatgtttatggcactcacgttttggtaagtgctgctcatgaagccagagtggagaagtttatttatgtcagcacagatgaagtatatggtggcagtcttgataaggaatttgatgaatcttcacccaaacaacctacaaatccttatgcatcatctaaagcagctgctgaatgttttgtacagtcttactgggaacaatataagtttccagttgtcatcacaagaagcagtaatgtttatggaccacatcaatatccagaaaaggttttccaaaatttatatctttgttcagcacatcaggaaatgttcgattactgggtagggcttaaacaagaacttctttttactactgatgtgaagaccattttcattgccta

SEQ ID NO: 328044 - DNA, 1681 bp, Homo sapiens
tccggaagctgcctctggctgctctgttaacgtgtcccgcgagcgaggcgcgtcgcaaaaggtcgcggcggaacttccctgcgcttttcagaccatactctttacggtactaggcactgctgagctgggagatgtcggcggcgtgttgggaggaaccgtggggtcttcccggcggctttgcgaagcgggtcctggtgaccggcggtgctggtttcattgcatcacatatgattgtctctttagtggaagattatccaaactatatgatcataaatctagacaagctggattactgtgcaagcttgaagaatcttgaaaccatttctaacaaacagaactacaaatttatacagggtgacatatgtgattctcactttgtgaaactgctttttgaaacagagaaaatagatatagtactacattttgccgcacaaacacatgtagatctttcattcgtacgtgcctttgagtttacctatgttaatgtttatggcactcacgttttggtaagtgctgctcatgaagccagagtggagaagtttatttatgtcagcacagatgaagtatatggtggcagtcttgataaggaatttgatgaatcttcacccaaacaacctacaaatccttatgcatcatctaaagcagctgctgaatgttttgtacagtcttactgggaacaatataagtttccagttgtcatcacaagaagcagtaatgtttatggaccacatcaatatccagaaaaggttattccaaaatttatatctttgctacagcacaacaggaaatgttgcattcatgggtcagggcttcaaacaagaaacttcctttatgctactgatgttgtagaagcatttctcactgtcctcaaaaaagggaaaccaggtgaaatttataacatcggaaccaattttgaaatgtcagttgtccagcttgccaaagaactaatacaactgatcaaagagaccaattcagagtctgaaatggaaaattgggttgattatgttaatgatagacccaccaatgacatgagatacccaatgaagtcagaaaaaatacatggcttaggatggagacctaaagtgccttggaaagaaggaataaagaaaacaagtatgttttgaattaatcattttgggggcaagtcagaaaaatttaaaggaaaaataacttatttccagaacattatacaaaccagtggaatattgtgttgaatcattcgtacttttcaaattgccacatttcatatatttctagtagcagtcctgtgtttcctaagcatcttgaattttataaaccaacctctgatcaatcttcccatatcttgttagcattaatcaaatacctgtattatttattctgaggtacatattttttcactttcttcacactcctaaaaggtatgtatttttataatcactggtgtcttataattattattgtagcttttttcttttttacatgtatgtaaaataatgatccatcagtggcatcttagagttggtgaaatatagatgcagtcttttttgtgtcttgaggctttttatattgaaaccaacagaggaaataaatttagtatgtgcagaaaaatctattaaaataagtgcatataaagtctgtgtatacatgttaaagctgtatttagaaatgtattcatgagaaaagctctacccagatgtag

SEQ ID NO: 328045 - DNA, 1897 bp, Homo sapiens
tccggaagctgcctctggctgctctgttaacgtgtcccgcgagcgaggcgcgtcgcaaaaggtcgcggcggaacttccctgcgcttttcagaccatactctttacggtactaggcactgctgagctgggagatgtcggcggcgtgttgggaggaaccgtggggtcttcccggcggctttgcgaagcgggtcctggtgaccggcggtgctggtttcatgtaggtaatggcgccgctagccaagcagtggctccccagaaacccctaccttttcccgcagctctgcttgccctagtgcatcacatatgattgtctctttagtggaagattatccaaactatatgatcataaatctagacaagctggattactgtgcaagcttgaagaatcttgaaaccatttctaacaaacagaactacaaatttatacagatctttcattcgtacgtgcctttgagtttacctatgttaatgtttatggcactcacgttttggtaagtgctgctcatgaagccagagtggagaagtttatttatgtcagcacagatgaagtatatggtggcagtcttgataaggaatttgatgaatcttcacccaaacaacctacaaatccttatgcatcatctaaagcagctgctgaatgttttgtacagtcttactgggaacaatataagtttccagttgtcatcacaagaagcagtaatgtttatggaccacatcaatatccagaaaaggttattccaaaatttatatctttgctacagcacaacaggaaatgttgcattcatgggtcagggcttcaaacaagaaacttcctttatgctactgatgttgtagaagcatttctcactgtcctcaaaaaagggaaaccaggtgaaatttataacatcggaaccaattttgaaatgtcagttgtccagcttgccaaagaactaatacaactgatcaaagagaccaattcagagtctgaaatggaaaattgggttgattatgttaatgatagacccaccaatgacatgagatacccaatgaagtcagaaaaaatacatggcttaggatggagacctaaagtgccttggaaagaaggaataaagaaaacaattgaatggtacagagagaattttcacaactggaagaatgtggaaaaggcattagaaccctttccggtataatcaccatttatatagtcgagacagttgtcaaagaagaaagttatcctacctcgccaagtggtatgaaattaagtgaccaaatgaagtgcactcttttcttttggaattagattcatgactttctgtataaaattcaaatgcagaatgcctcaatctttgggagagtttcagtactggcatagaatttaaatgtcaaaattctttctgaaaccctttctcctagaaactaggaaataataggtgtagaagactctccctaagggtagccaggaagaagtctcctgattcggacaaccatgaggggtagtggtgctagggagaaggcaaccttcactggttttgaactcagtgcctaagaaagtctctgaaatgttcgtttttaggcaatataggatgtcttaggccctaattcaccatttcttttttaagatctgatatgctatcattgccttaataatggaacaaaatagaagcatatctaacactttttaaattgataattttgtaaaattgattacgttgaatgctttttaagagaagtgtgtaaagtttttatattttcacaattaacgtatgtaaaaccttgtatcagaaatttatcatgtttactgtttaaaatgattgtatttataaaattgtcaatatcttaatgtatttaatgtagaatattgctttttaaaataatgtttttattttgctgtagaaaaataaaaaaaaatttgattata

SEQ ID NO: 328046 - DNA, 2516 bp, Homo sapiens
gcgctgtttcgtgggaccaggattgaaacaagatggcgggttcgtggtgagaagccgtcaagcaggagtagaaattggtatgcttagaagcagattctaaaagcagtttctcttcagaacatcttttttcataccacttgataagcatcttgaaacaccatggctgtagctgcagtaaaatgggtgatgtcaaagagaactatcttgaaacatttatttccagtccaaaatggagctttatattgtgtttgtcataaatctacgtattctcctctaccagatgactataattgcaacgtagagcttgctctgacttctgatggcaggacaatagtatgctaccacccttctgtggacattccatatgaacacacaaaacctatccctcggccagatcctgtgcataataatgaagaaacacatgatcaagtgctgaaaaccagattggaagaaaaagttgaacaccttgaggaaggacctatgatagaacaacttagcaaaatgttctttactactaagcaccgttggtatcctcatggacggtatcacagatgtcgtaagaatctgaatcctccaaaagacagatgatgcggaggttcctgggggaatcaaagagaaatgtgcctcatttgccatttgagaaaatgcagtctggtgtattcagtaatatatagtaaagtaataatgataaaatatcttttcatatattagaatgtgtacttttatataaagtaattctggatttgacattctcatttagagaaacctattttcttttttctttttctattttagtgtttcatttatgtgcggtctccaatttaggacttttccatagtgccaaagccatacatattcagtagaacatcaataaattacatcagaaattcaacactttattataaaacgggcttcgtgttagataattttgctaaacagtaggctactgtaagtgttctgagcatatttaagacaggctagcattttcaatttacaatattttcaactgatagtaggtttattgggatgtaaccctatgataagttgagaaacatctctttttgtgtgtctactgtgatttaagtatttttaatcatcagccaagcattgttagtagtataaatatgattaataaaaatgtgcatggctttcctgaaggagattttttaattgcctttgagaataaactcataaggtctaccaagaaaataaatgttatgatgtttcagttggcttctaggaaataattaaattagtgatattttaatcaggttttactatctgctaggccccttccatcaattcttattaaattctcaaaataatcctttgaaaagggagtataattacattttacagtgactcgaaccttacccaaacaagtgggagagccaggagccaaactatcaggctccaaagcttttttttagtgcatcacaatgacaaaggggtggttttctttcacccaagaatgtgctttcctggaaatttttctagatagaatattatgtaatttgttttgaaggttttttttcctgactgtcttaaagattatgctagctttagaacacatgcaaacagctgcagctctgtgattaaaatgttaaggtcactagaatagtgttaggaaaatgttaatagataattctgctgcctctattagcttatgtatgatccttaatagcattgcttccccttcagtttctatttaggaggtgaagaatcttttaataaggtagaaagttgctttatttaaatttgtactgtagaatgtttgtgatacagtatttgtaaaattgatatgaaaaataatttctcaaagtctattgtttgatctagttattttaataaaggaactctagaagtttcaagtggccagtgaagtgtgaggaatagagagtaaaggaaataattaataatggtgaccctctgttaagtggtttactttttccattaatataaatttcatttggaaagattaaaaaaacaagtttgattgaacttgataaatcagaaatatttaaaaaaaaaaaaaaaaaaaaaaaaaaaaaaaaaaaacaaaaaaaaaaaaaaaaaaaaaaacagaaaaaaaaaaaaaaaaaagagggggaacgcgcctaagaaacatttaacgactgggggagcgcacaggaccgaacacgcccgccaacttatatgatctcgaggcaacgcacaaagaggtgggactattttaaaggcagaagagcgagatgcactaacaccgaggcgtgagcgagacacaacaactagatagtaccgaatgtggaaggaaacgaaacacccacaaagcagtggaggagcagcacaatagtagtggacgacaatacaccagaaaaaggagagcacacgcgaaaggagaaagacataacaacgagaggcgaaagctgagagcaagaacaaaaaccaagtagaacgaggggagccaacgagacaaacacaacctagacaagaaacctgtacgagggaggaggagacacaagacccacagagaagaa

SEQ ID NO: 328047 - DNA, 1867 bp, Homo sapiens
gcgctgtttcgtgggaccaggattgaaacaagatggcgggttcgtggtgagaagccgtcaagcaggagtagaaattggtatgcttagaagcagattctaaaagcagtttctcttcagaacatcttttttcataccacttgataagcatcttgaaacaccatggctgtagctgcagtaaaatgggtgatgtcaaagagaactatcttgaaacatttatttccagtccaaaatggagctttatattgtgtttgtcataaatctacgtattctcctctaccagatgactataattgcaacgtagagcttgctctgacttctgatggcaggacaatagtatgctaccacccttctgtggacattccatatgaacacacaaaacctatccctcggccagatcctgtgcataataatgaagaaacacatgatcaagtgctgaaaaccagattggaagaaaaagttgaacaccttgaggaaggacctatgatagaacaacttagcaaaatgttctttactactaagcaccgttggtatcctcatggacggtatcacagatgtcgtaagaatctgaatcctccaaaagacagatgatgcggaggttcctgggggaatcaaagagaaatgtgcctcatttgccatttgagaaaatgcagtctggtgtattcagtaatatatagtaaagtaataatgataaaatatcttttcatatattagaatgtgtacttttatataaagtaattctggatttgacattctcatttagagaaacctattttcttttttctttttctattttagtgtttcatttatgtgcggtctccaatttaggacttttccatagtgccaaagccatacatattcagtagaacatcaataaattacatcagaaattcaacactttattataaaacgggcttcgtgttagataattttgctaaacagtaggctactgtaagtgttctgagcatatttaagacaggctagcattttcaatttacaatattttcaactgatagtaggtttattgggatgtaaccctatgataagttgagaaacatctctttttgtgtgtctactgtgatttaagtatttttaatcatcagccaagcattgttagtagtataaatatgattaataaaaatgtgcatggctttcctgaaggagattttttaattgcctttgagaataaactcataaggtctaccaagaaaataaatgttatgatgtttcagttggcttctaggaaataattaaattagtgatattttaatcaggttttactatctgctaggccccttccatcaattcttattaaattctcaaaataatcctttgaaaagggagtataattacattttacagtgactcgaaccttacccaaacaagtgggagagccaggagccaaactatcaggctccaaagcttttttttagtgcatcacaatgacaaaggggtggttttctttcacccaagaatgtgctttcctggaaatttttctagatagaatattatgtaatttgttttgaaggttttttttcctgactgtcttaaagattatgctagctttagaacacatgcaaacagctgcagctctgtgattaaaatgttaaggtcactagaatagtgttaggaaaatgttaatagataattctgctgcctctattagcttatgtatgatccttaatagcattgcttccccttcagtttctatttaggaggtgaagaatcttttaataaggtagaaagttgctttatttaaatttgtactgtagaatgtttgtgatacagtatttgtaaaattgatatgaaaaataatttctcaaagtctattgtttgatctagttattttaataaaggaactctagaagtt

SEQ ID NO: 328048 - DNA, 722 bp, Homo sapiens
gcgctgtttcgtgggaccaggattgaaacaagatggcgggttcgtggtgagaagccgtcaagcaggagtagaaattggtatgcttagaagcagattctaaaagcagtttctcttcagaacatcttttttcataccacttgataagcatcttgaaacaccatggctgtagctgcagtaaaatgggtgatgtcaaagagaactatcttgaaacatttatttccagtccaaaatggagctttatattgtgtttgtcataaatctacgtattctcctctaccagatgactataattgcaacgtagagcttgctctgacttctgatggcaggacaatagtatgctaccacccttctgtggacattccatatgaacacacaaaacctatccctcggccagatcctgtgcataataatgaagaaacacatgatcaagtgctgaaaaccagattggaagaaaaagttgaacaccttgaggaaggacctatgatagaacaacttagcaaaatgttctttactactaagcaccgttggtatcctcatggacggtatcacagatgtcgtaagaatctgaatcctccaaaagacagatgatgcggaggttcctgggggaatcaaagagaaatgtgcctcatttgccatttgagaaaatgcagtctggtgtattcagtaatatatagtaaagtaataatgataaaatatcttttcatatattagaatgtgtactt

SEQ ID NO: 328049 - DNA, 705 bp, Homo sapiens
  misc_feature (19)..(19): n is a, c, g, or t
  misc_feature (28)..(28): n is a, c, g, or t
cgaagtacggatatgtcgnccagcgtcnggtgagaagccgtcaagcaggagtagaaattggtatgcttagaagcagattctaaaagcagtttctcttcagaacatcttttttcataccacttgataagcatcttgaaacaccatggctgtagctgcagtaaaatgggtgatgtcaaagagaactatcttgaaacatttatttccagtccaaaatggagctttatattgtgtttgtcataaatctacgtattctcctctaccagatgactataattgcaacgtagagcttgctctgacttctgatggcaggacaatagtatgctaccacccttctgtggacattccatatgaacacacaaaacctatccctcggccagatcctgtgcataataatgaagaaacacatgatcaagtgctgaaaaccagattggaagaaaaagttgaacaccttgaggaaggacctatgatagaacaacttagcaaaatgttctttactactaagcaccgttggtatcctcatggacggtatcacagatgtcgtaagaatctgaatcctccaaaagacagatgatgcggaggttcctgggggaatcaaagagaaatgtgcctcatttgccatttgagaaaatgcagtctggtgtattcagtaatatatagtaaagtaataatgataaaatatcttttcatatattagaatgtgtactt

SEQ ID NO: 328050 - DNA, 726 bp, Homo sapiens
  misc_feature (27)..(27): n is a, c, g, or t
cctcggatgtttaatcgataagcttgnttggggagggcgggtcgtggtgagaagccgtcaagcaggagtagaaattggtatgcttagaagcagattctaaaagcagtttctcttcagaacatcttttttcataccacttgataagcatcttgaaacaccatggctgtagctgcagtaaaatgggtgatgtcaaagagaactatcttgaaacatttatttccagtccaaaatggagctttatattgtgtttgtcataaatctacgtattctcctctaccagatgactataattgcaacgtagagcttgctctgacttctgatggcaggacaatagtatgctaccacccttctgtggacattccatatgaacacacaaaacctatccctcggccagatcctgtgcataataatgaagaaacacatgatcaagtgctgaaaaccagattggaagaaaaagttgaacaccttgaggaaggacctatgatagaacaacttagcaaaatgttctttactactaagcaccgttggtatcctcatggacgaggcaaggtctcactcactgtgttgcgcaggctgattttaaactcctggactcaagtgatcctcctccctcagctgggattgtaagaatgagccactgccactgtacttttaaatttacatataatttagctaaaatgaaatagtacttctttttttctttattttaatgggggaatttaacca

SEQ ID NO: 328051 - DNA, 439 bp, Homo sapiens
  misc_feature (20)..(20): n is a, c, g, or t
tttgttttcaaaaaaaaaanacagcggcgccgcgaatttagtagtagtagtagtcgactactactactactactactactaaattcgcggccgcgcctatccctcggccagatcctgtgcataataatgaagaaacacatgatcaagtgctgaaaaccagattggaagaaaaagttgaacaccttgaggaaggacctatgatagaacaacttagcaaaatgttctttactactaagcaccgttggtatcctcatggacggtatcacagatgtcgtaagaatctgaatcctccaaaagacagatgatgcggaggttcctgggggaatcaaagagaaatgtgcctcatttgccatttgagaaaatgcagtctggtgtattcagtaatatatagtaaagtaataatgataaaatatcttttcatatattagaatgtgtactt

SEQ ID NO: 328052 - DNA, 2739 bp, Homo sapiens
gcgctgtttcgtgggaccaggattgaaacaagatggcgggttcgtggtgagaagccgtcaagcaggagtagaaattggtatgcttagaagcagattctaaaagcagtttctcttcagaacatcttttttcataccacttgataagcatcttgaaacaccatggctgtagctgcagtaaaatgggtgatgtcaaagagaactatcttgaaacatttatttccagtccaaaatggagctttatattgtgtttgtcataaatctacgtattctcctctaccagatgactataattgcaacgtagagcttgctctgacttctgatggcaggacaatagtatgctaccacccttctgtggacattccatatgaacacacaaaacctatccctcggccagatcctgtgcataataatgaagaaacacatgatcaagtgctgaaaaccagattggaagaaaaagttgaacaccttgaggaaggacctatgatagaacaacttagcaaaatgttctttactactaagcaccgttggtatcctcatggacggtatcacagatgtcgtaagaatctgaatcctccaaaagacagatgatgcggaggttcctgggggaatcaaagagaaatgtgcctcatttgccatttgagaaaatgcagtctggtgtattcagtaatatatagtaaagtaataatgataaaatatcttttcatatattagaatgtgtacttttatataaagtaattctggatttgacattctcatttagagaaacctattttcttttttctttttctattttagtgtttcatttatgtgcggtctccaatttaggacttttccatagtgccaaagccatacatattcagtagaacatcaataaattacatcagaaattcaacactttattataaaacgggcttcgtgttagataattttgctaaacagtaggctactgtaagtgttctgagcatatttaagacaggctagcattttcaatttacaatattttcaactgatagtaggtttattgggatgtaaccctatgataagttgagaaacatctctttttgtgtgtctactgtgatttaagtatttttaatcatcagccaagcattgttagtagtataaatatgattaataaaaatgtgcatggctttcctgaaggagattttttaattgcctttgagaataaactcataaggtctaccaagaaaataaatgttatgatgtttcagttggcttctaggaaataattaaattagtgatattttaatcaggttttactatctgctaggccccttccatcaattcttattaaattctcaaaataatcctttgaaaagggagtataattacattttacagtgactcgaaccttacccaaacaagtgggagagccaggagccaaactatcaggctccaaagcttttttttagtgcatcacaatgacaaaggggtggttttctttcacccaagaatgtgctttcctggaaatttttctagatagaatattatgtaatttgttttgaaggttttttttcctgactgtcttaaagattatgctagctttagaacacatgcaaacagctgcagctctgtgattaaaatgttaaggtcactagaatagtgttaggaaaatgttaatagataattctgctgcctctattagcttatgtatgatccttaatagcattgcttccccttcagtttctatttaggaggtgaagaatcttttaataaggtagaaagttgctttatttaaatttgtactgtagaatgtttgtgatacagtatttgtaaaattgatatgaaaaataatttctcaaagtctattgtttgatctagttattttaataaaggaactctagaagtttcaagtggccagtgaagtgtgaggaatagagagtaaaggaaataattaataatggtgaccctctgttaagtggtttactttttccattaatataaatttcatttggaaagattaaaaaaacaagtttgattgaacttgataaatcagaaatatttacagctttgtcgatggtgtattcttgaaaaatgtttggttttctttcaggttgacttatatccaaaattctacaaattcttagctatgttataaatgtagaaagaagtgaaaaatcaaaatatgattatgaagattttcttctcttccgagtacaaagctctgctaaataaggatttacccaagatgcccacatccacatacttatgtgtcagtgctttggagaattaactttgactttattctactggaagtatagattaacactgtgctttctgggattttgcttttcatgggttgctgatttttaattttgctaaataagcacatagtccatcaccagcatcacctgccctctgttcctcccccgtcccccagggataagaacctgttatccaccatcagtaacattttatgaaagatctacttatttgtctgttttgcagacattttaaaattcgtaaagtgggatgcttctttaatttaaatacatttagcttcatgaaaaactcactacacagttcttgttcaagcattattgggaaaccaccagagggcactctcacccagggcttaatttgaacatctcgcccaaaagtgacttttaaaagcacttaattagcagagaatttggatgttcattagttgagaatgactagtagaataaatggtaatagtgaaattaagtgctggaatattctgagtagaccaatagcaaa

SEQ ID NO: 328053 - DNA, 2023 bp, Homo sapiens
  misc_feature (27)..(27): n is a, c, g, or t
cctcggatgtttaatcgataagcttgnttggggagggcgggtcgtggtgagaagccgtcaagcaggagtagaaattggtatgcttagaagcagattctaaaagcagtttctcttcagaacatcttttttcataccacttgataagcatcttgaaacaccatggctgtagctgcagtaaaatgggtgatgtcaaagagaactatcttgaaacatttatttccagtccaaaatggagctttatattgtgtttgtcataaatctacgtattctcctctaccagatgactataattgcaacgtagagcttgctctgacttctgatggcaggacaatagtatgctaccacccttctgtggacattccatatgaacacacaaaacctatccctcggccagatcctgtgcataataatgaagaaacacatgatcaagtgctgaaaaccagattggaagaaaaagttgaacaccttgaggaaggacctatgatagaacaacttagcaaaatgttctttactactaagcaccgttggtatcctcatggacggtatcacagatgtcgtaagaatctgaatcctccaaaagacagatgatgcggaggttcctgggggaatcaaagagaaatgtgcctcatttgccatttgagaaaatgcagtctggtgtattcagtaatatatagtaaagtaataatgataaaatatcttttcatatattagaatgtgtacttttatataaagtaattctggatttgacattctcatttagagaaacctattttcttttttctttttctattttagtgtttcatttatgtgcggtctccaatttaggacttttccatagtgccaaagccatacatattcagtagaacatcaataaattacatcagaaattcaacactttattataaaacgggcttcgtgttagataattttgctaaacagtaggctactgtaagtgttctgagcatatttaagacaggctagcattttcaatttacaatattttcaactgatagtaggtttattgggatgtaaccctatgataagttgagaaacatctctttttgtgtgtctactgtgatttaagtatttttaatcatcagccaagcattgttagtagtataaatatgattaataaaaatgtgcatggctttcctgaaggagattttttaattgcctttgagaataaactcataaggtctaccaagaaaataaatgttatgatgtttcagttggcttctaggaaataattaaattagtgatattttaatcaggttttactatctgctaggccccttccatcaattcttattaaattctcaaaataatcctttgaaaagggagtataattacattttacagtgactcgaaccttacccaaacaagtgggagagccaggagccaaactatcaggctccaaagcttttttttagtgcatcacaatgacaaaggggtggttttctttcacccaagaatgtgctttcctggaaatttttctagatagaatattatgtaatttgttttgaaggttttttttcctgactgtcttaaagattatgctagctttagaacacatgcaaacagctgcagctctgtgattaaaatgttaaggtcactagaatagtgttaggaaaatgttaatagataattctgctgcctctattagcttatgtatgatccttaatagcattgcttccccttcagtttctatttaggaggtgaagaatcttttaataaggtagaaagttgctttatttaaatttgtactgtagaatgtttgtgatacagtatttgtaaaattgatatgaaaaataatttctcaaagtctattgtttgatctagttattttaataaaggaactctagaagtttcaagtggccagtgaagtgtgaggaatagagagtaaaggaaataattaataatggtgaccctctgttaagtggtttactttttccattaatataaatttcatttggaaagattaaaaaaacaagtttgattgaacttgataaatcagaaatattta

SEQ ID NO: 328054 - DNA, 2083 bp, Homo sapiens
gccagttagagctgagggagggctcaaaagcagtagaaaggatgacttgcgcgggtaggttaggaaaataggaccgtccccctctaacagaatataaccaacgtccccctacctggggatagcaggagtagaaattggtatgcttagaagcagattctaaaagcagtttctcttcagaacatcttttttcataccacttgataagcatcttgaaacaccatggctgtagctgcagtaaaatgggtgatgtcaaagagaactatcttgaaacatttatttccagtccaaaatggagctttatattgtgtttgtcataaatctacgtattctcctctaccagatgactataattgcaacgtagagcttgctctgacttctgatggcaggacaatagtatgctaccacccttctgtggacattccatatgaacacacaaaacctatccctcggccagatcctgtgcataataatgaagaaacacatgatcaagtgctgaaaaccagattggaagaaaaagttgaacaccttgaggaaggacctatgatagaacaacttagcaaaatgttctttactactaagcaccgttggtatcctcatggacggtatcacagatgtcgtaagaatctgaatcctccaaaagacagatgatgcggaggttcctgggggaatcaaagagaaatgtgcctcatttgccatttgagaaaatgcagtctggtgtattcagtaatatatagtaaagtaataatgataaaatatcttttcatatattagaatgtgtacttttatataaagtaattctggatttgacattctcatttagagaaacctattttcttttttctttttctattttagtgtttcatttatgtgcggtctccaatttaggacttttccatagtgccaaagccatacatattcagtagaacatcaataaattacatcagaaattcaacactttattataaaacgggcttcgtgttagataattttgctaaacagtaggctactgtaagtgttctgagcatatttaagacaggctagcattttcaatttacaatattttcaactgatagtaggtttattgggatgtaaccctatgataagttgagaaacatctctttttgtgtgtctactgtgatttaagtatttttaatcatcagccaagcattgttagtagtataaatatgattaataaaaatgtgcatggctttcctgaaggagattttttaattgcctttgagaataaactcataaggtctaccaagaaaataaatgttatgatgtttcagttggcttctaggaaataattaaattagtgatattttaatcaggttttactatctgctaggccccttccatcaattcttattaaattctcaaaataatcctttgaaaagggagtataattacattttacagtgactcgaaccttacccaaacaagtgggagagccaggagccaaactatcaggctccaaagcttttttttagtgcatcacaatgacaaaggggtggttttctttcacccaagaatgtgctttcctggaaatttttctagatagaatattatgtaatttgttttgaaggttttttttcctgactgtcttaaagattatgctagctttagaacacatgcaaacagctgcagctctgtgattaaaatgttaaggtcactagaatagtgttaggaaaatgttaatagataattctgctgcctctattagcttatgtatgatccttaatagcattgcttccccttcagtttctatttaggaggtgaagaatcttttaataaggtagaaagttgctttatttaaatttgtactgtagaatgtttgtgatacagtatttgtaaaattgatatgaaaaataatttctcaaagtctattgtttgatctagttattttaataaaggaactctagaagtttcaagtggccagtgaagtgtgaggaatagagagtaaaggaaataattaataatggtgaccctctgttaagtggtttactttttccattaatataaatttcatttggaaagattaaaaaaacaagtttgattgaacttgataaatcagaaatattta

SEQ ID NO: 328055 - DNA, 1975 bp, Homo sapiens
gcgctgtttcgtgggaccaggattgaaacaagatggcgggttcgtggtgagaagccgtcaagcaggagtagaaattggtatgcttagaagcagattctaaaagcagtttctcttcagaacatcttttttcataccacttgataagcatcttgaaacaccatggctgtagctgcagtaaaatgggtgatgtcaaagagaactatcttgaaacatttatttccagtccaaaatggagctttatattgtgtttgtcataaatctacgtattctcctctaccagatgactataattgcaacgtagagcttgctctgacttctgatggcaggacaatagtatgctaccacccttctgtggacattccatatgaacacacaaaacctatccctcggccagatcctgtgcataataatgaagaaacacatgatcaagtgctgaaaaccagattggaagaaaaagttgaacaccttgaggaaggacctatgatagaacaacttagcaaaatgttctttactactaagcaccgttggtatcctcatggacggtatcacagatgtcgtaagaatctgaatctgtgcctcatttgccatttgagaaaatgcagtctggtgtattcagtaatatatagtaaagtaataatgataaaatatcttttcatatattagaatgtgtacttttatataaagtaattctggatttgacattctcatttagagaaacctattttcttttttctttttctattttagtgtttcatttatgtgcggtctccaatttaggacttttccatagtgccaaagccatacatattcagtagaacatcaataaattacatcagaaattcaacactttattataaaacgggcttcgtgttagataattttgctaaacagtaggctactgtaagtgttctgagcatatttaagacaggctagcattttcaatttacaatattttcaactgatagtaggtttattgggatgtaaccctatgataagttgagaaacatctctttttgtgtgtctactgtgatttaagtatttttaatcatcagccaagcattgttagtagtataaatatgattaataaaaatgtgcatggctttcctgaaggagattttttaattgcctttgagaataaactcataaggtctaccaagaaaataaatgttatgatgtttcagttggcttctaggaaataattaaattagtgatattttaatcaggttttactatctgctaggccccttccatcaattcttattaaattctcaaaataatcctttgaaaagggagtataattacattttacagtgactcgaaccttacccaaacaagtgggagagccaggagccaaactatcaggctccaaagcttttttttagtgcatcacaatgacaaaggggtggttttctttcacccaagaatgtgctttcctggaaatttttctagatagaatattatgtaatttgttttgaaggttttttttcctgactgtcttaaagattatgctagctttagaacacatgcaaacagctgcagctctgtgattaaaatgttaaggtcactagaatagtgttaggaaaatgttaatagataattctgctgcctctattagcttatgtatgatccttaatagcattgcttccccttcagtttctatttaggaggtgaagaatcttttaataaggtagaaagttgctttatttaaatttgtactgtagaatgtttgtgatacagtatttgtaaaattgatatgaaaaataatttctcaaagtctattgtttgatctagttattttaataaaggaactctagaagtttcaagtggccagtgaagtgtgaggaatagagagtaaaggaaataattaataatggtgaccctctgttaagtggtttactttttccattaatataaatttcatttggaaagattaaaaaaacaagtttgattgaacttgataaatcagaaatattta

SEQ ID NO: 328056 - DNA, 2128 bp, Homo sapiens
gcgctgtttcgtgggaccaggattgaaacaagatggcgggttcgtggtgagaagccgtcaagcaggagtagaaattggtatgcttagaagcagattctaaaagcagtttctcttcagaacatcttttttcataccacttgataagcatcttgaaacaccatggctgtagctgcagtaaaatgggtgatgtcaaagagaactatcttgaaacatttatttccagtccaaaattcgggcgtacatgtgcaggtttgttacgtggatgtattacatatactgaggtttgggcttcaactgaacccgtcacccaaatagtgaacatagtacccaatagatggagctttatattgtgtttgtcataaatctacgtattctcctctaccagatgactataattgcaacgtagagcttgctctgacttctgatggcaggacaatagtatgctaccacccttctgtggacattccatatgaacacacaaaacctatccctcggccagatcctgtgcataataatgaagaaacacatgatcaagtgctgaaaaccagattggaagaaaaagttgaacaccttgaggaaggacctatgatagaacaacttagcaaaatgttctttactactaagcaccgttggtatcctcatggacggtatcacagatgtcgtaagaatctgaatcctccaaaagacagatgatgcggaggttcctgggggaatcaaagagaaatgtgcctcatttgccatttgagaaaatgcagtctggtgtattcagtaatatatagtaaagtaataatgataaaatatcttttcatatattagaatgtgtacttttatataaagtaattctggatttgacattctcatttagagaaacctattttcttttttctttttctattttagtgtttcatttatgtgcggtctccaatttaggacttttccatagtgccaaagccatacatattcagtagaacatcaataaattacatcagaaattcaacactttattataaaacgggcttcgtgttagataattttgctaaacagtaggctactgtaagtgttctgagcatatttaagacaggctagcattttcaatttacaatattttcaactgatagtaggtttattgggatgtaaccctatgataagttgagaaacatctctttttgtgtgtctactgtgatttaagtatttttaatcatcagccaagcattgttagtagtataaatatgattaataaaaatgtgcatggctttcctgaaggagattttttaattgcctttgagaataaactcataaggtctaccaagaaaataaatgttatgatgtttcagttggcttctaggaaataattaaattagtgatattttaatcaggttttactatctgctaggccccttccatcaattcttattaaattctcaaaataatcctttgaaaagggagtataattacattttacagtgactcgaaccttacccaaacaagtgggagagccaggagccaaactatcaggctccaaagcttttttttagtgcatcacaatgacaaaggggtggttttctttcacccaagaatgtgctttcctggaaatttttctagatagaatattatgtaatttgttttgaaggttttttttcctgactgtcttaaagattatgctagctttagaacacatgcaaacagctgcagctctgtgattaaaatgttaaggtcactagaatagtgttaggaaaatgttaatagataattctgctgcctctattagcttatgtatgatccttaatagcattgcttccccttcagtttctatttaggaggtgaagaatcttttaataaggtagaaagttgctttatttaaatttgtactgtagaatgtttgtgatacagtatttgtaaaattgatatgaaaaataatttctcaaagtctattgtttgatctagttattttaataaaggaactctagaagtttcaagtggccagtgaagtgtgaggaatagagagtaaaggaaataattaataatggtgaccctctgttaagtggtttactttttccattaatataaatttcatttggaaagattaaaaaaacaagtttgattgaacttgataaatcagaaatattta

SEQ ID NO: 328057 - DNA, 823 bp, Homo sapiens
gcgctgtttcgtgggaccaggattgaaacaagatggcgggttcgtggtgagaagccgtcaagcaggagtagaaattggtatgcttagaagcagattctaaaagcagtttctcttcagaacatcttttttcataccacttgataagcatcttgaaacaccatggctgtagctgcagtaaaatgggtgatgtcaaagagaactatcttgaaacatttatttccagtccaaaatggagctttatattgtgtttgtcataaatctacgtattctcctctaccagatgactataattgcaacgtagagcttgctctgacttctgatggcaggacaatagtatgctaccacccttctgtggacattccatatgaacacacaaaacctatccctcggccagatcctgtgcataataatgaagaaacacatgatcaagtgctgaaaaccagattggaagaaaaagttgaacaccttgaggaaggacctatgatagaacaacttagcaaaatgttctttactactaagcaccgttggtatcctcatggacggtatcacagatgtcgtaagaatctgaatcctccaaaagacagatgatgcggaggttcctgggggaatcaaagagaaatgtgcctcatttgccatttgagaaaatgcagtctggtgtattcagtaatatatagtaaagtaataatgataaaatatcttttcatatattagaatgtgtacttcttgtagtactccgattgactctcattgagaacaatcctaaccttccattcgggtcccatgcgggccaccagaatccatggcagccaactcgcggcccccc

SEQ ID NO: 328058 - DNA, 1034 bp, Homo sapiens
gaaattatcctcaagatatgaaagaaaactatttcaaatgcttaatttaattaatagtcaacaacttagccacgtgtggtggtgtgcctgtagtcccagctactaggcagggtaaggtaggaggagcccttgtgccaggagtttgaggctgtagtacactattattgagcttatgaataacctctgcacttcagcctgggcaataaagcaagacccagtctctagaaaaaaaaaatgattaggtaaagaaaagaaaacaaattttcacaatgggagaatgtggttttactatctgctaggccccttccatcaattcttattaaattctcaaaataatcctttgaaaagggagtataattacattttacagtgactcgaaccttacccaaacaagtgggagagccaggagccaaactatcaggctccaaagcttttttttagtgcatcacaatgacaaaggggtggttttctttcacccaagaatgtgctttcctggaaatttttctagatagaatattatgtaatttgttttgaaggttttttttcctgactgtcttaaagattatgctagctttagaacacatgcaaacagctgcagctctgtgattaaaatgttaaggtcactagaatagtgttaggaaaatgttaatagataattctgctgcctctattagcttatgtatgatccttaatagcattgcttccccttcagtttctatttaggaggtgaagaatcttttaataaggtagaaagttgctttatttaaatttgtactgtagaatgtttgtgatacagtatttgtaaaattgatatgaaaaataatttctcaaagtctattgtttgatctagttattttaataaaggaactctagaagtttcaagtggccagtgaagtgtgaggaatagagagtaaaggaaataattaataatggtgaccctctgttaagtggtttactttttccattaatataaatttcatttggaaagattaaaaaaacaagtttgattgaacttgataaatcagaaatattta

SEQ ID NO: 328059 - DNA, 473 bp, Homo sapiens
gcgctgtttcgtgggaccaggattgaaacaagatggcgggttcgtggtgagaagccgtcaagcaggagtagaaattggtatgcttagaagcagattctaaaagcagtttctcttcagaacatcttttttcataccacttgataagcatcttgaaacaccatggctgtagctgcagtaaaatgggtgatgtcaaagagaactatcttgaaacatttatttccagtccaaaatggagctttatattgtgtttcaagatagttctctttgattcccccaggaacctccgcatcatctgtcttttggaggattcagattcttacgacatctgtgataccgtccatgaggataccaacggtgcttagtagtaaagtgtgcctcatttgccatttgagaaaatgcagtctggtgtattcagtaatatatagtaaagtaataatgataaaatatcttttcatatattagaatgtgtactt

SEQ ID NO: 328060 - DNA, 2023 bp, Homo sapiens
gcgctgtttcgtgggaccaggattgaaacaagatggcgggttcgtggtgagaagccgtcaagcaggagtagaaattggtatgcttagaagcagattctaaaagcagtttctcttcagaacatcttttttcataccacttgataagcatcttgaaacaccatggctgtagctgcagtaaaatgggtgatgtcaaagagaactatcttgaaacatttatttccagtccaaaatggagctttatattgtgtttgtcataaatctacgtattctcctctaccagatgactataattgcaacgtagagcttgctctgacttctgatggcaggacaatagtatgctaccacccttctgtggacattccatatgaacacacaaaacctatccctcggccagatcctgtgcataataatgaagaaacacatgatcaagtgctgaaaaccagattggaagaaaaagttgaacaccttgaggaaggacctatgatagaacaacttagcaaaatgttctttactactaagcaccgttggtatcctcatggacggtatcacagatgtcgtaagaatctgaatcctccaaaagacagatgatgcggaggttcctgggggaatcaaagagaaatgtgcctcatttgccatttgagaaaatgcagtctggtgtattcagtaatatatagtaaagtaataatgataaaatatcttttcatatattagaatgtgtacttttatataaagtaattctggatttgacattctcatttagagaaacctattttcttttttctttttctattttagtgtttcatttatgtgcggtctccaatttaggacttttccatagtgccaaagccatacatattcagtagaacatcaataaattacatcagaaattcaacactttattataaaacgggcttcgtgttagataattttgctaaacagtaggctactgtaagtgttctgagcatatttaagacaggctagcattttcaatttacaatattttcaactgatagtaggtttattgggatgtaaccctatgataagttgagaaacatctctttttgtgtgtctactgtgatttaagtatttttaatcatcagccaagcattgttagtagtataaatatgattaataaaaatgtgcatggctttcctgaaggagattttttaattgcctttgagaataaactcataaggtctaccaagaaaataaatgttatgatgtttcagttggcttctaggaaataattaaattagtgatattttaatcaggttttactatctgctaggccccttccatcaattcttattaaattctcaaaataatcctttgaaaagggagtataattacattttacagtgactcgaaccttacccaaacaagtgggagagccaggagccaaactatcaggctccaaagcttttttttagtgcatcacaatgacaaaggggtggttttctttcacccaagaatgtgctttcctggaaatttttctagatagaatattatgtaatttgttttgaaggttttttttcctgactgtcttaaagattatgctagctttagaacacatgcaaacagctgcagctctgtgattaaaatgttaaggtcactagaatagtgttaggaaaatgttaatagataattctgctgcctctattagcttatgtatgatccttaatagcattgcttccccttcagtttctatttaggaggtgaagaatcttttaataaggtagaaagttgctttatttaaatttgtactgtagaatgtttgtgatacagtatttgtaaaattgatatgaaaaataatttctcaaagtctattgtttgatctagttattttaataaaggaactctagaagtttcaagtggccagtgaagtgtgaggaatagagagtaaaggaaataattaataatggtgaccctctgttaagtggtttactttttccattaatataaatttcatttggaaagattaaaaaaacaagtttgattgaacttgataaatcagaaatattta

SEQ ID NO: 328061 - DNA, 1154 bp, Homo sapiens
gcgctgtttcgtgggaccaggattgaaacaagatggcgggttcgtggtgagaagccgtcaagcaggagtagaaattggtatgcttagaagcagattctaaaagcagtttctcttcagaacatcttttttcataccacttgataagcatcttgaaacaccatggctgtagctgcagtaaaatgggtgatgtcaaagagaactatcttgaaacatttatttccagtccaaaatggagctttatattgtgtttgtcataaatctacgtattctcctctaccagatgactataattgcaacgtagagcttgctctgacttctgatggcaggacaatagtatgctaccacccttctgtggacattccatatgaacacacaaaacctatccctcggccagatcctgtgcataataatgaagaaacacatgatcaagtgctgaaaaccagattggaagaaaaagttgaacaccttgaggaaggacctatgatagaacaacttagcaaaatgttctttactactaagcaccgttggtatcctcatggacggtatcacagatgtcgtaagaatctgaatcctccaaaagacagatgatgcggaggttcctgggggaatcaaagagaaatgtgcctcatttgccatttgagaaaatgcagtctggtgtattcagtaatatatagtaaagtaataatgataaaatatcttttcatatattagaatgtgtacttttatataaagtaattctggatttgacattctcatttagagaaacctattttcttttttctttttctattttagtgtttcatttatgtgcggtctccaatttaggacttttccatagtgccaaagccatacatattcagtagaacatcaataaattacatcagaaattcaacactttattataaaacgggcttcgtgttagataattttgctaaacagtaggctactgtaagtgttctgagcatatttaagacaggctagcattttcaatttacaatattttcaactgatagtaggtttattgggatgtaaccctatgataagttgagaaacatctctttttgtgtgtctactgtgatttaagtatttttaatcatcagccaagcattgttagtagtataaatatgattaataaaaatgtgcatggctttcct

SEQ ID NO: 328062 - DNA, 754 bp, Homo sapiens
gcgctgtttcgtgggaccaggattgaaacaagatggcgggttcgtggtgagaagccgtcaagcaggagtagaaattggtatgcttagaagcagattctaaaagcagtttctcttcagaacatcttttttcataccacttgataagcatcttgaaacaccatggctgtagctgcagtaaaatgggtgatgtcaaagagaactatcttgaaacatttatttccagtccaaaatggagctttatattgtgtttgtcataaatctacgtattctcctctaccagatgactataattgcaacgtagagcttgctctgacttctgatggcaggacaatagtatgctaccacccttctgtggacattccatatgaacacacaaaacctatccctcggccagatcctgtgcataataatgaagaaacacatgatcaagtgctgaaaaccagattggaagaaaaagttgaacaccttgaggaaggacctatgatagaacaacttagcaaaatgttctttactactaagcaccgttggtatcctcatggacggtatcacagatgtcgtaagaatctgaatcctccaaaagacagatgatgcggaggttcctgggggaatcaaagagaaatgtgcctcatttgccatttgagaaaatgcagtctggtgtattcagtaatatatagtaaagtaataatgataaaatatcttttcatatattagaatgtgtacttttatataaagtaattctggatttgacattctc

SEQ ID NO: 328063 - DNA, 1326 bp, Homo sapiens
cggtagatagtggatgggaggggggtcggtgagaagcgtcagcaggagtagaaattggtatgcttagaagcagattctaaaagcagtttctcttcagaacatcttttttcataccacttgataagcatcttgaaacaccatggctgtagctgcagtaaaatgggtgatgtcaaagagaactatcttgaaacatttatttccagtccaaaatggagctttatattgtgtttgtcataaatctacgtattctcctctaccagatgactataattgcaacgtagagcttgctctgacttctgatggcaggacaatagtatgctaccacccttctgtggacattccatatgaacacacaaaacctatccctcggccagatcctgtgcataataatgaagaaacacatgatcaagtgctgaaaaccagattggaagaaaaagttgaacaccttgaggaaggacctatgatagaacaacttagcaaaatgttctttactactaagcaccgttggtatcctcatggacggtatcacagatgtcgtaagaatctgaatcctccaaaagacagatgatgcggaggttcctgggggaatcaaagagaaatgtgcctcatttgccatttgagaaaatgcagtctggtgtattcagtaatatatagtaaagttgacttatatccaaaattctacaaattcttagctatgttataaatgtagaaagaagtgaaaaatcaaaatatgattatgaagattttcttctcttccgagtacaaagctctgctaaataaggatttacccaagatgcccacatccacatacttatgtgtcagtgctttggagaattaactttgactttattctactggaagtatagattaacactgtgctttctgggattttgcttttcatgggttgctgatttttaattttgctaaataagcacatagtccatcaccagcatcacctgccctctgttcctcccccgtcccccagggataagaacctgttatccaccatcagtaacattttatgaaagatctacttatttgtctgttttgcagacattttaaaattcgtaaagtgggatgcttctttaatttaaatacatttagcttcatgaaaaactcactacacagttcttgttcaagcattattgggaaaccaccagagggcactctcacccagggcttaatttgaacatctcgcccaaaagtgacttttaaaagcacttaattagcagagaatttggatgttcattagttgagaatgactagtagaataaatggtaatagtgaaattaagtgctggaatattctgagtagaccaatagcaaa

SEQ ID NO: 328064 - DNA, 2537 bp, Homo sapiens
gcgctgtttcgtgggaccaggattgaaacaagatggcgggttcgtggtgagaagccgtcaagcaggagtagaaattggtatgcttagaagcagattctaaaagcagtttctcttcagaacatcttttttcataccacttgataagcatcttgaaacaccatggctgtagctgcagtaaaatgggtgatgtcaaagagaactatcttgaaacatttatttccagtccaaaatggagctttatattgtgtttgtcataaatctacgtattctcctctaccagatgactataattgcaacgtagagcttgctctgacttctgatggcaggacaatagtatgctaccacccttctgtggacattccatatgaacacacaaaacctatccctcggccagatcctgtgcataataatgaagaaacacatgatcaagtgctgaaaaccagattggaagaaaaagttgaacaccttgaggaaggacctatgatagaacaacttagcaaaatgttctttactactaagcaccgttggtatcctcatggacggtatcacagatgtcgtaagaatctgaatcctccaaaagacagatgatgcggaggttcctgggggaatcaaagagaaatgtgcctcatttgccatttgagaaaatgcagtctggtgtattcagtaatatatagtaaagtaataatgataaaatatcttttcatatattagaatgtgtacttttatataaagtaattctggatttgacattctcatttagagaaacctattttcttttttctttttctattttagtgtttcatttatgtgcggtctccaatttaggacttttccatagtgccaaagccatacatattcagtagaacatcaataaattacatcagaaattcaacactttattataaaacgggcttcgtgttagataattttgctaaacagtaggctactgtaagtgttctgagcatatttaagacaggctagcattttcaatttacaatattttcaactgatagtaggtttattgggatgtaaccctatgataagttgagaaacatctctttttgtgtgtctactgtgatttaagtatttttaatcatcagccaagcattgttagtagtataaatatgattaataaaaatgtgcatggctttcctgaaggagattttttaattgcctttgagaataaactcataaggtctaccaagaaaataaatgttatgatgtttcagttggcttctaggaaataattaaattagtgatattttaatcaggttttactatctgctaggccccttccatcaattcttattaaattctcaaaataatcctttgaaaagggagtataattacattttacagtgactcgaaccttacccaaacaagtgggagagccaggagccaaactatcaggctccaaagcttttttttagtgcatcacaatgacaaaggggtggttttctttcacccaagaatgtgctttcctggaaatttttctagatagaatattatgtaatttgttttgaaggttttttttcctgactgtcttaaagattatgctagctttagaacacatgcaaacagctgcagctctgtgattaaaatgttaaggtcactagaatagtgttaggaaaatgttaatagataattctgctgcctctattagcttatgtatgatccttaatagcattgcttccccttcagtttctatttaggaggtgaagaatcttttaataaggtagaaagttgctttatttaaatttgtactgtagaatgtttgtgatacagtatttgtaaaattgatatgaaaaataatttctcaaagtctattgtttgatctagttattttaataaaggaactctagaagtttcaagtggccagtgaagtgtgaggaatagagagtaaaggaaataattaataatggtgaccctctgttaagtggtttactttttccattaatataaatttcatttggaaagattaaaaaaacaagtttgattgaacttgataaatcagaaatatttaaaaaaaaaaaaaaaaaaaaaaaaaaaaaaaaaaaaaaaaaaaaaaaaaaaaaaaaacaaaaaaaaaaaaaaaaaaaaaaacagaaaaaaaaaaaaaaaaaagagggggaacgcgcctaagaaacatttaacgactgggggagcgcacaggaccgaacacgcccgccaacttatatgatctcgaggcaacgcacaaagaggtgggactattttaaaggcagaagagcgagatgcactaacaccgaggcgtgagcgagacacaacaactagatagtaccgaatgtggaaggaaacgaaacacccacaaagcagtggaggagcagcacaatagtagtggacgacaatacaccagaaaaaggagagcacacgcgaaaggagaaagacataacaacgagaggcgaaagctgagagcaagaacaaaaaccaagtagaacgaggggagccaacgagacaaacacaacctagacaagaaacctgtacgagggaggaggagacacaagacccacagagaagaa

SEQ ID NO: 328065 - DNA, 2006 bp, Homo sapiens
  misc_feature (19)..(19): n is a, c, g, or t
  misc_feature (28)..(28): n is a, c, g, or t
cgaagtacggatatgtcgnccagcgtcnggtgagaagccgtcaagcaggagtagaaattggtatgcttagaagcagattctaaaagcagtttctcttcagaacatcttttttcataccacttgataagcatcttgaaacaccatggctgtagctgcagtaaaatgggtgatgtcaaagagaactatcttgaaacatttatttccagtccaaaatggagctttatattgtgtttgtcataaatctacgtattctcctctaccagatgactataattgcaacgtagagcttgctctgacttctgatggcaggacaatagtatgctaccacccttctgtggacattccatatgaacacacaaaacctatccctcggccagatcctgtgcataataatgaagaaacacatgatcaagtgctgaaaaccagattggaagaaaaagttgaacaccttgaggaaggacctatgatagaacaacttagcaaaatgttctttactactaagcaccgttggtatcctcatggacggtatcacagatgtcgtaagaatctgaatcctccaaaagacagatgatgcggaggttcctgggggaatcaaagagaaatgtgcctcatttgccatttgagaaaatgcagtctggtgtattcagtaatatatagtaaagtaataatgataaaatatcttttcatatattagaatgtgtacttttatataaagtaattctggatttgacattctcatttagagaaacctattttcttttttctttttctattttagtgtttcatttatgtgcggtctccaatttaggacttttccatagtgccaaagccatacatattcagtagaacatcaataaattacatcagaaattcaacactttattataaaacgggcttcgtgttagataattttgctaaacagtaggctactgtaagtgttctgagcatatttaagacaggctagcattttcaatttacaatattttcaactgatagtaggtttattgggatgtaaccctatgataagttgagaaacatctctttttgtgtgtctactgtgatttaagtatttttaatcatcagccaagcattgttagtagtataaatatgattaataaaaatgtgcatggctttcctgaaggagattttttaattgcctttgagaataaactcataaggtctaccaagaaaataaatgttatgatgtttcagttggcttctaggaaataattaaattagtgatattttaatcaggttttactatctgctaggccccttccatcaattcttattaaattctcaaaataatcctttgaaaagggagtataattacattttacagtgactcgaaccttacccaaacaagtgggagagccaggagccaaactatcaggctccaaagcttttttttagtgcatcacaatgacaaaggggtggttttctttcacccaagaatgtgctttcctggaaatttttctagatagaatattatgtaatttgttttgaaggttttttttcctgactgtcttaaagattatgctagctttagaacacatgcaaacagctgcagctctgtgattaaaatgttaaggtcactagaatagtgttaggaaaatgttaatagataattctgctgcctctattagcttatgtatgatccttaatagcattgcttccccttcagtttctatttaggaggtgaagaatcttttaataaggtagaaagttgctttatttaaatttgtactgtagaatgtttgtgatacagtatttgtaaaattgatatgaaaaataatttctcaaagtctattgtttgatctagttattttaataaaggaactctagaagtttcaagtggccagtgaagtgtgaggaatagagagtaaaggaaataattaataatggtgaccctctgttaagtggtttactttttccattaatataaatttcatttggaaagattaaaaaaacaagtttgattgaacttgataaatcagaaatattta

SEQ ID NO: 328066 - DNA, 2003 bp, Homo sapiens
cggtagatagtggatgggaggggggtcggtgagaagcgtcagcaggagtagaaattggtatgcttagaagcagattctaaaagcagtttctcttcagaacatcttttttcataccacttgataagcatcttgaaacaccatggctgtagctgcagtaaaatgggtgatgtcaaagagaactatcttgaaacatttatttccagtccaaaatggagctttatattgtgtttgtcataaatctacgtattctcctctaccagatgactataattgcaacgtagagcttgctctgacttctgatggcaggacaatagtatgctaccacccttctgtggacattccatatgaacacacaaaacctatccctcggccagatcctgtgcataataatgaagaaacacatgatcaagtgctgaaaaccagattggaagaaaaagttgaacaccttgaggaaggacctatgatagaacaacttagcaaaatgttctttactactaagcaccgttggtatcctcatggacggtatcacagatgtcgtaagaatctgaatcctccaaaagacagatgatgcggaggttcctgggggaatcaaagagaaatgtgcctcatttgccatttgagaaaatgcagtctggtgtattcagtaatatatagtaaagtaataatgataaaatatcttttcatatattagaatgtgtacttttatataaagtaattctggatttgacattctcatttagagaaacctattttcttttttctttttctattttagtgtttcatttatgtgcggtctccaatttaggacttttccatagtgccaaagccatacatattcagtagaacatcaataaattacatcagaaattcaacactttattataaaacgggcttcgtgttagataattttgctaaacagtaggctactgtaagtgttctgagcatatttaagacaggctagcattttcaatttacaatattttcaactgatagtaggtttattgggatgtaaccctatgataagttgagaaacatctctttttgtgtgtctactgtgatttaagtatttttaatcatcagccaagcattgttagtagtataaatatgattaataaaaatgtgcatggctttcctgaaggagattttttaattgcctttgagaataaactcataaggtctaccaagaaaataaatgttatgatgtttcagttggcttctaggaaataattaaattagtgatattttaatcaggttttactatctgctaggccccttccatcaattcttattaaattctcaaaataatcctttgaaaagggagtataattacattttacagtgactcgaaccttacccaaacaagtgggagagccaggagccaaactatcaggctccaaagcttttttttagtgcatcacaatgacaaaggggtggttttctttcacccaagaatgtgctttcctggaaatttttctagatagaatattatgtaatttgttttgaaggttttttttcctgactgtcttaaagattatgctagctttagaacacatgcaaacagctgcagctctgtgattaaaatgttaaggtcactagaatagtgttaggaaaatgttaatagataattctgctgcctctattagcttatgtatgatccttaatagcattgcttccccttcagtttctatttaggaggtgaagaatcttttaataaggtagaaagttgctttatttaaatttgtactgtagaatgtttgtgatacagtatttgtaaaattgatatgaaaaataatttctcaaagtctattgtttgatctagttattttaataaaggaactctagaagtttcaagtggccagtgaagtgtgaggaatagagagtaaaggaaataattaataatggtgaccctctgttaagtggtttactttttccattaatataaatttcatttggaaagattaaaaaaacaagtttgattgaacttgataaatcagaaatattta

SEQ ID NO: 328067 - DNA, 419 bp, Homo sapiens
aattaataatctacggtaatgtactatagagcttttttctattcttggaagtgttaaggataactcataatctaaatcagatttctcatgatgattctatgtgtccaggtatgtaattgagctcactgtgtatccaaatccagctgttaatgagttctgtgctaagggaatattaaatttaagaaagtttttttgggttcttaagagtaatttcttcaacttggaggagtatttgtgctttctatccttgagaccagatagaactcatcgattctagagagaagtagagtttcagtctcattctgctgtacactggctgtgtgaccttgagcacattaaacctctattaacctgtttcctcttagaattttgagaataaaatgatgtaatccacagtgcctgaaacatggtatgctcaa

SEQ ID NO: 328068 - DNA, 464 bp, Homo sapiens
gatcacaggcatgctctctagaacagtgtatctgactgagtaggttagcatattatcatcctgagaaagcagtggcctgattctgtaacaaatactttaactgcttatgtttttattttcaactttgactatttatgaacactgcagtgttcttatgaataattgtcttggcacttgtagtcctaaactgggcacttagaacaataaaaaatcctacagatcatttaaacaagtgaaaccctaatatataagtgagcgtatgattacattttcacttgttttcatactttgcaaatttgaaagtaactcatgttggaaaaactgttctttagctttcccagttagtatctgtagataatataagtattatctatagatatcccagtgatatgtactgatatggtacttaaaacaatctgcatttgaaaacttagtccatatattaaattacccttacagataaa

SEQ ID NO: 328069 - DNA, 821 bp, Homo sapiens
tctttaacactgtactgtatataaaacagaagctcaataggtgtttgttcattgaataaaaggaagaattctctcagctttttcccacagtaagcaacagtcacatttcagagtagagcaacagcccctaagagcttcttttcagtattttgtcagcttgttagccctgctgaaaactgtcacaggctgcaggcagcaacagagatgacagacttcttgcatggagctgaatccacaccctcagcacaatccctgagggagctaaacgggaggaaaaatgggtaagagctgggcactcctccccacttaagtctgagtggtgagattattaatcattttaaagtcagatctttatgcttttctatgtgttctacaagttaacatgtgttattttataaatggaaaggttgttaattaggagggaaatatgaaataaggcatccattgccctcttcattaataaacaacaaaattaaatgtgcttattttttaaaaaatcctgtgttttacttttgtgtcagaaccacaactggacttattctaatttgttttaacaagcaataactgattccctgcataattatttcaagaaatgagtttttaaacacatttaaaatgtttttacttatttcactagttttgggggaacaggtgttttttgattacatggataagttctttagtggtgatttctgagattctgatgcacccatcacctgagcagggtcactgagttatccttcaccttcctcccacctttccccgccagtctccaagtccattatatcattcttatgcctttgcatcttcatagcttagct

SEQ ID NO: 328070 - DNA, 282 bp, Homo sapiens
attcttactgagtgccactatgtgtgtgcacagtctgtgcgtagccgtggggatacaatgacgaataagacaagcccattctctgcccttacagagctaacgaaggagatggccaaacatgtaagtaaaagaaaggatgataagggataggggagcacatgtcagggctactgacttcgtttaatagggatgggggtttgaacaaggatcagagaaagatgaatagaaaataggcaaaggaagaatgtgtggcatcagggagggtgaaggacagtgtgtttg

SEQ ID NO: 328071 - DNA, 196 bp, Homo sapiens
  misc_feature (14)..(14): n is a, c, g, or t
  misc_feature (20)..(20): n is a, c, g, or t
  misc_feature (23)..(23): n is a, c, g, or t
  misc_feature (27)..(27): n is a, c, g, or t
  misc_feature (33)..(33): n is a, c, g, or t
  misc_feature (40)..(40): n is a, c, g, or t
  misc_feature (53)..(54): n is a, c, g, or t
aaaggggggggaantttggnttnaaanttaggntttgggnggccccccccttnnagagataacctgcactggtctaccttctgcttccctggaaaggatgaatttacatcatttgacaagcctattttcaagttatttgttgtttgtttgcttgtttttgtttttgcagctaaaataaaaatttcaaatacaattt

SEQ ID NO: 328072 - DNA, 1024 bp, Homo sapiens
  misc_feature (883)..(883): n is a, c, g, or t
  misc_feature (894)..(894): n is a, c, g, or t
  misc_feature (896)..(896): n is a, c, g, or t
  misc_feature (900)..(900): n is a, c, g, or t
  misc_feature (935)..(935): n is a, c, g, or t
cccccccccccccccccccccccgcccccccgcacctaacggctaggtcgaggctgggttggcatctgctcgcggcgccgcctcctgctcctcccgctgctgctgccgctgccgccctgagtcactgcctgcgcagctccggccgcctggctccccatactagtcgccgatatttggagttcttacaacatggcagacattgacaacaaagaacagtctgaacttgatcaagatttggatgatgttgaagaagtagaagaagaggaaactggtgaagaaacaaaactcaaagcacgtcagctaactgttcagatgatgcaaaatcctcagattcttgcagcccttcaagaaagacttgatggtctggtagaaacaccaacaggatacattgaaagcctgcctagggtagttaaaagacgagtgaatgctctcaaaaacctgcaagttaaatgtgcacagatagaagccaaattctatgaggaagttcatgatcttgaaaggaagtatgctgttctctatcagcctctatttgataagcgatttgaaattattaatgcaatttatgaacctacggaagaagaatgtgaatggaaaccagatgaagaagatgagatttcggaggaattgaaagaaaaggccaagattgaagatgagaaaaaggatgaagaaaaagaagaccccaaaggaattcctgaattttggttaactgtttttaagaatgttgacttgctcagtgatatggttcaggaacacgatgaacctattctgaagcacttgaaagatattaaagtgaagttctcagatgctggccagcctatgagtttgtcttagaatttcactttgaaccaatggatttttcaatgagggtggcaagactacgggngggtgaaccgngnttgntccttcttgaggccaattggtggcgggcaaatggnaagacaggtgaataaaagcaaggggggagtggaaaaaaattttggccaaaagaagaaacgcaatgtcattctaggtggcaaatatttcg

SEQ ID NO: 328073 - DNA, 963 bp, Homo sapiens
tagactcagaagtcttcactttattctttctcacctccactgtgaagtaaagaaaaggaaactccaaagatagtataggctagtattgttgctccacagccataagggatccaggactcttctgttttcctaactcctttttctttagctggtggctttcattctctaggatgcctcctggtccagtgtggctgctggagcttgagccatcacattcatattctaagtgggagggggagagggattaagataaaggcttcccagctatctaccatcctgttaaggatacttcctcaaagaaatacagcatttctgcttttttatcttgctgtcaaaatagtgtagctaaaggtaggctaggaaatgtagacttttagcttggtgtgttgccatctcatataaaatgagaatgttgttactaagaaggaaaagtaaaatcagtagatattcggttgaatgcacgtacttgttgacatcacattccccaaaaacctgcaaaaccaattttataaagcttcaaaagtataaactttacatttgaccagatgcttttaatgaaagtgtaagcacttccagtgtgtacttgtttacatatgaagttagaaaacggaattaccttttgaatttcctatttcatgtctttgaaagagatactaattttgaaaatgaattttaagtttttctgtaactttttttggtaattggtacatttgaaccttggtgtgatactatgatattatagcaaagaacagtctgaacttgatcaagatttggatgatgttgaagaagtagaagaagaggaaactggtgaagaaacaaaactcaaaggtattactttaaattacttcaggagccagtgattgctggcacatgtctactagagggtagttataagtaccagtctatttttttggacccttgctcattgtcccatttatctactggtccatacttctagtgtgt

SEQ ID NO: 328074 - DNA, 796 bp, Homo sapiens
  misc_feature (14)..(14): n is a, c, g, or t
tcagctgtacgccncggagtatgggatatcgtcgacccacggcctcgaagatattaaagtgaagttctcagatgctggccagcctatgagttttgtcttagaatttcactttgaacccaatgaatattttacaaatgaagtgctgacaaagacatacaggatgaggtcagaaccagatgattctgatcccttttcttttgatggaccagaaattatgggttgtacagggtgccagatagattggaaaaaaggaaagaatgtcactttgaaaactattaagaagaagcagaaacacaagggacgtgggacagttcgtactgtgactaaaacagtttccaatgactctttctttaacttttttgcccctcctgaagttcctgagagtggagatctggatgatgatgctgaagctatccttgctgcagacttcgaaattggtcactttttacgtgagcgtataatcccaagatcagtgttatattttactggagaagctattgaagatgatgatgatgattatgatgaagaaggtgaagaagcggatgaggaaggggaagaagaaggagatgaggaaaatgatccagactatgacccaaagaaggatcaaaacccagcagagtgcaagcagcagtgaagcaggatgtatgtggccttgaggataacctgcactggtctaccttctgcttccctggaaaggatgaatttacatcatttgacaagcctattttcaagttatttgttgtttgtttgcttgtttttgtttttgcagctaaaataaaaatttcaaatacaattt

SEQ ID NO: 328075 - DNA, 1000 bp, Homo sapiens
gaggactcccttacagagtagtttcagagtggagatctggatgatgatgctgaagctatccttgctgcagacttcgaaattggtcactttttacgtgagcgtataatcccaagatcagtgttatattttactggagaagctattgaagatgatgatgatgattatgatgaagaaggtgaagaagcggatgaggaaggggaagaagaaggagatgaggaaaatgatccagactatgacccaaagaaggatcaaaacccagcagagtgcaagcagcagtgaagcaggatgtatgtggccttgaggataacctgcactggtctaccttctgcttccctggaaaggatgaatttacatcatttgacaagcctattttcaagttatttgttgtttgtttgcttgtttttgtttttgcagctaaaataaaaatttcaaatacaatttaaaacaacacaaaaaccttcgcaggcattctatgcccgggtgcggcagacacgcgggtccatcgacactcgccccgtgcgtccatagcgcggtccccggaccccagtttcttcggtacaacggggtacgttcggcggggctcccaataggtagagaccgactcaacatcaggttcaaggccagggtcaaccttgcttaaccgaaccgggaacaccaccgcacacaccacggacgccaggacaaccagctctccacagagccagacaaacgctatcgcgacgacggaaatgcacgcgagaactttaggtctgggtaatataaccaataagctgaacgacgacggagaccaaccaagatggatgatggggagagacagaataatagaatcaggagatgaggaaaaggacgacagtctaagtgcaggcgtaagacaatatcagacgggaccaacacttgacatcccaggaagagagagagagagtggatgatagccaataacgagactgaggggaaggggcggagacagccgaggagtggaggagaagggcagacacaagtc

SEQ ID NO: 328076 - DNA, 205 bp, Homo sapiens
  misc_feature (41)..(41): n is a, c, g, or t
ttaaaaatttaaatttcttctttcttcaaacccttttgggnggaaaaacggaaaaagctaattgaagatgatgatgatgattatgatgaagaaggtgaagaagcggatgagggttatcagctctttgaagaagtcaaaagctgcagtaaacttttccaacgttggctgcagtaactattttcaataaaagctgtctggatgtctc

SEQ ID NO: 328077 - DNA, 2023 bp, Homo sapiens
  misc_feature (1859)..(1859): n is a, c, g, or t
gcagaagagccatttattaaatgtaggtaatattcacaatttattttagcagatatttttaatgggagtggtggtgggggattgtactacttagggtatgtcttgtagatctgcgccaagaatattaaggtaccagatgactcagcttttcatttttaagccggatggaagttaattgtgaaaagacttcagaacttgtattaatagcttcagcttttgtttagtaacattttcttaacagatacagaactgtatcctcagtgaccaatattgatatttaaaaatctgtattggttatcccggctgtgtgtacatcatctagtaattgaattattatcagaagtaaattgacctcaaaaaaagtaattgggaaaattaagtttatggcactttgtgtaataactgtattgatgatgaagagaaggttagtactgtaatttgttttgtataagtctagtgcatatttggattgagtatgtttttaaaaagccattgaaaaccacattttgtttggctttagttacagtctttgactgtcccaactattaactttattaactttattcatacacatagaaatacattacacaagcatcaaacataaacattcagatcactcacttcatctttctcctgggcctaaaactgtcagtatatttgcagttttctgatatgtgttgtctgcattcagaggactgtcaagagtcatagataggcatctgaatgaagctttgagcttcttaaaatgcaaggtgggtgaaacacaggataccaggaagagaaaggatattgttcatatagttgtggcagtggccttgagaactgtcttgactagagatagattaggaatctgaattattcctgaacattgggttttcctttagtgtattctctttagctttccctgcccgtctctactcattagatataccagcaatttatgggccagttaggaaaacttcatgagattggattgtcctattaaaaaagcataatacattttcataaaatccttctttcgatgcccttttttttttaaagcacgtcagctaactgttcagatgatgcaaaatcctcagattcttgcagcccttcaagaaagacttgatggtctggtagaaacaccaacaggatacattgaaagcctgcctagggtagttaaaagacgagtgaatgctctcaaaaacctgcaagttaaatgtgcacagatagaagccaaattctatgaggaagttcatgatcttgaaaggaagtatgctgttctctatcagcctctatttgataagcgatttgaaattattaatgcaatttatgaacctacggaagaagaatgtgaatggaaaccagatgaagaagatgagatttcggaggaattgaaagaaaaggccaagattgaagatgagaaaaaggatgaagaaaaagaagaccccaaaggaattcctgaattttggttaactgtttttaagaatgttgacttgctcagtgatatggttcaggaacacgatgaacctattctgaagcacttgaaagatattaaagtgaagttctcagatgctggccagcctatgagttttgtcttagaatttcactttgaacccaatgaatattttacaaatgaagtgctgacaaagacatacaggatgaggtcagaaccagatgattctgatcccttttcttttgatggaccagaaattatgggttgtacagggtgccagatagattggaaaaaaggaaagaatgtcactttgaaaactattaagaagaagcagaaacacaagggacgtgggacagttcgtactgtgactaaaacagtttccaatgactctttctttaacttttttgcccctcctgaagggccnccgaatctgagatggacggcgtgtgcgagcctcctctggacctcaatgggctttaggagggtaccccgaaggttttacggacgctcagcgacagtatcttacaggagggggcgagaggattctaccaaaccaaccatggacctgcccgaccacttgtctaagaa

SEQ ID NO: 328078 - DNA, 497 bp, Homo sapiens
cagcacagcttagaagttacagtgtggatccgctgtgtgaacctgatgagttctttgagaaactctttgagtttctgtttgacctctttaacaacaagagcaaaactccatctcaaaaaaaaaaagacttcgaaattggtcactttttacgtgagcgtataatcccaagatcagtgttatattttactggagaagctattgaagatgatgatgatgattatgatgaagaaggtgaagaagcggatgaggaaggggaagaagaaggagatgaggaaaatgatccagactatgacccaaagaaggatcaaaacccagcagagtgcaagcagcagtgaagcaggatgtatgtggccttgaggataacctgcactggtctaccttctgcttccctggaaaggatgaatttacatcatttgacaagcctattttcaagttatttgttgtttgtttgcttgtttttgtttttgcagctaaaataaaaatttcaaatacaattt

SEQ ID NO: 328079 - DNA, 752 bp, Homo sapiens
ggacgcgtgggtcgacccacgcgtcgagagaagccaaattctatgaggaagttcatgatcttgaaaggaagtatgctgttctctatcagcctctatttgataagcgatttgaaattattaatgcaatttatgaacctacggaagaagaatgtgaatggaaaccagatgaagaagatgagatttcggaggaattgaaagaaaaggccaagattgaagatgagaaaaaggatgaagaaaaagaagaccccaaaggaattcctgaattttggttaactgtttttaagaatgttgacttgctcagtgatatggttcaggaacacgatgaacctattctgaagcacttgaaagatattaaagtgaagttctcagatgctggccagcctatgagttttgtcttagaatttcactttgaacccaatgaatattttacaaatgaagtgctgacaaagacatacaggatgaggtcagaaccagatgattctggatgatgatgctgaagctatccttgctgcagacttcgaaattggtcactttttacgtgagcgtataatcccaagatcagtgttatattttactggagaagctattgaagatgatgatgatgattatgatgaagaaggtgaagaagcggatgaggaacgggcaaggaagaagggagatgaggaaaatgatcagactatggacccaaagaaggatcaaacccagcagagtgcagcagagtgaagcaggatggtctaacttctgcttcccta

SEQ ID NO: 328080 - DNA, 727 bp, Homo sapiens
gtggaagtgaggaagagggagagctcctgggcaccagaatgaatggggagggtcctttaggcactgtgaggcctttagcttttactcctactgagactggacatcgcaggagagtttcagagcagagaagtgctatgactgctcttgaagtttaagaggaccaggtggctggctttgctgtgtgtcagagaacaggagcagaaacagggagaccagctgggaggtgactgcaaaagtccaggtgagaggcgatggagctagtgaggagtgccggaggcctggtgtattctgacggtgccaggacctgtgataggtgctgagagagatgaggaactgctcagatcaccagctgcttcaggttaccagcccacacctgtctgtctcacctctgacaaccttggtaaagaaaccaaggcttagagacctgctcacagtcgtttcgtgagggaatgcaacatctgggtctagggtccaaatctatctctgctgtgaagaggaactcatacaggagatctacatgattaccaattcttggccttgcagtggaggatattaattttaagtacctgtgaaatgaagttcttaaaacctaagattccccaaaactccagttatcaacaaggttatataggaatcaaagcgaggcgtttggagtagatgccgagatcacctctccctcacacctctgctgaccccagctacctgcaatcctgccaggaccattctg

SEQ ID NO: 328081 - DNA, 5382 bp, Homo sapiens
gtggaagtgaggaagagggagagctcctgggcaccagaatgaatggggagggtcctttaggcactgtgaggcctttagcttttactcctactgagactggacatcgcaggagagtttcagagcagagaagtgctatgactgctcttgaagtttaagaggaccaggtggctggctttgctgtgtgtcagagaacaggagcagaaacagggagaccagctgggaggtgactgcaaaagtccaggtgagaggcgatggagctagtgaggagtgccggaggcctggtgtattctgacggtgccaggacctgtgataggtgctgagagagatgaggaactgctcagatcaccagctgcttcaggttaccagcccacacctgtctgtctcacctctgacaaccttggtaaagaaaccaaggcttagagacctgctcacagtcgtttcgtgagggaatgcaacatctgggtctagggtccaaatctatctctgctgtgaagaggaactcatacaggagatctacatgattaccaattcttggccttgcagtggagatatttggagttcttacaacatggcagacattgacaacaaagaacagtctgaacttgatcaagatttggatgatgttgaagaagtagaagaagaggaaactggtgaagaaacaaaactcaaagcacgtcagctaactgttcagatgatgcaaaatcctcagattcttgcagcccttcaagaaagacttgatggtctggtagaaacaccaacaggatacattgaaagcctgcctagggtagttaaaagacgagtgaatgctctcaaaaacctgcaagttaaatgtgcacagatagaagccaaattctatgaggaagttcatgatcttgaaaggaagtatgctgttctctatcagcctctatttgataagcgatttgaaattattaatgcaatttatgaacctacggaagaagaatgtgaatggaaaccagatgaagaagatgagatttcggaggaattgaaagaaaaggccaagattgaagatgagaaaaaggatgaagaaaaagaagaccccaaaggaattcctgaattttggttaactgtttttaagaatgttgacttgctcagtgatatggttcaggaacacgatgaacctattctgaagcacttgaaagatattaaagtgaagttctcagatgctggccagcctatgagttttgtcttagaatttcactttgaacccaatgaatattttacaaatgaagtgctgacaaagacatacaggatgaggtcagaaccagatgattctgatcccttttcttttgatggaccagaaattatgggttgtacagggtgccagatagattggaaaaaaggaaagaatgtcactttgaaaactattaagaagaagcagaaacacaagggacgtgggacagttcgtactgtgactaaaacagtttccaatgactctttctttaacttttttgcccctcctgaagttcctgagagtggagatctggatgatgatgctgaagctatccttgctgcagacttcgaaattggtcactttttacgtgagcgtataatcccaagatcagtgttatattttactggagaagctattgaagatgatgatgatgattatgatgaagaaggtgaagaagcggatgaggaaggggaagaagaaggagatgaggaaaatgatccagactatgacccaaagaaggatcaaaacccagcagagtgcaagcagcagtgaagcaggatgtatgtggccttgaggataacctgcactgtaatagcctaaacacaactcttatttacttacagccttatgtttttgtattttcttggtagactaggtaatttttttttaaaggacaggaaactgatattttaaagaccaatttgttctacctagcattttaactagtttttctgccagctatgttgaatgcacaaattctgtcacgcatgttcattcattgctacataatttggttcttctggaatatttttatgtagctcttggagtacagctatgaaaattaacaactgttaaaggaaataccttttttttttttttgtaattttttccttgaagaaccaaagtattttttcagctggttgttgaatagggttaagtccgcttggattagctgtgcctttcattactttgttacagaaatgcagtgacttatactaagacaatttattgtttaaaaaaaaaattggcaagacaactatatggttaagaatttccagtatgaccacacccaataactgttattagagtgttaatggattattgtgttttaggtgacatagttaactgtaaagtaacctgactcagtatagttactggtaccacagtgaggtgaataaaacgggattttcagaagttagcctgaatttaactgtatttttaaatttaacctccattaactaagcatcttttctttgtggtagggtctaccttctgcttccctggaaaggatgaatttacatcatttgacaagcctattttcaagttatttgttgtttgtttgcttgtttttgtttttgcagctaaaataaaaatttcaaatacaattttagttcttacaagataatgtcttaattttgtaccaattcaggtagaagtagaggcctaccttgaattaagggttatactcagtttttaacacattgttgaagaaaaggtaccagctttggaacgagatgctatactaataagcaagtgtaaaaaaaaaaaaaaaaagaggaagaaaatcttaagtgattgatgctgttttcttttaaaaaaaaaaaaaaaatggtttcttctaattcttattgcttaaagtatgagtatgtcacttacccgtgcttctgtttactgtgtaattaaaatgggtagtactgtttacctaactacctcatggatgtgttaaggcatattgagttaaatctcatataatgtttctcaatcttgttaaaagctcaaaattttgggcctatttgtaatgccagtgtgacactaagcattttgttcacaccacgctttgataactaaactggaaaacaaaggtgttaagtacctctgttctggatctgggcagtcagcactctttttagatctttgtgtggctcctatttttatagaagtggagggatgcactatttcacaaggtccaagatttgttttcagatatttttgatgactgtattgtaaatactacagggatagcactatagtattgtagtcatgagacttaaagtggaaataagactatttttgacaaaagatgccattaaatttcagactgtagagccacatttacaatacctcaggctaattactgttaattttggggttgaacttttttttgacagtgagggtggattattggattgtcattagaggaaggtctagatttcctgctcttaataaaattacattgaattgatttttagaggtaatgaaaacttcctttctgagaagttagtgttaaggtcttggaatgtgaacacattgtttgtagtgctatccattcctctcctgagattttaacttactactggaaatccttaaccaattataatagctttttttctttattttcaaaatgatttcctttgctttgattagacactatgtgctttttttttttaaccatagttcatcgaaatgcagctttttctgaacttcaaagatagaatcccatttttaatgaactgaagtagcaaaatcatctttttcattctttaggaaatagctattgccaaagtgaaggtgtagataatacctagtcttgttacataaaggggatgtggtttgcagaagaattttctttataaaattgaagttttaagggacgtcagtgtttatgccatttttccagttccaaaatgattccattccattctagaaatttgaagtatgtaacctgaaatccttaataaaatttggatttaattttataaaatgtactggtgatattttgggtgtttttttttaaatgaatgtatatactttttttttgaagagtggagagtagtgatgtctagagggagctattttgtgctgaggccactatgttctgtaaatatataattttaagagcaacctcacaatccctgctaagtggagtttattatttgaagactaaaatggaattccatagttcctgataggttatattctgagttattattctgagttatctacaaacatttttgagatttgtctttacactctgattgtagtttccagcagcccacgcacactgccaagtaagtctcattttttcctgttagaaatggtgaaatatcatataatcacttataaagaaaactgatatgaaaaaattttagagttgtttgctttatggtcactcaagtagggtaagtgttccacaaattccacaagttgatagtttaacatggatgtctgaaagccacatatataatttcttaggattcttaaattagtaaatctagcttactgaagcagtattagcatcactattttagattgcaaaaataccttaattgtgtggaactggcttgtagagtggtacttaagaaaaatgggattctacctctatttctgttttagcacacttaatcaggaaaggatatattaactttcataaaaatatttttgttgtgtgaataggttaatgatatggtaaggcccctaaaataactgaattaattgtttattgtaattgtaggccattcccattattaaaaataaagacaaaacttgaagtaactgaaaatcttatcgtgctatgtagaaatattgaactaatattcaaatatttgaatgctttggtttcagggattggtttaaaattggagtccttttttatgggttagtcttacaaaaatttaagcctttatatttttgactttaaatcaaaacaaatgttattttaaatgtacagaatagattggtagtgcagaagagtgtaagttcttcataggagctttagaaaagagaaatatgtgctaattcagtttttttttaatctgcactgtacatatatacttggtaattatgagcttgattttgtttttggaaatatgtgttcataatttaggtaatttgctacttaaagcactaagtctctgatacctgaaaagtacatgtaaatggtgatggtgaaataatactgcagttaacttaatagatgtatactggtgatttttgtatgctggattaaaactccagatattaaaatataacctggataaaaagccaagttcttggactgattgaggatcacttacatgactttacagaaatggaaacatccttgttggtatatgaaattattttactcaaggataagtattcataagaaattttgattgatgtatattttcaaaaatacagtatgctttgta

SEQ ID NO: 328082 - DNA, 5358 bp, Homo sapiens
gtggaagtgaggaagagggagagctcctgggcaccagaatgaatggggagggtcctttaggcactgtgaggcctttagcttttactcctactgagactggacatcgcaggagagtttcagagcagagaagtgctatgactgctcttgaagtttaagaggaccaggtggctggctttgctgtgtgtcagagaacaggagcagaaacagggagaccagctgggaggtgactgcaaaagtccaggtgagaggcgatggagctagtgaggagtgccggaggcctggtgtattctgacggtgccaggacctgtgataggtgctgagagagatgaggaactgctcagatcaccagctgcttcaggttaccagcccacacctgtctgtctcacctctgacaaccttggtaaagaaaccaaggcttagagacctgctcacagtcgtttcgtgagggaatgcaacatctgggtctagggtccaaatctatctctgctgtgaagaggaactcatacaggagatctacatgattaccaattcttggccttgcagtggagatatttggagttcttacaacatggcagacattgacaacaaagaacagtctgaacttgatcaagatttggatgatgttgaagaagtagaagaagaggaaactggtgaagaaacaaaactcaaagcacgtcagctaactgttcagatgatgcaaaatcctcagattcttgcagcccttcaagaaagacttgatggtctggtagaaacaccaacaggatacattgaaagcctgcctagggtagttaaaagacgagtgaatgctctcaaaaacctgcaagttaaatgtgcacagatagaagccaaattctatgaggaagttcatgatcttgaaaggaagtatgctgttctctatcagcctctatttgataagcgatttgaaattattaatgcaatttatgaacctacggaagaagaatgtgaatggaaaccagatgaagaagatgagatttcggaggaattgaaagaaaaggccaagattgaagatgagaaaaaggatgaagaaaaagaagaccccaaaggaattcctgaattttggttaactgtttttaagaatgttgacttgctcagtgatatggttcaggaacacgatgaacctattctgaagcacttgaaagatattaaagtgaagttctcagatgctggccagcctatgagttttgtcttagaatttcactttgaacccaatgaatattttacaaatgaagtgctgacaaagacatacaggatgaggtcagaaccagatgattctgatcccttttcttttgatggaccagaaattatgggttgtacagggtgccagatagattggaaaaaaggaaagaatgtcactttgaaaactattaagaagaagcagaaacacaagggacgtgggacagttcgtactgtgactaaaacagtttccaatgactctttctttaacttttttgcccctcctgaagttcctgagagtggagatctggatgatgatgctgaagctatccttgctgcagacttcgaaattggtcactttttacgtgagcgtataatcccaagatcagtgttatattttactggagaagctattgaagatgatgatgatgattatgatgaagaaggtgaagaagcggatgaggaaggggaagaagaaggagatgaggaaaatgatccagactatgacccaaagaaggatcaaaacccagcagagtgcaagcagcagtgaagcaggatgtatgtggccttgaggataacctgcactgtaatagcctaaacacaactcttatttacttacagccttatgtttttgtattttcttggtagactaggtaatttttttttaaaggacaggaaactgatattttaaagaccaatttgttctacctagcattttaactagtttttctgccagctatgttgaatgcacaaattctgtcacgcatgttcattcattgctacataatttggttcttctggaatatttttatgtagctcttggagtacagctatgaaaattaacaactgttaaaggaaataccttttttttttttttgtaattttttccttgaagaaccaaagtattttttcagctggttgttgaatagggttaagtccgcttggattagctgtgcctttcattactttgttacagaaatgcagtgacttatactaagacaatttattgtttaaaaaaaaaattggcaagacaactatatggttaagaatttccagtatgaccacacccaataactgttattagagtgttaatggattattgtgttttaggtgacatagttaactgtaaagtaacctgactcagtatagttactggtaccacagtgaggtgaataaaacgggattttcagaagttagcctgaatttaactgtatttttaaatttaacctccattaactaagcatcttttctttgtggtagggtctaccttctgcttccctggaaaggatgaatttacatcatttgacaagcctattttcaagttatttgttgtttgtttgcttgtttttgtttttgcagctaaaataaaaatttcaaatacaattttagttcttacaagataatgtcttaattttgtaccaattcaggtagaagtagaggcctaccttgaattaagggttatactcagtttttaacacattgttgaagaaaaggtaccagctttggaacgagatgctatactaataagcaagtgtaaaaaaaaaaaaaaaaagaggaagaaaatcttaagtgattgatgctgttttcttttaaaaaaaaaaaaaaaaaattcattttctttgggttagagctagagagaaggccccaagcttctatggtttcttctaattcttattgcttaaagtatgagtatgtcacttacccgtgcttctgtttactgtgtaattaaaatgggtagtactgtttacctaactacctcatggatgtgttaaggcatattgagttaaatctcatataatgtttctcaatcttgttaaaagctcaaaattttgggcctatttgtaatgccagtgtgacactaagcattttgttcacaccacgctttgataactaaactggaaaacaaaggtgttaagtacctctgttctggatctgggcagtcagcactctttttagatctttgtgtggctcctatttttatagaagtggagggatgcactatttcacaaggtccaagatttttaaagtggaaataagactatttttgacaaaagatgccattaaatttcagactgtagagccacatttacaatacctcaggctaattactgttaattttggggttgaacttttttttgacagtgagggtggattattggattgtcattagaggaaggtctagatttcctgctcttaataaaattacattgaattgatttttagaggtaatgaaaacttcctttctgagaagttagtgttaaggtcttggaatgtgaacacattgtttgtagtgctatccattcctctcctgagattttaacttactactggaaatccttaaccaattataatagctttttttctttattttcaaaatgatttcctttgctttgattagacactatgtgctttttttttttaaccatagttcatcgaaatgcagctttttctgaacttcaaagatagaatcccatttttaatgaactgaagtagcaaaatcatctttttcattctttaggaaatagctattgccaaagtgaaggtgtagataatacctagtcttgttacataaaggggatgtggtttgcagaagaattttctttataaaattgaagttttaagggacgtcagtgtttatgccatttttccagttccaaaatgattccattccattctagaaatttgaagtatgtaacctgaaatccttaataaaatttggatttaattttataaaatgtactggtgatattttgggtgtttttttttaaatgaatgtatatactttttttttgaagagtggagagtagtgatgtctagagggagctattttgtgctgaggccactatgttctgtaaatatataattttaagagcaacctcacaatccctgctaagtggagtttattatttgaagactaaaatggaattccatagttcctgataggttatattctgagttattattctgagttatctacaaacatttttgagatttgtctttacactctgattgtagtttccagcagcccacgcacactgccaagtaagtctcattttttcctgttagaaatggtgaaatatcatataatcacttataaagaaaactgatatgaaaaaattttagagttgtttgctttatggtcactcaagtagggtaagtgttccacaaattccacaagttgatagtttaacatggatgtctgaaagccacatatataatttcttaggattcttaaattagtaaatctagcttactgaagcagtattagcatcactattttagattgcaaaaataccttaattgtgtggaactggcttgtagagtggtacttaagaaaaatgggattctacctctatttctgttttagcacacttaatcaggaaaggatatattaactttcataaaaatatttttgttgtgtgaataggttaatgatatggtaaggcccctaaaataactgaattaattgtttattgtaattgtaggccattcccattattaaaaataaagacaaaacttgaagtaactgaaaatcttatcgtgctatgtagaaatattgaactaatattcaaatatttgaatgctttggtttcagggattggtttaaaattggagtccttttttatgggttagtcttacaaaaatttaagcctttatatttttgactttaaatcaaaacaaatgttattttaaatgtacagaatagattggtagtgcagaagagtgtaagttcttcataggagctttagaaaagagaaatatgtgctaattcagtttttttttaatctgcactgtacatatatacttggtaattatgagcttgattttgtttttggaaatatgtgttcataatttaggtaatttgctacttaaagcactaagtctctgatacctgaaaagtacatgtaaatggtgatggtgaaataatactgcagttaacttaatagatgtatactggtgatttttgtatgctggattaaaactccagatattaaaatataacctggataaaaagccaagttcttggactgattgaggatcacttacatgactttacagaaatggaaacatccttgttggtatatgaaattattttactcaaggataagtattcataagaaattttgattgatgtatattttcaaaaatacagtatgctttgta

SEQ ID NO: 328083 - DNA, 3992 bp, Homo sapiens
gtggaagtgaggaagagggagagctcctgggcaccagaatgaatggggagggtcctttaggcactgtgaggcctttagcttttactcctactgagactggacatcgcaggagagtttcagagcagagaagtgctatgactgctcttgaagtttaagaggaccaggtggctggctttgctgtgtgtcagagaacaggagcagaaacagggagaccagctgggaggtgactgcaaaagtccaggtgagaggcgatggagctagtgaggagtgccggaggcctggtgtattctgacggtgccaggacctgtgataggtgctgagagagatgaggaactgctcagatcaccagctgcttcaggttaccagcccacacctgtctgtctcacctctgacaaccttggtaaagaaaccaaggcttagagacctgctcacagtcgtttcgtgagggaatgcaacatctgggtctagggtccaaatctatctctgctgtgaagaggaactcatacaggagatctacatgattaccaattcttggccttgcagtggagatatttggagttcttacaacatggcagacattgacaacaaagaacagtctgaacttgatcaagatttggatgatgttgaagaagtagaagaagaggaaactggtgaagaaacaaaactcaaagcacgtcagctaactgttcagatgatgcaaaatcctcagattcttgcagcccttcaagaaagacttgatggtctggtagaaacaccaacaggatacattgaaagcctgcctagggtagttaaaagacgagtgaatgctctcaaaaacctgcaagttaaatgtgcacagatagaagccaaattctatgaggaagttcatgatcttgaaaggaagtatgctgttctctatcagcctctatttgataagcgatttgaaattattaatgcaatttatgaacctacggaagaagaatgtgaatggaaaccagatgaagaagatgagatttcggaggaattgaaagaaaaggccaagattgaagatgagaaaaaggatgaagaaaaagaagaccccaaaggaattcctgaattttggttaactgtttttaagaatgttgacttgctcagtgatatggttcaggaacacgatgaacctattctgaagcacttgaaagatattaaagtgaagttctcagatgctggccagcctatgagttttgtcttagaatttcactttgaacccaatgaatattttacaaatgaagtgctgacaaagacatacaggatgaggtcagaaccagatgattctgatcccttttcttttgatggaccagaaattatgggttgtacagggtgccagatagattggaaaaaaggaaagaatgtcactttgaaaactattaagaagaagcagaaacacaagggacgtgggacagttcgtactgtgactaaaacagtttccaatgactctttctttaacttttttgcccctcctgaagttcctgagagtggagatctggatgatgatgctgaagctatccttgctgcagacttcgaaattggtcactttttacgtgagcgtataatcccaagatcagtgttatattttactggagaagctattgaagatgatgatgatgattatgatgaagaaggtgaagaagcggatgaggaaggggaagaagaaggagatgaggaaaatgatccagactatgacccaaagaaggatcaaaacccagcagagtgcaagcagcagtgaagcaggatgtatgtggccttgaggataacctgcactgtaatagcctaaacacaactcttatttacttacagccttatgtttttgtattttcttggtagactaggtaatttttttttaaaggacaggaaactgatattttaaagaccaatttgttctacctagcattttaactagtttttctgccagctatgttgaatgcacaaattctgtcacgcatgttcattcattgctacataatttggttcttctggaatatttttatgtagctcttggagtacagctatgaaaattaacaactgttaaaggaaataccttttttttttttttgtaattttttccttgaagaaccaaagtattttttcagctggttgttgaatagggttaagtccgcttggattagctgtgcctttcattactttgttacagaaatgcagtgacttatactaagacaatttattgtttaaaaaaaaaattggcaagacaactatatggttaagaatttccagtatgaccacacccaataactgttattagagtgttaatggattattgtgttttaggtgacatagttaactgtaaagtaacctgactcagtatagttactggtaccacagtgaggtgaataaaacgggattttcagaagttagcctgaatttaactgtatttttaaatttaacctccattaactaagcatcttttctttgtggtagggtctaccttctgcttccctggaaaggatgaatttacatcatttgacaagcctattttcaagttatttgttgtttgtttgcttgtttttgtttttgcagctaaaataaaaatttcaaatacaattttagttcttacaagataatgtcttaattttgtaccaattcaggtagaagtagaggcctaccttgaattaagggttatactcagtttttaacacattgttgaagaaaaggtaccagctttggaacgagatgctatactaataagcaagtgtaaaaaaaaaaaaaaaaagaggaagaaaatcttaagtgattgatgctgttttcttttaaaaaaaaaaaaaaaaaattcattttctttgggttagagctagagagaaggccccaagcttctatggtttcttctaattcttattgcttaaagtatgagtatgtcacttacccgtgcttctgtttactgtgtaattaaaatgggtagtactgtttacctaactacctcatggatgtgttaaggcatattgagttaaatctcatataatgtttctcaatcttgttaaaagctcaaaattttgggcctatttgtaatgccagtgtgacactaagcattttgttcacaccacgctttgataactaaactggaaaacaaaggtgttaagtacctctgttctggatctgggcagtcagcactctttttagatctttgtgtggctcctatttttatagaagtggagggatgcactatttcacaaggtccaagatttgttttcagatatttttgatgactgtattgtaaatactacagggatagcactatagtattgtagtcatgagacttaaagtggaaataagactatttttgacaaaagatgccattaaatttcagactgtagagccacatttacaatacctcaggctaattactgttaattttggggttgaacttttttttgacagtgagggtggattattggattgtcattagaggaaggtctagatttcctgctcttaataaaattacattgaattgatttttagaggtaatgaaaacttcctttctgagaagttagtgttaaggtcttggaatgtgaacacattgtttgtagtgctatccattcctctcctgagattttaacttactactggaaatccttaaccaattataatagctttttttctttattttcaaaatgatttcctttgctttgattagacactatgtgctttttttttttaaccatagttcatcgaaatgcagctttttctgaacttcaaagatagaatcccatttttaatgaactgaagtagcaaaatcatctttttcattctttaggaaatagctattgccaaagtgaaggtgtagataatacctagtcttgttacataaaggggatgtggtttgcagaagaattttctttataaaattgaagttttaagggacgtcagtgtttatgccatttttccagttccaaaatgattccattccattctagaaatttgaagtatgtaacctgaaatccttaataaaatttggatttaat

SEQ ID NO: 328084 - DNA, 6165 bp, Homo sapiens
gtggaagtgaggaagagggagagctcctgggcaccagaatgaatggggagggtcctttaggcactgtgaggcctttagcttttactcctactgagactggacatcgcaggagagtttcagagcagagaagtgctatgactgctcttgaagtttaagaggaccaggtggctggctttgctgtgtgtcagagaacaggagcagaaacagggagaccagctgggaggtgactgcaaaagtccaggtgagaggcgatggagctagtgaggagtgccggaggcctggtgtattctgacggtgccaggacctgtgataggtgctgagagagatgaggaactgctcagatcaccagctgcttcaggttaccagcccacacctgtctgtctcacctctgacaaccttggtaaagaaaccaaggcttagagacctgctcacagtcgtttcgtgagggaatgcaacatctgggtctagggtccaaatctatctctgctgtgaagaggaactcatacaggagatctacatgattaccaattcttggccttgcagtggagatatttggagttcttacaacatggcagacattgacaacaaagaacagtctgaacttgatcaagatttggatgatgttgaagaagtagaagaagaggaaactggtgaagaaacaaaactcaaagcacgtcagctaactgttcagatgatgcaaaatcctcagattcttgcagcccttcaagaaagacttgatggtctggtagaaacaccaacaggatacattgaaagcctgcctagggtagttaaaagacgagtgaatgctctcaaaaacctgcaagttaaatgtgcacagatagaagccaaattctatgaggaagttcatgatcttgaaaggaagtatgctgttctctatcagcctctatttgataagcgatttgaaattattaatgcaatttatgaacctacggaagaagaatgtgaatggaaaccagatgaagaagatgagatttcggaggaattgaaagaaaaggccaagattgaagatgagaaaaaggatgaagaaaaagaagaccccaaaggaattcctgaattttggttaactgtttttaagaatgttgacttgctcagtgatatggttcaggaacacgatgaacctattctgaagcacttgaaagatattaaagtgaagttctcagatgctggccagcctatgagttttgtcttagaatttcactttgaacccaatgaatattttacaaatgaagtgctgacaaagacatacaggatgaggtcagaaccagatgattctgatcccttttcttttgatggaccagaaattatgggttgtacagggtgccagatagattggaaaaaaggaaagaatgtcactttgaaaactattaagaagaagcagaaacacaagggacgtgggacagttcgtactgtgactaaaacagtttccaatgactctttctttaacttttttgcccctcctgaagttcctgagagtggagatctggatgatgatgctgaagctatccttgctgcagacttcgaaattggtcactttttacgtgagcgtataatcccaagatcagtgttatattttactggagaagctattgaagatgatgatgatgattatgatgaagaaggtgaagaagcggatgaggaaggggaagaagaaggagatgaggaaaatgatccagactatgacccaaaggtgagcaaaattagtgctgctttctattaaatttaagatagctaaagtaagagttggtgtttttgaatatcaagtttctctccgttaaagtctttaataaataaagcctattgactggataactttgttttttcagtcccactggcattgtgaacagtacacataatttcagtggacgtttttctaaaaaacattgttttttgtttggacttcgtgctttttatagtttcaggtacagtgaaccctaggattctattttaatgggacgatttgtaacagtttttaagcattagaaaataaaggtttttaaaagatctggttgtaggagtgttcgggaactggggagcagtgcagtttgttagatccttccaactactcttactcagtccctgagagtcctagtctattattcctgagaatttgttatattaggattagcaaaaacaaagctgattggtaatataactaacataaattgcttggtaactttatttttttaagattatggtttagcgtgtgtcacattttatggagttaattctacagtgtaaagtttgagcttgattttagcatttcagtgacttgctaataaaataaataatttaccaccattgtcctataccatttcttttgacaacagtgagctactgttataattaaggcagtaattactattgagaaattcactgaagcaggtagaagaagatagattgacttgttgttttcctttaacagaaggatcaaaacccagcagagtgcaagcagcagtgaagcaggatgtatgtggccttgaggataacctgcactgtaatagcctaaacacaactcttatttacttacagccttatgtttttgtattttcttggtagactaggtaatttttttttaaaggacaggaaactgatattttaaagaccaatttgttctacctagcattttaactagtttttctgccagctatgttgaatgcacaaattctgtcacgcatgttcattcattgctacataatttggttcttctggaatatttttatgtagctcttggagtacagctatgaaaattaacaactgttaaaggaaataccttttttttttttttgtaattttttccttgaagaaccaaagtattttttcagctggttgttgaatagggttaagtccgcttggattagctgtgcctttcattactttgttacagaaatgcagtgacttatactaagacaatttattgtttaaaaaaaaaattggcaagacaactatatggttaagaatttccagtatgaccacacccaataactgttattagagtgttaatggattattgtgttttaggtgacatagttaactgtaaagtaacctgactcagtatagttactggtaccacagtgaggtgaataaaacgggattttcagaagttagcctgaatttaactgtatttttaaatttaacctccattaactaagcatcttttctttgtggtagggtctaccttctgcttccctggaaaggatgaatttacatcatttgacaagcctattttcaagttatttgttgtttgtttgcttgtttttgtttttgcagctaaaataaaaatttcaaatacaattttagttcttacaagataatgtcttaattttgtaccaattcaggtagaagtagaggcctaccttgaattaagggttatactcagtttttaacacattgttgaagaaaaggtaccagctttggaacgagatgctatactaataagcaagtgtaaaaaaaaaaaaaaaaagaggaagaaaatcttaagtgattgatgctgttttcttttaaaaaaaaaaaaaaaaaattcattttctttgggttagagctagagagaaggccccaagcttctatggtttcttctaattcttattgcttaaagtatgagtatgtcacttacccgtgcttctgtttactgtgtaattaaaatgggtagtactgtttacctaactacctcatggatgtgttaaggcatattgagttaaatctcatataatgtttctcaatcttgttaaaagctcaaaattttgggcctatttgtaatgccagtgtgacactaagcattttgttcacaccacgctttgataactaaactggaaaacaaaggtgttaagtacctctgttctggatctgggcagtcagcactctttttagatctttgtgtggctcctatttttatagaagtggagggatgcactatttcacaaggtccaagatttgttttcagatatttttgatgactgtattgtaaatactacagggatagcactatagtattgtagtcatgagacttaaagtggaaataagactatttttgacaaaagatgccattaaatttcagactgtagagccacatttacaatacctcaggctaattactgttaattttggggttgaacttttttttgacagtgagggtggattattggattgtcattagaggaaggtctagatttcctgctcttaataaaattacattgaattgatttttagaggtaatgaaaacttcctttctgagaagttagtgttaaggtcttggaatgtgaacacattgtttgtagtgctatccattcctctcctgagattttaacttactactggaaatccttaaccaattataatagctttttttctttattttcaaaatgatttcctttgctttgattagacactatgtgctttttttttttaaccatagttcatcgaaatgcagctttttctgaacttcaaagatagaatcccatttttaatgaactgaagtagcaaaatcatctttttcattctttaggaaatagctattgccaaagtgaaggtgtagataatacctagtcttgttacataaaggggatgtggtttgcagaagaattttctttataaaattgaagttttaagggacgtcagtgtttatgccatttttccagttccaaaatgattccattccattctagaaatttgaagtatgtaacctgaaatccttaataaaatttggatttaattttataaaatgtactggtgatattttgggtgtttttttttaaatgaatgtatatactttttttttgaagagtggagagtagtgatgtctagagggagctattttgtgctgaggccactatgttctgtaaatatataattttaagagcaacctcacaatccctgctaagtggagtttattatttgaagactaaaatggaattccatagttcctgataggttatattctgagttattattctgagttatctacaaacatttttgagatttgtctttacactctgattgtagtttccagcagcccacgcacactgccaagtaagtctcattttttcctgttagaaatggtgaaatatcatataatcacttataaagaaaactgatatgaaaaaattttagagttgtttgctttatggtcactcaagtagggtaagtgttccacaaattccacaagttgatagtttaacatggatgtctgaaagccacatatataatttcttaggattcttaaattagtaaatctagcttactgaagcagtattagcatcactattttagattgcaaaaataccttaattgtgtggaactggcttgtagagtggtacttaagaaaaatgggattctacctctatttctgttttagcacacttaatcaggaaaggatatattaactttcataaaaatatttttgttgtgtgaataggttaatgatatggtaaggcccctaaaataactgaattaattgtttattgtaattgtaggccattcccattattaaaaataaagacaaaacttgaagtaactgaaaatcttatcgtgctatgtagaaatattgaactaatattcaaatatttgaatgctttggtttcagggattggtttaaaattggagtccttttttatgggttagtcttacaaaaatttaagcctttatatttttgactttaaatcaaaacaaatgttattttaaatgtacagaatagattggtagtgcagaagagtgtaagttcttcataggagctttagaaaagagaaatatgtgctaattcagtttttttttaatctgcactgtacatatatacttggtaattatgagcttgattttgtttttggaaatatgtgttcataatttaggtaatttgctacttaaagcactaagtctctgatacctgaaaagtacatgtaaatggtgatggtgaaataatactgcagttaacttaatagatgtatactggtgatttttgtatgctggattaaaactccagatattaaaatataacctggataaaaagccaagttcttggactgattgaggatcacttacatgactttacagaaatggaaacatccttgttggtatatgaaattattttactcaaggataagtattcataagaaattttgattgatgtatattttcaaaaatacagtatgctttgta

SEQ ID NO: 328085 - DNA, 6670 bp, Homo sapiens
gtggaagtgaggaagagggagagctcctgggcaccagaatgaatggggagggtcctttaggcactgtgaggcctttagcttttactcctactgagactggacatcgcaggagagtttcagagcagagaagtgctatgactgctcttgaagtttaagaggaccaggtggctggctttgctgtgtgtcagagaacaggagcagaaacagggagaccagctgggaggtgactgcaaaagtccaggtgagaggcgatggagctagtgaggagtgccggaggcctggtgtattctgacggtgccaggacctgtgataggtgctgagagagatgaggaactgctcagatcaccagctgcttcaggttaccagcccacacctgtctgtctcacctctgacaaccttggtaaagaaaccaaggcttagagacctgctcacagtcgtttcgtgagggaatgcaacatctgggtctagggtccaaatctatctctgctgtgaagaggaactcatacaggagatctacatgattaccaattcttggccttgcagtggagatatttggagttcttacaacatggcagacattgacaacaaagaacagtctgaacttgatcaagatttggatgatgttgaagaagtagaagaagaggaaactggtgaagaaacaaaactcaaagcacgtcagctaactgttcagatgatgcaaaatcctcagattcttgcagcccttcaagaaagacttgatggtctggtagaaacaccaacaggatacattgaaagcctgcctagggtagttaaaagacgagtgaatgctctcaaaaacctgcaagttaaatgtgcacagatagaagccaaattctatgaggaagttcatgatcttgaaaggaagtatgctgttctctatcagcctctatttgataagcgatttgaaattattaatgcaatttatgaacctacggaagaagaatgtgaatggaaaccagatgaagaagatgagatttcggaggaattgaaagaaaaggccaagattgaagatgagaaaaaggatgaagaaaaagaagaccccaaaggaattcctgaattttggttaactgtttttaagaatgttgacttgctcagtgatatggttcaggaacacgatgaacctattctgaagcacttgaaagatattaaagtgaagttctcagatgctggccagcctatgagttttgtcttagaatttcactttgaacccaatgaatattttacaaatgaagtgctgacaaagacatacaggatgaggtcagaaccagatgattctgatcccttttcttttgatggaccagaaattatgggttgtacagggtgccagatagattggaaaaaaggaaagaatgtcactttgaaaactattaagaagaagcagaaacacaagggacgtgggacagttcgtactgtgactaaaacagtttccaatgactctttctttaacttttttgcccctcctgaagttcctgagagtggagatctggatgatgatgctgaagctatccttgctgcagacttcgaaattggtcactttttacgtgagcgtataatcccaagatcagtgttatattttactggagaagctattgaagatgatgatgatgattatgatgaagaaggtgaagaagcggatgaggtaatgtttaccaaatgagcaaataattctctgtggttaacacattgagaagcaaattgaatgacttatgtattcctttgctataatcattctgtgatttgggataaaaacattttggaaaacatgattttagaattctacagccaaacaatgtatgtataaggtttcaataaataaattgcaaaactcagcaacatttttttatttcaaataattttgttctgctgcagggttatcagctctttgaagaagtcaaaagctgcagtaaacttttccaacgttggctgcagtaactattttcaataaaagctgtctggatgtctcaagttgtgttgggaaatttttcatattagaagctttcaaattaaattgtattatcatcaaagtctgtaatcatgaaaatctgttgatccgtagagtaacttgtattaaattttccctacattatgagccagtttacctactatgtacatacttcatggatgcattttgaactttaatataggaaggggaagaagaaggagatgaggaaaatgatccagactatgacccaaaggtgagcaaaattagtgctgctttctattaaatttaagatagctaaagtaagagttggtgtttttgaatatcaagtttctctccgttaaagtctttaataaataaagcctattgactggataactttgttttttcagtcccactggcattgtgaacagtacacataatttcagtggacgtttttctaaaaaacattgttttttgtttggacttcgtgctttttatagtttcaggtacagtgaaccctaggattctattttaatgggacgatttgtaacagtttttaagcattagaaaataaaggtttttaaaagatctggttgtaggagtgttcgggaactggggagcagtgcagtttgttagatccttccaactactcttactcagtccctgagagtcctagtctattattcctgagaatttgttatattaggattagcaaaaacaaagctgattggtaatataactaacataaattgcttggtaactttatttttttaagattatggtttagcgtgtgtcacattttatggagttaattctacagtgtaaagtttgagcttgattttagcatttcagtgacttgctaataaaataaataatttaccaccattgtcctataccatttcttttgacaacagtgagctactgttataattaaggcagtaattactattgagaaattcactgaagcaggtagaagaagatagattgacttgttgttttcctttaacagaaggatcaaaacccagcagagtgcaagcagcagtgaagcaggatgtatgtggccttgaggataacctgcactgtaatagcctaaacacaactcttatttacttacagccttatgtttttgtattttcttggtagactaggtaatttttttttaaaggacaggaaactgatattttaaagaccaatttgttctacctagcattttaactagtttttctgccagctatgttgaatgcacaaattctgtcacgcatgttcattcattgctacataatttggttcttctggaatatttttatgtagctcttggagtacagctatgaaaattaacaactgttaaaggaaataccttttttttttttttgtaattttttccttgaagaaccaaagtattttttcagctggttgttgaatagggttaagtccgcttggattagctgtgcctttcattactttgttacagaaatgcagtgacttatactaagacaatttattgtttaaaaaaaaaattggcaagacaactatatggttaagaatttccagtatgaccacacccaataactgttattagagtgttaatggattattgtgttttaggtgacatagttaactgtaaagtaacctgactcagtatagttactggtaccacagtgaggtgaataaaacgggattttcagaagttagcctgaatttaactgtatttttaaatttaacctccattaactaagcatcttttctttgtggtagggtctaccttctgcttccctggaaaggatgaatttacatcatttgacaagcctattttcaagttatttgttgtttgtttgcttgtttttgtttttgcagctaaaataaaaatttcaaatacaattttagttcttacaagataatgtcttaattttgtaccaattcaggtagaagtagaggcctaccttgaattaagggttatactcagtttttaacacattgttgaagaaaaggtaccagctttggaacgagatgctatactaataagcaagtgtaaaaaaaaaaaaaaaaagaggaagaaaatcttaagtgattgatgctgttttcttttaaaaaaaaaaaaaaaaaattcattttctttgggttagagctagagagaaggccccaagcttctatggtttcttctaattcttattgcttaaagtatgagtatgtcacttacccgtgcttctgtttactgtgtaattaaaatgggtagtactgtttacctaactacctcatggatgtgttaaggcatattgagttaaatctcatataatgtttctcaatcttgttaaaagctcaaaattttgggcctatttgtaatgccagtgtgacactaagcattttgttcacaccacgctttgataactaaactggaaaacaaaggtgttaagtacctctgttctggatctgggcagtcagcactctttttagatctttgtgtggctcctatttttatagaagtggagggatgcactatttcacaaggtccaagatttgttttcagatatttttgatgactgtattgtaaatactacagggatagcactatagtattgtagtcatgagacttaaagtggaaataagactatttttgacaaaagatgccattaaatttcagactgtagagccacatttacaatacctcaggctaattactgttaattttggggttgaacttttttttgacagtgagggtggattattggattgtcattagaggaaggtctagatttcctgctcttaataaaattacattgaattgatttttagaggtaatgaaaacttcctttctgagaagttagtgttaaggtcttggaatgtgaacacattgtttgtagtgctatccattcctctcctgagattttaacttactactggaaatccttaaccaattataatagctttttttctttattttcaaaatgatttcctttgctttgattagacactatgtgctttttttttttaaccatagttcatcgaaatgcagctttttctgaacttcaaagatagaatcccatttttaatgaactgaagtagcaaaatcatctttttcattctttaggaaatagctattgccaaagtgaaggtgtagataatacctagtcttgttacataaaggggatgtggtttgcagaagaattttctttataaaattgaagttttaagggacgtcagtgtttatgccatttttccagttccaaaatgattccattccattctagaaatttgaagtatgtaacctgaaatccttaataaaatttggatttaattttataaaatgtactggtgatattttgggtgtttttttttaaatgaatgtatatactttttttttgaagagtggagagtagtgatgtctagagggagctattttgtgctgaggccactatgttctgtaaatatataattttaagagcaacctcacaatccctgctaagtggagtttattatttgaagactaaaatggaattccatagttcctgataggttatattctgagttattattctgagttatctacaaacatttttgagatttgtctttacactctgattgtagtttccagcagcccacgcacactgccaagtaagtctcattttttcctgttagaaatggtgaaatatcatataatcacttataaagaaaactgatatgaaaaaattttagagttgtttgctttatggtcactcaagtagggtaagtgttccacaaattccacaagttgatagtttaacatggatgtctgaaagccacatatataatttcttaggattcttaaattagtaaatctagcttactgaagcagtattagcatcactattttagattgcaaaaataccttaattgtgtggaactggcttgtagagtggtacttaagaaaaatgggattctacctctatttctgttttagcacacttaatcaggaaaggatatattaactttcataaaaatatttttgttgtgtgaataggttaatgatatggtaaggcccctaaaataactgaattaattgtttattgtaattgtaggccattcccattattaaaaataaagacaaaacttgaagtaactgaaaatcttatcgtgctatgtagaaatattgaactaatattcaaatatttgaatgctttggtttcagggattggtttaaaattggagtccttttttatgggttagtcttacaaaaatttaagcctttatatttttgactttaaatcaaaacaaatgttattttaaatgtacagaatagattggtagtgcagaagagtgtaagttcttcataggagctttagaaaagagaaatatgtgctaattcagtttttttttaatctgcactgtacatatatacttggtaattatgagcttgattttgtttttggaaatatgtgttcataatttaggtaatttgctacttaaagcactaagtctctgatacctgaaaagtacatgtaaatggtgatggtgaaataatactgcagttaacttaatagatgtatactggtgatttttgtatgctggattaaaactccagatattaaaatataacctggataaaaagccaagttcttggactgattgaggatcacttacatgactttacagaaatggaaacatccttgttggtatatgaaattattttactcaaggataagtattcataagaaattttgattgatgtatattttcaaaaatacagtatgctttgta

SEQ ID NO: 328086 - DNA, 6440 bp, Homo sapiens
gtggaagtgaggaagagggagagctcctgggcaccagaatgaatggggagggtcctttaggcactgtgaggcctttagcttttactcctactgagactggacatcgcaggagagtttcagagcagagaagtgctatgactgctcttgaagtttaagaggaccaggtggctggctttgctgtgtgtcagagaacaggagcagaaacagggagaccagctgggaggtgactgcaaaagtccaggtgagaggcgatggagctagtgaggagtgccggaggcctggtgtattctgacggtgccaggacctgtgataggtgctgagagagatgaggaactgctcagatcaccagctgcttcaggttaccagcccacacctgtctgtctcacctctgacaaccttggtaaagaaaccaaggcttagagacctgctcacagtcgtttcgtgagggaatgcaacatctgggtctagggtccaaatctatctctgctgtgaagaggaactcatacaggagatctacatgattaccaattcttggccttgcagtggagatatttggagttcttacaacatggcagacattgacaacaaagaacagtctgaacttgatcaagatttggatgatgttgaagaagtagaagaagaggaaactggtgaagaaacaaaactcaaagcacgtcagctaactgttcagatgatgcaaaatcctcagattcttgcagcccttcaagaaagacttgatggtctggtagaaacaccaacaggatacattgaaagcctgcctagggtagttaaaagacgagtgaatgctctcaaaaacctgcaagttaaatgtgcacagatagaagccaaattctatgaggaagttcatgatcttgaaaggaagtatgctgttctctatcagcctctatttgataagcgatttgaaattattaatgcaatttatgaacctacggaagaagaatgtgaatggaaaccagatgaagaagatgagatttcggaggaattgaaagaaaaggccaagattgaagatgagaaaaaggatgaagaaaaagaagaccccaaaggaattcctgaattttggttaactgtttttaagaatgttgacttgctcagtgatatggttcaggaacacgatgaacctattctgaagcacttgaaagatattaaagtgaagttctcagatgctggccagcctatgagttttgtcttagaatttcactttgaacccaatgaatattttacaaatgaagtgctgacaaagacatacaggatgaggtcagaaccagatgattctgatcccttttcttttgatggaccagaaattatgggttgtacagggtgccagatagattggaaaaaaggaaagaatgtcactttgaaaactattaagaagaagcagaaacacaagggacgtgggacagttcgtactgtgactaaaacagtttccaatgactctttctttaacttttttgcccctcctgaagttcctgagagtggagatctggatgatgatgctgaagctatccttgctgcagacttcgaaattggtcactttttacgtgagcgtataatcccaagatcagtgttatattttactggagaagctattgaagatgatgatgatgattatgatgaagaaggtgaagaagcggatgagggttatcagctctttgaagaagtcaaaagctgcagtaaacttttccaacgttggctgcagtaactattttcaataaaagctgtctggatgtctcaagttgtgttgggaaatttttcatattagaagctttcaaattaaattgtattatcatcaaagtctgtaatcatgaaaatctgttgatccgtagagtaacttgtattaaattttccctacattatgagccagtttacctactatgtacatacttcatggatgcattttgaactttaatataggaaggggaagaagaaggagatgaggaaaatgatccagactatgacccaaaggtgagcaaaattagtgctgctttctattaaatttaagatagctaaagtaagagttggtgtttttgaatatcaagtttctctccgttaaagtctttaataaataaagcctattgactggataactttgttttttcagtcccactggcattgtgaacagtacacataatttcagtggacgtttttctaaaaaacattgttttttgtttggacttcgtgctttttatagtttcaggtacagtgaaccctaggattctattttaatgggacgatttgtaacagtttttaagcattagaaaataaaggtttttaaaagatctggttgtaggagtgttcgggaactggggagcagtgcagtttgttagatccttccaactactcttactcagtccctgagagtcctagtctattattcctgagaatttgttatattaggattagcaaaaacaaagctgattggtaatataactaacataaattgcttggtaactttatttttttaagattatggtttagcgtgtgtcacattttatggagttaattctacagtgtaaagtttgagcttgattttagcatttcagtgacttgctaataaaataaataatttaccaccattgtcctataccatttcttttgacaacagtgagctactgttataattaaggcagtaattactattgagaaattcactgaagcaggtagaagaagatagattgacttgttgttttcctttaacagaaggatcaaaacccagcagagtgcaagcagcagtgaagcaggatgtatgtggccttgaggataacctgcactgtaatagcctaaacacaactcttatttacttacagccttatgtttttgtattttcttggtagactaggtaatttttttttaaaggacaggaaactgatattttaaagaccaatttgttctacctagcattttaactagtttttctgccagctatgttgaatgcacaaattctgtcacgcatgttcattcattgctacataatttggttcttctggaatatttttatgtagctcttggagtacagctatgaaaattaacaactgttaaaggaaataccttttttttttttttgtaattttttccttgaagaaccaaagtattttttcagctggttgttgaatagggttaagtccgcttggattagctgtgcctttcattactttgttacagaaatgcagtgacttatactaagacaatttattgtttaaaaaaaaaattggcaagacaactatatggttaagaatttccagtatgaccacacccaataactgttattagagtgttaatggattattgtgttttaggtgacatagttaactgtaaagtaacctgactcagtatagttactggtaccacagtgaggtgaataaaacgggattttcagaagttagcctgaatttaactgtatttttaaatttaacctccattaactaagcatcttttctttgtggtagggtctaccttctgcttccctggaaaggatgaatttacatcatttgacaagcctattttcaagttatttgttgtttgtttgcttgtttttgtttttgcagctaaaataaaaatttcaaatacaattttagttcttacaagataatgtcttaattttgtaccaattcaggtagaagtagaggcctaccttgaattaagggttatactcagtttttaacacattgttgaagaaaaggtaccagctttggaacgagatgctatactaataagcaagtgtaaaaaaaaaaaaaaaaagaggaagaaaatcttaagtgattgatgctgttttcttttaaaaaaaaaaaaaaaaaattcattttctttgggttagagctagagagaaggccccaagcttctatggtttcttctaattcttattgcttaaagtatgagtatgtcacttacccgtgcttctgtttactgtgtaattaaaatgggtagtactgtttacctaactacctcatggatgtgttaaggcatattgagttaaatctcatataatgtttctcaatcttgttaaaagctcaaaattttgggcctatttgtaatgccagtgtgacactaagcattttgttcacaccacgctttgataactaaactggaaaacaaaggtgttaagtacctctgttctggatctgggcagtcagcactctttttagatctttgtgtggctcctatttttatagaagtggagggatgcactatttcacaaggtccaagatttgttttcagatatttttgatgactgtattgtaaatactacagggatagcactatagtattgtagtcatgagacttaaagtggaaataagactatttttgacaaaagatgccattaaatttcagactgtagagccacatttacaatacctcaggctaattactgttaattttggggttgaacttttttttgacagtgagggtggattattggattgtcattagaggaaggtctagatttcctgctcttaataaaattacattgaattgatttttagaggtaatgaaaacttcctttctgagaagttagtgttaaggtcttggaatgtgaacacattgtttgtagtgctatccattcctctcctgagattttaacttactactggaaatccttaaccaattataatagctttttttctttattttcaaaatgatttcctttgctttgattagacactatgtgctttttttttttaaccatagttcatcgaaatgcagctttttctgaacttcaaagatagaatcccatttttaatgaactgaagtagcaaaatcatctttttcattctttaggaaatagctattgccaaagtgaaggtgtagataatacctagtcttgttacataaaggggatgtggtttgcagaagaattttctttataaaattgaagttttaagggacgtcagtgtttatgccatttttccagttccaaaatgattccattccattctagaaatttgaagtatgtaacctgaaatccttaataaaatttggatttaattttataaaatgtactggtgatattttgggtgtttttttttaaatgaatgtatatactttttttttgaagagtggagagtagtgatgtctagagggagctattttgtgctgaggccactatgttctgtaaatatataattttaagagcaacctcacaatccctgctaagtggagtttattatttgaagactaaaatggaattccatagttcctgataggttatattctgagttattattctgagttatctacaaacatttttgagatttgtctttacactctgattgtagtttccagcagcccacgcacactgccaagtaagtctcattttttcctgttagaaatggtgaaatatcatataatcacttataaagaaaactgatatgaaaaaattttagagttgtttgctttatggtcactcaagtagggtaagtgttccacaaattccacaagttgatagtttaacatggatgtctgaaagccacatatataatttcttaggattcttaaattagtaaatctagcttactgaagcagtattagcatcactattttagattgcaaaaataccttaattgtgtggaactggcttgtagagtggtacttaagaaaaatgggattctacctctatttctgttttagcacacttaatcaggaaaggatatattaactttcataaaaatatttttgttgtgtgaataggttaatgatatggtaaggcccctaaaataactgaattaattgtttattgtaattgtaggccattcccattattaaaaataaagacaaaacttgaagtaactgaaaatcttatcgtgctatgtagaaatattgaactaatattcaaatatttgaatgctttggtttcagggattggtttaaaattggagtccttttttatgggttagtcttacaaaaatttaagcctttatatttttgactttaaatcaaaacaaatgttattttaaatgtacagaatagattggtagtgcagaagagtgtaagttcttcataggagctttagaaaagagaaatatgtgctaattcagtttttttttaatctgcactgtacatatatacttggtaattatgagcttgattttgtttttggaaatatgtgttcataatttaggtaatttgctacttaaagcactaagtctctgatacctgaaaagtacatgtaaatggtgatggtgaaataatactgcagttaacttaatagatgtatactggtgatttttgtatgctggattaaaactccagatattaaaatataacctggataaaaagccaagttcttggactgattgaggatcacttacatgactttacagaaatggaaacatccttgttggtatatgaaattattttactcaaggataagtattcataagaaattttgattgatgtatattttcaaaaatacagtatgctttgta

SEQ ID NO: 328087 - DNA, 3282 bp, Homo sapiens
gtggaagtgaggaagagggagagctcctgggcaccagaatgaatggggagggtcctttaggcactgtgaggcctttagcttttactcctactgagactggacatcgcaggagagtttcagagcagagaagtgctatgactgctcttgaagtttaagaggaccaggtggctggctttgctgtgtgtcagagaacaggagcagaaacagggagaccagctgggaggtgactgcaaaagtccaggtgagaggcgatggagctagtgaggagtgccggaggcctggtgtattctgacggtgccaggacctgtgataggtgctgagagagatgaggaactgctcagatcaccagctgcttcaggttaccagcccacacctgtctgtctcacctctgacaaccttggtaaagaaaccaaggcttagagacctgctcacagtcgtttcgtgagggaatgcaacatctgggtctagggtccaaatctatctctgctgtgaagaggaactcatacaggagatctacatgattaccaattcttggccttgcagtggagatatttggagttcttacaacatggcagacattgacaacaaagaacagtctgaacttgatcaagatttggatgatgttgaagaagtagaagaagaggaaactggtgaagaaacaaaactcaaagcacgtcagctaactgttcagatgatgcaaaatcctcagattcttgcagcccttcaagaaagacttgatggtctggtagaaacaccaacaggatacattgaaagcctgcctagggtagttaaaagacgagtgaatgctctcaaaaacctgcaagttaaatgtgcacagatagaagccaaattctatgaggaagttcatgatcttgaaaggaagtatgctgttctctatcagcctctatttgataagcgatttgaaattattaatgcaatttatgaacctacggaagaagaatgtgaatggaaaccagatgaagaagatgagatttcggaggaattgaaagaaaaggccaagattgaagatgagaaaaaggatgaagaaaaagaagaccccaaaggaattcctgaattttggttaactgtttttaagaatgttgacttgctcagtgatatggttcaggaacacgatgaacctattctgaagcacttgaaagatattaaagtgaagttctcagatgctggccagcctatgagttttgtcttagaatttcactttgaacccaatgaatattttacaaatgaagtgctgacaaagacatacaggatgaggtcagaaccagatgattctgatcccttttcttttgatggaccagaaattatgggttgtacagggtgccagatagattggaaaaaaggaaagaatgtcactttgaaaactattaagaagaagcagaaacacaagggacgtgggacagttcgtactgtgactaaaacagtttccaatgactctttctttaacttttttgcccctcctgaagttcctgagagtggagatctggatgatgatgctgaagctatccttgctgcagacttcgaaattggtcactttttacgtgagcgtataatcccaagatcagtgttatattttactggagaagctattgaagatgatgatgatgattatgatgaagaaggtgaagaagcggatgaggaaggggaagaagaaggagatgaggaaaatgatccagactatgacccaaagaaggatcaaaacccagcagagtgcaagcagcagtgaagcaggatgtatgtggccttgaggataacctgcactgtaatagcctaaacacaactcttatttacttacagccttatgtttttgtattttcttggtagactaggtaatttttttttaaaggacaggaaactgatattttaaagaccaatttgttctacctagcattttaactagtttttctgccagctatgttgaatgcacaaattctgtcacgcatgttcattcattgctacataatttggttcttctggaatatttttatgtagctcttggagtacagctatgaaaattaacaactgttaaaggaaataccttttttttttttttgtaattttttccttgaagaaccaaagtattttttcagctggttgttgaatagggttaagtccgcttggattagctgtgcctttcattactttgttacagaaatgcagtgacttatactaagacaatttattgtttaaaaaaaaaattggcaagacaactatatggttaagaatttccagtatgaccacacccaataactgttattagagtgttaatggattattgtgttttaggtgacatagttaactgtaaagtaacctgactcagtatagttactggtaccacagtgaggtgaataaaacgggattttcagaagttagcctgaatttaactgtatttttaaatttaacctccattaactaagcatcttttctttgtggtagggtctaccttctgcttccctggaaaggatgaatttacatcatttgacaagcctattttcaagttatttgttgtttgtttgcttgtttttgtttttgcagctaaaataaaaatttcaaatacaattttagttcttacaagataatgtcttaattttgtaccaattcaggtagaagtagaggcctaccttgaattaagggttatactcagtttttaacacattgttgaagaaaaggtaccagctttggaacgagatgctatactaataagcaagtgtaaaaaaaaaaaaaaaaagaggaagaaaatcttaagtgattgatgctgttttcttttaaaaaaaaaaaaaaaaaattcattttctttgggttagagctagagagaaggccccaagcttctatggtttcttctaattcttattgcttaaagtatgagtatgtcacttacccgtgcttctgtttactgtgtaattaaaatgggtagtactgtttacctaactacctcatggatgtgttaaggcatattgagttaaatctcatataatgtttctcaatcttgttaaaagctcaaaattttgggcctatttgtaatgccagtgtgacactaagcattttgttcacaccacgctttgataactaaactggaaaacaaaggtgttaagtacctctgttctggatctgggcagtcagcactctttttagatctttgtgtggctcctatttttatagaagtggaggcctaccttgaattaagggttatactcagtttttaacacattgttgaagaaaaggtaccagctttggaacgagatgctatactaataagcaagtgta

SEQ ID NO: 328088 - DNA, 3540 bp, Homo sapiens
gtggaagtgaggaagagggagagctcctgggcaccagaatgaatggggagggtcctttaggcactgtgaggcctttagcttttactcctactgagactggacatcgcaggagagtttcagagcagagaagtgctatgactgctcttgaagtttaagaggaccaggtggctggctttgctgtgtgtcagagaacaggagcagaaacagggagaccagctgggaggtgactgcaaaagtccaggtgagaggcgatggagctagtgaggagtgccggaggcctggtgtattctgacggtgccaggacctgtgataggtgctgagagagatgaggaactgctcagatcaccagctgcttcaggttaccagcccacacctgtctgtctcacctctgacaaccttggtaaagaaaccaaggcttagagacctgctcacagtcgtttcgtgagggaatgcaacatctgggtctagggtccaaatctatctctgctgtgaagaggaactcatacaggagatctacatgattaccaattcttggccttgcagtggagatatttggagttcttacaacatggcagacattgacaacaaagaacagtctgaacttgatcaagatttggatgatgttgaagaagtagaagaagaggaaactggtgaagaaacaaaactcaaagcacgtcagctaactgttcagatgatgcaaaatcctcagattcttgcagcccttcaagaaagacttgatggtctggtagaaacaccaacaggatacattgaaagcctgcctagggtagttaaaagacgagtgaatgctctcaaaaacctgcaagttaaatgtgcacagatagaagccaaattctatgaggaagttcatgatcttgaaaggaagtatgctgttctctatcagcctctatttgataagcgatttgaaattattaatgcaatttatgaacctacggaagaagaatgtgaatggaaaccagatgaagaagatgagatttcggaggaattgaaagaaaaggccaagattgaagatgagaaaaaggatgaagaaaaagaagaccccaaaggaattcctgaattttggttaactgtttttaagaatgttgacttgctcagtgatatggttcaggaacacgatgaacctattctgaagcacttgaaagatattaaagtgaagttctcagatgctggccagcctatgagttttgtcttagaatttcactttgaacccaatgaatattttacaaatgaagtgctgacaaagacatacaggatgaggtcagaaccagatgattctgatcccttttcttttgatggaccagaaattatgggttgtacagggtgccagatagattggaaaaaaggaaagaatgtcactttgaaaactattaagaagaagcagaaacacaagggacgtgggacagttcgtactgtgactaaaacagtttccaatgactctttctttaacttttttgcccctcctgaagttcctgagagtggagatctggatgatgatgctgaagctatccttgctgcagacttcgaaattggtcactttttacgtgagcgtataatcccaagatcagtgttatattttactggagaagctattgaagatgatgatgatgattatgatgaagaaggtgaagaagcggatgaggaaggggaagaagaaggagatgaggaaaatgatccagactatgacccaaagaaggatcaaaacccagcagagtgcaagcagcagtgaagcaggatgtatgtggccttgaggataacctgcactgtaatagcctaaacacaactcttatttacttacagccttatgtttttgtattttcttggtagactaggtaatttttttttaaaggacaggaaactgatattttaaagaccaatttgttctacctagcattttaactagtttttctgccagctatgttgaatgcacaaattctgtcacgcatgttcattcattgctacataatttggttcttctggaatatttttatgtagctcttggagtacagctatgaaaattaacaactgttaaaggaaataccttttttttttttttgtaattttttccttgaagaaccaaagtattttttcagctggttgttgaatagggttaagtccgcttggattagctgtgcctttcattactttgttacagaaatgcagtgacttatactaagacaatttattgtttaaaaaaaaaattggcaagacaactatatggttaagaatttccagtatgaccacacccaataactgttattagagtgttaatggattattgtgttttaggtgacatagttaactgtaaagtaacctgactcagtatagttactggtaccacagtgaggtgaataaaacgggattttcagaagttagcctgaatttaactgtatttttaaatttaacctccattaactaagcatcttttctttgtggtagggtctaccttctgcttccctggaaaggatgaatttacatcatttgacaagcctattttcaagttatttgttgtttgtttgcttgtttttgtttttgcagctaaaataaaaatttcaaatacaattttagttcttacaagataatgtcttaattttgtaccaattcaggtagaagtagaggcctaccttgaattaagggttatactcagtttttaacacattgttgaagaaaaggtaccagctttggaacgagatgctatactaataagcaagtgtaaaaaaaaaaaaaaaaagaggaagaaaatcttaagtgattgatgctgttttcttttaaaaaaaaaaaaaaatcatagggggtcaagagcgctaagaagaaaaggcgcccaaaggcttctatgggtgttccttaataatactaatggggtaaaagagtttgagagcgtttgtgaccttatccccggggctgctatgggtcaccgggtgcgacttaacaatgggggtaacacgtggattaccccttaaaaatacacctcaagggacagtgatgattaagaggcgaatattgggagattataacacttctcattttaagggtgtttctccaaactcttgtgtacaacaagcctctaaagaatatttgggggcccatactaggggaagactgccccagcgtgttgtacacttaaagcaactattgtggtgttacagaccacaggggacttttgagcaatacagactaagccgtgtgggaaaaaaaccacaggggttgtcttaagtaatgccctctctgtgtatgaacggaggaataccggtggagaagataaggccacacccctttatacaagaactctcgggaggtgcgggccccccaaagttataaataaaaaacggggccgcggaaatcgccccaactataccaacacgggggccccacgaaaatggagagtcaccagaatactatgagcggcgacaccggggatggcgggaagacaccaacaacaggggggcaacgcccactgtgacgacccacggcgccacatgcaggacctacaggcacgacactcaagcacacatgtgggggacacag

SEQ ID NO: 328089 - DNA, 6670 bp, Homo sapiens; identical to SEQ ID NO: 328085

SEQ ID NO: 328090 - DNA, 5261 bp, Homo sapiens
gtggaagtgaggaagagggagagctcctgggcaccagaatgaatggggagggtcctttaggcactgtgaggcctttagcttttactcctactgagactggacatcgcaggagagtttcagagcagagaagtgctatgactgctcttgaagtttaagaggaccaggtggctggctttgctgtgtgtcagagaacaggagcagaaacagggagaccagctgggaggtgactgcaaaagtccaggtgagaggcgatggagctagtgaggagtgccggaggcctggtgtattctgacggtgccaggacctgtgataggtgctgagagagatgaggaactgctcagatcaccagctgcttcaggttaccagcccacacctgtctgtctcacctctgacaaccttggtaaagaaaccaaggcttagagacctgctcacagtcgtttcgtgagggaatgcaacatctgggtctagggtccaaatctatctctgctgtgaagaggaactcatacaggagatctacatgattaccaattcttggccttgcagtggagatatttggagttcttacaacatggcagacattgacaacaaagaacagtctgaacttgatcaagatttggatgatgttgaagaagtagaagaagaggaaactggtgaagaaacaaaactcaaagcacgtcagctaactgttcagatgatgcaaaatcctcagattcttgcagcccttcaagaaagacttgatggtctggtagaaacaccaacaggatacattgaaagcctgcctagggtagttaaaagacgagtgaatgctctcaaaaacctgcaagttaaatgtgcacagatagaagccaaattctatgaggaagttcatgatcttgaaaggaagtatgctgttctctatcagcctctatttgataagcgatttgaaattattaatgcaatttatgaacctacggaagaagaatgtgaatggaaaccagatgaagaagatgagatttcggaggaattgaaagaaaaggccaagattgaagatgagaaaaaggatgaagaaaaagaagaccccaaaggaattcctgaattttggttaactgtttttaagaatgttgacttgctcagtgatatggttcaggaacacgatgaacctattctgaagcacttgaaagatattaaagtgaagttctcagatgctggccagcctatgagttttgtcttagaatttcactttgaacccaatgaatattttacaaatgaagtgctgacaaagacatacaggatgaggtcagaaccagatgattctgatcccttttcttttgatggaccagaaattatgggttgtacagggtgccagatagattggaaaaaaggaaagaatgtcactttgaaaactattaagaagaagcagaaacacaagggacgtgggacagttcgtactgtgactaaaacagtttccaatgactctttctttaacttttttgcccctcctgaagttcctgagagtggagatctggatgatgatgctgaagctatccttgctgcagacttcgaaattggtcactttttacgtgagcgtataatcccaagatcagtgttatattttactggagaagctattgaagatgatgatgatgattatgatgaagaaggtgaagaagcggatgaggtaatgtttaccaaatgagcaaataattctctgtggttaacacattgagaagcaaattgaatgacttatgtattcctttgctataatcattctgtgatttgggataaaaacattttggaaaacatgattttagaattctacagccaaacaatgtatgtataaggtttcaataaataaattgcaaaactcagcaacatttttttatttcaaataattttgttctgctgcagggttatcagctctttgaagaagtcaaaagctgcagtaaacttttccaacgttggctgcagtaactattttcaataaaagctgtctggatgtctcaagttgtgttgggaaatttttcatattagaagctttcaaattaaattgtattatcatcaaagtctgtaatcatgaaaatctgttgatccgtagagtaacttgtattaaattttccctacattatgagccagtttacctactatgtacatacttcatggatgcattttgaactttaatataggaaggggaagaagaaggagatgaggaaaatgatccagactatgacccaaagaaggatcaaaacccagcagagtgcaagcagcagtgaagcaggatgtatgtggccttgaggataacctgcactggtctaccttctgcttccctggaaaggatgaatttacatcatttgacaagcctattttcaagttatttgttgtttgtttgcttgtttttgtttttgcagctaaaataaaaatttcaaatacaattttagttcttacaagataatgtcttaattttgtaccaattcaggtagaagtagaggcctaccttgaattaagggttatactcagtttttaacacattgttgaagaaaaggtaccagctttggaacgagatgctatactaataagcaagtgtaaaaaaaaaaaaaaaaagaggaagaaaatcttaagtgattgatgctgttttcttttaaaaaaaaaaaaaaaaaattcattttctttgggttagagctagagagaaggccccaagcttctatggtttcttctaattcttattgcttaaagtatgagtatgtcacttacccgtgcttctgtttactgtgtaattaaaatgggtagtactgtttacctaactacctcatggatgtgttaaggcatattgagttaaatctcatataatgtttctcaatcttgttaaaagctcaaaattttgggcctatttgtaatgccagtgtgacactaagcattttgttcacaccacgctttgataactaaactggaaaacaaaggtgttaagtacctctgttctggatctgggcagtcagcactctttttagatctttgtgtggctcctatttttatagaagtggagggatgcactatttcacaaggtccaagatttgttttcagatatttttgatgactgtattgtaaatactacagggatagcactatagtattgtagtcatgagacttaaagtggaaataagactatttttgacaaaagatgccattaaatttcagactgtagagccacatttacaatacctcaggctaattactgttaattttggggttgaacttttttttgacagtgagggtggattattggattgtcattagaggaaggtctagatttcctgctcttaataaaattacattgaattgatttttagaggtaatgaaaacttcctttctgagaagttagtgttaaggtcttggaatgtgaacacattgtttgtagtgctatccattcctctcctgagattttaacttactactggaaatccttaaccaattataatagctttttttctttattttcaaaatgatttcctttgctttgattagacactatgtgctttttttttttaaccatagttcatcgaaatgcagctttttctgaacttcaaagatagaatcccatttttaatgaactgaagtagcaaaatcatctttttcattctttaggaaatagctattgccaaagtgaaggtgtagataatacctagtcttgttacataaaggggatgtggtttgcagaagaattttctttataaaattgaagttttaagggacgtcagtgtttatgccatttttccagttccaaaatgattccattccattctagaaatttgaagtatgtaacctgaaatccttaataaaatttggatttaattttataaaatgtactggtgatattttgggtgtttttttttaaatgaatgtatatactttttttttgaagagtggagagtagtgatgtctagagggagctattttgtgctgaggccactatgttctgtaaatatataattttaagagcaacctcacaatccctgctaagtggagtttattatttgaagactaaaatggaattccatagttcctgataggttatattctgagttattattctgagttatctacaaacatttttgagatttgtctttacactctgattgtagtttccagcagcccacgcacactgccaagtaagtctcattttttcctgttagaaatggtgaaatatcatataatcacttataaagaaaactgatatgaaaaaattttagagttgtttgctttatggtcactcaagtagggtaagtgttccacaaattccacaagttgatagtttaacatggatgtctgaaagccacatatataatttcttaggattcttaaattagtaaatctagcttactgaagcagtattagcatcactattttagattgcaaaaataccttaattgtgtggaactggcttgtagagtggtacttaagaaaaatgggattctacctctatttctgttttagcacacttaatcaggaaaggatatattaactttcataaaaatatttttgttgtgtgaataggttaatgatatggtaaggcccctaaaataactgaattaattgtttattgtaattgtaggccattcccattattaaaaataaagacaaaacttgaagtaactgaaaatcttatcgtgctatgtagaaatattgaactaatattcaaatatttgaatgctttggtttcagggattggtttaaaattggagtccttttttatgggttagtcttacaaaaatttaagcctttatatttttgactttaaatcaaaacaaatgttattttaaatgtacagaatagattggtagtgcagaagagtgtaagttcttcataggagctttagaaaagagaaatatgtgctaattcagtttttttttaatctgcactgtacatatatacttggtaattatgagcttgattttgtttttggaaatatgtgttcataatttaggtaatttgctacttaaagcactaagtctctgatacctgaaaagtacatgtaaatggtgatggtgaaataatactgcagttaacttaatagatgtatactggtgatttttgtatgctggattaaaactccagatattaaaatataacctggataaaaagccaagttcttggactgattgaggatcacttacatgactttacagaaatggaaacatccttgttggtatatgaaattattttactcaaggataagtattcataagaaattttgattgatgtatattttcaaaaatacagtatgctttgta

SEQ ID NO: 328091 - DNA, 6650 bp, Homo sapiens
gtggaagtgaggaagagggagagctcctgggcaccagaatgaatggggagggtcctttaggcactgtgaggcctttagcttttactcctactgagactggacatcgcaggagagtttcagagcagagaagtgctatgactgctcttgaagtttaagaggaccaggtggctggctttgctgtgtgtcagagaacaggagcagaaacagggagaccagctgggaggtgactgcaaaagtccaggtgagaggcgatggagctagtgaggagtgccggaggcctggtgtattctgacggtgccaggacctgtgataggtgctgagagagatgaggaactgctcagatcaccagctgcttcaggttaccagcccacacctgtctgtctcacctctgacaaccttggtaaagaaaccaaggcttagagacctgctcacagtcgtttcgtgagggaatgcaacatctgggtctagggtccaaatctatctctgctgtgaagaggaactcatacaggagatctacatgattaccaattcttggccttgcagtggagatatttggagttcttacaacatggcagacattgacaacaaagaacagtctgaacttgatcaagatttggatgatgttgaagaagtagaagaagaggaaactggtgaagaaacaaaactcaaagcacgtcagctaactgttcagatgatgcaaaatcctcagattcttgcagcccttcaagaaagacttgatggtctggtagaaacaccaacaggatacattgaaagcctgcctagggtagttaaaagacgagtgaatgctctcaaaaacctgcaagttaaatgtgcacagatagaagccaaattctatgaggaagttcatgatcttgaaaggaagtatgctgttctctatcagcctctatttgataagcgatttgaaattattaatgcaatttatgaacctacggaagaagaatgtgaatggaaaccagatgaagaagatgagatttcggaggaattgaaagaaaaggccaagattgaagatgagaaaaaggatgaagaaaaagaagaccccaaaggaattcctgaattttggttaactgtttttaagaatgttgacttgctcagtgatatggttcaggaacacgatgaacctattctgaagcacttgaaagatattaaagtgaagttctcagatgctggccagcctatgagttttgtcttagaatttcactttgaacccaatgaatattttacaaatgaagtgctgacaaagacatacaggatgaggtcagaaccagatgattctgatcccttttcttttgatggaccagaaattatgggttgtacagggtgccagatagattggaaaaaaggaaagaatgtcactttgaaaactattaagaagaagcagaaacacaagggacgtgggacagttcgtactgtgactaaaacagtttccaatgactctttctttaacttttttgcccctcctgaaggatgatgatgctgaagctatccttgctgcagacttcgaaattggtcactttttacgtgagcgtataatcccaagatcagtgttatattttactggagaagctattgaagatgatgatgatgattatgatgaagaaggtgaagaagcggatgaggtaatgtttaccaaatgagcaaataattctctgtggttaacacattgagaagcaaattgaatgacttatgtattcctttgctataatcattctgtgatttgggataaaaacattttggaaaacatgattttagaattctacagccaaacaatgtatgtataaggtttcaataaataaattgcaaaactcagcaacatttttttatttcaaataattttgttctgctgcagggttatcagctctttgaagaagtcaaaagctgcagtaaacttttccaacgttggctgcagtaactattttcaataaaagctgtctggatgtctcaagttgtgttgggaaatttttcatattagaagctttcaaattaaattgtattatcatcaaagtctgtaatcatgaaaatctgttgatccgtagagtaacttgtattaaattttccctacattatgagccagtttacctactatgtacatacttcatggatgcattttgaactttaatataggaaggggaagaagaaggagatgaggaaaatgatccagactatgacccaaaggtgagcaaaattagtgctgctttctattaaatttaagatagctaaagtaagagttggtgtttttgaatatcaagtttctctccgttaaagtctttaataaataaagcctattgactggataactttgttttttcagtcccactggcattgtgaacagtacacataatttcagtggacgtttttctaaaaaacattgttttttgtttggacttcgtgctttttatagtttcaggtacagtgaaccctaggattctattttaatgggacgatttgtaacagtttttaagcattagaaaataaaggtttttaaaagatctggttgtaggagtgttcgggaactggggagcagtgcagtttgttagatccttccaactactcttactcagtccctgagagtcctagtctattattcctgagaatttgttatattaggattagcaaaaacaaagctgattggtaatataactaacataaattgcttggtaactttatttttttaagattatggtttagcgtgtgtcacattttatggagttaattctacagtgtaaagtttgagcttgattttagcatttcagtgacttgctaataaaataaataatttaccaccattgtcctataccatttcttttgacaacagtgagctactgttataattaaggcagtaattactattgagaaattcactgaagcaggtagaagaagatagattgacttgttgttttcctttaacagaaggatcaaaacccagcagagtgcaagcagcagtgaagcaggatgtatgtggccttgaggataacctgcactgtaatagcctaaacacaactcttatttacttacagccttatgtttttgtattttcttggtagactaggtaatttttttttaaaggacaggaaactgatattttaaagaccaatttgttctacctagcattttaactagtttttctgccagctatgttgaatgcacaaattctgtcacgcatgttcattcattgctacataatttggttcttctggaatatttttatgtagctcttggagtacagctatgaaaattaacaactgttaaaggaaataccttttttttttttttgtaattttttccttgaagaaccaaagtattttttcagctggttgttgaatagggttaagtccgcttggattagctgtgcctttcattactttgttacagaaatgcagtgacttatactaagacaatttattgtttaaaaaaaaaattggcaagacaactatatggttaagaatttccagtatgaccacacccaataactgttattagagtgttaatggattattgtgttttaggtgacatagttaactgtaaagtaacctgactcagtatagttactggtaccacagtgaggtgaataaaacgggattttcagaagttagcctgaatttaactgtatttttaaatttaacctccattaactaagcatcttttctttgtggtagggtctaccttctgcttccctggaaaggatgaatttacatcatttgacaagcctattttcaagttatttgttgtttgtttgcttgtttttgtttttgcagctaaaataaaaatttcaaatacaattttagttcttacaagataatgtcttaattttgtaccaattcaggtagaagtagaggcctaccttgaattaagggttatactcagtttttaacacattgttgaagaaaaggtaccagctttggaacgagatgctatactaataagcaagtgtaaaaaaaaaaaaaaaaagaggaagaaaatcttaagtgattgatgctgttttcttttaaaaaaaaaaaaaaaaaattcattttctttgggttagagctagagagaaggccccaagcttctatggtttcttctaattcttattgcttaaagtatgagtatgtcacttacccgtgcttctgtttactgtgtaattaaaatgggtagtactgtttacctaactacctcatggatgtgttaaggcatattgagttaaatctcatataatgtttctcaatcttgttaaaagctcaaaattttgggcctatttgtaatgccagtgtgacactaagcattttgttcacaccacgctttgataactaaactggaaaacaaaggtgttaagtacctctgttctggatctgggcagtcagcactctttttagatctttgtgtggctcctatttttatagaagtggagggatgcactatttcacaaggtccaagatttgttttcagatatttttgatgactgtattgtaaatactacagggatagcactatagtattgtagtcatgagacttaaagtggaaataagactatttttgacaaaagatgccattaaatttcagactgtagagccacatttacaatacctcaggctaattactgttaattttggggttgaacttttttttgacagtgagggtggattattggattgtcattagaggaaggtctagatttcctgctcttaataaaattacattgaattgatttttagaggtaatgaaaacttcctttctgagaagttagtgttaaggtcttggaatgtgaacacattgtttgtagtgctatccattcctctcctgagattttaacttactactggaaatccttaaccaattataatagctttttttctttattttcaaaatgatttcctttgctttgattagacactatgtgctttttttttttaaccatagttcatcgaaatgcagctttttctgaacttcaaagatagaatcccatttttaatgaactgaagtagcaaaatcatctttttcattctttaggaaatagctattgccaaagtgaaggtgtagataatacctagtcttgttacataaaggggatgtggtttgcagaagaattttctttataaaattgaagttttaagggacgtcagtgtttatgccatttttccagttccaaaatgattccattccattctagaaatttgaagtatgtaacctgaaatccttaataaaatttggatttaattttataaaatgtactggtgatattttgggtgtttttttttaaatgaatgtatatactttttttttgaagagtggagagtagtgatgtctagagggagctattttgtgctgaggccactatgttctgtaaatatataattttaagagcaacctcacaatccctgctaagtggagtttattatttgaagactaaaatggaattccatagttcctgataggttatattctgagttattattctgagttatctacaaacatttttgagatttgtctttacactctgattgtagtttccagcagcccacgcacactgccaagtaagtctcattttttcctgttagaaatggtgaaatatcatataatcacttataaagaaaactgatatgaaaaaattttagagttgtttgctttatggtcactcaagtagggtaagtgttccacaaattccacaagttgatagtttaacatggatgtctgaaagccacatatataatttcttaggattcttaaattagtaaatctagcttactgaagcagtattagcatcactattttagattgcaaaaataccttaattgtgtggaactggcttgtagagtggtacttaagaaaaatgggattctacctctatttctgttttagcacacttaatcaggaaaggatatattaactttcataaaaatatttttgttgtgtgaataggttaatgatatggtaaggcccctaaaataactgaattaattgtttattgtaattgtaggccattcccattattaaaaataaagacaaaacttgaagtaactgaaaatcttatcgtgctatgtagaaatattgaactaatattcaaatatttgaatgctttggtttcagggattggtttaaaattggagtccttttttatgggttagtcttacaaaaatttaagcctttatatttttgactttaaatcaaaacaaatgttattttaaatgtacagaatagattggtagtgcagaagagtgtaagttcttcataggagctttagaaaagagaaatatgtgctaattcagtttttttttaatctgcactgtacatatatacttggtaattatgagcttgattttgtttttggaaatatgtgttcataatttaggtaatttgctacttaaagcactaagtctctgatacctgaaaagtacatgtaaatggtgatggtgaaataatactgcagttaacttaatagatgtatactggtgatttttgtatgctggattaaaactccagatattaaaatataacctggataaaaagccaagttcttggactgattgaggatcacttacatgactttacagaaatggaaacatccttgttggtatatgaaattattttactcaaggataagtattcataagaaattttgattgatgtatattttcaaaaatacagtatgctttgta

SEQ ID NO: 328092 - DNA, 5367 bp, Homo sapiens
gtggaagtgaggaagagggagagctcctgggcaccagaatgaatggggagggtcctttaggcactgtgaggcctttagcttttactcctactgagactggacatcgcaggagagtttcagagcagagaagtgctatgactgctcttgaagtttaagaggaccaggtggctggctttgctgtgtgtcagagaacaggagcagaaacagggagaccagctgggaggtgactgcaaaagtccaggtgagaggcgatggagctagtgaggagtgccggaggcctggtgtattctgacggtgccaggacctgtgataggtgctgagagagatgaggaactgctcagatcaccagctgcttcaggttaccagcccacacctgtctgtctcacctctgacaaccttggtaaagaaaccaaggcttagagacctgctcacagtcgtttcgtgagggaatgcaacatctgggtctagggtccaaatctatctctgctgtgaagaggaactcatacaggagatctacatgattaccaattcttggccttgcagtggagatatttggagttcttacaacatggcagacattgacaacaaagaacagtctgaacttgatcaagatttggatgatgttgaagaagtagaagaagaggaaactggtgaagaaacaaaactcaaagcacgtcagctaactgttcagatgatgcaaaatcctcagattcttgcagcccttcaagaaagacttgatggtctggtagaaacaccaacaggatacattgaaagcctgcctagggtagttaaaagacgagtgaatgctctcaaaaacctgcaagttaaatgtgcacagatagaagccaaattctatgaggaagttcatgatcttgaaaggaagtatgctgttctctatcagcctctatttgataagcgatttgaaattattaatgcaatttatgaacctacggaagaagaatgtgaatggaaaccagatgaagaagatgagatttcggaggaattgaaagaaaaggccaagattgaagatgagaaaaaggatgaagaaaaagaagaccccaaaggaattcctgaattttggttaactgtttttaagaatgttgacttgctcagtgatatggttcaggaacacgatgaacctattctgaagcacttgaaagatattaaagtgaagttctcagatgctggccagcctatgagttttgtcttagaatttcactttgaacccaatgaatattttacaaatgaagtgctgacaaagacatacaggatgaggtcagaaccagatgattctgatcccttttcttttgatggaccagaaattatgggttgtacagggtgccagatagattggaaaaaaggaaagaatgtcactttgaaaactattaagaagaagcagaaacacaagggacgtgggacagttcgtactgtgactaaaacagatgatgatgctgaagctatccttgctgcagacttcgaaattggtcactttttacgtgagcgtataatcccaagatcagtgttatattttactggagaagctattgaagatgatgatgatgattatgatgaagaaggtgaagaagcggatgaggaaggggaagaagaaggagatgaggaaaatgatccagactatgacccaaagaaggatcaaaacccagcagagtgcaagcagcagtgaagcaggatgtatgtggccttgaggataacctgcactgtaatagcctaaacacaactcttatttacttacagccttatgtttttgtattttcttggtagactaggtaatttttttttaaaggacaggaaactgatattttaaagaccaatttgttctacctagcattttaactagtttttctgccagctatgttgaatgcacaaattctgtcacgcatgttcattcattgctacataatttggttcttctggaatatttttatgtagctcttggagtacagctatgaaaattaacaactgttaaaggaaataccttttttttttttttgtaattttttccttgaagaaccaaagtattttttcagctggttgttgaatagggttaagtccgcttggattagctgtgcctttcattactttgttacagaaatgcagtgacttatactaagacaatttattgtttaaaaaaaaaattggcaagacaactatatggttaagaatttccagtatgaccacacccaataactgttattagagtgttaatggattattgtgttttaggtgacatagttaactgtaaagtaacctgactcagtatagttactggtaccacagtgaggtgaataaaacgggattttcagaagttagcctgaatttaactgtatttttaaatttaacctccattaactaagcatcttttctttgtggtagggtctaccttctgcttccctggaaaggatgaatttacatcatttgacaagcctattttcaagttatttgttgtttgtttgcttgtttttgtttttgcagctaaaataaaaatttcaaatacaattttagttcttacaagataatgtcttaattttgtaccaattcaggtagaagtagaggcctaccttgaattaagggttatactcagtttttaacacattgttgaagaaaaggtaccagctttggaacgagatgctatactaataagcaagtgtaaaaaaaaaaaaaaaaagaggaagaaaatcttaagtgattgatgctgttttcttttaaaaaaaaaaaaaaaaaattcattttctttgggttagagctagagagaaggccccaagcttctatggtttcttctaattcttattgcttaaagtatgagtatgtcacttacccgtgcttctgtttactgtgtaattaaaatgggtagtactgtttacctaactacctcatggatgtgttaaggcatattgagttaaatctcatataatgtttctcaatcttgttaaaagctcaaaattttgggcctatttgtaatgccagtgtgacactaagcattttgttcacaccacgctttgataactaaactggaaaacaaaggtgttaagtacctctgttctggatctgggcagtcagcactctttttagatctttgtgtggctcctatttttatagaagtggagggatgcactatttcacaaggtccaagatttgttttcagatatttttgatgactgtattgtaaatactacagggatagcactatagtattgtagtcatgagacttaaagtggaaataagactatttttgacaaaagatgccattaaatttcagactgtagagccacatttacaatacctcaggctaattactgttaattttggggttgaacttttttttgacagtgagggtggattattggattgtcattagaggaaggtctagatttcctgctcttaataaaattacattgaattgatttttagaggtaatgaaaacttcctttctgagaagttagtgttaaggtcttggaatgtgaacacattgtttgtagtgctatccattcctctcctgagattttaacttactactggaaatccttaaccaattataatagctttttttctttattttcaaaatgatttcctttgctttgattagacactatgtgctttttttttttaaccatagttcatcgaaatgcagctttttctgaacttcaaagatagaatcccatttttaatgaactgaagtagcaaaatcatctttttcattctttaggaaatagctattgccaaagtgaaggtgtagataatacctagtcttgttacataaaggggatgtggtttgcagaagaattttctttataaaattgaagttttaagggacgtcagtgtttatgccatttttccagttccaaaatgattccattccattctagaaatttgaagtatgtaacctgaaatccttaataaaatttggatttaattttataaaatgtactggtgatattttgggtgtttttttttaaatgaatgtatatactttttttttgaagagtggagagtagtgatgtctagagggagctattttgtgctgaggccactatgttctgtaaatatataattttaagagcaacctcacaatccctgctaagtggagtttattatttgaagactaaaatggaattccatagttcctgataggttatattctgagttattattctgagttatctacaaacatttttgagatttgtctttacactctgattgtagtttccagcagcccacgcacactgccaagtaagtctcattttttcctgttagaaatggtgaaatatcatataatcacttataaagaaaactgatatgaaaaaattttagagttgtttgctttatggtcactcaagtagggtaagtgttccacaaattccacaagttgatagtttaacatggatgtctgaaagccacatatataatttcttaggattcttaaattagtaaatctagcttactgaagcagtattagcatcactattttagattgcaaaaataccttaattgtgtggaactggcttgtagagtggtacttaagaaaaatgggattctacctctatttctgttttagcacacttaatcaggaaaggatatattaactttcataaaaatatttttgttgtgtgaataggttaatgatatggtaaggcccctaaaataactgaattaattgtttattgtaattgtaggccattcccattattaaaaataaagacaaaacttgaagtaactgaaaatcttatcgtgctatgtagaaatattgaactaatattcaaatatttgaatgctttggtttcagggattggtttaaaattggagtccttttttatgggttagtcttacaaaaatttaagcctttatatttttgactttaaatcaaaacaaatgttattttaaatgtacagaatagattggtagtgcagaagagtgtaagttcttcataggagctttagaaaagagaaatatgtgctaattcagtttttttttaatctgcactgtacatatatacttggtaattatgagcttgattttgtttttggaaatatgtgttcataatttaggtaatttgctacttaaagcactaagtctctgatacctgaaaagtacatgtaaatggtgatggtgaaataatactgcagttaacttaatagatgtatactggtgatttttgtatgctggattaaaactccagatattaaaatataacctggataaaaagccaagttcttggactgattgaggatcacttacatgactttacagaaatggaaacatccttgttggtatatgaaattattttactcaaggataagtattcataagaaattttgattgatgtatattttcaaaaatacagtatgctttgta

SEQ ID NO: 328093 - DNA, 2390 bp, Homo sapiens
gtggaagtgaggaagagggagagctcctgggcaccagaatgaatggggagggtcctttaggcactgtgaggcctttagcttttactcctactgagactggacatcgcaggagagtttcagagcagagaagtgctatgactgctcttgaagtttaagaggaccaggtggctggctttgctgtgtgtcagagaacaggagcagaaacagggagaccagctgggaggtgactgcaaaagtccaggtgagaggcgatggagctagtgaggagtgccggaggcctggtgtattctgacggtgccaggacctgtgataggtgctgagagagatgaggaactgctcagatcaccagctgcttcaggttaccagcccacacctgtctgtctcacctctgacaaccttggtaaagaaaccaaggcttagagacctgctcacagtcgtttcgtgagggaatgcaacatctgggtctagggtccaaatctatctctgctgtgaagaggaactcatacaggagatctacatgattaccaattcttggccttgcagtggagatatttggagttcttacaacatggcagacattgacaacaaagaacagtctgaacttgatcaagatttggatgatgttgaagaagtagaagaagaggaaactggtgaagaaacaaaactcaaagcacgtcagctaactgttcagatgatgcaaaatcctcagattcttgcagcccttcaagaaagacttgatggtctggtagaaacaccaacaggatacattgaaagcctgcctagggtagttaaaagacgagtgaatgctctcaaaaacctgcaagttaaatgtgcacagatagaagccaaattctatgaggaagttcatgatcttgaaaggaagtatgctgttctctatcagcctctatttgataagcgatttgaaattattaatgcaatttatgaacctacggaagaagaatgtgaatggaaaccagatgaagaagatgagatttcggaggaattgaaagaaaaggccaagattgaagatgagaaaaaggatgaagaaaaagaagaccccaaaggaattcctgaattttggttaactgtttttaagaatgttgacttgctcagtgatatggttcaggaacacgatgaacctattctgaagcacttgaaagatattaaagtgaagttctcagatgctggccagcctatgagttttgtcttagaatttcactttgaacccaatgaatattttacaaatgaagtgctgacaaagacatacaggatgaggtcagaaccagatgattctgatcccttttcttttgatggaccagaaattatgggttgtacagggtgccagatagattggaaaaaaggaaagaatgtcactttgaaaactattaagaagaagcagaaacacaagggacgtgggacagttcgtactgtgactaaaacagtttccaatgactctttctttaacttttttgcccctcctgaagttcctgagagtggagatctggatgatgatgctgaagctatccttgctgcagacttcgaaattggtcactttttacgtgagcgtataatcccaagatcagtgttatattttactggagaagctattgaagatgatgatgatgattatgatgaagaaggtgaagaagcggatgaggaaggggaagaagaaggagatgaggaaaatgatccagactatgacccaaagaaggatcaaaacccagcagagtgcaagcagcagtgaagcaggatgtatgtggccttgaggataacctgcactgtaatagcctaaacacaactcttatttacttacagccttatgtttttgtattttcttggtagactaggtaatttttttttaaaggacaggaaactgatattttaaagaccaatttgttctacctagcattttaactagtttttctgccagctatgttgaatgcacaaattctgtcacgcatgttcattcattgctacataatttggttcttctggaatatttttatgtagctcttggagtacagctatgaaaattaacaactgttaaaggaaataccttttttttttttttgtaattttttccttgaagaaccaaagtattttttcagctggttgttgaatagggttaagtccgcttggattagctgtgcctttcattactttgttacagaaatgcagtgacttatactaagacaatttattgtttaaaaaaaaaattggcaagacaactatatggttaagaatttccagtatgaccacacccaataactgttattagagtgttaatggattattgtgttttaggtgacatagttaactgtaaagtaacctgactcagtatagttactggtaccacagtgaggtgaataaaacgggattttcagaagtta

SEQ ID NO: 328094 - DNA, 2527 bp, Homo sapiens
gtggaagtgaggaagagggagagctcctgggcaccagaatgaatggggagggtcctttaggcactgtgaggcctttagcttttactcctactgagactggacatcgcaggagagtttcagagcagagaagtgctatgactgctcttgaagtttaagaggaccaggtggctggctttgctgtgtgtcagagaacaggagcagaaacagggagaccagctgggaggtgactgcaaaagtccaggtgagaggcgatggagctagtgaggagtgccggaggcctggtgtattctgacggtgccaggacctgtgataggtgctgagagagatgaggaactgctcagatcaccagctgcttcaggttaccagcccacacctgtctgtctcacctctgacaaccttggtaaagaaaccaaggcttagagacctgctcacagtcgtttcgtgagggaatgcaacatctgggtctagggtccaaatctatctctgctgtgaagaggaactcatacaggagatctacatgattaccaattcttggccttgcagtggagatatttggagttcttacaacatggcagacattgacaacaaagaacagtctgaacttgatcaagatttggatgatgttgaagaagtagaagaagaggaaactggtgaagaaacaaaactcaaagcacgtcagctaactgttcagatgatgcaaaatcctcagattcttgcagcccttcaagaaagacttgatggtctggtagaaacaccaacaggatacattgaaagcctgcctagggtagttaaaagacgagtgaatgctctcaaaaacctgcaagttaaatgtgcacagatagaagccaaattctatgaggaagttcatgatcttgaaaggaagtatgctgttctctatcagcctctatttgataagcgatttgaaattattaatgcaatttatgaacctacggaagaagaatgtgaatggaaaccagatgaagaagatgagatttcggaggaattgaaagaaaaggccaagattgaagatgagaaaaaggatgaagaaaaagaagaccccaaaggaattcctgaattttggttaactgtttttaagaatgttgacttgctcagtgatatggttcaggaacacgatgaacctattctgaagcacttgaaagatattaaagtgaagttctcagatgctggccagcctatgagttttgtcttagaatttcactttgaacccaatgaatattttacaaatgaagtgctgacaaagacatacaggatgaggtcagaaccagatgattctgatcccttttcttttgatggaccagaaattatgggttgtacagggtgccagatagattggaaaaaaggaaagaatgtcactttgaaaactattaagaagaagcagaaacacaagggacgtgggacagttcgtactgtgactaaaacagtttccaatgactctttctttaacttttttgcccctcctgaagttcctgagagtggagatctggatgatgatgctgaagctatccttgctgcagacttcgaaattggtcactttttacgtgagcgtataatcccaagatcagtgttatattttactggagaagctattgaagatgatgatgatgattatgatgaagaaggtgaagaagcggatgaggaaggggaagaagaaggagatgaggaaaatgatccagactatgacccaaagaaggatcaaaacccagcagagtgcaagcagcagtgaagcaggatgtatgtggccttgaggataacctgcactgtaatagcctaaacacaactcttatttacttacagccttatgtttttgtattttcttggtagactaggtaatttttttttaaaggacaggaaactgatattttaaagaccaatttgttctacctagcattttaactagtttttctgccagctatgttgaatgcacaaattctgtcacgcatgttcattcattgctacataatttggttcttctggaatatttttatgtagctcttggagtacagctatgaaaattaacaactgttaaaggaaataccttttttttttttttgtaattttttccttgaagaaccaaagtattttttcagctggttgttgaatagggttaagtccgcttggattagctgtgcctttcattactttgttacagaaatgcagtgacttatactaagacaatttattgtttaaaaaaaaaattggcaagacaactatatggattattgtgttttaggtgacatagttaactgtaaagtaacctgactcagtatagttactggtaccacagtgaggtgaataaaacgggattttcagaagttagcctgaatttaactgtatttttaaatttaacctccattaactaagcatcttttctttgtggtagggtctaccttctgcttccctggaaaggatgaatttacatcatttgacaagcctattttcaagttatttgttgtttgtttgcttgtttttgtttttgcagctaaaataaaaatttcaaatacaattt

SEQ ID NO: 328095 - DNA, 2362 bp, Homo sapiens
gtggaagtgaggaagagggagagctcctgggcaccagaatgaatggggagggtcctttaggcactgtgaggcctttagcttttactcctactgagactggacatcgcaggagagtttcagagcagagaagtgctatgactgctcttgaagtttaagaggaccaggtggctggctttgctgtgtgtcagagaacaggagcagaaacagggagaccagctgggaggtgactgcaaaagtccaggtgagaggcgatggagctagtgaggagtgccggaggcctggtgtattctgacggtgccaggacctgtgataggtgctgagagagatgaggaactgctcagatcaccagctgcttcaggttaccagcccacacctgtctgtctcacctctgacaaccttggtaaagaaaccaaggcttagagacctgctcacagtcgtttcgtgagggaatgcaacatctgggtctagggtccaaatctatctctgctgtgaagaggaactcatacaggagatctacatgattaccaattcttggccttgcagtggagatatttggagttcttacaacatggcagacattgacaacaaagaacagtctgaacttgatcaagatttggatgatgttgaagaagtagaagaagaggaaactggtgaagaaacaaaactcaaagcacgtcagctaactgttcagatgatgcaaaatcctcagattcttgcagcccttcaagaaagacttgatggtctggtagaaacaccaacaggatacattgaaagcctgcctagggtagttaaaagacgagtgaatgctctcaaaaacctgcaagttaaatgtgcacagatagaagccaaattctatgaggaagttcatgatcttgaaaggaagtatgctgttctctatcagcctctatttgataagcgatttgaaattattaatgcaatttatgaacctacggaagaagaatgtgaatggaaaccagatgaagaagatgagatttcggaggaattgaaagaaaaggccaagattgaagatgagaaaaaggatgaagaaaaagaagaccccaaaggaattcctgaattttggttaactgtttttaagaatgttgacttgctcagtgatatggttcaggaacacgatgaacctattctgaagcacttgaaagatattaaagtgaagttctcagatgctggccagcctatgagttttgtcttagaatttcactttgaacccaatgaatattttacaaatgaagtgctgacaaagacatacaggatgaggtcagaaccagatgattctgatcccttttcttttgatggaccagaaattatgggttgtacagggtgccagatagattggaaaaaaggaaagaatgtcactttgaaaactattaagaagaagcagaaacacaagggacgtgggacagttcgtactgtgactaaaacagtttccaatgactctttctttaacttttttgcccctcctgaagttcctgagagtggagatctggatgatgatgctgaagctatccttgctgcagacttcgaaattggtcactttttacgtgagcgtataatcccaagatcagtgttatattttactggagaagctattgaagatgatgatgatgattatgatgaagaaggtgaagaagcggatgaggaaggggaagaagaaggagatgaggaaaatgatccagactatgacccaaagaaggatcaaaacccagcagagtgcaagcagcagtgaagcaggatgtatgtggccttgaggataacctgcactggtctaccttctgcttccctggaaaggatgaatttacatcatttgacaagcctattttcaagttatttgttgtttgtttgcttgtttttgtttttgcagctaaaataaaaatttcaaatacaatttaaaaaaaaaataatatgagagataacaatgaaaaagagggggcggggcgcggcgttataagaatgttcccccccgcggggggcggcccatcttttacggcgttcgtccaggttttttttgtacaagttgggccccgtatagagggaggccggtattatatagggctaggagcactggcgccgctcgtgtttaacaccgtcgtcgggagtgtgggacaccatcggctacgcgtgggtgcctcttggggggagggggactccctcactttggtggggtggggcacatttcttgcgggccacacttcccctcacggggggattttatcggccctgagggggacatcctaacactttttcgacgggtgtcttctcggtgttacccctacgctgcaatattcttggggttggagaaggttgggcgaccgggattatgcttttcggacacttttctccggcc

SEQ ID NO: 328096 - DNA, 4736 bp, Homo sapiens
gtggaagtgaggaagagggagagctcctgggcaccagaatgaatggggagggtcctttaggcactgtgaggcctttagcttttactcctactgagactggacatcgcaggagagtttcagagcagagaagtgctatgactgctcttgaagtttaagaggaccaggtggctggctttgctgtgtgtcagagaacaggagcagaaacagggagaccagctgggaggtgactgcaaaagtccaggtgagaggcgatggagctagtgaggagtgccggaggcctggtgtattctgacggtgccaggacctgtgataggtgctgagagagatgaggaactgctcagatcaccagctgcttcaggttaccagcccacacctgtctgtctcacctctgacaaccttggtaaagaaaccaaggcttagagacctgctcacagtcgtttcgtgagggaatgcaacatctgggtctagggtccaaatctatctctgctgtgaagaggaactcatacaggagatctacatgattaccaattcttggccttgcagtggagatatttggagttcttacaacatggcagacattgacaacaaagaacagtctgaacttgatcaagatttggatgatgttgaagaagtagaagaagaggaaactggtgaagaaacaaaactcaaagcacgtcagctaactgttcagatgatgcaaaatcctcagattcttgcagcccttcaagaaagacttgatggtctggtagaaacaccaacaggatacattgaaagcctgcctagggtagttaaaagacgagtgaatgctctcaaaaacctgcaagttaaatgtgcacagatagaagccaaattctatgaggaagttcatgatcttgaaaggaagtatgctgttctctatcagcctctatttgataagcgatttgaaattattaatgcaatttatgaacctacggaagaagaatgtgaatggaaaccagatgaagaagatgagatttcggaggaattgaaagaaaaggccaagattgaagatgagaaaaaggatgaagaaaaagaagaccccaaaggaattcctgaattttggttaactgtttttaagaatgttgacttgctcagtgatatggttcaggaacacgatgaacctattctgaagcacttgaaagatattaaagtgaagttctcagatgctggccagcctatgagttttgtcttagaatttcactttgaacccaatgaatattttacaaatgaagtgctgacaaagacatacaggatgaggtcagaaccagatgattctgatcccttttcttttgatggaccagaaattatgggttgtacagggtgccagatagattggaaaaaaggaaagaatgtcactttgaaaactattaagaagaagcagaaacacaagggacgtgggacagttcgtactgtgactaaaacagtttccaatgactctttctttaacttttttgcccctcctgaaggatgatgatgctgaagctatccttgctgcagacttcgaaattggtcactttttacgtgagcgtataatcccaagatcagtgttatattttactggagaagctattgaagatgatgatgatgattatgatgaagaaggtgaagaagcggatgaggaaggggaagaagaaggagatgaggaaaatgatccagactatgacccaaagaaggatcaaaacccagcagagtgcaagcagcagtgaagcaggatgtatgtggccttgaggataacctgcactggtctaccttctgcttccctggaaaggatgaatttacatcatttgacaagcctattttcaagttatttgttgtttgtttgcttgtttttgtttttgcagctaaaataaaaatttcaaatacaattttagttcttacaagataatgtcttaattttgtaccaattcaggtagaagtagaggcctaccttgaattaagggttatactcagtttttaacacattgttgaagaaaaggtaccagctttggaacgagatgctatactaataagcaagtgtaaaaaaaaaaaaaaaaagaggaagaaaatcttaagtgattgatgctgttttcttttaaaaaaaaaaaaaaaaaattcattttctttgggttagagctagagagaaggccccaagcttctatggtttcttctaattcttattgcttaaagtatgagtatgtcacttacccgtgcttctgtttactgtgtaattaaaatgggtagtactgtttacctaactacctcatggatgtgttaaggcatattgagttaaatctcatataatgtttctcaatcttgttaaaagctcaaaattttgggcctatttgtaatgccagtgtgacactaagcattttgttcacaccacgctttgataactaaactggaaaacaaaggtgttaagtacctctgttctggatctgggcagtcagcactctttttagatctttgtgtggctcctatttttatagaagtggagggatgcactatttcacaaggtccaagatttgttttcagatatttttgatgactgtattgtaaatactacagggatagcactatagtattgtagtcatgagacttaaagtggaaataagactatttttgacaaaagatgccattaaatttcagactgtagagccacatttacaatacctcaggctaattactgttaattttggggttgaacttttttttgacagtgagggtggattattggattgtcattagaggaaggtctagatttcctgctcttaataaaattacattgaattgatttttagaggtaatgaaaacttcctttctgagaagttagtgttaaggtcttggaatgtgaacacattgtttgtagtgctatccattcctctcctgagattttaacttactactggaaatccttaaccaattataatagctttttttctttattttcaaaatgatttcctttgctttgattagacactatgtgctttttttttttaaccatagttcatcgaaatgcagctttttctgaacttcaaagatagaatcccatttttaatgaactgaagtagcaaaatcatctttttcattctttaggaaatagctattgccaaagtgaaggtgtagataatacctagtcttgttacataaaggggatgtggtttgcagaagaattttctttataaaattgaagttttaagggacgtcagtgtttatgccatttttccagttccaaaatgattccattccattctagaaatttgaagtatgtaacctgaaatccttaataaaatttggatttaattttataaaatgtactggtgatattttgggtgtttttttttaaatgaatgtatatactttttttttgaagagtggagagtagtgatgtctagagggagctattttgtgctgaggccactatgttctgtaaatatataattttaagagcaacctcacaatccctgctaagtggagtttattatttgaagactaaaatggaattccatagttcctgataggttatattctgagttattattctgagttatctacaaacatttttgagatttgtctttacactctgattgtagtttccagcagcccacgcacactgccaagtaagtctcattttttcctgttagaaatggtgaaatatcatataatcacttataaagaaaactgatatgaaaaaattttagagttgtttgctttatggtcactcaagtagggtaagtgttccacaaattccacaagttgatagtttaacatggatgtctgaaagccacatatataatttcttaggattcttaaattagtaaatctagcttactgaagcagtattagcatcactattttagattgcaaaaataccttaattgtgtggaactggcttgtagagtggtacttaagaaaaatgggattctacctctatttctgttttagcacacttaatcaggaaaggatatattaactttcataaaaatatttttgttgtgtgaataggttaatgatatggtaaggcccctaaaataactgaattaattgtttattgtaattgtaggccattcccattattaaaaataaagacaaaacttgaagtaactgaaaatcttatcgtgctatgtagaaatattgaactaatattcaaatatttgaatgctttggtttcagggattggtttaaaattggagtccttttttatgggttagtcttacaaaaatttaagcctttatatttttgactttaaatcaaaacaaatgttattttaaatgtacagaatagattggtagtgcagaagagtgtaagttcttcataggagctttagaaaagagaaatatgtgctaattcagtttttttttaatctgcactgtacatatatacttggtaattatgagcttgattttgtttttggaaatatgtgttcataatttaggtaatttgctacttaaagcactaagtctctgatacctgaaaagtacatgtaaatggtgatggtgaaataatactgcagttaacttaatagatgtatactggtgatttttgtatgctggattaaaactccagatattaaaatataacctggataaaaagccaagttcttggactgattgaggatcacttacatgactttacagaaatggaaacatccttgttggtatatgaaattattttactcaaggataagtattcataagaaattttgattgatgtatattttcaaaaatacagtatgctttgta

SEQ ID NO: 328097 - DNA, 1820 bp, Homo sapiens
  misc_feature (1793)..(1793): n is a, c, g, or t
  misc_feature (1808)..(1808): n is a, c, g, or t
gtggaagtgaggaagagggagagctcctgggcaccagaatgaatggggagggtcctttaggcactgtgaggcctttagcttttactcctactgagactggacatcgcaggagagtttcagagcagagaagtgctatgactgctcttgaagtttaagaggaccaggtggctggctttgctgtgtgtcagagaacaggagcagaaacagggagaccagctgggaggtgactgcaaaagtccaggtgagaggcgatggagctagtgaggagtgccggaggcctggtgtattctgacggtgccaggacctgtgataggtgctgagagagatgaggaactgctcagatcaccagctgcttcaggttaccagcccacacctgtctgtctcacctctgacaaccttggtaaagaaaccaaggcttagagacctgctcacagtcgtttcgtgagggaatgcaacatctgggtctagggtccaaatctatctctgctgtgaagaggaactcatacaggagatctacatgattaccaattcttggccttgcagtggagatatttggagttcttacaacatggcagacattgacaacaaagaacagtctgaacttgatcaagatttggatgatgttgaagaagtagaagaagaggaaactggtgaagaaacaaaactcaaagcacgtcagctaactgttcagatgatgcaaaatcctcagattcttgcagcccttcaagaaagacttgatggtctggtagaaacaccaacaggatacattgaaagcctgcctagggtagttaaaagacgagtgaatgctctcaaaaacctgcaagttaaatgtgcacagatagaagccaaattctatgaggaagttcatgatcttgaaaggaagtatgctgttctctatcagcctctatttgataagcgatttgaaattattaatgcaatttatgaacctacggaagaagaatgtgaatggaaaccagatgaagaagatgagatttcggaggaattgaaagaaaaggccaagattgaagatgagaaaaaggatgaagaaaaagaagaccccaaaggaattcctgaattttggttaactgtttttaagaatgttgacttgctcagtgatatggttcaggaacacgatgaacctattctgaagcacttgaaagatattaaagtgaagttctcagatgctggccagcctatgagttttgtcttagaatttcactttgaacccaatgaatattttacaaatgaagtgctgacaaagacatacaggatgaggtcagaaccagatgattctgatcccttttcttttgatggaccagaaattatgggttgtacagggtgccagatagattggaaaaaaggaaagaatgtcactttgaaaactattaagaagaagcagaaacacaagggacgtgggacagttcgtactgtgactaaaacagtttccaatgactctttctttaacttttttgcccctcctgaagttcctgagagtggagatctggatgatgatgctgaagctatccttgctgcagacttcgaaattggtcactttttacgtgagcgtataatcccaagatcagtgttatattttactggagaagctattgaagatgatgatgatgattatgatgaagaaggtgaagaagcggatgaggaaggggaagaagaaggagatgaggaaaatgatccagactatgacccaaagaaggatcaaaacccagcagagtgcaagcagcagtgaagcaggatgtatgtggccttgaggataacctgcactgtctaccttctgnttccccttccacatncgtactgggccg

SEQ ID NO: 328098 - DNA, 6460 bp, Homo sapiens
gtggaagtgaggaagagggagagctcctgggcaccagaatgaatggggagggtcctttaggcactgtgaggcctttagcttttactcctactgagactggacatcgcaggagagtttcagagcagagaagtgctatgactgctcttgaagtttaagaggaccaggtggctggctttgctgtgtgtcagagaacaggagcagaaacagggagaccagctgggaggtgactgcaaaagtccaggtgagaggcgatggagctagtgaggagtgccggaggcctggtgtattctgacggtgccaggacctgtgataggtgctgagagagatgaggaactgctcagatcaccagctgcttcaggttaccagcccacacctgtctgtctcacctctgacaaccttggtaaagaaaccaaggcttagagacctgctcacagtcgtttcgtgagggaatgcaacatctgggtctagggtccaaatctatctctgctgtgaagaggaactcatacaggagatctacatgattaccaattcttggccttgcagtggagatatttggagttcttacaacatggcagacattgacaacaaagaacagtctgaacttgatcaagatttggatgatgttgaagaagtagaagaagaggaaactggtgaagaaacaaaactcaaagcacgtcagctaactgttcagatgatgcaaaatcctcagattcttgcagcccttcaagaaagacttgatggtctggtagaaacaccaacaggatacattgaaagcctgcctagggtagttaaaagacgagtgaatgctctcaaaaacctgcaagttaaatgtgcacagatagaagccaaattctatgaggaagttcatgatcttgaaaggaagtatgctgttctctatcagcctctatttgataagcgatttgaaattattaatgcaatttatgaacctacggaagaagaatgtgaatggaaaccagatgaagaagatgagatttcggaggaattgaaagaaaaggccaagattgaagatgagaaaaaggatgaagaaaaagaagaccccaaaggaattcctgaattttggttaactgtttttaagaatgttgacttgctcagtgatatggttcaggaacacgatgaacctattctgaagcacttgaaagatattaaagtgaagttctcagatgctggccagcctatgagttttgtcttagaatttcactttgaacccaatgaatattttacaaatgaagtgctgacaaagacatacaggatgattcctgagagtggagatctggatgatgatgctgaagctatccttgctgcagacttcgaaattggtcactttttacgtgagcgtataatcccaagatcagtgttatattttactggagaagctattgaagatgatgatgatgattatgatgaagaaggtgaagaagcggatgaggtaatgtttaccaaatgagcaaataattctctgtggttaacacattgagaagcaaattgaatgacttatgtattcctttgctataatcattctgtgatttgggataaaaacattttggaaaacatgattttagaattctacagccaaacaatgtatgtataaggtttcaataaataaattgcaaaactcagcaacatttttttatttcaaataattttgttctgctgcagggttatcagctctttgaagaagtcaaaagctgcagtaaacttttccaacgttggctgcagtaactattttcaataaaagctgtctggatgtctcaagttgtgttgggaaatttttcatattagaagctttcaaattaaattgtattatcatcaaagtctgtaatcatgaaaatctgttgatccgtagagtaacttgtattaaattttccctacattatgagccagtttacctactatgtacatacttcatggatgcattttgaactttaatataggaaggggaagaagaaggagatgaggaaaatgatccagactatgacccaaaggtgagcaaaattagtgctgctttctattaaatttaagatagctaaagtaagagttggtgtttttgaatatcaagtttctctccgttaaagtctttaataaataaagcctattgactggataactttgttttttcagtcccactggcattgtgaacagtacacataatttcagtggacgtttttctaaaaaacattgttttttgtttggacttcgtgctttttatagtttcaggtacagtgaaccctaggattctattttaatgggacgatttgtaacagtttttaagcattagaaaataaaggtttttaaaagatctggttgtaggagtgttcgggaactggggagcagtgcagtttgttagatccttccaactactcttactcagtccctgagagtcctagtctattattcctgagaatttgttatattaggattagcaaaaacaaagctgattggtaatataactaacataaattgcttggtaactttatttttttaagattatggtttagcgtgtgtcacattttatggagttaattctacagtgtaaagtttgagcttgattttagcatttcagtgacttgctaataaaataaataatttaccaccattgtcctataccatttcttttgacaacagtgagctactgttataattaaggcagtaattactattgagaaattcactgaagcaggtagaagaagatagattgacttgttgttttcctttaacagaaggatcaaaacccagcagagtgcaagcagcagtgaagcaggatgtatgtggccttgaggataacctgcactgtaatagcctaaacacaactcttatttacttacagccttatgtttttgtattttcttggtagactaggtaatttttttttaaaggacaggaaactgatattttaaagaccaatttgttctacctagcattttaactagtttttctgccagctatgttgaatgcacaaattctgtcacgcatgttcattcattgctacataatttggttcttctggaatatttttatgtagctcttggagtacagctatgaaaattaacaactgttaaaggaaataccttttttttttttttgtaattttttccttgaagaaccaaagtattttttcagctggttgttgaatagggttaagtccgcttggattagctgtgcctttcattactttgttacagaaatgcagtgacttatactaagacaatttattgtttaaaaaaaaaattggcaagacaactatatggttaagaatttccagtatgaccacacccaataactgttattagagtgttaatggattattgtgttttaggtgacatagttaactgtaaagtaacctgactcagtatagttactggtaccacagtgaggtgaataaaacgggattttcagaagttagcctgaatttaactgtatttttaaatttaacctccattaactaagcatcttttctttgtggtagggtctaccttctgcttccctggaaaggatgaatttacatcatttgacaagcctattttcaagttatttgttgtttgtttgcttgtttttgtttttgcagctaaaataaaaatttcaaatacaattttagttcttacaagataatgtcttaattttgtaccaattcaggtagaagtagaggcctaccttgaattaagggttatactcagtttttaacacattgttgaagaaaaggtaccagctttggaacgagatgctatactaataagcaagtgtaaaaaaaaaaaaaaaaagaggaagaaaatcttaagtgattgatgctgttttcttttaaaaaaaaaaaaaaaaaattcattttctttgggttagagctagagagaaggccccaagcttctatggtttcttctaattcttattgcttaaagtatgagtatgtcacttacccgtgcttctgtttactgtgtaattaaaatgggtagtactgtttacctaactacctcatggatgtgttaaggcatattgagttaaatctcatataatgtttctcaatcttgttaaaagctcaaaattttgggcctatttgtaatgccagtgtgacactaagcattttgttcacaccacgctttgataactaaactggaaaacaaaggtgttaagtacctctgttctggatctgggcagtcagcactctttttagatctttgtgtggctcctatttttatagaagtggagggatgcactatttcacaaggtccaagatttgttttcagatatttttgatgactgtattgtaaatactacagggatagcactatagtattgtagtcatgagacttaaagtggaaataagactatttttgacaaaagatgccattaaatttcagactgtagagccacatttacaatacctcaggctaattactgttaattttggggttgaacttttttttgacagtgagggtggattattggattgtcattagaggaaggtctagatttcctgctcttaataaaattacattgaattgatttttagaggtaatgaaaacttcctttctgagaagttagtgttaaggtcttggaatgtgaacacattgtttgtagtgctatccattcctctcctgagattttaacttactactggaaatccttaaccaattataatagctttttttctttattttcaaaatgatttcctttgctttgattagacactatgtgctttttttttttaaccatagttcatcgaaatgcagctttttctgaacttcaaagatagaatcccatttttaatgaactgaagtagcaaaatcatctttttcattctttaggaaatagctattgccaaagtgaaggtgtagataatacctagtcttgttacataaaggggatgtggtttgcagaagaattttctttataaaattgaagttttaagggacgtcagtgtttatgccatttttccagttccaaaatgattccattccattctagaaatttgaagtatgtaacctgaaatccttaataaaatttggatttaattttataaaatgtactggtgatattttgggtgtttttttttaaatgaatgtatatactttttttttgaagagtggagagtagtgatgtctagagggagctattttgtgctgaggccactatgttctgtaaatatataattttaagagcaacctcacaatccctgctaagtggagtttattatttgaagactaaaatggaattccatagttcctgataggttatattctgagttattattctgagttatctacaaacatttttgagatttgtctttacactctgattgtagtttccagcagcccacgcacactgccaagtaagtctcattttttcctgttagaaatggtgaaatatcatataatcacttataaagaaaactgatatgaaaaaattttagagttgtttgctttatggtcactcaagtagggtaagtgttccacaaattccacaagttgatagtttaacatggatgtctgaaagccacatatataatttcttaggattcttaaattagtaaatctagcttactgaagcagtattagcatcactattttagattgcaaaaataccttaattgtgtggaactggcttgtagagtggtacttaagaaaaatgggattctacctctatttctgttttagcacacttaatcaggaaaggatatattaactttcataaaaatatttttgttgtgtgaataggttaatgatatggtaaggcccctaaaataactgaattaattgtttattgtaattgtaggccattcccattattaaaaataaagacaaaacttgaagtaactgaaaatcttatcgtgctatgtagaaatattgaactaatattcaaatatttgaatgctttggtttcagggattggtttaaaattggagtccttttttatgggttagtcttacaaaaatttaagcctttatatttttgactttaaatcaaaacaaatgttattttaaatgtacagaatagattggtagtgcagaagagtgtaagttcttcataggagctttagaaaagagaaatatgtgctaattcagtttttttttaatctgcactgtacatatatacttggtaattatgagcttgattttgtttttggaaatatgtgttcataatttaggtaatttgctacttaaagcactaagtctctgatacctgaaaagtacatgtaaatggtgatggtgaaataatactgcagttaacttaatagatgtatactggtgatttttgtatgctggattaaaactccagatattaaaatataacctggataaaaagccaagttcttggactgattgaggatcacttacatgactttacagaaatggaaacatccttgttggtatatgaaattattttactcaaggataagtattcataagaaattttgattgatgtatattttcaaaaatacagtatgctttgta

SEQ ID NO: 328099 - DNA, 2339 bp, Homo sapiens
gtggaagtgaggaagagggagagctcctgggcaccagaatgaatggggagggtcctttaggcactgtgaggcctttagcttttactcctactgagactggacatcgcaggagagtttcagagcagagaagtgctatgactgctcttgaagtttaagaggaccaggtggctggctttgctgtgtgtcagagaacaggagcagaaacagggagaccagctgggaggtgactgcaaaagtccaggtgagaggcgatggagctagtgaggagtgccggaggcctggtgtattctgacggtgccaggacctgtgataggtgctgagagagatgaggaactgctcagatcaccagctgcttcaggttaccagcccacacctgtctgtctcacctctgacaaccttggtaaagaaaccaaggcttagagacctgctcacagtcgtttcgtgagggaatgcaacatctgggtctagggtccaaatctatctctgctgtgaagaggaactcatacaggagatctacatgattaccaattcttggccttgcagtggagatatttggagttcttacaacatggcagacattgacaacaaagaacagtctgaacttgatcaagatttggatgatgttgaagaagtagaagaagaggaaactggtgaagaaacaaaactcaaagcacgtcagctaactgttcagatgatgcaaaatcctcagattcttgcagcccttcaagaaagacttgatggtctggtagaaacaccaacaggatacattgaaagcctgcctagggtagttaaaagacgagtgaatgctctcaaaaacctgcaagttaaatgtgcacagatagaagccaaattctatgaggaagttcatgatcttgaaaggaagtatgctgttctctatcagcctctatttgataagcgatttgaaattattaatgcaatttatgaacctacggaagaagaatgtgaatggaaaccagatgaagaagatgagatttcggaggaattgaaagaaaaggccaagattgaagatgagaaaaaggatgaagaaaaagaagaccccaaaggaattcctgaattttggttaactgtttttaagaatgttgacttgctcagtgatatggttcaggaacacgatgaacctattctgaagcacttgaaagatattaaagtgaagttctcagatgctggccagcctatgagttttgtcttagaatttcactttgaacccaatgaatattttacaaatgaagtgctgacaaagacatacaggatgaggtcagaaccagatgattctgatcccttttcttttgatggaccagaaattatgggttgtacagggtgccagatagattggaaaaaaggaaagaatgtcactttgaaaactattaagaagaagcagaaacacaagggacgtgggacagttcgtactgtgactaaaacagtttccaatgactctttctttaacttttttgcccctcctgaagttcctgagagtggagatctggatgatgatgctgaagctatccttgctgcagacttcgaaattggtcactttttacgtgagcgtataatcccaagatcagtgttatattttactggagaagctattgaagatgatgatgatgattatgatgaagaaggtgaagaagcggatgaggaaggggaagaagaaggagatgaggaaaatgatccagactatgacccaaagaaggatcaaaacccagcagagtgcaagcagcagtgaagcaggatggtctaccttctgcttccctggaaaggatgaatttacatcatttgacaagcctattttcaagttatttgttgtttgtttgcttgtttttgtttttgcagctaaaataaaaatttcaaatacaatttaaaaaaaaaaaaaaaaaaaacaaaaaaaaaaaaagcaacaacaacaccgacgcacacaccacaacagagacccaggcaaagccgcacagaaaacggaggcgagaggagaggcaccaagagaacggacaggccgcggccagccgcgaaaggcgaaacaagcagaggaggggggcgggtagacagcaccaatcacgaggaggcggcacgaaagcacggaacgacgcaggccacactacggagacagcacctagaggagagagaacaaccagacgagcgacgggcgagctagcaacaacagctgcggaggagaaaagacgagtggtcagtcaagagagaaggcaccaatgggggggacagtaaaacggtcacacaaccagcggatagccagctgcggagagatacaccacgggtaggatgcgagacacacatcgagctgcggcgagcagccgagctacaaatcg

SEQ ID NO: 328100 - DNA, 1864 bp, Homo sapiens
gtggaagtgaggaagagggagagctcctgggcaccagaatgaatggggagggtcctttaggcactgtgaggcctttagcttttactcctactgagactggacatcgcaggagagtttcagagcagagaagtgctatgactgctcttgaagtttaagaggaccaggtggctggctttgctgtgtgtcagagaacaggagcagaaacagggagaccagctgggaggtgactgcaaaagtccaggtgagaggcgatggagctagtgaggagtgccggaggcctggtgtattctgacggtgccaggacctgtgataggtgctgagagagatgaggaactgctcagatcaccagctgcttcaggttaccagcccacacctgtctgtctcacctctgacaaccttggtaaagaaaccaaggcttagagacctgctcacagtcgtttcgtgagggaatgcaacatctgggtctagggtccaaatctatctctgctgtgaagaggaactcatacaggagatctacatgattaccaattcttggccttgcagtggagatatttggagttcttacaacatggcagacattgacaacaaagaacagtctgaacttgatcaagatttggatgatgttgaagaagtagaagaagaggaaactggtgaagaaacaaaactcaaagcacgtcagctaactgttcagatgatgcaaaatcctcagattcttgcagcccttcaagaaagacttgatggtctggtagaaacaccaacaggatacattgaaagcctgcctagggtagttaaaagacgagtgaatgctctcaaaaacctgcaagttaaatgtgcacagatagaagccaaattctatgaggaagttcatgatcttgaaaggaagtatgctgttctctatcagcctctatttgataagcgatttgaaattattaatgcaatttatgaacctacggaagaagaatgtgaatggaaaccagatgaagaagatgagatttcggaggaattgaaagaaaaggccaagattgaagatgagaaaaaggatgaagaaaaagaagaccccaaaggaattcctgaattttggttaactgtttttaagaatgttgacttgctcagtgatatggttcaggaacacgatgaacctattctgaagcacttgaaagatattaaagtgaagttctcagatgctggccagcctatgagttttgtcttagaatttcactttgaacccaatgaatattttacaaatgaagtgctgacaaagacatacaggatgaggtcagaaccagatgattctgatcccttttcttttgatggaccagaaattatgggttgtacagggtgccagatagattggaaaaaaggaaagaatgtcactttgaaaactattaagaagaagcagaaacacaagggacgtgggacagttcgtactgtgactaaaacagtttccaatgactctttctttaacttttttgcccctcctgaagttcctgagagtggagatctggatgatgatgctgaagctatccttgctgcagacttcgaaattggtcactttttacgtgagcgtataatcccaagatcagtgttatattttactggagaagctattgaagatgatgatgatgattatgatgaagaaggtgaagaagcggatgaggaaggggaagaagaaggagatgaggaaaatgatccagactatgacccaaagaaagatcaaaccagagagtgcaagcagagtgaagccgatgttgtggctgagttacttgatggttactctgcttccggaaggtaattcctctttgaaagcttttcaagtattggggggggggtgtgggtaaaaaaattcaatacatttttaaaaaat

SEQ ID NO: 328101 - DNA, 1751 bp, Homo sapiens
gtggaagtgaggaagagggagagctcctgggcaccagaatgaatggggagggtcctttaggcactgtgaggcctttagcttttactcctactgagactggacatcgcaggagagtttcagagcagagaagtgctatgactgctcttgaagtttaagaggaccaggtggctggctttgctgtgtgtcagagaacaggagcagaaacagggagaccagctgggaggtgactgcaaaagtccaggtgagaggcgatggagctagtgaggagtgccggaggcctggtgtattctgacggtgccaggacctgtgataggtgctgagagagatgaggaactgctcagatcaccagctgcttcaggttaccagcccacacctgtctgtctcacctctgacaaccttggtaaagaaaccaaggcttagagacctgctcacagtcgtttcgtgagggaatgcaacatctgggtctagggtccaaatctatctctgctgtgaagaggaactcatacaggagatctacatgattaccaattcttggccttgcagtggagatatttggagttcttacaacatggcagacattgacaacaaagaacagtctgaacttgatcaagatttggatgatgttgaagaagtagaagaagaggaaactggtgaagaaacaaaactcaaagcacgtcagctaactgttcagatgatgcaaaatcctcagattcttgcagcccttcaagaaagacttgatggtctggtagaaacaccaacaggatacattgaaagcctgcctagggtagttaaaagacgagtgaatgctctcaaaaacctgcaagttaaatgtgcacagatagaagccaaattctatgaggaagttcatgatcttgaaaggaagtatgctgttctctatcagcctctatttgataagcgatttgaaattattaatgcaatttatgaacctacggaagaagaatgtgaatggaaaccagatgaagaagatgagatttcggaggaattgaaagaaaaggccaagattgaagatgagaaaaaggatgaagaaaaagaagaccccaaaggaattcctgaattttggttaactgtttttaagaatgttgacttgctcagtgatatggttcaggaacacgatgaacctattctgaagcacttgaaagatattaaagtgaagttctcagatgctggccagcctatgagttttgtcttagaatttcactttgaacccaatgaatattttacaaatgaagtgctgacaaagacatacaggatgaggtcagaaccagatgattctgatcccttttcttttgatggaccagaaattatgggttgtacagggtgccagatagattggaaaaaaggaaagaatgtcactttgaaaactattaagaagaagcagaaacacaagggacgtgggacagttcgtactgtgactaaaacagtttccaatgactctttctttaacttttttgcccctcctgaagttcctgagagtggagatctggatgatgatgctgaagctatccttgctgcagacttcgaaattggtcactttttacgtgagcgtataatcccaagatcagtgttatattttactggagaagctattgaagatgatgatgatgattatgatgaagaaggtgaagaagcggatgagggttatcagctctttgaagaagtcaaaagctgcagtaaacttttccaacgttggctgcagtaactattttcaataaaagctgtctggatgtctc

SEQ ID NO: 328102 - DNA, 1981 bp, Homo sapiens
gtggaagtgaggaagagggagagctcctgggcaccagaatgaatggggagggtcctttaggcactgtgaggcctttagcttttactcctactgagactggacatcgcaggagagtttcagagcagagaagtgctatgactgctcttgaagtttaagaggaccaggtggctggctttgctgtgtgtcagagaacaggagcagaaacagggagaccagctgggaggtgactgcaaaagtccaggtgagaggcgatggagctagtgaggagtgccggaggcctggtgtattctgacggtgccaggacctgtgataggtgctgagagagatgaggaactgctcagatcaccagctgcttcaggttaccagcccacacctgtctgtctcacctctgacaaccttggtaaagaaaccaaggcttagagacctgctcacagtcgtttcgtgagggaatgcaacatctgggtctagggtccaaatctatctctgctgtgaagaggaactcatacaggagatctacatgattaccaattcttggccttgcagtggagatatttggagttcttacaacatggcagacattgacaacaaagaacagtctgaacttgatcaagatttggatgatgttgaagaagtagaagaagaggaaactggtgaagaaacaaaactcaaagcacgtcagctaactgttcagatgatgcaaaatcctcagattcttgcagcccttcaagaaagacttgatggtctggtagaaacaccaacaggatacattgaaagcctgcctagggtagttaaaagacgagtgaatgctctcaaaaacctgcaagttaaatgtgcacagatagaagccaaattctatgaggaagttcatgatcttgaaaggaagtatgctgttctctatcagcctctatttgataagcgatttgaaattattaatgcaatttatgaacctacggaagaagaatgtgaatggaaaccagatgaagaagatgagatttcggaggaattgaaagaaaaggccaagattgaagatgagaaaaaggatgaagaaaaagaagaccccaaaggaattcctgaattttggttaactgtttttaagaatgttgacttgctcagtgatatggttcaggaacacgatgaacctattctgaagcacttgaaagatattaaagtgaagttctcagatgctggccagcctatgagttttgtcttagaatttcactttgaacccaatgaatattttacaaatgaagtgctgacaaagacatacaggatgaggtcagaaccagatgattctgatcccttttcttttgatggaccagaaattatgggttgtacagggtgccagatagattggaaaaaaggaaagaatgtcactttgaaaactattaagaagaagcagaaacacaagggacgtgggacagttcgtactgtgactaaaacagtttccaatgactctttctttaacttttttgcccctcctgaagttcctgagagtggagatctggatgatgatgctgaagctatccttgctgcagacttcgaaattggtcactttttacgtgagcgtataatcccaagatcagtgttatattttactggagaagctattgaagatgatgatgatgattatgatgaagaaggtgaagaagcggatgaggtaatgtttaccaaatgagcaaataattctctgtggttaacacattgagaagcaaattgaatgacttatgtattcctttgctataatcattctgtgatttgggataaaaacattttggaaaacatgattttagaattctacagccaaacaatgtatgtataaggtttcaataaataaattgcaaaactcagcaacatttttttatttcaaataattttgttctgctgcagggttatcagctctttgaagaagtcaaaagctgcagtaaacttttccaacgttggctgcagtaactattttcaataaaagctgtctggatgtctc

SEQ ID NO: 328103 - DNA, 1848 bp, Homo sapiens
gtggaagtgaggaagagggagagctcctgggcaccagaatgaatggggagggtcctttaggcactgtgaggcctttagcttttactcctactgagactggacatcgcaggagagtttcagagcagagaagtgctatgactgctcttgaagtttaagaggaccaggtggctggctttgctgtgtgtcagagaacaggagcagaaacagggagaccagctgggaggtgactgcaaaagtccaggtgagaggcgatggagctagtgaggagtgccggaggcctggtgtattctgacggtgccaggacctgtgataggtgctgagagagatgaggaactgctcagatcaccagctgcttcaggttaccagcccacacctgtctgtctcacctctgacaaccttggtaaagaaaccaaggcttagagacctgctcacagtcgtttcgtgagggaatgcaacatctgggtctagggtccaaatctatctctgctgtgaagaggaactcatacaggagatctacatgattaccaattcttggccttgcagtggagatatttggagttcttacaacatggcagacattgacaacaaagaacagtctgaacttgatcaagatttggatgatgttgaagaagtagaagaagaggaaactggtgaagaaacaaaactcaaagcacgtcagctaactgttcagatgatgcaaaatcctcagattcttgcagcccttcaagaaagacttgatggtctggtagaaacaccaacaggatacattgaaagcctgcctagggtagttaaaagacgagtgaatgctctcaaaaacctgcaagttaaatgtgcacagatagaagccaaattctatgaggaagttcatgatcttgaaaggaagtatgctgttctctatcagcctctatttgataagcgatttgaaattattaatgcaatttatgaacctacggaagaagaatgtgaatggaaaccagatgaagaagatgagatttcggaggaattgaaagaaaaggccaagattgaagatgagaaaaaggatgaagaaaaagaagaccccaaaggaattcctgaattttggttaactgtttttaagaatgttgacttgctcagtgatatggttcaggaacacgatgaacctattctgaagcacttgaaagatattaaagtgaagttctcagatgctggccagcctatgagttttgtcttagaatttcactttgaacccaatgaatattttacaaatgaagtgctgacaaagacatacaggatgaggtcagaaccagatgattctgatcccttttcttttgatggaccagaaattatgggttgtacagggtgccagatagattggaaaaaaggaaagaatgtcactttgaaaactattaagaagaagcagaaacacaagggacgtgggacagttcgtactgtgactaaaacagtttccaatgactctttctttaacttttttgcccctcctgaagttcctgagagtggagatctggatgatgatgctgaagctatccttgctgcagacttcgaaattggtcactttttacgtgagcgtataatcccaagatcagtgttatattttactggagaagctattgaagatgatgatgatgattatgatgaagaaggtgaagaagcggatgaggtaatgtttaccaaatgagcaaataattctctgtggttaacacattgagaagcaaattgaatgacttatgtattcctttgctataatcattctgtgatttgggataaaaacattttggaaaacatgattttagaattctacagccaaacaatgtatgtataaggtttcaataaataaattgcaaaactcag

SEQ ID NO: 328104 - DNA, 1981 bp, Homo sapiens; identical to SEQ ID NO: 328102

SEQ ID NO: 328105 - DNA, 1582 bp, Homo sapiens
gtggaagtgaggaagagggagagctcctgggcaccagaatgaatggggagggtcctttaggcactgtgaggcctttagcttttactcctactgagactggacatcgcaggagagtttcagagcagagaagtgctatgactgctcttgaagtttaagaggaccaggtggctggctttgctgtgtgtcagagaacaggagcagaaacagggagaccagctgggaggtgactgcaaaagtccaggtgagaggcgatggagctagtgaggagtgccggaggcctggtgtattctgacggtgccaggacctgtgataggtgctgagagagatgaggaactgctcagatcaccagctgcttcaggttaccagcccacacctgtctgtctcacctctgacaaccttggtaaagaaaccaaggcttagagacctgctcacagtcgtttcgtgagggaatgcaacatctgggtctagggtccaaatctatctctgctgtgaagaggaactcatacaggagatctacatgattaccaattcttggccttgcagtggagatatttggagttcttacaacatggcagacattgacaacaaagaacagtctgaacttgatcaagatttggatgatgttgaagaagtagaagaagaggaaactggtgaagaaacaaaactcaaagcacgtcagctaactgttcagatgatgcaaaatcctcagattcttgcagcccttcaagaaagacttgatggtctggtagaaacaccaacaggatacattgaaagcctgcctagggtagttaaaagacgagtgaatgctctcaaaaacctgcaagttaaatgtgcacagatagaagccaaattctatgaggaagttcatgatcttgaaaggaagtatgctgttctctatcagcctctatttgataagcgatttgaaattattaatgcaatttatgaacctacggaagaagaatgtgaatggaaaccagatgaagaagatgagatttcggaggaattgaaagaaaaggccaagattgaagatgagaaaaaggatgaagaaaaagaagaccccaaaggaattcctgaattttggttaactgtttttaagaatgttgacttgctcagtgatatggttcaggaacacgatgaacctattctgaagcacttgaaagatattaaagtgaagttctcagatgctggccagcctatgagttttgtcttagaatttcactttgaacccaatgaatattttacaaatgaagtgctgacaaagacatacaggatgaggtcagaaccagatgattctgatcccttttcttttgatggaccagaaattatgggttgtacagggtgccagatagattggaaaaaaggaaagaatgtcactttgaaaactattaagaagaagcagaaacacaagggacgtgggacagttcgtactgtgactaaaacagtttccaatgactctttctttaacttttttgcccctcctgaagtcctgagagtggagatctggatgatgatgctgaagctattcattactgctgagtgacatcgcgacactcggtacgtgcgctgtatatctcgtgaccac

SEQ ID NO: 328106 - DNA, 1692 bp, Homo sapiens
gtggaagtgaggaagagggagagctcctgggcaccagaatgaatggggagggtcctttaggcactgtgaggcctttagcttttactcctactgagactggacatcgcaggagagtttcagagcagagaagtgctatgactgctcttgaagtttaagaggaccaggtggctggctttgctgtgtgtcagagaacaggagcagaaacagggagaccagctgggaggtgactgcaaaagtccaggtgagaggcgatggagctagtgaggagtgccggaggcctggtgtattctgacggtgccaggacctgtgataggtgctgagagagatgaggaactgctcagatcaccagctgcttcaggttaccagcccacacctgtctgtctcacctctgacaaccttggtaaagaaaccaaggcttagagacctgctcacagtcgtttcgtgagggaatgcaacatctgggtctagggtccaaatctatctctgctgtgaagaggaactcatacaggagatctacatgattaccaattcttggccttgcagtggagatatttggagttcttacaacatggcagacattgacaacaaagaacagtctgaacttgatcaagatttggatgatgttgaagaagtagaagaagaggaaactggtgaagaaacaaaactcaaagcacgtcagctaactgttcagatgatgcaaaatcctcagattcttgcagcccttcaagaaagacttgatggtctggtagaaacaccaacaggatacattgaaagcctgcctagggtagttaaaagacgagtgaatgctctcaaaaacctgcaagttaaatgtgcacagatagaagccaaattctatgaggaagttcatgatcttgaaaggaagtatgctgttctctatcagcctctatttgataagcgatttgaaattattaatgcaatttatgaacctacggaagaagaatgtgaatggaaaccagatgaagaagatgagatttcggaggaattgaaagaaaaggccaagattgaagatgagaaaaaggatgaagaaaaagaagaccccaaaggaattcctgaattttggttaactgtttttaagaatgttgacttgctcagtgatatggttcaggaacacgatgaacctattctgaagcacttgaaagatattaaagtgaagttctcagatgctggccagcctatgagttttgtcttagaatttcactttgaacccaatgaatattttacaaatgaagtgctgacaaagacatacaggatgaggtcagaaccagatgattctgatcccttttcttttgatggaccagaaattatgggttgtacagggtgccagatagattgaaaaaaaaaaaaaaaaaaaaaaaaaacaaaatttggggggggctgggccgaaaaagattctataagaaccaattcggtgtggggcggcgggggggcccagagtaggggcaagccgtgtggacacgtgtggtcaatgacgggggtttcccaaggaggagaaccggggcgccaaggaacactagggcggggggttccccacacaattaaaaaaaacgcgccgggggggggcaccggggcggttcggggaaccaactcccaaaggggggtctcggagggccaccgggggaccctactaaaggggagtccaaggggagccgaatacaaattacggccgacggg

SEQ ID NO: 328107 - DNA, 221 bp, Homo sapiens
ttctccagattctgaatgttctacatctgggcacaagattaccgttctttcattgtaccatctcaggctcagtcattgttacttaagcaggccaccatgttgcgggactggtggggatgagcttgcaggctcagttgtcagtgtgagaactttccctttcctatgaccttccagatgaggaactgctcagatcaccagctgcttcaggttaccagcccaca

SEQ ID NO: 328108 - DNA, 204 bp, Homo sapiens
ctactttggcctcctgaagtgttgggactacagttgtgagccatcacacccagcctctaagagtcttacatgtgccaaattaagtaacacagttattcctaaattttctgcttttgttttcctttaaaaatagatgatgatgctgaagctatccttgctgcagacttcgaaattggtcactttttacgtgagcgtataatccca

SEQ ID NO: 328109 - DNA, 239 bp, Homo sapiens
atatctatttgatttttatttactttgaatctaccttttgcttcagataaaaaacctgtcattcactaactccaatgcttcagtttcagtatgacaaaagaagtgtgacttccattttactctgatgctatataactgatttctaacctttcagcctgcctagggtagttaaaagacgagtgaatgctctcaaaaacctgcaagttaaatgtgcacagatagaagccaaattctatgag

SEQ ID NO: 328110 - DNA, 387 bp, Homo sapiens
atgtctcagtcagctggtgtttgtgtagtaacagaacacagtcctcgaatgccatgttattcatttttattatttttttaatttgaaggaacacgatgaacctattctgaagcacttgaaagatattaaagtgaagttctcagatgctggccagcctatggtaaaagaactttgaaatatttataattttgtaacatgcttacaggtagataaatagaagcttttaaaaagataacattcaagggtaaggttggtgctctttgttatagtgaataaatatttggatgctgctaattgtgaggcagtatttattccttttcctccttctgatcataaattgtgtttgaaacacagacaatccttgttcctggataagtggataaaaat

SEQ ID NO: 328111 - DNA, 644 bp, Homo sapiens
cagaggaggttagacaccggcgggaaccagaggagcccaagcgcggcgcctgggcctcggggctgcaggagtcctcggtgggggtatggaggtcgccggggaaggaggacggttcagttgctaggcaacccggcctggacccgcctctcgctcgcgttgctgggagactacaaggccgggaggagggcggcgaaagggccctacgtgctgacgctaattgtatatgagcgcgagcggcgggctcttgggtcttttttagcgccatctgctcgcggcgccgcctcctgctcctcccgctgctgctgccgctgccgccctgagtcactgcctgcgcagctccggccgcctggctccccatactagtcgccggtaacggatgggggcctggaagggaagggggaacgtggtgttggctgggcggcctgcgcagatgggagggccggagggatggagggactgggagccgggagtcggggccgctggccgcccgtggcctccggggtcgtcctgtgaggtcggacaggaccgcggagtccggaccccggagcctgagaggggccccggggccgaccagcgcttttatcggggacggctgaggcgacgtaggggttggcgcggcctggaggcctaaggttctctgagct

SEQ ID NO: 328112 - DNA, 790 bp, Homo sapiens
gatgatgtagaggtcgtcactcggtttaatttcagtacggggctgggcgttaggcggacatattgctgggccgggcttgtcgatgtcagcagccgccctgagtcactgcctgcgcagctccggccgcctggctccccatactagtcgccgcacgtcagctaactgttcagatgatgcaaaatcctcagattcttgcagcccttcaagaaagacttgatggtctggtagaaacaccaacaggatacattgaaagcctgcctagggtagttaaaagacgagtgaatgctctcaaaaacctgcaagttaaatgtgcacagatagaagccaaattctatgaggaagttcatgatcttgaaaggaagtatgctgttctctatcagcctctatttgataagcgatttgaaattattaatgcaatttatgaacctacggaagaagaatgtgaatggaaaccagatgaagaagatgagatttcggaggaattgaaagaaaaggccaagattgaagatgagaaaaaggatgaagaaaaagaagaccccaaaggaattcctgaattttggttaactgtttttaagaatgttgacttgctcagtgatatggttcaggaacacgatgaacctattctgaagcacttgaaagatattaaagtgaagttctcagatgctggccagcctatgagtattgtttagaattcatttgaaccatgatattttcaatgaagtgctgcaagactcggataggtcgaccgatgtctgatccttctttgtgccgaatttggtgcgggccgaat

SEQ ID NO: 328113 - DNA, 509 bp, Homo sapiens
ccactcccgcccacccaacacccgcaggaccgcgtttgaatccggacgaggtgatccttttcttttgatggaccagaaacttatgggttgtacatggtgccagatagattggaaaaaaggaaagaatgtcactttgaaaactattaagaagaagcagaaacacaagggacgtgggacagttcgtactgtgactaaaacagtttccaatgactctttctttaacttttttgcccctcctgaagttcctgagagtggagatctggatgatgatgctgaagctatccttgctgcagacttcgaaattggtcactttttacgtgagcgtataatcccaagatcagtgttatattttactggagaagctattgaagatgatgatgatgattatgatgaagaaggtgaagaagcggatgagggttatcagctctttgaagaagtcaaaagctgcagtaaacttttccaacgttggctgcagtaactattttcaataaaagctgtctggatgtctc

SEQ ID NO: 328114 - DNA, 388 bp, Homo sapiens
ccaccggcaggttgtactccaccggcaggggacgtgggacagttcgtactgtgactaaaacagtttccaatgactctttctttaacttttttgcccctcctgaagttcctgagagtggagatctggatgatgatgctgaagctatccttgctgcagacttcgaaattggtcactttttacgtgagcgtataatcccaagatcagtgttatattttactggagaagctattgaagatgatgatgatgattatgatgaagaaggtgaagaagcggatgaggaaggggaagaagaaggagatgaggaaaatgatccagactatgacccaaagaaggatcaaacccagcagagtacagccggtggagtacacctgccatggggccggcctat

SEQ ID NO: 328115 - DNA, 5430 bp, Homo sapiens
gtggaagtgaggaagagggagagctcctgggcaccagaatgaatggggagggtcctttaggcactgtgaggcctttagcttttactcctactgagactggacatcgcaggagagtttcagagcagagaagtgctatgactgctcttgaagtttaagaggaccaggtggctggctttgctgtgtgtcagagaacaggagcagaaacagggagaccagctgggaggtgactgcaaaagtccaggtgagaggcgatggagctagtgaggagtgccggaggcctggtgtattctgacggtgccaggacctgtgataggtgctgagagagatgaggaactgctcagatcaccagctgcttcaggttaccagcccacacctgtctgtctcacctctgacaaccttggtaaagaaaccaaggcttagagacctgctcacagtcgtttcgtgagggaatgcaacatctgggtctagggtccaaatctatctctgctgtgaagaggaactcatacaggagatctacatgattaccaattcttggccttgcagtggagatatttggagttcttacaacatggcagacattgacaacaaagaacagtctgaacttgatcaagatttggatgatgttgaagaagtagaagaagaggaaactggtgaagaaacaaaactcaaagcacgtcagctaactgttcagatgatgcaaaatcctcagattcttgcagcccttcaagaaagacttgatggtctggtagaaacaccaacaggatacattgaaagcctgcctagggtagttaaaagacgagtgaatgctctcaaaaacctgcaagttaaatgtgcacagatagaagccaaattctatgaggaagttcatgatcttgaaaggaagtatgctgttctctatcagcctctatttgataagcgatttgaaattattaatgcaatttatgaacctacggaagaagaatgtgaatggaaaccagatgaagaagatgagatttcggaggaattgaaagaaaaggccaagattgaagatgagaaaaaggatgaagaaaaagaagaccccaaaggaattcctgaattttggttaactgtttttaagaatgttgacttgctcagtgatatggttcaggaacacgatgaacctattctgaagcacttgaaagatattaaagtgaagttctcagatgctggccagcctatgagttttgtcttagaatttcactttgaacccaatgaatattttacaaatgaagtgctgacaaagacatacaggatgaggtcagaaccagatgattctgatcccttttcttttgatggaccagaaattatgggttgtacagggtgccagatagattggaaaaaaggaaagaatgtcactttgaaaactattaagaagaagcagaaacacaagggacgtgggacagttcgtactgtgactaaaacagtttccaatgactctttctttaacttttttgcccctcctgaagttcctgagagtggagatctggatgatgatgctgaagctatccttgctgcagacttcgaaattggtcactttttacgtgagcgtataatcccaagatcagtgttatattttactggagaagctattgaagatgatgatgatgattatgatgaagaaggtgaagaagcggatgaggaaggggaagaagaaggagatgaggaaaatgatccagactatgacccaaagaaggatcaaaacccagcagagtgcaagcagcagtgaagcaggatgtatgtggccttgaggataacctgcactgtaatagcctaaacacaactcttatttacttacagccttatgtttttgtattttcttggtagactaggtaatttttttttaaaggacaggaaactgatattttaaagaccaatttgttctacctagcattttaactagtttttctgccagctatgttgaatgcacaaattctgtcacgcatgttcattcattgctacataatttggttcttctggaatatttttatgtagctcttggagtacagctatgaaaattaacaactgttaaaggaaataccttttttttttttttgtaattttttccttgaagaaccaaagtattttttcagctggttgttgaatagggttaagtccgcttggattagctgtgcctttcattactttgttacagaaatgcagtgacttatactaagacaatttattgtttaaaaaaaaaattggcaagacaactatatggttaagaatttccagtatgaccacacccaataactgttattagagtgttaatggattattgtgttttaggtgacatagttaactgtaaagtaacctgactcagtatagttactggtaccacagtgaggtgaataaaacgggattttcagaagttagcctgaatttaactgtatttttaaatttaacctccattaactaagcatcttttctttgtggtagggtctaccttctgcttccctggaaaggatgaatttacatcatttgacaagcctattttcaagttatttgttgtttgtttgcttgtttttgtttttgcagctaaaataaaaatttcaaatacaattttagttcttacaagataatgtcttaattttgtaccaattcaggtagaagtagaggcctaccttgaattaagggttatactcagtttttaacacattgttgaagaaaaggtaccagctttggaacgagatgctatactaataagcaagtgtaaaaaaaaaaaaaaaaagaggaagaaaatcttaagtgattgatgctgttttcttttaaaaaaaaaaaaaaaaaattcattttctttgggttagagctagagagaaggccccaagcttctatggtttcttctaattcttattgcttaaagtatgagtatgtcacttacccgtgcttctgtttactgtgtaattaaaatgggtagtactgtttacctaactacctcatggatgtgttaaggcatattgagttaaatctcatataatgtttctcaatcttgttaaaagctcaaaattttgggcctatttgtaatgccagtgtgacactaagcattttgttcacaccacgctttgataactaaactggaaaacaaaggtgttaagtacctctgttctggatctgggcagtcagcactctttttagatctttgtgtggctcctatttttatagaagtggagggatgcactatttcacaaggtccaagatttgttttcagatatttttgatgactgtattgtaaatactacagggatagcactatagtattgtagtcatgagacttaaagtggaaataagactatttttgacaaaagatgccattaaatttcagactgtagagccacatttacaatacctcaggctaattactgttaattttggggttgaacttttttttgacagtgagggtggattattggattgtcattagaggaaggtctagatttcctgctcttaataaaattacattgaattgatttttagaggtaatgaaaacttcctttctgagaagttagtgttaaggtcttggaatgtgaacacattgtttgtagtgctatccattcctctcctgagattttaacttactactggaaatccttaaccaattataatagctttttttctttattttcaaaatgatttcctttgctttgattagacactatgtgctttttttttttaaccatagttcatcgaaatgcagctttttctgaacttcaaagatagaatcccatttttaatgaactgaagtagcaaaatcatctttttcattctttaggaaatagctattgccaaagtgaaggtgtagataatacctagtcttgttacataaaggggatgtggtttgcagaagaattttctttataaaattgaagttttaagggacgtcagtgtttatgccatttttccagttccaaaatgattccattccattctagaaatttgaagtatgtaacctgaaatccttaataaaatttggatttaattttataaaatgtactggtgatattttgggtgtttttttttaaatgaatgtatatactttttttttgaagagtggagagtagtgatgtctagagggagctattttgtgctgaggccactatgttctgtaaatatataattttaagagcaacctcacaatccctgctaagtggagtttattatttgaagactaaaatggaattccatagttcctgataggttatattctgagttattattctgagttatctacaaacatttttgagatttgtctttacactctgattgtagtttccagcagcccacgcacactgccaagtaagtctcattttttcctgttagaaatggtgaaatatcatataatcacttataaagaaaactgatatgaaaaaattttagagttgtttgctttatggtcactcaagtagggtaagtgttccacaaattccacaagttgatagtttaacatggatgtctgaaagccacatatataatttcttaggattcttaaattagtaaatctagcttactgaagcagtattagcatcactattttagattgcaaaaataccttaattgtgtggaactggcttgtagagtggtacttaagaaaaatgggattctacctctatttctgttttagcacacttaatcaggaaaggatatattaactttcataaaaatatttttgttgtgtgaataggttaatgatatggtaaggcccctaaaataactgaattaattgtttattgtaattgtaggccattcccattattaaaaataaagacaaaacttgaagtaactgaaaatcttatcgtgctatgtagaaatattgaactaatattcaaatatttgaatgctttggtttcagggattggtttaaaattggagtccttttttatgggttagtcttacaaaaatttaagcctttatatttttgactttaaatcaaaacaaatgttattttaaatgtacagaatagattggtagtgcagaagagtgtaagttcttcataggagctttagaaaagagaaatatgtgctaattcagtttttttttaatctgcactgtacatatatacttggtaattatgagcttgattttgtttttggaaatatgtgttcataatttaggtaatttgctacttaaagcactaagtctctgatacctgaaaagtacatgtaaatggtgatggtgaaataatactgcagttaacttaatagatgtatactggtgatttttgtatgctggattaaaactccagatattaaaatataacctggataaaaagccaagttcttggactgattgaggatcacttacatgactttacagaaatggaaacatccttgttggtatatgaaattattttactcaaggataagtattcataagaaattttgattgatgtatattttcaaaaatacagtatgctttgta

SEQ ID NO: 328116 - DNA, 5376 bp, Homo sapiens
gtggaagtgaggaagagggagagctcctgggcaccagaatgaatggggagggtcctttaggcactgtgaggcctttagcttttactcctactgagactggacatcgcaggagagtttcagagcagagaagtgctatgactgctcttgaagtttaagaggaccaggtggctggctttgctgtgtgtcagagaacaggagcagaaacagggagaccagctgggaggtgactgcaaaagtccaggtgagaggcgatggagctagtgaggagtgccggaggcctggtgtattctgacggtgccaggacctgtgataggtgctgagagagatgaggaactgctcagatcaccagctgcttcaggttaccagcccacacctgtctgtctcacctctgacaaccttggtaaagaaaccaaggcttagagacctgctcacagtcgtttcgtgagggaatgcaacatctgggtctagggtccaaatctatctctgctgtgaagaggaactcatacaggagatctacatgattaccaattcttggccttgcagtggagatatttggagttcttacaacatggcagacattgacaacaaagaacagtctgaacttgatcaagatttggatgatgttgaagaagtagaagaagaggaaactggtgaagaaacaaaactcaaagcacgtcagctaactgttcagatgatgcaaaatcctcagattcttgcagcccttcaagaaagacttgatggtctggtagaaacaccaacaggatacattgaaagcctgcctagggtagttaaaagacgagtgaatgctctcaaaaacctgcaagttaaatgtgcacagatagaagccaaattctatgaggaagttcatgatcttgaaaggaagtatgctgttctctatcagcctctatttgataagcgatttgaaattattaatgcaatttatgaacctacggaagaagaatgtgaatggaaaccagatgaagaagatgagatttcggaggaattgaaagaaaaggccaagattgaagatgagaaaaaggatgaagaaaaagaagaccccaaaggaattcctgaattttggttaactgtttttaagaatgttgacttgctcagtgatatggttcaggaacacgatgaacctattctgaagcacttgaaagatattaaagtgaagttctcagatgctggccagcctatgagttttgtcttagaatttcactttgaacccaatgaatattttacaaatgaagtgctgacaaagacatacaggatgaggtcagaaccagatgattctgatcccttttcttttgatggaccagaaattatgggttgtacagggtgccagatagattggaaaaaaggaaagaatgtcactttgaaaactattaagaagaagcagaaacacaagggacgtgggacagttcgtactgtgactaaaacagtttccaatgactctttctttaacttttttgcccctcctgaagttcctgagagtggagatctggatgatgatgctgaagctatccttgctgcagacttcgaaattggtcactttttacgtgagcgtataatcccaagatcagtgttatattttactggagaagctattgaagatgatgatgatgattatgatgaagaaggtgaagaagcggatgaggaaggggaagaagaaggagatgaggaaaatgatccagactatgacccaaagaaggatcaaaacccagcagagtgcaagcagcagtgaagcaggatgtatgtggccttgaggataacctgcactgtaatagcctaaacacaactcttatttacttacagccttatgtttttgtattttcttggtagactaggtaatttttttttaaaggacaggaaactgatattttaaagaccaatttgttctacctagcattttaactagtttttctgccagctatgttgaatgcacaaattctgtcacgcatgttcattcattgctacataatttggttcttctggaatatttttatgtagctcttggagtacagctatgaaaattaacaactgttaaaggaaataccttttttttttttttgtaattttttccttgaagaaccaaagtattttttcagctggttgttgaatagggttaagtccgcttggattagctgtgcctttcattactttgttacagaaatgcagtgacttatactaagacaatttattgtttaaaaaaaaaattggcaagacaactatatggttaagaatttccagtatgaccacacccaataactgttattagagtgttaatggattattgtgttttaggtgacatagttaactgtaaagtaacctgactcagtatagttactggtaccacagtgaggtgaataaaacgggattttcagaagttagcctgaatttaactgtatttttaaatttaacctccattaactaagcatcttttctttgtggtagggtctaccttctgcttccctggaaaggatgaatttacatcatttgacaagcctattttcaagttatttgttgtttgtttgcttgtttttgtttttgcagctaaaataaaaatttcaaatacaattttagttcttacaagataatgtcttaattttgtaccaattcaggtagaagtagaggcctaccttgaattaagggttatactcagtttttaacacattgttgaagaaaaggtaccagctttggaacgagatgctatactaataagcaagtgtaaaaaaaaaaaaaaaaagaggaagaaaatcttaagtgattgatgctgttttcttttaaaaaaaaaaaaaaaaaattcattttctttgggttagagctagagagaaggccccaagcttctatggtttcttctaattcttattgcttaaagtatgagtatgtcacttacccgtgcttctgtttactgtgtaattaaaatgggtagtactgtttacctaactacctcatggatgtgttaaggcatattgagttaaatctcatataatgtttctcaatcttgttaaaagctcaaaattttgggcctatttgtaatgccagtgtgacactaagcattttgttcacaccacgctttgataactaaactggaaaacaaaggtgttaagtacctctgttctggatctgggcagtcagcactctttttagatctttgtgtggctcctatttttatagaagtggagggatgcactatttcacaaggtccaagatttgttttcagatatttttgatgactgtattgtaaatactacagggatagcactatagtattgtagtcatgagacttaaagtggaaataagactatttttgacaattactgttaattttggggttgaacttttttttgacagtgagggtggattattggattgtcattagaggaaggtctagatttcctgctcttaataaaattacattgaattgatttttagaggtaatgaaaacttcctttctgagaagttagtgttaaggtcttggaatgtgaacacattgtttgtagtgctatccattcctctcctgagattttaacttactactggaaatccttaaccaattataatagctttttttctttattttcaaaatgatttcctttgctttgattagacactatgtgctttttttttttaaccatagttcatcgaaatgcagctttttctgaacttcaaagatagaatcccatttttaatgaactgaagtagcaaaatcatctttttcattctttaggaaatagctattgccaaagtgaaggtgtagataatacctagtcttgttacataaaggggatgtggtttgcagaagaattttctttataaaattgaagttttaagggacgtcagtgtttatgccatttttccagttccaaaatgattccattccattctagaaatttgaagtatgtaacctgaaatccttaataaaatttggatttaattttataaaatgtactggtgatattttgggtgtttttttttaaatgaatgtatatactttttttttgaagagtggagagtagtgatgtctagagggagctattttgtgctgaggccactatgttctgtaaatatataattttaagagcaacctcacaatccctgctaagtggagtttattatttgaagactaaaatggaattccatagttcctgataggttatattctgagttattattctgagttatctacaaacatttttgagatttgtctttacactctgattgtagtttccagcagcccacgcacactgccaagtaagtctcattttttcctgttagaaatggtgaaatatcatataatcacttataaagaaaactgatatgaaaaaattttagagttgtttgctttatggtcactcaagtagggtaagtgttccacaaattccacaagttgatagtttaacatggatgtctgaaagccacatatataatttcttaggattcttaaattagtaaatctagcttactgaagcagtattagcatcactattttagattgcaaaaataccttaattgtgtggaactggcttgtagagtggtacttaagaaaaatgggattctacctctatttctgttttagcacacttaatcaggaaaggatatattaactttcataaaaatatttttgttgtgtgaataggttaatgatatggtaaggcccctaaaataactgaattaattgtttattgtaattgtaggccattcccattattaaaaataaagacaaaacttgaagtaactgaaaatcttatcgtgctatgtagaaatattgaactaatattcaaatatttgaatgctttggtttcagggattggtttaaaattggagtccttttttatgggttagtcttacaaaaatttaagcctttatatttttgactttaaatcaaaacaaatgttattttaaatgtacagaatagattggtagtgcagaagagtgtaagttcttcataggagctttagaaaagagaaatatgtgctaattcagtttttttttaatctgcactgtacatatatacttggtaattatgagcttgattttgtttttggaaatatgtgttcataatttaggtaatttgctacttaaagcactaagtctctgatacctgaaaagtacatgtaaatggtgatggtgaaataatactgcagttaacttaatagatgtatactggtgatttttgtatgctggattaaaactccagatattaaaatataacctggataaaaagccaagttcttggactgattgaggatcacttacatgactttacagaaatggaaacatccttgttggtatatgaaattattttactcaaggataagtattcataagaaattttgattgatgtatattttcaaaaatacagtatgctttgta

SEQ ID NO: 328117 - DNA, 4756 bp, Homo sapiens
gtggaagtgaggaagagggagagctcctgggcaccagaatgaatggggagggtcctttaggcactgtgaggcctttagcttttactcctactgagactggacatcgcaggagagtttcagagcagagaagtgctatgactgctcttgaagtttaagaggaccaggtggctggctttgctgtgtgtcagagaacaggagcagaaacagggagaccagctgggaggtgactgcaaaagtccaggtgagaggcgatggagctagtgaggagtgccggaggcctggtgtattctgacggtgccaggacctgtgataggtgctgagagagatgaggaactgctcagatcaccagctgcttcaggttaccagcccacacctgtctgtctcacctctgacaaccttggtaaagaaaccaaggcttagagacctgctcacagtcgtttcgtgagggaatgcaacatctgggtctagggtccaaatctatctctgctgtgaagaggaactcatacaggagatctacatgattaccaattcttggccttgcagtggagatatttggagttcttacaacatggcagacattgacaacaaagaacagtctgaacttgatcaagatttggatgatgttgaagaagtagaagaagaggaaactggtgaagaaacaaaactcaaagcacgtcagctaactgttcagatgatgcaaaatcctcagattcttgcagcccttcaagaaagacttgatggtctggtagaaacaccaacaggatacattgaaagcctgcctagggtagttaaaagacgagtgaatgctctcaaaaacctgcaagttaaatgtgcacagatagaagccaaattctatgaggaagttcatgatcttgaaaggaagtatgctgttctctatcagcctctatttgataagcgatttgaaattattaatgcaatttatgaacctacggaagaagaatgtgaatggaaaccagatgaagaagatgagatttcggaggaattgaaagaaaaggccaagattgaagatgagaaaaaggatgaagaaaaagaagaccccaaaggaattcctgaattttggttaactgtttttaagaatgttgacttgctcagtgatatggttcaggaacacgatgaacctattctgaagcacttgaaagatattaaagtgaagttctcagatgctggccagcctatgagttttgtcttagaatttcactttgaacccaatgaatattttacaaatgaagtgctgacaaagacatacaggatgaggtcagaaccagatgattctgatcccttttcttttgatggaccagaaattatgggttgtacagggtgccagatagattggaaaaaaggaaagaatgtcactttgaaaactattaagaagaagcagaaacacaagggacgtgggacagttcgtactgtgactaaaacagtttccaatgactctttctttaacttttttgcccctcctgaagttcctgagagtggagatctggatgatgatgctgaagctatccttgctgcagacttcgaaattggtcactttttacgtgagcgtataatcccaagatcagtgttatattttactggagaagctattgaagatgatgatgatgattatgatgaagaaggtgaagaagcggatgaggaaggggaagaagaaggagatgaggaaaatgatccagactatgacccaaagaaggatcaaaacccagcagagtgcaagcagcagtgaagcaggatgtatgtggccttgaggataacctgcactggtctaccttctgcttccctggaaaggatgaatttacatcatttgacaagcctattttcaagttatttgttgtttgtttgcttgtttttgtttttgcagctaaaataaaaatttcaaatacaattttagttcttacaagataatgtcttaattttgtaccaattcaggtagaagtagaggcctaccttgaattaagggttatactcagtttttaacacattgttgaagaaaaggtaccagctttggaacgagatgctatactaataagcaagtgtaaaaaaaaaaaaaaaaagaggaagaaaatcttaagtgattgatgctgttttcttttaaaaaaaaaaaaaaaaaattcattttctttgggttagagctagagagaaggccccaagcttctatggtttcttctaattcttattgcttaaagtatgagtatgtcacttacccgtgcttctgtttactgtgtaattaaaatgggtagtactgtttacctaactacctcatggatgtgttaaggcatattgagttaaatctcatataatgtttctcaatcttgttaaaagctcaaaattttgggcctatttgtaatgccagtgtgacactaagcattttgttcacaccacgctttgataactaaactggaaaacaaaggtgttaagtacctctgttctggatctgggcagtcagcactctttttagatctttgtgtggctcctatttttatagaagtggagggatgcactatttcacaaggtccaagatttgttttcagatatttttgatgactgtattgtaaatactacagggatagcactatagtattgtagtcatgagacttaaagtggaaataagactatttttgacaaaagatgccattaaatttcagactgtagagccacatttacaatacctcaggctaattactgttaattttggggttgaacttttttttgacagtgagggtggattattggattgtcattagaggaaggtctagatttcctgctcttaataaaattacattgaattgatttttagaggtaatgaaaacttcctttctgagaagttagtgttaaggtcttggaatgtgaacacattgtttgtagtgctatccattcctctcctgagattttaacttactactggaaatccttaaccaattataatagctttttttctttattttcaaaatgatttcctttgctttgattagacactatgtgctttttttttttaaccatagttcatcgaaatgcagctttttctgaacttcaaagatagaatcccatttttaatgaactgaagtagcaaaatcatctttttcattctttaggaaatagctattgccaaagtgaaggtgtagataatacctagtcttgttacataaaggggatgtggtttgcagaagaattttctttataaaattgaagttttaagggacgtcagtgtttatgccatttttccagttccaaaatgattccattccattctagaaatttgaagtatgtaacctgaaatccttaataaaatttggatttaattttataaaatgtactggtgatattttgggtgtttttttttaaatgaatgtatatactttttttttgaagagtggagagtagtgatgtctagagggagctattttgtgctgaggccactatgttctgtaaatatataattttaagagcaacctcacaatccctgctaagtggagtttattatttgaagactaaaatggaattccatagttcctgataggttatattctgagttattattctgagttatctacaaacatttttgagatttgtctttacactctgattgtagtttccagcagcccacgcacactgccaagtaagtctcattttttcctgttagaaatggtgaaatatcatataatcacttataaagaaaactgatatgaaaaaattttagagttgtttgctttatggtcactcaagtagggtaagtgttccacaaattccacaagttgatagtttaacatggatgtctgaaagccacatatataatttcttaggattcttaaattagtaaatctagcttactgaagcagtattagcatcactattttagattgcaaaaataccttaattgtgtggaactggcttgtagagtggtacttaagaaaaatgggattctacctctatttctgttttagcacacttaatcaggaaaggatatattaactttcataaaaatatttttgttgtgtgaataggttaatgatatggtaaggcccctaaaataactgaattaattgtttattgtaattgtaggccattcccattattaaaaataaagacaaaacttgaagtaactgaaaatcttatcgtgctatgtagaaatattgaactaatattcaaatatttgaatgctttggtttcagggattggtttaaaattggagtccttttttatgggttagtcttacaaaaatttaagcctttatatttttgactttaaatcaaaacaaatgttattttaaatgtacagaatagattggtagtgcagaagagtgtaagttcttcataggagctttagaaaagagaaatatgtgctaattcagtttttttttaatctgcactgtacatatatacttggtaattatgagcttgattttgtttttggaaatatgtgttcataatttaggtaatttgctacttaaagcactaagtctctgatacctgaaaagtacatgtaaatggtgatggtgaaataatactgcagttaacttaatagatgtatactggtgatttttgtatgctggattaaaactccagatattaaaatataacctggataaaaagccaagttcttggactgattgaggatcacttacatgactttacagaaatggaaacatccttgttggtatatgaaattattttactcaaggataagtattcataagaaattttgattgatgtatattttcaaaaatacagtatgctttgta

SEQ ID NO: 328118 - DNA, 5935 bp, Homo sapiens
gtggaagtgaggaagagggagagctcctgggcaccagaatgaatggggagggtcctttaggcactgtgaggcctttagcttttactcctactgagactggacatcgcaggagagtttcagagcagagaagtgctatgactgctcttgaagtttaagaggaccaggtggctggctttgctgtgtgtcagagaacaggagcagaaacagggagaccagctgggaggtgactgcaaaagtccaggtgagaggcgatggagctagtgaggagtgccggaggcctggtgtattctgacggtgccaggacctgtgataggtgctgagagagatgaggaactgctcagatcaccagctgcttcaggttaccagcccacacctgtctgtctcacctctgacaaccttggtaaagaaaccaaggcttagagacctgctcacagtcgtttcgtgagggaatgcaacatctgggtctagggtccaaatctatctctgctgtgaagaggaactcatacaggagatctacatgattaccaattcttggccttgcagtggagatatttggagttcttacaacatggcagacattgacaacaaagaacagtctgaacttgatcaagatttggatgatgttgaagaagtagaagaagaggaaactggtgaagaaacaaaactcaaagcacgtcagctaactgttcagatgatgcaaaatcctcagattcttgcagcccttcaagaaagacttgatggtctggtagaaacaccaacaggatacattgaaagcctgcctagggtagttaaaagacgagtgaatgctctcaaaaacctgcaagttaaatgtgcacagatagaagccaaattctatgaggaagttcatgatcttgaaaggaagtatgctgttctctatcagcctctatttgataagcgatttgaaattattaatgcaatttatgaacctacggaagaagaatgtgaatggaaaccagatgaagaagatgagatttcggaggaattgaaagaaaaggccaagattgaagatgagaaaaaggatgaagaaaaagaagaccccaaaggaattcctgaattttggttaactgtttttaagaatgttgacttgctcagtgatatggttcaggaacacgatgaacctattctgaagcacttgaaagatattaaagtgaagttctcagatgctggccagcctatgagttttgtcttagaatttcactttgaacccaatgaatattttacaaatgaagtgctgacaaagacatacaggatgaggtcagaaccagatgattctgatcccttttcttttgatggaccagaaattatgggttgtacagggtgccagatagattggaaaaaaggaaagaatgtcactttgaaaactattaagaagaagcagaaacacaagggacgtgggacagttcgtactgtgactaaaacagtttccaatgactctttctttaacttttttgcccctcctgaagttcctgagagtggagatctggatgatgatgctgaagctatccttgctgcagacttcgaaattggtcactttttacgtgagcgtataatcccaagatcagtgttatattttactggagaagctattgaagatgatgatgatgattatgatgaagaaggtgaagaagcggatgaggtaatgtttaccaaatgagcaaataattctctgtggttaacacattgagaagcaaattgaatgacttatgtattcctttgctataatcattctgtgatttgggataaaaacattttggaaaacatgattttagaattctacagccaaacaatgtatgtataaggtttcaataaataaattgcaaaactcagcaacatttttttatttcaaataattttgttctgctgcagggttatcagctctttgaagaagtcaaaagctgcagtaaacttttccaacgttggctgcagtaactattttcaataaaagctgtctggatgtctcaagttgtgttgggaaatttttcatattagaagctttcaaattaaattgtattatcatcaaagtctgtaatcatgaaaatctgttgatccgtagagtaacttgtattaaattttccctacattatgagccagtttacctactatgtacatacttcatggatgcattttgaactttaatataggaaggggaagaagaaggagatgaggaaaatgatccagactatgacccaaagaaggatcaaaacccagcagagtgcaagcagcagtgaagcaggatgtatgtggccttgaggataacctgcactgtaatagcctaaacacaactcttatttacttacagccttatgtttttgtattttcttggtagactaggtaatttttttttaaaggacaggaaactgatattttaaagaccaatttgttctacctagcattttaactagtttttctgccagctatgttgaatgcacaaattctgtcacgcatgttcattcattgctacataatttggttcttctggaatatttttatgtagctcttggagtacagctatgaaaattaacaactgttaaaggaaataccttttttttttttttgtaattttttccttgaagaaccaaagtattttttcagctggttgttgaatagggttaagtccgcttggattagctgtgcctttcattactttgttacagaaatgcagtgacttatactaagacaatttattgtttaaaaaaaaaattggcaagacaactatatggttaagaatttccagtatgaccacacccaataactgttattagagtgttaatggattattgtgttttaggtgacatagttaactgtaaagtaacctgactcagtatagttactggtaccacagtgaggtgaataaaacgggattttcagaagttagcctgaatttaactgtatttttaaatttaacctccattaactaagcatcttttctttgtggtagggtctaccttctgcttccctggaaaggatgaatttacatcatttgacaagcctattttcaagttatttgttgtttgtttgcttgtttttgtttttgcagctaaaataaaaatttcaaatacaattttagttcttacaagataatgtcttaattttgtaccaattcaggtagaagtagaggcctaccttgaattaagggttatactcagtttttaacacattgttgaagaaaaggtaccagctttggaacgagatgctatactaataagcaagtgtaaaaaaaaaaaaaaaaagaggaagaaaatcttaagtgattgatgctgttttcttttaaaaaaaaaaaaaaaaaattcattttctttgggttagagctagagagaaggccccaagcttctatggtttcttctaattcttattgcttaaagtatgagtatgtcacttacccgtgcttctgtttactgtgtaattaaaatgggtagtactgtttacctaactacctcatggatgtgttaaggcatattgagttaaatctcatataatgtttctcaatcttgttaaaagctcaaaattttgggcctatttgtaatgccagtgtgacactaagcattttgttcacaccacgctttgataactaaactggaaaacaaaggtgttaagtacctctgttctggatctgggcagtcagcactctttttagatctttgtgtggctcctatttttatagaagtggagggatgcactatttcacaaggtccaagatttgttttcagatatttttgatgactgtattgtaaatactacagggatagcactatagtattgtagtcatgagacttaaagtggaaataagactatttttgacaaaagatgccattaaatttcagactgtagagccacatttacaatacctcaggctaattactgttaattttggggttgaacttttttttgacagtgagggtggattattggattgtcattagaggaaggtctagatttcctgctcttaataaaattacattgaattgatttttagaggtaatgaaaacttcctttctgagaagttagtgttaaggtcttggaatgtgaacacattgtttgtagtgctatccattcctctcctgagattttaacttactactggaaatccttaaccaattataatagctttttttctttattttcaaaatgatttcctttgctttgattagacactatgtgctttttttttttaaccatagttcatcgaaatgcagctttttctgaacttcaaagatagaatcccatttttaatgaactgaagtagcaaaatcatctttttcattctttaggaaatagctattgccaaagtgaaggtgtagataatacctagtcttgttacataaaggggatgtggtttgcagaagaattttctttataaaattgaagttttaagggacgtcagtgtttatgccatttttccagttccaaaatgattccattccattctagaaatttgaagtatgtaacctgaaatccttaataaaatttggatttaattttataaaatgtactggtgatattttgggtgtttttttttaaatgaatgtatatactttttttttgaagagtggagagtagtgatgtctagagggagctattttgtgctgaggccactatgttctgtaaatatataattttaagagcaacctcacaatccctgctaagtggagtttattatttgaagactaaaatggaattccatagttcctgataggttatattctgagttattattctgagttatctacaaacatttttgagatttgtctttacactctgattgtagtttccagcagcccacgcacactgccaagtaagtctcattttttcctgttagaaatggtgaaatatcatataatcacttataaagaaaactgatatgaaaaaattttagagttgtttgctttatggtcactcaagtagggtaagtgttccacaaattccacaagttgatagtttaacatggatgtctgaaagccacatatataatttcttaggattcttaaattagtaaatctagcttactgaagcagtattagcatcactattttagattgcaaaaataccttaattgtgtggaactggcttgtagagtggtacttaagaaaaatgggattctacctctatttctgttttagcacacttaatcaggaaaggatatattaactttcataaaaatatttttgttgtgtgaataggttaatgatatggtaaggcccctaaaataactgaattaattgtttattgtaattgtaggccattcccattattaaaaataaagacaaaacttgaagtaactgaaaatcttatcgtgctatgtagaaatattgaactaatattcaaatatttgaatgctttggtttcagggattggtttaaaattggagtccttttttatgggttagtcttacaaaaatttaagcctttatatttttgactttaaatcaaaacaaatgttattttaaatgtacagaatagattggtagtgcagaagagtgtaagttcttcataggagctttagaaaagagaaatatgtgctaattcagtttttttttaatctgcactgtacatatatacttggtaattatgagcttgattttgtttttggaaatatgtgttcataatttaggtaatttgctacttaaagcactaagtctctgatacctgaaaagtacatgtaaatggtgatggtgaaataatactgcagttaacttaatagatgtatactggtgatttttgtatgctggattaaaactccagatattaaaatataacctggataaaaagccaagttcttggactgattgaggatcacttacatgactttacagaaatggaaacatccttgttggtatatgaaattattttactcaaggataagtattcataagaaattttgattgatgtatattttcaaaaatacagtatgctttgta

SEQ ID NO: 328119 - DNA, 4728 bp, Homo sapiens
gtggaagtgaggaagagggagagctcctgggcaccagaatgaatggggagggtcctttaggcactgtgaggcctttagcttttactcctactgagactggacatcgcaggagagtttcagagcagagaagtgctatgactgctcttgaagtttaagaggaccaggtggctggctttgctgtgtgtcagagaacaggagcagaaacagggagaccagctgggaggtgactgcaaaagtccaggtgagaggcgatggagctagtgaggagtgccggaggcctggtgtattctgacggtgccaggacctgtgataggtgctgagagagatgaggaactgctcagatcaccagctgcttcaggttaccagcccacacctgtctgtctcacctctgacaaccttggtaaagaaaccaaggcttagagacctgctcacagtcgtttcgtgagggaatgcaacatctgggtctagggtccaaatctatctctgctgtgaagaggaactcatacaggagatctacatgattaccaattcttggccttgcagtggagatatttggagttcttacaacatggcagacattgacaacaaagaacagtctgaacttgatcaagatttggatgatgttgaagaagtagaagaagaggaaactggtgaagaaacaaaactcaaagcacgtcagctaactgttcagatgatgcaaaatcctcagattcttgcagcccttcaagaaagacttgatggtctggtagaaacaccaacaggatacattgaaagcctgcctagggtagttaaaagacgagtgaatgctctcaaaaacctgcaagttaaatgtgcacagatagaagccaaattctatgaggaagttcatgatcttgaaaggaagtatgctgttctctatcagcctctatttgataagcgatttgaaattattaatgcaatttatgaacctacggaagaagaatgtgaatggaaaccagatgaagaagatgagatttcggaggaattgaaagaaaaggccaagattgaagatgagaaaaaggatgaagaaaaagaagaccccaaaggaattcctgaattttggttaactgtttttaagaatgttgacttgctcagtgatatggttcaggaacacgatgaacctattctgaagcacttgaaagatattaaagtgaagttctcagatgctggccagcctatgagttttgtcttagaatttcactttgaacccaatgaatattttacaaatgaagtgctgacaaagacatacaggatgaggtcagaaccagatgattctgatcccttttcttttgatggaccagaaattatgggttgtacagggtgccagatagattggaaaaaaggaaagaatgtcactttgaaaactattaagaagaagcagaaacacaagggacgtgggacagttcgtactgtgactaaaacagtttccaatgactctttctttaacttttttgcccctcctgaagttcctgagagtggagatctggatgatgatgctgaagctatccttgctgcagacttcgaaattggtcactttttacgtgagcgtataatcccaagatcagtgttatattttactggagaagctattgaagatgatgatgatgattatgatgaagaaggtgaagaagcggatgaggaaggggaagaagaaggagatgaggaaaatgatccagactatgacccaaagaaggatcaaaacccagcagagtgcaagcagcagtgaagcaggatggtctaccttctgcttccctggaaaggatgaatttacatcatttgacaagcctattttcaagttatttgttgtttgtttgcttgtttttgtttttgcagctaaaataaaaatttcaaatacaattttagttcttacaagataatgtcttaattttgtaccaattcaggtagaagtagaggcctaccttgaattaagggttatactcagtttttaacacattgttgaagaaaaggtaccagctttggaacgagatgctatactaataagcaagtgtaaaaaaaaaaaaaaaaagaggaagaaaatcttaagtgattgatgctgttttcttttaaaaaaaaaaaaaaaaaattcattttctttgggttagagctagagagaaggccccaagcttctatggtttcttctaattcttattgcttaaagtatgagtatgtcacttacccgtgcttctgtttactgtgtaattaaaatgggtagtactgtttacctaactacctcatggatgtgttaaggcatattgagttaaatctcatataatgtttctcaatcttgttaaaagctcaaaattttgggcctatttgtaatgccagtgtgacactaagcattttgttcacaccacgctttgataactaaactggaaaacaaaggtgttaagtacctctgttctggatctgggcagtcagcactctttttagatctttgtgtggctcctatttttatagaagtggagggatgcactatttcacaaggtccaagatttgttttcagatatttttgatgactgtattgtaaatactacagggatagcactatagtattgtagtcatgagacttaaagtggaaataagactatttttgacaaaagatgccattaaatttcagactgtagagccacatttacaatacctcaggctaattactgttaattttggggttgaacttttttttgacagtgagggtggattattggattgtcattagaggaaggtctagatttcctgctcttaataaaattacattgaattgatttttagaggtaatgaaaacttcctttctgagaagttagtgttaaggtcttggaatgtgaacacattgtttgtagtgctatccattcctctcctgagattttaacttactactggaaatccttaaccaattataatagctttttttctttattttcaaaatgatttcctttgctttgattagacactatgtgctttttttttttaaccatagttcatcgaaatgcagctttttctgaacttcaaagatagaatcccatttttaatgaactgaagtagcaaaatcatctttttcattctttaggaaatagctattgccaaagtgaaggtgtagataatacctagtcttgttacataaaggggatgtggtttgcagaagaattttctttataaaattgaagttttaagggacgtcagtgtttatgccatttttccagttccaaaatgattccattccattctagaaatttgaagtatgtaacctgaaatccttaataaaatttggatttaattttataaaatgtactggtgatattttgggtgtttttttttaaatgaatgtatatactttttttttgaagagtggagagtagtgatgtctagagggagctattttgtgctgaggccactatgttctgtaaatatataattttaagagcaacctcacaatccctgctaagtggagtttattatttgaagactaaaatggaattccatagttcctgataggttatattctgagttattattctgagttatctacaaacatttttgagatttgtctttacactctgattgtagtttccagcagcccacgcacactgccaagtaagtctcattttttcctgttagaaatggtgaaatatcatataatcacttataaagaaaactgatatgaaaaaattttagagttgtttgctttatggtcactcaagtagggtaagtgttccacaaattccacaagttgatagtttaacatggatgtctgaaagccacatatataatttcttaggattcttaaattagtaaatctagcttactgaagcagtattagcatcactattttagattgcaaaaataccttaattgtgtggaactggcttgtagagtggtacttaagaaaaatgggattctacctctatttctgttttagcacacttaatcaggaaaggatatattaactttcataaaaatatttttgttgtgtgaataggttaatgatatggtaaggcccctaaaataactgaattaattgtttattgtaattgtaggccattcccattattaaaaataaagacaaaacttgaagtaactgaaaatcttatcgtgctatgtagaaatattgaactaatattcaaatatttgaatgctttggtttcagggattggtttaaaattggagtccttttttatgggttagtcttacaaaaatttaagcctttatatttttgactttaaatcaaaacaaatgttattttaaatgtacagaatagattggtagtgcagaagagtgtaagttcttcataggagctttagaaaagagaaatatgtgctaattcagtttttttttaatctgcactgtacatatatacttggtaattatgagcttgattttgtttttggaaatatgtgttcataatttaggtaatttgctacttaaagcactaagtctctgatacctgaaaagtacatgtaaatggtgatggtgaaataatactgcagttaacttaatagatgtatactggtgatttttgtatgctggattaaaactccagatattaaaatataacctggataaaaagccaagttcttggactgattgaggatcacttacatgactttacagaaatggaaacatccttgttggtatatgaaattattttactcaaggataagtattcataagaaattttgattgatgtatattttcaaaaatacagtatgctttgta

SEQ ID NO: 328120 - DNA, 2580 bp, Homo sapiens
gtggaagtgaggaagagggagagctcctgggcaccagaatgaatggggagggtcctttaggcactgtgaggcctttagcttttactcctactgagactggacatcgcaggagagtttcagagcagagaagtgctatgactgctcttgaagtttaagaggaccaggtggctggctttgctgtgtgtcagagaacaggagcagaaacagggagaccagctgggaggtgactgcaaaagtccaggtgagaggcgatggagctagtgaggagtgccggaggcctggtgtattctgacggtgccaggacctgtgataggtgctgagagagatgaggaactgctcagatcaccagctgcttcaggttaccagcccacacctgtctgtctcacctctgacaaccttggtaaagaaaccaaggcttagagacctgctcacagtcgtttcgtgagggaatgcaacatctgggtctagggtccaaatctatctctgctgtgaagaggaactcatacaggagatctacatgattaccaattcttggccttgcagtggagatatttggagttcttacaacatggcagacattgacaacaaagaacagtctgaacttgatcaagatttggatgatgttgaagaagtagaagaagaggaaactggtgaagaaacaaaactcaaagcacgtcagctaactgttcagatgatgcaaaatcctcagattcttgcagcccttcaagaaagacttgatggtctggtagaaacaccaacaggatacattgaaagcctgcctagggtagttaaaagacgagtgaatgctctcaaaaacctgcaagttaaatgtgcacagatagaagccaaattctatgaggaagttcatgatcttgaaaggaagtatgctgttctctatcagcctctatttgataagcgatttgaaattattaatgcaatttatgaacctacggaagaagaatgtgaatggaaaccagatgaagaagatgagatttcggaggaattgaaagaaaaggccaagattgaagatgagaaaaaggatgaagaaaaagaagaccccaaaggaattcctgaattttggttaactgtttttaagaatgttgacttgctcagtgatatggttcaggaacacgatgaacctattctgaagcacttgaaagatattaaagtgaagttctcagatgctggccagcctatgagttttgtcttagaatttcactttgaacccaatgaatattttacaaatgaagtgctgacaaagacatacaggatgaggtcagaaccagatgattctgatcccttttcttttgatggaccagaaattatgggttgtacagggtgccagatagattggaaaaaaggaaagaatgtcactttgaaaactattaagaagaagcagaaacacaagggacgtgggacagttcgtactgtgactaaaacagtttccaatgactctttctttaacttttttgcccctcctgaagttcctgagagtggagatctggatgatgatgctgaagctatccttgctgcagacttcgaaattggtcactttttacgtgagcgtataatcccaagatcagtgttatattttactggagaagctattgaagatgatgatgatgattatgatgaagaaggtgaagaagcggatgaggaaggggaagaagaaggagatgaggaaaatgatccagactatgacccaaagaaggatcaaaacccagcagagtgcaagcagcagtgaagcaggatgtatgtggccttgaggataacctgcactgtaatagcctaaacacaactcttatttacttacagccttatgtttttgtattttcttggtagactaggtaatttttttttaaaggacaggaaactgatattttaaagaccaatttgttctacctagcattttaactagtttttctgccagctatgttgaatgcacaaattctgtcacgcatgttcattcattgctacataatttggttcttctggaatatttttatgtagctcttggagtacagctatgaaaattaacaactgttaaaggaaataccttttttttttttttgtaattttttccttgaagaaccaaagtattttttcagctggttgttgaatagggttaagtccgcttggattagctgtgcctttcattactttgttacagaaatgcagtgacttatactaagacaatttattgtttaaaaaaaaaattggcaagacaactatatggttaagaatttccagtatgaccacacccaataactgttattagagtgttaatggattattgtgttttaggtgacatagttaactgtaaagtaacctgactcagtatagttactggtaccacagtgaggtgaataaaacgggattttcagaagttagcctgaatttaactgtatttttaaatttaacctccattaactaagcatcttttctttgtggtagggtctaccttctgcttccctggaaaggatgaatttacatcatttgacaagcctattttcaagttatttgttgtttgtttgcttgtttttgtttttgcagctaaaataaaaatttcaaatacaattt

SEQ ID NO: 328121 - DNA, 1906 bp, Homo sapiens
gtggaagtgaggaagagggagagctcctgggcaccagaatgaatggggagggtcctttaggcactgtgaggcctttagcttttactcctactgagactggacatcgcaggagagtttcagagcagagaagtgctatgactgctcttgaagtttaagaggaccaggtggctggctttgctgtgtgtcagagaacaggagcagaaacagggagaccagctgggaggtgactgcaaaagtccaggtgagaggcgatggagctagtgaggagtgccggaggcctggtgtattctgacggtgccaggacctgtgataggtgctgagagagatgaggaactgctcagatcaccagctgcttcaggttaccagcccacacctgtctgtctcacctctgacaaccttggtaaagaaaccaaggcttagagacctgctcacagtcgtttcgtgagggaatgcaacatctgggtctagggtccaaatctatctctgctgtgaagaggaactcatacaggagatctacatgattaccaattcttggccttgcagtggagatatttggagttcttacaacatggcagacattgacaacaaagaacagtctgaacttgatcaagatttggatgatgttgaagaagtagaagaagaggaaactggtgaagaaacaaaactcaaagcacgtcagctaactgttcagatgatgcaaaatcctcagattcttgcagcccttcaagaaagacttgatggtctggtagaaacaccaacaggatacattgaaagcctgcctagggtagttaaaagacgagtgaatgctctcaaaaacctgcaagttaaatgtgcacagatagaagccaaattctatgaggaagttcatgatcttgaaaggaagtatgctgttctctatcagcctctatttgataagcgatttgaaattattaatgcaatttatgaacctacggaagaagaatgtgaatggaaaccagatgaagaagatgagatttcggaggaattgaaagaaaaggccaagattgaagatgagaaaaaggatgaagaaaaagaagaccccaaaggaattcctgaattttggttaactgtttttaagaatgttgacttgctcagtgatatggttcaggaacacgatgaacctattctgaagcacttgaaagatattaaagtgaagttctcagatgctggccagcctatgagttttgtcttagaatttcactttgaacccaatgaatattttacaaatgaagtgctgacaaagacatacaggatgaggtcagaaccagatgattctgatcccttttcttttgatggaccagaaattatgggttgtacagggtgccagatagattggaaaaaaggaaagaatgtcactttgaaaactattaagaagaagcagaaacacaagggacgtgggacagttcgtactgtgactaaaacagtttccaatgactctttctttaacttttttgcccctcctgaagttcctgagagtggagatctggatgatgatgctgaagctatccttgctgcagacttcgaaattggtcactttttacgtgagcgtataatcccaagatcagtgttatattttactggagaagctattgaagatgatgatgatgattatgatgaagaaggtgaagaagcggatgaggaaggggaagaagaaggagatgaggaaaatgatccagactatgacccaaagaaggatcaaaacccagcagagtgcaagcagcagtgaagcaggatgtatgtggccttgaggataacctgcactggtctaccttctgcttccctggaaaggatgaatttacatcatttgacaagcctattttcaagttatttgttgtttgtttgcttgtttttgtttttgcagctaaaataaaaatttcaaatacaattt

SEQ ID NO: 328122 - DNA, 2773 bp, Homo sapiens
  misc_feature (2160)..(2160): n is a, c, g, or t
gtggaagtgaggaagagggagagctcctgggcaccagaatgaatggggagggtcctttaggcactgtgaggcctttagcttttactcctactgagactggacatcgcaggagagtttcagagcagagaagtgctatgactgctcttgaagtttaagaggaccaggtggctggctttgctgtgtgtcagagaacaggagcagaaacagggagaccagctgggaggtgactgcaaaagtccaggtgagaggcgatggagctagtgaggagtgccggaggcctggtgtattctgacggtgccaggacctgtgataggtgctgagagagatgaggaactgctcagatcaccagctgcttcaggttaccagcccacacctgtctgtctcacctctgacaaccttggtaaagaaaccaaggcttagagacctgctcacagtcgtttcgtgagggaatgcaacatctgggtctagggtccaaatctatctctgctgtgaagaggaactcatacaggagatctacatgattaccaattcttggccttgcagtggagatatttggagttcttacaacatggcagacattgacaacaaagaacagtctgaacttgatcaagatttggatgatgttgaagaagtagaagaagaggaaactggtgaagaaacaaaactcaaagcacgtcagctaactgttcagatgatgcaaaatcctcagattcttgcagcccttcaagaaagacttgatggtctggtagaaacaccaacaggatacattgaaagcctgcctagggtagttaaaagacgagtgaatgctctcaaaaacctgcaagttaaatgtgcacagatagaagccaaattctatgaggaagttcatgatcttgaaaggaagtatgctgttctctatcagcctctatttgataagcgatttgaaattattaatgcaatttatgaacctacggaagaagaatgtgaatggaaaccagatgaagaagatgagatttcggaggaattgaaagaaaaggccaagattgaagatgagaaaaaggatgaagaaaaagaagaccccaaaggaattcctgaattttggttaactgtttttaagaatgttgacttgctcagtgatatggttcaggaacacgatgaacctattctgaagcacttgaaagatattaaagtgaagttctcagatgctggccagcctatgagttttgtcttagaatttcactttgaacccaatgaatattttacaaatgaagtgctgacaaagacatacaggatgaggtcagaaccagatgattctgatcccttttcttttgatggaccagaaattatgggttgtacagggtgccagatagattggaaaaaaggaaagaatgtcactttgaaaactattaagaagaagcagaaacacaagggacgtgggacagttcgtactgtgactaaaacagtttccaatgactctttctttaacttttttgcccctcctgaagttcctgagagtggagatctggatgatgatgctgaagctatccttgctgcagacttcgaaattggtcactttttacgtgagcgtataatcccaagatcagtgttatattttactggagaagctattgaagatgatgatgatgattatgatgaagaaggtgaagaagcggatgaggaaggggaagaagaaggagatgaggaaaatgatccagactatgacccaaagaaggatcaaaacccagcagagtgcaagcagcagtgaagcaggatgtatgtggccttgaggataacctgcactggtctaccttctgcttccctggaaaggatgaatttacatcatttgacaagcctattttcaagttatttgttgtttgtttgcttgtttttgtttttgcagctaaaataaaaatttcaaatacaattttagttcttacaagataatgtcttaattttgtaccaattcaggtagaagtagaggcctaccttgaattaagggttatactcagtttttaacacattgttgaagaaaaggtaccagctttggaacgagatgctatactaataagcaagtgtaacacacacaccactcggaggacagaaactcttcaggggattggactgcctggttccgctattcgacacacacacaacatgcttagacgtttccacttatctctngcgggcggtacagagcctcaagagagaagggctccaaaggcttcacaaagggggctctccaaagtccaaaaggggcacaggtttggagttatggacccagttaccccggggtagtctccggggtcaacccggggagccattctaccaacggcggtcagatcactggggacccctgatacgagccgctaatggagctgtcgcaagggccagatatcggggtaaaaattccaaaatacatggtcgtccactctgttaaaaggctcaacacatttgtgggaccaaattgtgacagatccccgttggtgacactagagtattgtgtacaccccagcggttgggataacaccaacgggtgacaccacaggctgtttagaaacactctgtctcgcgaaatttgagccacagacgcccatttgacgctcatcgaggggggcccaatatatatgaagacgcgggaggcgagaacgcattgtcgaaggggccaaagtcggtcaccgaaatttgtggcatggtgagtagaaacccgcggccctgtcgtgcagaatacacgaagtgcaaaccatcaccacccgacaatacttgccgcaacaccatacacatagtactaccaatc

SEQ ID NO: 328123 - DNA, 2790 bp, Homo sapiens
gtggaagtgaggaagagggagagctcctgggcaccagaatgaatggggagggtcctttaggcactgtgaggcctttagcttttactcctactgagactggacatcgcaggagagtttcagagcagagaagtgctatgactgctcttgaagtttaagaggaccaggtggctggctttgctgtgtgtcagagaacaggagcagaaacagggagaccagctgggaggtgactgcaaaagtccaggtgagaggcgatggagctagtgaggagtgccggaggcctggtgtattctgacggtgccaggacctgtgataggtgctgagagagatgaggaactgctcagatcaccagctgcttcaggttaccagcccacacctgtctgtctcacctctgacaaccttggtaaagaaaccaaggcttagagacctgctcacagtcgtttcgtgagggaatgcaacatctgggtctagggtccaaatctatctctgctgtgaagaggaactcatacaggagatctacatgattaccaattcttggccttgcagtggagatatttggagttcttacaacatggcagacattgacaacaaagaacagtctgaacttgatcaagatttggatgatgttgaagaagtagaagaagaggaaactggtgaagaaacaaaactcaaagcacgtcagctaactgttcagatgatgcaaaatcctcagattcttgcagcccttcaagaaagacttgatggtctggtagaaacaccaacaggatacattgaaagcctgcctagggtagttaaaagacgagtgaatgctctcaaaaacctgcaagttaaatgtgcacagatagaagccaaattctatgaggaagttcatgatcttgaaaggaagtatgctgttctctatcagcctctatttgataagcgatttgaaattattaatgcaatttatgaacctacggaagaagaatgtgaatggaaaccagatgaagaagatgagatttcggaggaattgaaagaaaaggccaagattgaagatgagaaaaaggatgaagaaaaagaagaccccaaaggaattcctgaattttggttaactgtttttaagaatgttgacttgctcagtgatatggttcaggaacacgatgaacctattctgaagcacttgaaagatattaaagtgaagttctcagatgctggccagcctatgagttttgtcttagaatttcactttgaacccaatgaatattttacaaatgaagtgctgacaaagacatacaggatgaggtcagaaccagatgattctgatcccttttcttttgatggaccagaaattatgggttgtacagggtgccagatagattggaaaaaaggaaagaatgtcactttgaaaactattaagaagaagcagaaacacaagggacgtgggacagttcgtactgtgactaaaacagtttccaatgactctttctttaacttttttgcccctcctgaagttcctgagagtggagatctggatgatgatgctgaagctatccttgctgcagacttcgaaattggtcactttttacgtgagcgtataatcccaagatcagtgttatattttactggagaagctattgaagatgatgatgatgattatgatgaagaaggtgaagaagcggatgaggaaggggaagaagaaggagatgaggaaaatgatccagactatgacccaaagaaggatcaaaacccagcagagtgcaagcagcagtgaagcaggatgtatgtggccttgaggataacctgcactggtctaccttctgcttccctggaaaggatgaatttacatcatttgacaagcctattttcaagttatttgttgtttgtttgcttgtttttgtttttgcagctaaaataaaaatttcaaatacaatttaaaaaaaaaaaaaaaaaaaaaaaaaaaaaaaaaagaaaggggggggcgcgcggctccaagaaaagatatcccctcgagggaggggccccatgttatcggcgcgcatcagccccaggtttttgttggttcgaaaggggggccccctaaagggggagcgcctcaattaaagaaagcgaagggccaggggcgcgcgccgtgtaaaaaagcgcgctctcggtagccgggaaaaaagagcgggccaagcgtgggggagccccttgtggagagaaagcagaaacccctaacccttcgcgggggggcggcgacacactactgtgggcaacacgacaccaccctcaccagacgataattagaagcgcgctcaaggggacaaccatcgaaacacacttcacaagcgcgactatacggggggcaaccaaccacaggcggtgcataaaatgcagtggcgcggtcttgcaacaacagttgcggccaccacgaagaaattgcagctgtcgaggaacaagtcttatttaacgccgggggggcctctgttggtaaaaaataactgggggaaccaccagccggcaataggacaacagagctataggcaaggaaaaagaagagacagaagtacagagagatgatataacaacatagaaagcagcgcgaggtgactacacgcgaacaggagaccatgatagcgaaccaacagtccaggtgatgaaggcgatccgggaagcgaggggagcagaacacaggaaccgaacacaaaagacaagaaacgacgcagaggcaaggatgagagagggacgcagcagcgcgaacaaacgcaccacaaagaaggaaccgtaagccaacgaccgacgaacggcgcaaccaagccagaagaccgccacagcaac

SEQ ID NO: 328124 - DNA, 5221 bp, Homo sapiens
gtggaagtgaggaagagggagagctcctgggcaccagaatgaatggggagggtcctttaggcactgtgaggcctttagcttttactcctactgagactggacatcgcaggagagtttcagagcagagaagtgctatgactgctcttgaagtttaagaggaccaggtggctggctttgctgtgtgtcagagaacaggagcagaaacagggagaccagctgggaggtgactgcaaaagtccaggtgagaggcgatggagctagtgaggagtgccggaggcctggtgtattctgacggtgccaggacctgtgataggtgctgagagagatgaggaactgctcagatcaccagctgcttcaggttaccagcccacacctgtctgtctcacctctgacaaccttggtaaagaaaccaaggcttagagacctgctcacagtcgtttcgtgagggaatgcaacatctgggtctagggtccaaatctatctctgctgtgaagaggaactcatacaggagatctacatgattaccaattcttggccttgcagtggagatatttggagttcttacaacatggcagacattgacaacaaagaacagtctgaacttgatcaagatttggatgatgttgaagaagtagaagaagaggaaactggtgaagaaacaaaactcaaagcacgtcagctaactgttcagatgatgcaaaatcctcagattcttgcagcccttcaagaaagacttgatggtctggtagaaacaccaacaggatacattgaaagcctgcctagggtagttaaaagacgagtgaatgctctcaaaaacctgcaagttaaatgtgcacagatagaagccaaattctatgaggaagttcatgatcttgaaaggaagtatgctgttctctatcagcctctatttgataagcgatttgaaattattaatgcaatttatgaacctacggaagaagaatgtgaatggaaaccagatgaagaagatgagatttcggaggaattgaaagaaaaggccaagattgaagatgagaaaaaggatgaagaaaaagaagaccccaaaggaattcctgaattttggttaactgtttttaagaatgttgacttgctcagtgatatggttcaggaacacgatgaacctattctgaagcacttgaaagatattaaagtgaagttctcagatgctggccagcctatgagttttgtcttagaatttcactttgaacccaatgaatattttacaaatgaagtgctgacaaagacatacaggatgaggtcagaaccagatgattctggatgatgatgctgaagctatccttgctgcagacttcgaaattggtcactttttacgtgagcgtataatcccaagatcagtgttatattttactggagaagctattgaagatgatgatgatgattatgatgaagaaggtgaagaagcggatgaggaaggggaagaagaaggagatgaggaaaatgatccagactatgacccaaagaaggatcaaaacccagcagagtgcaagcagcagtgaagcaggatgtatgtggccttgaggataacctgcactgtaatagcctaaacacaactcttatttacttacagccttatgtttttgtattttcttggtagactaggtaatttttttttaaaggacaggaaactgatattttaaagaccaatttgttctacctagcattttaactagtttttctgccagctatgttgaatgcacaaattctgtcacgcatgttcattcattgctacataatttggttcttctggaatatttttatgtagctcttggagtacagctatgaaaattaacaactgttaaaggaaataccttttttttttttttgtaattttttccttgaagaaccaaagtattttttcagctggttgttgaatagggttaagtccgcttggattagctgtgcctttcattactttgttacagaaatgcagtgacttatactaagacaatttattgtttaaaaaaaaaattggcaagacaactatatggttaagaatttccagtatgaccacacccaataactgttattagagtgttaatggattattgtgttttaggtgacatagttaactgtaaagtaacctgactcagtatagttactggtaccacagtgaggtgaataaaacgggattttcagaagttagcctgaatttaactgtatttttaaatttaacctccattaactaagcatcttttctttgtggtagggtctaccttctgcttccctggaaaggatgaatttacatcatttgacaagcctattttcaagttatttgttgtttgtttgcttgtttttgtttttgcagctaaaataaaaatttcaaatacaattttagttcttacaagataatgtcttaattttgtaccaattcaggtagaagtagaggcctaccttgaattaagggttatactcagtttttaacacattgttgaagaaaaggtaccagctttggaacgagatgctatactaataagcaagtgtaaaaaaaaaaaaaaaaagaggaagaaaatcttaagtgattgatgctgttttcttttaaaaaaaaaaaaaaaaaattcattttctttgggttagagctagagagaaggccccaagcttctatggtttcttctaattcttattgcttaaagtatgagtatgtcacttacccgtgcttctgtttactgtgtaattaaaatgggtagtactgtttacctaactacctcatggatgtgttaaggcatattgagttaaatctcatataatgtttctcaatcttgttaaaagctcaaaattttgggcctatttgtaatgccagtgtgacactaagcattttgttcacaccacgctttgataactaaactggaaaacaaaggtgttaagtacctctgttctggatctgggcagtcagcactctttttagatctttgtgtggctcctatttttatagaagtggagggatgcactatttcacaaggtccaagatttgttttcagatatttttgatgactgtattgtaaatactacagggatagcactatagtattgtagtcatgagacttaaagtggaaataagactatttttgacaaaagatgccattaaatttcagactgtagagccacatttacaatacctcaggctaattactgttaattttggggttgaacttttttttgacagtgagggtggattattggattgtcattagaggaaggtctagatttcctgctcttaataaaattacattgaattgatttttagaggtaatgaaaacttcctttctgagaagttagtgttaaggtcttggaatgtgaacacattgtttgtagtgctatccattcctctcctgagattttaacttactactggaaatccttaaccaattataatagctttttttctttattttcaaaatgatttcctttgctttgattagacactatgtgctttttttttttaaccatagttcatcgaaatgcagctttttctgaacttcaaagatagaatcccatttttaatgaactgaagtagcaaaatcatctttttcattctttaggaaatagctattgccaaagtgaaggtgtagataatacctagtcttgttacataaaggggatgtggtttgcagaagaattttctttataaaattgaagttttaagggacgtcagtgtttatgccatttttccagttccaaaatgattccattccattctagaaatttgaagtatgtaacctgaaatccttaataaaatttggatttaattttataaaatgtactggtgatattttgggtgtttttttttaaatgaatgtatatactttttttttgaagagtggagagtagtgatgtctagagggagctattttgtgctgaggccactatgttctgtaaatatataattttaagagcaacctcacaatccctgctaagtggagtttattatttgaagactaaaatggaattccatagttcctgataggttatattctgagttattattctgagttatctacaaacatttttgagatttgtctttacactctgattgtagtttccagcagcccacgcacactgccaagtaagtctcattttttcctgttagaaatggtgaaatatcatataatcacttataaagaaaactgatatgaaaaaattttagagttgtttgctttatggtcactcaagtagggtaagtgttccacaaattccacaagttgatagtttaacatggatgtctgaaagccacatatataatttcttaggattcttaaattagtaaatctagcttactgaagcagtattagcatcactattttagattgcaaaaataccttaattgtgtggaactggcttgtagagtggtacttaagaaaaatgggattctacctctatttctgttttagcacacttaatcaggaaaggatatattaactttcataaaaatatttttgttgtgtgaataggttaatgatatggtaaggcccctaaaataactgaattaattgtttattgtaattgtaggccattcccattattaaaaataaagacaaaacttgaagtaactgaaaatcttatcgtgctatgtagaaatattgaactaatattcaaatatttgaatgctttggtttcagggattggtttaaaattggagtccttttttatgggttagtcttacaaaaatttaagcctttatatttttgactttaaatcaaaacaaatgttattttaaatgtacagaatagattggtagtgcagaagagtgtaagttcttcataggagctttagaaaagagaaatatgtgctaattcagtttttttttaatctgcactgtacatatatacttggtaattatgagcttgattttgtttttggaaatatgtgttcataatttaggtaatttgctacttaaagcactaagtctctgatacctgaaaagtacatgtaaatggtgatggtgaaataatactgcagttaacttaatagatgtatactggtgatttttgtatgctggattaaaactccagatattaaaatataacctggataaaaagccaagttcttggactgattgaggatcacttacatgactttacagaaatggaaacatccttgttggtatatgaaattattttactcaaggataagtattcataagaaattttgattgatgtatattttcaaaaatacagtatgctttgta

SEQ ID NO: 328125 - DNA, 1878 bp, Homo sapiens
gtggaagtgaggaagagggagagctcctgggcaccagaatgaatggggagggtcctttaggcactgtgaggcctttagcttttactcctactgagactggacatcgcaggagagtttcagagcagagaagtgctatgactgctcttgaagtttaagaggaccaggtggctggctttgctgtgtgtcagagaacaggagcagaaacagggagaccagctgggaggtgactgcaaaagtccaggtgagaggcgatggagctagtgaggagtgccggaggcctggtgtattctgacggtgccaggacctgtgataggtgctgagagagatgaggaactgctcagatcaccagctgcttcaggttaccagcccacacctgtctgtctcacctctgacaaccttggtaaagaaaccaaggcttagagacctgctcacagtcgtttcgtgagggaatgcaacatctgggtctagggtccaaatctatctctgctgtgaagaggaactcatacaggagatctacatgattaccaattcttggccttgcagtggagatatttggagttcttacaacatggcagacattgacaacaaagaacagtctgaacttgatcaagatttggatgatgttgaagaagtagaagaagaggaaactggtgaagaaacaaaactcaaagcacgtcagctaactgttcagatgatgcaaaatcctcagattcttgcagcccttcaagaaagacttgatggtctggtagaaacaccaacaggatacattgaaagcctgcctagggtagttaaaagacgagtgaatgctctcaaaaacctgcaagttaaatgtgcacagatagaagccaaattctatgaggaagttcatgatcttgaaaggaagtatgctgttctctatcagcctctatttgataagcgatttgaaattattaatgcaatttatgaacctacggaagaagaatgtgaatggaaaccagatgaagaagatgagatttcggaggaattgaaagaaaaggccaagattgaagatgagaaaaaggatgaagaaaaagaagaccccaaaggaattcctgaattttggttaactgtttttaagaatgttgacttgctcagtgatatggttcaggaacacgatgaacctattctgaagcacttgaaagatattaaagtgaagttctcagatgctggccagcctatgagttttgtcttagaatttcactttgaacccaatgaatattttacaaatgaagtgctgacaaagacatacaggatgaggtcagaaccagatgattctgatcccttttcttttgatggaccagaaattatgggttgtacagggtgccagatagattggaaaaaaggaaagaatgtcactttgaaaactattaagaagaagcagaaacacaagggacgtgggacagttcgtactgtgactaaaacagtttccaatgactctttctttaacttttttgcccctcctgaagttcctgagagtggagatctggatgatgatgctgaagctatccttgctgcagacttcgaaattggtcactttttacgtgagcgtataatcccaagatcagtgttatattttactggagaagctattgaagatgatgatgatgattatgatgaagaaggtgaagaagcggatgaggaaggggaagaagaaggagatgaggaaaatgatccagactatgacccaaagaaggatcaaaacccagcagagtgcaagcagcagtgaagcaggatggtctaccttctgcttccctggaaaggatgaatttacatcatttgacaagcctattttcaagttatttgttgtttgtttgcttgtttttgtttttgcagctaaaataaaaatttcaaatacaattt

SEQ ID NO: 328126 - DNA, 2411 bp, Homo sapiens
gtggaagtgaggaagagggagagctcctgggcaccagaatgaatggggagggtcctttaggcactgtgaggcctttagcttttactcctactgagactggacatcgcaggagagtttcagagcagagaagtgctatgactgctcttgaagtttaagaggaccaggtggctggctttgctgtgtgtcagagaacaggagcagaaacagggagaccagctgggaggtgactgcaaaagtccaggtgagaggcgatggagctagtgaggagtgccggaggcctggtgtattctgacggtgccaggacctgtgataggtgctgagagagatgaggaactgctcagatcaccagctgcttcaggttaccagcccacacctgtctgtctcacctctgacaaccttggtaaagaaaccaaggcttagagacctgctcacagtcgtttcgtgagggaatgcaacatctgggtctagggtccaaatctatctctgctgtgaagaggaactcatacaggagatctacatgattaccaattcttggccttgcagtggagatatttggagttcttacaacatggcagacattgacaacaaagaacagtctgaacttgatcaagatttggatgatgttgaagaagtagaagaagaggaaactggtgaagaaacaaaactcaaagcacgtcagctaactgttcagatgatgcaaaatcctcagattcttgcagcccttcaagaaagacttgatggtctggtagaaacaccaacaggatacattgaaagcctgcctagggtagttaaaagacgagtgaatgctctcaaaaacctgcaagttaaatgtgcacagatagaagccaaattctatgaggaagttcatgatcttgaaaggaagtatgctgttctctatcagcctctatttgataagcgatttgaaattattaatgcaatttatgaacctacggaagaagaatgtgaatggaaaccagatgaagaagatgagatttcggaggaattgaaagaaaaggccaagattgaagatgagaaaaaggatgaagaaaaagaagaccccaaaggaattcctgaattttggttaactgtttttaagaatgttgacttgctcagtgatatggttcaggaacacgatgaacctattctgaagcacttgaaagatattaaagtgaagttctcagatgctggccagcctatgagttttgtcttagaatttcactttgaacccaatgaatattttacaaatgaagtgctgacaaagacatacaggatgaggtcagaaccagatgattctgatcccttttcttttgatggaccagaaattatgggttgtacagggtgccagatagattggaaaaaaggaaagaatgtcactttgaaaactattaagaagaagcagaaacacaagggacgtgggacagttcgtactgtgactaaaacagtttccaatgactctttctttaacttttttgcccctcctgaagttcctgagagtggagatctggatgatgatgctgaagctatccttgctgcagacttcgaaattggtcactttttacgtgagcgtataatcccaagatcagtgttatattttactggagaagctattgaagatgatgatgatgattatgatgaagaaggtgaagaagcggatgaggtaatgtttaccaaatgagcaaataattctctgtggttaacacattgagaagcaaattgaatgacttatgtattcctttgctataatcattctgtgatttgggataaaaacattttggaaaacatgattttagaattctacagccaaacaatgtatgtataaggtttcaataaataaattgcaaaactcagcaacatttttttatttcaaataattttgttctgctgcagggttatcagctctttgaagaagtcaaaagctgcagtaaacttttccaacgttggctgcagtaactattttcaataaaagctgtctggatgtctcaagttgtgttgggaaatttttcatattagaagctttcaaattaaattgtattatcatcaaagtctgtaatcatgaaaatctgttgatccgtagagtaacttgtattaaattttccctacattatgagccagtttacctactatgtacatacttcatggatgcattttgaactttaatataggaaggggaagaagaaggagatgaggaaaatgatccagactatgacccaaagaaggatcaaaacccagcagagtgcaagcagcagtgaagcaggatgtatgtggccttgaggataacctgcactggtctaccttctgcttccctggaaaggatgaatttacatcatttgacaagcctattttcaagttatttgttgtttgtttgcttgtttttgtttttgcagctaaaataaaaatttcaaatacaattt

SEQ ID NO: 328127 - DNA, 1848 bp, Homo sapiens; identical to SEQ ID NO: 328103

SEQ ID NO: 328128 - DNA, 1880 bp, Homo sapiens
gtggaagtgaggaagagggagagctcctgggcaccagaatgaatggggagggtcctttaggcactgtgaggcctttagcttttactcctactgagactggacatcgcaggagagtttcagagcagagaagtgctatgactgctcttgaagtttaagaggaccaggtggctggctttgctgtgtgtcagagaacaggagcagaaacagggagaccagctgggaggtgactgcaaaagtccaggtgagaggcgatggagctagtgaggagtgccggaggcctggtgtattctgacggtgccaggacctgtgataggtgctgagagagatgaggaactgctcagatcaccagctgcttcaggttaccagcccacacctgtctgtctcacctctgacaaccttggtaaagaaaccaaggcttagagacctgctcacagtcgtttcgtgagggaatgcaacatctgggtctagggtccaaatctatctctgctgtgaagaggaactcatacaggagatctacatgattaccaattcttggccttgcagtggagatatttggagttcttacaacatggcagacattgacaacaaagaacagtctgaacttgatcaagatttggatgatgttgaagaagtagaagaagaggaaactggtgaagaaacaaaactcaaagcacgtcagctaactgttcagatgatgcaaaatcctcagattcttgcagcccttcaagaaagacttgatggtctggtagaaacaccaacaggatacattgaaagcctgcctagggtagttaaaagacgagtgaatgctctcaaaaacctgcaagttaaatgtgcacagatagaagccaaattctatgaggaagttcatgatcttgaaaggaagtatgctgttctctatcagcctctatttgataagcgatttgaaattattaatgcaatttatgaacctacggaagaagaatgtgaatggaaaccagatgaagaagatgagatttcggaggaattgaaagaaaaggccaagattgaagatgagaaaaaggatgaagaaaaagaagaccccaaaggaattcctgaattttggttaactgtttttaagaatgttgacttgctcagtgatatggttcaggaacacgatgaacctattctgaagcacttgaaagatattaaagtgaagttctcagatgctggccagcctatgagttttgtcttagaatttcactttgaacccaatgaatattttacaaatgaagtgctgacaaagacatacaggatgaggtcagaaccagatgattctgatcccttttcttttgatggaccagaaattatgggttgtacagggtgccagatagattggaaaaaaggaaagaatgtcactttgaaaactattaagaagaagcagaaacacaagggacgtgggacagttcgtactgtgactaaaacagtttccaatgactctttctttaacttttttgcccctcctgaagttcctgagagtggagatctggatgatgatgctgaagctatccttgctgcagacttcgaaattggtcactttttacgtgagcgtataatcccaagatcagtgttatattttactggagaagctattgaagatgatgatgatgattatgatgaagaaggtgaagaagcggatgaggtaatgtttaccaaatgagcaaataattctctgtggttaacacattgagaagcaaattgaatgacttatgtattcctttgctataatcattctgtgatttgggataaaaacattttggaaaacatgattttagaattctacagccaaacaatgtatttattgaaaccttatacatacattgtttggctgtataaggtttcaataaataaattgcaaaactcag

SEQ ID NO: 328129 - DNA, 1602 bp, Homo sapiens
gtggaagtgaggaagagggagagctcctgggcaccagaatgaatggggagggtcctttaggcactgtgaggcctttagcttttactcctactgagactggacatcgcaggagagtttcagagcagagaagtgctatgactgctcttgaagtttaagaggaccaggtggctggctttgctgtgtgtcagagaacaggagcagaaacagggagaccagctgggaggtgactgcaaaagtccaggtgagaggcgatggagctagtgaggagtgccggaggcctggtgtattctgacggtgccaggacctgtgataggtgctgagagagatgaggaactgctcagatcaccagctgcttcaggttaccagcccacacctgtctgtctcacctctgacaaccttggtaaagaaaccaaggcttagagacctgctcacagtcgtttcgtgagggaatgcaacatctgggtctagggtccaaatctatctctgctgtgaagaggaactcatacaggagatctacatgattaccaattcttggccttgcagtggagatatttggagttcttacaacatggcagacattgacaacaaagaacagtctgaacttgatcaagatttggatgatgttgaagaagtagaagaagaggaaactggtgaagaaacaaaactcaaagcacgtcagctaactgttcagatgatgcaaaatcctcagattcttgcagcccttcaagaaagacttgatggtctggtagaaacaccaacaggatacattgaaagcctgcctagggtagttaaaagacgagtgaatgctctcaaaaacctgcaagttaaatgtgcacagatagaagccaaattctatgaggaagttcatgatcttgaaaggaagtatgctgttctctatcagcctctatttgataagcgatttgaaattattaatgcaatttatgaacctacggaagaagaatgtgaatggaaaccagatgaagaagatgagatttcggaggaattgaaagaaaaggccaagattgaagatgagaaaaaggatgaagaaaaagaagaccccaaaggaattcctgaattttggttaactgtttttaagaatgttgacttgctcagtgatatggttcaggaacacgatgaacctattctgaagcacttgaaagatattaaagtgaagttctcagatgctggccagcctatgagttttgtcttagaatttcactttgaacccaatgaatattttacaaatgaagtgctgacaaagacatacaggatgaggtcagaaccagatgattctgatcccttttcttttgatggaccagaaattatgggttgtacagggtgccagatagattggaaaaaaggaaagaatgtcactttgaaaactattaagaagaagcagaaacacaagggacgtgggacagttcgtactgtgactaaaacagtttccaatgactctttctttaacttttttgcccctcctgaagtcctgagagtggagatctggatgatgatgctgaagctattccgtggtctccagacttcagcaatttgtcacgactgacgttgcgcgaacaagcacacagagcagtgctgatactatga

SEQ ID NO: 328130 - DNA, 1610 bp, Homo sapiens
gtggaagtgaggaagagggagagctcctgggcaccagaatgaatggggagggtcctttaggcactgtgaggcctttagcttttactcctactgagactggacatcgcaggagagtttcagagcagagaagtgctatgactgctcttgaagtttaagaggaccaggtggctggctttgctgtgtgtcagagaacaggagcagaaacagggagaccagctgggaggtgactgcaaaagtccaggtgagaggcgatggagctagtgaggagtgccggaggcctggtgtattctgacggtgccaggacctgtgataggtgctgagagagatgaggaactgctcagatcaccagctgcttcaggttaccagcccacacctgtctgtctcacctctgacaaccttggtaaagaaaccaaggcttagagacctgctcacagtcgtttcgtgagggaatgcaacatctgggtctagggtccaaatctatctctgctgtgaagaggaactcatacaggagatctacatgattaccaattcttggccttgcagtggagatatttggagttcttacaacatggcagacattgacaacaaagaacagtctgaacttgatcaagatttggatgatgttgaagaagtagaagaagaggaaactggtgaagaaacaaaactcaaagcacgtcagctaactgttcagatgatgcaaaatcctcagattcttgcagcccttcaagaaagacttgatggtctggtagaaacaccaacaggatacattgaaagcctgcctagggtagttaaaagacgagtgaatgctctcaaaaacctgcaagttaaatgtgcacagatagaagccaaattctatgaggaagttcatgatcttgaaaggaagtatgctgttctctatcagcctctatttgataagcgatttgaaattattaatgcaatttatgaacctacggaagaagaatgtgaatggaaaccagatgaagaagatgagatttcggaggaattgaaagaaaaggccaagattgaagatgagaaaaaggatgaagaaaaagaagaccccaaaggaattcctgaattttggttaactgtttttaagaatgttgacttgctcagtgatatggttcaggaacacgatgaacctattctgaagcacttgaaagatattaaagtgaagttctcagatgctggccagcctatgagttttgtcttagaatttcactttgaacccaatgaatattttacaaatgaagtgctgacaaagacatacaggatgaggtcagaaccagatgattctgatcccttttcttttgatggaccagaaattatgggttgtacagggtgccagatagattggaaaaaaggaaagaatgtcactttgaaaactattaagaagaagcagaaacacaagtgatttcatagaagcaggaactgggagaattgtgcaggtgtcatttatctatgaccaataggaagagcaaccagttactatgattgaaagggagccagaagactgattggaggccctaccttgtgagtggggcatctgttggacgttccacctggttatatactctgcagctgttagaatgtgcatgcacttgaacacgcac

SEQ ID NO: 328131 - DNA, 818 bp, Homo sapiens
cgtctcaacacggttgcttgagattcctgatagcatggtggctagatcccaaaaaggagtgctccaagaagtaaagaagatgattcacctcagaccagcctgggcaacacgattcaccattacctttgggggcatgtttaaaagagatgctttcatgtccaagtctggaaatcccagcatctgtcctgtcttcaggtgattgaagaaactgcccatgggatcataacagaagccccggtgatagtcttctcagattgaaccacagcactaatggagattaccaaaatttataggataagattactgaaatttctatgttgttttatcccattgaaatcaatggaaagcaaaggacaggaaagagccaaacagacaattttcccctctcatctctatgatatggtccctccttacagttcttctggaaaagtccagagtgccaagcaaatatactgactctggggtcctgctgtgctgcatcgtggctcattgtgaaccagtggtcaatccaggaggccatctccatagatactttgcatcatttcctttccctccccttcaccactggggacttacacttcccaaataaaatatcaacaattcaatccatatccctgcattctagacgcttagcacactcccatgacccacatgctggtgaggatgttgagttcatgtgaagccttggtaattttggttggaaacatgtttctagaatcaaggcaatgtggtttggtcaaattcagatgagattgtggagccgcgtgtcctagattccagctttggctctagaccttataaaccaaccctgtggcctt

SEQ ID NO: 328132 - DNA, 337 bp, Homo sapiens
  misc_feature (20)..(20): n is a, c, g, or t
gcggccgcctactactactnctgctcgaattcaagcttctaacgatgtacggggacatcagcttatggcttctgtctaagcacctgaacagaggactgaaacctccactgcaggctggttttaggtcttgaattatgtaagaatcttgcacagcactgctaatgtaaatttcagttgtttttccctctaggacaaacacttaccaaaatatgcaacttttttttggtgggaagagagattgtcctgtgatttctacccatttcctgaggcctgtggaaataaacctttatgtacttaaagttatacagaaaatagaataaagttaataccaaacttg

SEQ ID NO: 328133 - DNA, 3594 bp, Homo sapiens
aggcggagcgtggcctcgatcaccaccgagagctgacggccgcccggattcccgccctcagagaatcctggcccccagtcgttccaagaccctttacggactgcagcttaaaggaaccggcctctgccattgagaccaaactgacagaggaactggtcactcttctgttctttccagagaggagcttagccagggacttctgcccttcctgggcccgggcctcgggggcgattccgggtaggtaaagcggaacgagggcgtggcctctcttgtgagcccgccctccccgtgtcgctcccgccttgagggcggggctctttcccaagtgccctctgtgagagccgggccgctctctccggggcgtggcgaagaggggcggagtcacgagcggggcggtgagacttcctgcccagtcgcgggccagcctagcgcttcagccggcggctcatttccggtgggggcgccgcgcccagtgagggcccggaagtgggtcgcgcggagattgctgggcggttcttgccggaagcggagagcggctgatcgcagtccggaggtgaggcggaactctgaggtggtccattatggctgacatgcaaaatctggtagaaagattggagagggcagtgggccgcctggaggcagtatctcatacctctgacatgcaccgtgggtatgcagacagtccttcaaaagcaggagcagctccatatgtgcaggcatttgactcgctgcttgctggtcctgtggcagagtacttgaagatcagtaaagagattgggggagacgtgcagaaacatgcggagatggtccacacaggtttgaagttggagcgagctctgttggttacagcttctcagtgtcaacagccagcagaaaataagctttccgatttgttggcacccatctcagagcagatcaaagaagtgataacctttcgggagaagaaccgaggcagcaagttgtttaatcacctgtcagctgtcagcgaaagtatccaggccctgggctgggtggctatggctcccaagcctggcccttatgtgaaagaaatgaatgatgccgccatgttttatacaaaccgagtcctcaaagagtacaaagatgtggataagaagcatgtagactgggtcaaagcttatttaagtatatggacagagctgcaggcttacattaaggagttccataccaccggactggcctggagcaaaacggggcctgtggcaaaagaactgagcggactgccatctggaccctctgccggatcaggtcctcctccccctccaccaggcccccctcctcccccagtctctaccagttcaggctcagatgagtctgcttcccgctcagcactgttcgcgcagattaatcagggggagagcattacacatgccctgaaacatgtatctgatgacatgaagactcacaagaaccctgccctgaaggctcagagtggtccagtacgcagtggccccaaaccattctctgcacctaaaccccaaaccagcccatcccccaaacgagccacaaagaaggagccagctgtacttgaactggagggcaagaagtggagagtggaaaatcaggaaaatgtttccaacctggtgattgaggacacagagctgaaacaggtggcttacatatacaagtgtgtcaacacgacattgcaaatcaagggcaaaattaactccattacagtagataactgtaagaaacttggcctggtattcgatgacgtggtgggcattgtggagataatcaacagtaaggatgtcaaagttcaggtaatgggtaaagtgccaaccatatccatcaacaaaacagatggctgccatgcttacctgagcaagaattccctggattgtgaaatagtcagtgccaaatcttccgagatgaatgtcctcattcctacagaaggcggtgactttaatgaattcccagttcctgagcagttcaagaccctatggaacgggcagaagttggtcaccacagtgacagaaattgctggataagcgaagtgccactgggttctttgccctcccttcacaccatgggataaatctgtatcaagacggttcttttctagatttcctctacctttttgctcttaaaactgcttctctgctctgagaagcacagctacctgccttcactgaaatatacctcaggctgaaatttggggtgggatagcaggtcagttgatcttctgcaggaaggtgcagcttttccatatcagctcaaccacgccgccagtccattcttaaggaactgccgactaggactgatgatgcattttagctttgagcttttgggggttattctaccaacaaacagtccattggaaagaaaacagtccctggaattaacagatcagaatgttcacactggttaatctttttttaacaatgagcatgaaggtagcagaagctggtgtgtttccagatggttcttctaaccaaactaatttttcactgttgacaagcgaggcaagggttgcactggaccaaaggctgaggcttggccatctagcattccatacaaaattgtttcctataagcattccttttattctctattctatcctgggtctgcctcaaccgtgagataggagagtctctggtactagctgctgtagcagtgcccttcatccagggcagttaatggagtcttggaccctttctttctctgggatccctgcccagcaccttcctatagagatgactttaaaaggaaaaaaaaaaaaaaaacaaacccacatgatttcaaggagtctggcattcctgaatccttcttccctgccaggtgcctgtcacctgtcttcactgcctccttttccctgtcatgctcatcagcttatggcttctgtctaagcacctgaacagaggactgaaacctccactgcaggctggttttaggtcttgaattatgtaagaatcttgcacagcactgctaatgtaaatttcagttgtttttccctctaggacaaacacttaccaaaatatgcaacttttttttggtgggaagagagattgtcctgtgatttctacccatttcctgaggcctgtggaaataaacctttatgtacttaaagttatacagaaaatagaataaagttaataccaaacttgaaaaaaaaaaaaaaaaaaaaaaaaaaaaaccttgtgggcgccgcgcccgggccccggaaagcttttaaacccatccggtggggcgcgcggggccccaatagggaactggagaacacatgtggcgcacacctggtgtcccctaaggagaaactccggggccatgctagacatacgggccgggagttctccccccatataaaaaaaaaccgcccgggggttacccccgagcgtgtttcggggaacaacttccccagaatgggcgctctccaggagcggggcccataaccggggggtctttatcacaacgaggggtctcccaaggcggcgcttccgatattccaacatttacccgccccgctcctcgttagctccatcagcgcgctctctcctgtgcctctctcatcatcctctctctctcgtctaccctcagtcctccttacttgcggcatagtcccctcagcgttgcccg

SEQ ID NO: 328134 - DNA, 1531 bp, Homo sapiens
aggcggagcgtggcctcgatcaccaccgagagctgacggccgcccggattcccgccctcagagaatcctggcccccagtcgttccaagaccctttacggactgcagcttaaaggaaccggcctctgccattgagaccaaactgacagaggaactggtcactcttctgttctttccagagaggagcttagccagggacttctgcccttcctgggcccgggcctcgggggcgattccgggtaggtaaagcggaacgagggcgtggcctctcttgtgagcccgccctccccgtgtcgctcccgccttgagggcggggctctttcccaagtgccctctgtgagagccgggccgctctctccggggcgtggcgaagaggggcggagtcacgagcggggcggtgagacttcctgcccagtcgcgggccagcctagcgcttcagccggcggctcatttccggtgggggcgccgcgcccagtgagggcccggaagtgggtcgcgcggagattgctgggcggttcttgccggaagcggagagcggctgatcgcagtccggaggtgaggcggaactctgaggtggtccattatggctgacatgcaaaatctggtagaaagattggagagggcagtgggccgcctggaggcagtatctcatacctctgacatgcaccgtgggtatgcagacagtccttcaaaagcaggagcagctccatatgtgcaggcatttgactcgctgcttgctggtcctgtggcagagtacttgaagatcagtaaagagattgggggagacgtgcagaaacatgcggagatggtccacacaggtttgaagttggagcgagctctgttggttacagcttctcagtgtcaacagccagcagaaaataagctttccgatttgttggcacccatctcagagcagatcaaagaagtgataacctttcgggagaagaaccgaggcagcaagttgtttaatcacctgtcagctgtcagcgaaagtatccaggccctgggctgggtggctatggctcccaagcctggcccttatgtgaaagaaatgaatgatgccgccatgttttatacaaaccgagtcctcaaagagtacaaagatgtggataagaagcatgtagactgggtcaaagcttatttaagtatatggacagagctgcaggcttacattaaggagttccataccaccggactggcctggagcaaaacgcggggcttgtgccaaaagaacttgaaccgggacttgccattctgggaaccctctgccggaatagggtcgtacctccccaatcaacaggggaccagtgcagtacccaaggaatctaacaagtgaaggcaaaaagagcatggacgagggcagcagtgggagcgaaggatgaaaagggggagaacagaaatgcacgaaagggggggatgaggagaggaagaccggcaagttcaaaaggaaaaggaggcacaaatacggagatacactaaggagacacaaggaaaacacaaatggaacaaacgagaaaagaagaaaaggaaaag

SEQ ID NO: 328135 - DNA, 137 bp, Homo sapiens
caaaggtaggtgctttctgcctaagtggagctcaaggtagcaaaaaataatggggatgagccatggcaccttgtcaggctggtgctataaagccatatgtacttttggtgtgcattattgggtactacgctttggca

SEQ ID NO: 328136 - DNA, 2639 bp, Homo sapiens
aattcgcggccgcgtcgaccgagaagacgacagaagggggcggagagcggctgatcgcagtccggaggtgaggcggaactctgaggtggtccattatggctgacatgcaaaatctggtagaaagattggagagggcagtgggccgcctggaggcagtatctcatacctctgacatgcaccgtgggtatgcagacagtccttcaaaagcaggagcagctccatatgtgcaggcatttgactcgctgcttgctggtcctgtggcagagtacttgaagatcagtaaagagattgggggagacgtgcagaaacatgcggagatggtccacacaggtttgaagttggagcgagctctgttggttacagcttctcagtgtcaacagccagcagaaaataagctttccgatttgttggcacccatctcagagcagatcaaagaagtgataacctttcgggagaagaaccgaggcagcaagttgtttaatcacctgtcagctgtcagcgaaagtatccaggccctgggctgggtggctatggctcccaagcctggcccttatgtgaaagaaatgaatgatgccgccatgttttatacaaaccgagtcctcaaagagtacaaagatgtggataagaagcatgtagactgggtcaaagcttatttaagtatatggacagagctgcaggcttacattaaggagttccataccaccggactggcctggagcaaaacggggcctgtggcaaaagaactgagcggactgccatctggaccctctgccggatcaggtcctcctccccctccaccaggcccccctcctcccccagtctctaccagttcaggctcagatgagtctgcttcccgctcagcactgttcgcgcagattaatcagggggagagcattacacatgccctgaaacatgtatctgatgacatgaagactcacaagaaccctgccctgaaggctcagagtggtccagtacgcagtggccccaaaccattctctgcacctaaaccccaaaccagcccatcccccaaacgagccacaaagaaggagccagctgtacttgaactggagggcaagaagtggagagtggaaaatcaggaaaatgtttccaacctggtgattgaggacacagagctgaaacaggtggcttacatatacaagtgtgtcaacacgacattgcaaatcaagggcaaaattaactccattacagtagataactgtaagaaacttggcctggtattcgatgacgtggtgggcattgtggagataatcaacagtaaggatgtcaaagttcaggtaatgggtaaagtgccaaccatatccatcaacaaaacagatggctgccatgcttacctgagcaagaattccctggattgtgaaatagtcagtgccaaatcttccgagatgaatgtcctcattcctacagaaggcggtgactttaatgaattcccagttcctgagcagttcaagaccctatggaacgggcagaagttggtcaccacagtgacagaaattgctggataagcgaagtgccactgggttctttgccctcccttcacaccatgggataaatctgtatcaagacggttcttttctagatttcctctacctttttgctcttaaaactgcttctctgctctgagaagcacagctacctgccttcactgaaatatacctcaggctgaaatttggggtgggatagcaggtcagttgatcttctgcaggaaggtgcagcttttccatatcagctcaaccacgccgccagtccattcttaaggaactgccgactaggactgatgatgcattttagctttgagcttttgggggttattctaccaacaaacagtccattggaaagaaaacagtccctggaattaacagatcagaatgttcacactggttaatctttttttaacaatgagcatgaaggtagcagaagctggtgtgtttccagatggttcttctaaccaaactaatttttcactgttgacaagcgaggcaagggttgcactggaccaaaggctgaggcttggccatctagcattccatacaaaattgtttcctataagcattccttttattctctattctatcctgggtctgcctcaaccgtgagataggagagtctctggtactagctgctgtagcagtgcccttcatccagggcagttaatggagtcttggaccctttctttctctgggatccctgcccagcaccttcctatagagatgactttaaaaggaaaaaaaaaaaaaaaacaaacccacatgatttcaaggagtctggcattcctgaatccttcttccctgccaggtgcctgtcacctgtcttcactgcctccttttccctgtcatgctcatcagcttatggcttctgtctaagcacctgaacagaggactgaaacctccactgcaggctggttttaggtcttgaattatgtaagaatcttgcacagcactgctaatgtaaatttcagttgtttttccctctaggacaaacacttaccaaaatatgcaacttttttttggtgggaagagagattgtcctgtgatttctacccatttcctgaggcctgtggaaataaacctttatgtacttaaagttatacagaaaatagaataaagttaataccaaacttg

SEQ ID NO: 328137 - DNA, 2599 bp, Homo sapiens
aattcgcggccgcgtcgaccgagaagacgacagaagggggcggagagcggctgatcgcagtccggaggtgaggcggaactctgaggtggtccattatggctgacatgcaaaatctggtagaaagattggagagggcagtgggccgcctggaggcagtatctcatacctctgacatgcaccgtgggtatgcagacagtccttcaaaagcaggagcagctccatatgtgcaggcatttgactcgctgcttgctggtcctgtggcagagtacttgaagatcagtaaagagattgggggagacgtgcagaaacatgcggagatggtccacacaggtttgaagttggagcgagctctgttggttacagcttctcagtgtcaacagccagcagaaaataagctttccgatttgttggcacccatctcagagcagatcaaagaagtgataacctttcgggagaagaaccgaggcagcaagttgtttaatcacctgtcagctgtcagcgaaagtatccaggccctgggctgggtggctatggctcccaagcctggcccttatgtgaaagaaatgaatgatgccgccatgttttatacaaaccgagtcctcaaagagtacaaagatgtggataagaagcatgtagactgggtcaaagcttatttaagtatatggacagagctgcaggcttacattaaggagttccataccaccggactggcctggagcaaaacggggcctgtggcaaaagaactgagcggactgccatctggaccctctgccggatcaggtcctcctccccctccaccaggcccccctcctcccccagtctctaccagttcaggctcagatgagtctgcttcccgctcagcactgttcgcgcagattaatcagggggagagcattacacatgccctgaaacatgtatctgatgacatgaagactcacaagaaccctgccctgaaggctcagagtggtccagtacgcagtggccccaaaccattctctgcacctaaaccccaaaccagcccatcccccaaacgagccacaaagaaggagccagctgtacttgaactggagggcaagaagtggagagtggaaaatcaggaaaatgtttccaacctggtgattgaggacacagagctgaaacaggtggcttacatatacaagtgtgtcaacacgacattgcaaatcaagggcaaaattaactccattacagtagataactgtaagaaacttggcctggtattcgatgacgtggtgggcattgtggagataatcaacagtaaggatgtcaaagttcaggtaatgggtaaagtgccaaccatatccatcaacaaaacagatggctgccatgcttacctgagcaagaattccctggattgtgaaatagtcagtgccaaatcttccgagatgaatgtcctcattcctacagaaggcggtgactttaatgaattcccagttcctgagcagttcaagaccctatggaacgggcagaagttggtcaccacagtgacagaaattgctggataagcgaagtgccactgggttctttgccctcccttcacaccatgggataaatctgtatcaagacggttcttttctagatttcctctacctttttgctcttaaaactgcttctctgctctgagaagcacagctacctgccttcactgaaatatacctcaggctgaaatttggggtgggatagcaggtcagttgatcttctgcaggaaggtgcagcttttccatatcagctcaaccacgccgccagtccattcttaaggaactgccgactaggactgatgatgcattttagctttgagcttttgggggttattctaccaacaaacagtccattggaaagaaaacagtccctggaattaacagatcagaatgttcacactggttaatctttttttaacaatgagcatgaaggtagcagaagctggtgtgtttccagatggttcttctaaccaaactaatttttcactgttgacaagcgaggcaagggttgcactggaccaaaggctgaggcttggccatctagcattccatacaaaattgtttcctataagcattccttttattctctattctatcctgggtctgcctcaaccgtgagataggagagtctctggtactagctgctgtagcagtgcccttcatccagggcagttaatggagtcttggaccctttctttctctgggatccctgcccagcaccttcctatagagatgactttaaaaggaaaaaaaaaaaaaaaacaaacccacatgatttcaaggagtctggcattcctgaatccttcttccctgccaggtgcctgtcacctgtcttcactgcctccttttccctgtcatgctcatcagcttatggcttctgtctaagcacctgaacagaggactgaaacctccactgcaggctggttttaggtcttgaattatgtaagaatcttgcacagcactgctaatgtaaatttcagttgtttttccctctaggacaaacacttaccaaaatatgcaacttttttttggtgggaagagagattgtcctgtgatttctacccatttcctgaggcctgtggggaagatgtcaggggagaaga

SEQ ID NO: 328138 - DNA, 2296 bp, Homo sapiens
aattcgcggccgcgtcgaccgagaagacgacagaagggggcggagagcggctgatcgcagtccggaggtgaggcggaactctgaggtggtccattatggctgacatgcaaaatctggtagaaagattggagagggcagtgggccgcctggaggcagtatctcatacctctgacatgcaccgtgggtatgcagacagtccttcaaaagcaggagcagctccatatgtgcaggcatttgactcgctgcttgctggtcctgtggcagagtacttgaagatcagtaaagagattgggggagacgtgcagaaacatgcggagatggtccacacaggtttgaagttggagcgagctctgttggttacagcttctcagtgtcaacagccagcagaaaataagctttccgatttgttggcacccatctcagagcagatcaaagaagtgataacctttcgggagaagaaccgaggcagcaagttgtttaatcacctgtcagctgtcagcgaaagtatccaggccctgggctgggtggctatggctcccaagcctggcccttatgtgaaagaaatgaatgatgccgccatgttttatacaaaccgagtcctcaaagagtacaaagatgtggataagaagcatgtagactgggtcaaagcttatttaagtatatggacagagctgcaggcttacattaaggagttccataccaccggactggcctggagcaaaacggggcctgtggcaaaagaactgagcggactgccatctggaccctctgccggatcaggtcctcctccccctccaccaggcccccctcctcccccagtctctaccagttcaggctcagatgagtctgcttcccgctcagcactgttcgcgcagattaatcagggggagagcattacacatgccctgaaacatgtatctgatgacatgaagactcacaagaaccctgccctgaaggctcagagtggtccagtacgcagtggccccaaaccattctctgcacctaaaccccaaaccagcccatcccccaaacgagccacaaagaaggagccagctgtacttgaactggagggcaagaagtggagagtggaaaatcaggaaaatgtttccaacctggtgattgaggacacagagctgaaacaggtggcttacatatacaagtgtgtcaacacgacattgcaaatcaagggcaaaattaactccattacagtagataactgtaagaaacttggcctggtattcgatgacgtggtgggcattgtggagataatcaacagtaaggatgtcaaagttcaggtaatgggtaaagtgccaaccatatccatcaacaaaacagatggctgccatgcttacctgagcaagaattccctggattgtgaaatagtcagtgccaaatcttccgagatgaatgtcctcattcctacagaaggcggtgactttaatgaattcccagttcctgagcagttcaagaccctatggaacgggcagaagttggtcaccacagtgacagaaattgctggataagcgaagtgccactgggttctttgccctcccttcacaccatgggataaatctgtatcaagacggttcttttctagatttcctctacctttttgctcttaaaactgcttctctgctctgagaagcacagctacctgccttcactgaaatatacctcaggctgaaatttggggtgggatagcaggtcagttgatcttctgcaggaaggtgcagcttttccatatcagctcaaccacgccgccagtccattcttaaggaactgccgactaggactgatgatgcattttagctttgagcttttgggggttattctaccaacaaacagtccattggaaagaaaacagtccctggaattaacagatcagaatgttcacactggttaatctttttttaacaatgagcatgaaggtagcagaagctggtgtgtttccagatggttcttctaaccaaactaatttttcactgttgacaagcgaggcaagggttgcactggaccaaaggctgaggcttggccatctagcattccatacaaaattgtttcctataagcattccttttattctctattctatcctgggtctgcctcaaccgtgagataggagagtctctggtactagctgctgtagcagtgcccttcatccagggcagttaatggagtcttggaccctttctttctctgggatccctgcccagcaccttcctatagagatgactttaaaaggaaaaaaaaaaaccagaccccccttgatttcaggaagcaggaacgtggagggtta

SEQ ID NO: 328139 - DNA, 2606 bp, Homo sapiens
aattcgcggccgcgtcgaccgagaagacgacagaagggggcggagagcggctgatcgcagtccggaggtgaggcggaactctgaggtggtccattatggctgacatgcaaaatctggtagaaagattggagagggcagtgggccgcctggaggcagtatctcatacctctgacatgcaccgtgggtatgcagacagtccttcaaaagcaggagcagctccatatgtgcaggcatttgactcgctgcttgctggtcctgtggcagagtacttgaagatcagtaaagagattgggggagacgtgcagaaacatgcggagatggtccacacaggtttgaagttggagcgagctctgttggttacagcttctcagtgtcaacagccagcagaaaataagctttccgatttgttggcacccatctcagagcagatcaaagaagtgataacctttcgggagaagaaccgaggcagcaagttgtttaatcacctgtcagctgtcagcgaaagtatccaggccctgggctgggtggctatggctcccaagcctggcccttatgtgaaagaaatgaatgatgccgccatgttttatacaaaccgagtcctcaaagagtacaaagatgtggataagaagcatgtagactgggtcaaagcttatttaagtatatggacagagctgcaggcttacattaaggagttccataccaccggactggcctggagcaaaacggggcctgtggcaaaagaactgagcggactgccatctggaccctctgccggatcaggtcctcctccccccagttcaggctcagatgagtctgcttcccgctcagcactgttcgcgcagattaatcagggggagagcattacacatgccctgaaacatgtatctgatgacatgaagactcacaagaaccctgccctgaaggctcagagtggtccagtacgcagtggccccaaaccattctctgcacctaaaccccaaaccagcccatcccccaaacgagccacaaagaaggagccagctgtacttgaactggagggcaagaagtggagagtggaaaatcaggaaaatgtttccaacctggtgattgaggacacagagctgaaacaggtggcttacatatacaagtgtgtcaacacgacattgcaaatcaagggcaaaattaactccattacagtagataactgtaagaaacttggcctggtattcgatgacgtggtgggcattgtggagataatcaacagtaaggatgtcaaagttcaggtaatgggtaaagtgccaaccatatccatcaacaaaacagatggctgccatgcttacctgagcaagaattccctggattgtgaaatagtcagtgccaaatcttccgagatgaatgtcctcattcctacagaaggcggtgactttaatgaattcccagttcctgagcagttcaagaccctatggaacgggcagaagttggtcaccacagtgacagaaattgctggataagcgaagtgccactgggttctttgccctcccttcacaccatgggataaatctgtatcaagacggttcttttctagatttcctctacctttttgctcttaaaactgcttctctgctctgagaagcacagctacctgccttcactgaaatatacctcaggctgaaatttggggtgggatagcaggtcagttgatcttctgcaggaaggtgcagcttttccatatcagctcaaccacgccgccagtccattcttaaggaactgccgactaggactgatgatgcattttagctttgagcttttgggggttattctaccaacaaacagtccattggaaagaaaacagtccctggaattaacagatcagaatgttcacactggttaatctttttttaacaatgagcatgaaggtagcagaagctggtgtgtttccagatggttcttctaaccaaactaatttttcactgttgacaagcgaggcaagggttgcactggaccaaaggctgaggcttggccatctagcattccatacaaaattgtttcctataagcattccttttattctctattctatcctgggtctgcctcaaccgtgagataggagagtctctggtactagctgctgtagcagtgcccttcatccagggcagttaatggagtcttggaccctttctttctctgggatccctgcccagcaccttcctatagagatgactttaaaaggaaaaaaaaaaaaaaaacaaacccacatgatttcaaggagtctggcattcctgaatccttcttccctgccaggtgcctgtcacctgtcttcactgcctccttttccctgtcatgctcatcagcttatggcttctgtctaagcacctgaacagaggactgaaacctccactgcaggctggttttaggtcttgaattatgtaagaatcttgcacagcactgctaatgtaaatttcagttgtttttccctctaggacaaacacttaccaaaatatgcaacttttttttggtgggaagagagattgtcctgtgatttctacccatttcctgaggcctgtggaaataaacctttatgtacttaaagttatacagaaaatagaataaagttaataccaaacttg

SEQ ID NO: 328140 - DNA, 2704 bp, Homo sapiens
aattcgcggccgcgtcgaccgagaagacgacagaagggggcggagagcggctgatcgcagtccggaggtgaggcggaactctgaggcagatatcctccctttcctcctcggctgctgctcttactttgacaagccaggctaacattgaaggtggtccattatggctgacatgcaaaatctggtagaaagattggagagggcagtgggccgcctggaggcagtatctcatacctctgacatgcaccgtgggtatgcagacagtccttcaaaagcaggagcagctccatatgtgcaggcatttgactcgctgcttgctggtcctgtggcagagtacttgaagatcagtaaagagattgggggagacgtgcagaaacatgcggagatggtccacacaggtttgaagttggagcgagctctgttggttacagcttctcagtgtcaacagccagcagaaaataagctttccgatttgttggcacccatctcagagcagatcaaagaagtgataacctttcgggagaagaaccgaggcagcaagttgtttaatcacctgtcagctgtcagcgaaagtatccaggccctgggctgggtggctatggctcccaagcctggcccttatgtgaaagaaatgaatgatgccgccatgttttatacaaaccgagtcctcaaagagtacaaagatgtggataagaagcatgtagactgggtcaaagcttatttaagtatatggacagagctgcaggcttacattaaggagttccataccaccggactggcctggagcaaaacggggcctgtggcaaaagaactgagcggactgccatctggaccctctgccggatcaggtcctcctccccctccaccaggcccccctcctcccccagtctctaccagttcaggctcagatgagtctgcttcccgctcagcactgttcgcgcagattaatcagggggagagcattacacatgccctgaaacatgtatctgatgacatgaagactcacaagaaccctgccctgaaggctcagagtggtccagtacgcagtggccccaaaccattctctgcacctaaaccccaaaccagcccatcccccaaacgagccacaaagaaggagccagctgtacttgaactggagggcaagaagtggagagtggaaaatcaggaaaatgtttccaacctggtgattgaggacacagagctgaaacaggtggcttacatatacaagtgtgtcaacacgacattgcaaatcaagggcaaaattaactccattacagtagataactgtaagaaacttggcctggtattcgatgacgtggtgggcattgtggagataatcaacagtaaggatgtcaaagttcaggtaatgggtaaagtgccaaccatatccatcaacaaaacagatggctgccatgcttacctgagcaagaattccctggattgtgaaatagtcagtgccaaatcttccgagatgaatgtcctcattcctacagaaggcggtgactttaatgaattcccagttcctgagcagttcaagaccctatggaacgggcagaagttggtcaccacagtgacagaaattgctggataagcgaagtgccactgggttctttgccctcccttcacaccatgggataaatctgtatcaagacggttcttttctagatttcctctacctttttgctcttaaaactgcttctctgctctgagaagcacagctacctgccttcactgaaatatacctcaggctgaaatttggggtgggatagcaggtcagttgatcttctgcaggaaggtgcagcttttccatatcagctcaaccacgccgccagtccattcttaaggaactgccgactaggactgatgatgcattttagctttgagcttttgggggttattctaccaacaaacagtccattggaaagaaaacagtccctggaattaacagatcagaatgttcacactggttaatctttttttaacaatgagcatgaaggtagcagaagctggtgtgtttccagatggttcttctaaccaaactaatttttcactgttgacaagcgaggcaagggttgcactggaccaaaggctgaggcttggccatctagcattccatacaaaattgtttcctataagcattccttttattctctattctatcctgggtctgcctcaaccgtgagataggagagtctctggtactagctgctgtagcagtgcccttcatccagggcagttaatggagtcttggaccctttctttctctgggatccctgcccagcaccttcctatagagatgactttaaaaggaaaaaaaaaaaaaaaacaaacccacatgatttcaaggagtctggcattcctgaatccttcttccctgccaggtgcctgtcacctgtcttcactgcctccttttccctgtcatgctcatcagcttatggcttctgtctaagcacctgaacagaggactgaaacctccactgcaggctggttttaggtcttgaattatgtaagaatcttgcacagcactgctaatgtaaatttcagttgtttttccctctaggacaaacacttaccaaaatatgcaacttttttttggtgggaagagagattgtcctgtgatttctacccatttcctgaggcctgtggaaataaacctttatgtacttaaagttatacagaaaatagaataaagttaataccaaacttg

SEQ ID NO: 328141 - DNA, 2630 bp, Homo sapiens
cccacccccccccccctcacccaaactatgtatacgtgccgccagctcgttgttatattcagtgatcagggctggggtggtccattatggctgacatgcaaaatctggtagaaagattggagagggcagtgggccgcctggaggcagtatctcatacctctgacatgcaccgtgggtatgcagacagtccttcaaaagcaggagcagctccatatgtgcaggcatttgactcgctgcttgctggtcctgtggcagagtacttgaagatcagtaaagagattgggggagacgtgcagaaacatgcggagatggtccacacaggtttgaagttggagcgagctctgttggttacagcttctcagtgtcaacagccagcagaaaataagctttccgatttgttggcacccatctcagagcagatcaaagaagtgataacctttcgggagaagaaccgaggcagcaagttgtttaatcacctgtcagctgtcagcgaaagtatccaggccctgggctgggtggctatggctcccaagcctggcccttatgtgaaagaaatgaatgatgccgccatgttttatacaaaccgagtcctcaaagagtacaaagatgtggataagaagcatgtagactgggtcaaagcttatttaagtatatggacagagctgcaggcttacattaaggagttccataccaccggactggcctggagcaaaacggggcctgtggcaaaagaactgagcggactgccatctggaccctctgccggatcaggtcctcctccccctccaccaggcccccctcctcccccagtctctaccagttcaggctcagatgagtctgcttcccgctcagcactgttcgcgcagattaatcagggggagagcattacacatgccctgaaacatgtatctgatgacatgaagactcacaagaaccctgccctgaaggctcagagtggtccagtacgcagtggccccaaaccattctctgcacctaaaccccaaaccagcccatcccccaaacgagccacaaagaaggagccagctgtacttgaactggagggcaagaagtggagagtggaaaatcaggaaaatgtttccaacctggtgattgaggacacagagctgaaacaggtggcttacatatacaagtgtgtcaacacgacattgcaaatcaagggcaaaattaactccattacagtagataactgtaagaaacttggcctggtattcgatgacgtggtgggcattgtggagataatcaacagtaaggatgtcaaagttcaggtaatgggtaaagtgccaaccatatccatcaacaaaacagatggctgccatgcttacctgagcaagaattccctggattgtgaaatagtcagtgccaaatcttccgagatgaatgtcctcattcctacagaaggcggtgactttaatgaattcccagttcctgagcagttcaagaccctatggaacgggcagaagttggtcaccacagtgacagaaattgctggataagcgaagtgccactgggttctttgccctcccttcacaccatgggataaatctgtatcaagacggttcttttctagatttcctctacctttttgctcttaaaactgcttctctgctctgagaagcacagctacctgccttcactgaaatatacctcaggctgaaatttggggtgggatagcaggtcagttgatcttctgcaggaaggtgcagcttttccatatcagctcaaccacgccgccagtccattcttaaggaactgccgactaggactgatgatgcattttagctttgagcttttgggggttattctaccaacaaacagtccattggaaagaaaacagtccctggaattaacagatcagaatgttcacactggttaatctttttttaacaatgagcatgaaggtagcagaagctggtgtgtttccagatggttcttctaaccaaactaatttttcactgttgacaagcgaggcaagggttgcactggaccaaaggctgaggcttggccatctagcattccatacaaaattgtttcctataagcattccttttattctctattctatcctgggtctgcctcaaccgtgagataggagagtctctggtactagctgctgtagcagtgcccttcatccagggcagttaatggagtcttggaccctttctttctctgggatccctgcccagcaccttcctatagagatgactttaaaaggaaaaaaaaaaaaaaaacaaacccacatgatttcaaggagtctggcattcctgaatccttcttccctgccaggtgcctgtcacctgtcttcactgcctccttttccctgtcatgctcatcagcttatggcttctgtctaagcacctgaacagaggactgaaacctccactgcaggctggttttaggtcttgaattatgtaagaatcttgcacagcactgctaatgtaaatttcagttgtttttccctctaggacaaacacttaccaaaatatgcaacttttttttggtgggaagagagattgtcctgtgatttctacccatttcctgaggcctgtggaaataaacctttatgtacttaaagttatacagaaaatagaataaagttaataccaaacttg

SEQ ID NO: 328142 - DNA, 2501 bp, Homo sapiens
tttttttttttctgttttagggacccatcggcggcacacgccgtgggtatgcagacagtccttcaaaagcaggagcagctccatatgtgcaggcatttgactcgctgcttgctggtcctgtggcagagtacttgaagatcagtaaagagattgggggagacgtgcagaaacatgcggagatggtccacacaggtttgaagttggagcgagctctgttggttacagcttctcagtgtcaacagccagcagaaaataagctttccgatttgttggcacccatctcagagcagatcaaagaagtgataacctttcgggagaagaaccgaggcagcaagttgtttaatcacctgtcagctgtcagcgaaagtatccaggccctgggctgggtggctatggctcccaagcctggcccttatgtgaaagaaatgaatgatgccgccatgttttatacaaaccgagtcctcaaagagtacaaagatgtggataagaagcatgtagactgggtcaaagcttatttaagtatatggacagagctgcaggcttacattaaggagttccataccaccggactggcctggagcaaaacggggcctgtggcaaaagaactgagcggactgccatctggaccctctgccggatcaggtcctcctccccctccaccaggcccccctcctcccccagtctctaccagttcaggctcagatgagtctgcttcccgctcagcactgttcgcgcagattaatcagggggagagcattacacatgccctgaaacatgtatctgatgacatgaagactcacaagaaccctgccctgaaggctcagagtggtccagtacgcagtggccccaaaccattctctgcacctaaaccccaaaccagcccatcccccaaacgagccacaaagaaggagccagctgtacttgaactggagggcaagaagtggagagtggaaaatcaggaaaatgtttccaacctggtgattgaggacacagagctgaaacaggtggcttacatatacaagtgtgtcaacacgacattgcaaatcaagggcaaaattaactccattacagtagataactgtaagaaacttggcctggtattcgatgacgtggtgggcattgtggagataatcaacagtaaggatgtcaaagttcaggtaatgggtaaagtgccaaccatatccatcaacaaaacagatggctgccatgcttacctgagcaagaattccctggattgtgaaatagtcagtgccaaatcttccgagatgaatgtcctcattcctacagaaggcggtgactttaatgaattcccagttcctgagcagttcaagaccctatggaacgggcagaagttggtcaccacagtgacagaaattgctggataagcgaagtgccactgggttctttgccctcccttcacaccatgggataaatctgtatcaagacggttcttttctagatttcctctacctttttgctcttaaaactgcttctctgctctgagaagcacagctacctgccttcactgaaatatacctcaggctgaaatttggggtgggatagcaggtcagttgatcttctgcaggaaggtgcagcttttccatatcagctcaaccacgccgccagtccattcttaaggaactgccgactaggactgatgatgcattttagctttgagcttttgggggttattctaccaacaaacagtccattggaaagaaaacagtccctggaattaacagatcagaatgttcacactggttaatctttttttaacaatgagcatgaaggtagcagaagctggtgtgtttccagatggttcttctaaccaaactaatttttcactgttgacaagcgaggcaagggttgcactggaccaaaggctgaggcttggccatctagcattccatacaaaattgtttcctataagcattccttttattctctattctatcctgggtctgcctcaaccgtgagataggagagtctctggtactagctgctgtagcagtgcccttcatccagggcagttaatggagtcttggaccctttctttctctgggatccctgcccagcaccttcctatagagatgactttaaaaggaaaaaaaaaaaaaaaacaaacccacatgatttcaaggagtctggcattcctgaatccttcttccctgccaggtgcctgtcacctgtcttcactgcctccttttccctgtcatgctcatcagcttatggcttctgtctaagcacctgaacagaggactgaaacctccactgcaggctggttttaggtcttgaattatgtaagaatcttgcacagcactgctaatgtaaatttcagttgtttttccctctaggacaaacacttaccaaaatatgcaacttttttttggtgggaagagagattgtcctgtgatttctacccatttcctgaggcctgtggaaataaacctttatgtacttaaagttatacagaaaatagaataaagttaataccaaacttg

SEQ ID NO: 328143 - DNA, 2588 bp, Homo sapiens
aattcgcggccgcgtcgaccgagaagacgacagaagggggcggagagcggctgatcgcagtccggaggtggtccattatggctgacatgcaaaatctggtagaaagattggagagggcagtgggccgcctggaggcagtatctcatacctctgacatgcaccgtgggtatgcagacagtccttcaaaagcaggagcagctccatatgtgcaggcatttgactcgctgcttgctggtcctgtggcagagtacttgaagatcagtaaagagattgggggagacgtgcagaaacatgcggagatggtccacacaggtttgaagttggagcgagctctgttggttacagcttctcagtgtcaacagccagcagaaaataagctttccgatttgttggcacccatctcagagcagatcaaagaagtgataacctttcgggagaagaaccgaggcagcaagttgtttaatcacctgtcagctgtcagcgaaagtatccaggccctgggctgggtggctatggctcccaagcctggcccttatgtgaaagaaatgaatgatgccgccatgttttatacaaaccgagtcctcaaagagtacaaagatgtggataagaagcatgtagactgggtcaaagcttatttaagtatatggacagagctgcaggcttacattaaggagttccataccaccggactggcctggagcaaaacggggcctgtggcaaaagaactgagcggactgccatctggaccctctgccggatcaggtcctcctccccccagttcaggctcagatgagtctgcttcccgctcagcactgttcgcgcagattaatcagggggagagcattacacatgccctgaaacatgtatctgatgacatgaagactcacaagaaccctgccctgaaggctcagagtggtccagtacgcagtggccccaaaccattctctgcacctaaaccccaaaccagcccatcccccaaacgagccacaaagaaggagccagctgtacttgaactggagggcaagaagtggagagtggaaaatcaggaaaatgtttccaacctggtgattgaggacacagagctgaaacaggtggcttacatatacaagtgtgtcaacacgacattgcaaatcaagggcaaaattaactccattacagtagataactgtaagaaacttggcctggtattcgatgacgtggtgggcattgtggagataatcaacagtaaggatgtcaaagttcaggtaatgggtaaagtgccaaccatatccatcaacaaaacagatggctgccatgcttacctgagcaagaattccctggattgtgaaatagtcagtgccaaatcttccgagatgaatgtcctcattcctacagaaggcggtgactttaatgaattcccagttcctgagcagttcaagaccctatggaacgggcagaagttggtcaccacagtgacagaaattgctggataagcgaagtgccactgggttctttgccctcccttcacaccatgggataaatctgtatcaagacggttcttttctagatttcctctacctttttgctcttaaaactgcttctctgctctgagaagcacagctacctgccttcactgaaatatacctcaggctgaaatttggggtgggatagcaggtcagttgatcttctgcaggaaggtgcagcttttccatatcagctcaaccacgccgccagtccattcttaaggaactgccgactaggactgatgatgcattttagctttgagcttttgggggttattctaccaacaaacagtccattggaaagaaaacagtccctggaattaacagatcagaatgttcacactggttaatctttttttaacaatgagcatgaaggtagcagaagctggtgtgtttccagatggttcttctaaccaaactaatttttcactgttgacaagcgaggcaagggttgcactggaccaaaggctgaggcttggccatctagcattccatacaaaattgtttcctataagcattccttttattctctattctatcctgggtctgcctcaaccgtgagataggagagtctctggtactagctgctgtagcagtgcccttcatccagggcagttaatggagtcttggaccctttctttctctgggatccctgcccagcaccttcctatagagatgactttaaaaggaaaaaaaaaaaaaaaacaaacccacatgatttcaaggagtctggcattcctgaatccttcttccctgccaggtgcctgtcacctgtcttcactgcctccttttccctgtcatgctcatcagcttatggcttctgtctaagcacctgaacagaggactgaaacctccactgcaggctggttttaggtcttgaattatgtaagaatcttgcacagcactgctaatgtaaatttcagttgtttttccctctaggacaaacacttaccaaaatatgcaacttttttttggtgggaagagagattgtcctgtgatttctacccatttcctgaggcctgtggaaataaacctttatgtacttaaagttatacagaaaatagaataaagttaataccaaacttg

SEQ ID NO: 328144 - DNA, 2586 bp, Homo sapiens
aattcgcggccgcgtcgaccgagaagacgacagaagggggcggagagcggctgatcgcagtccggaggtgaggcggaactctgaggtggtccattatggctgacatgcaaaatctggtagaaagattggagagggcagtgggccgcctggaggcagtatctcatacctctgacatgcaccgtgggtatgcagacagtccttcaaaagcaggagcagctccatatgtgcaggcatttgactcgctgcttgctggtcctgtggcagagtacttgaagatcagtaaagagattgggggagacgtgcagaaacatgcggagatggtccacacaggtttgaagttggagcgagctctgttggttacagcttctcagtgtcaacagccagcagaaaataagctttccgatttgttggcacccatctcagagcagatcaaagaagtgataacctttcgggagaagaaccgaggcagcaagttgtttaatcacctgtcagctgtcagcgaaagtatccaggccctgggctgggtggctatggctcccaagcctggcccttatgtgaaagaaatgaatgatgccgccatgttttatacaaaccgagtcctcaaagagtacaaagatgtggataagaagcatgtagactgggtcaaagcttatttaagtatatggacagagctgcaggcttacattaaggagttccataccaccggactggcctggagcaaaacggggcctgtggcaaaagaactgagcggactgccatctggaccctctgccggatcaggtcctcctccccctccaccaggcccccctcctcccccagtctctaccagttcaggctcagatgagtctgcttcccgctcagcactgttcgcgcagattaatcagggggagagcattacacatgccctgaaacatgtatctgatgacatgaagactcacaagaaccctgccctgaaggctcagagtggtccagtacgcagtggccccaaaccattctctgcacctaaaccccaaaccagcccatcccccaaacgagccacaaagaaggagccagctgtacttgaactggagggcaagaagtggagagtggaaaatcaggaaaatgtttccaacctggtgattgaggacacagagctgaaacaggtggcttacatatacaagtgtgtcaacacgacattgcaaatcaagggcaaaattaactccattacagtagataactgtaagaaacttggcctggtattcgatgacgtggtgggcattgtggagataatcaacagtaaggatgtcaaagttcaggtaatgggtaaagtgccaaccatatccatcaacaaaacagatggctgccatgcttacctgagcaagaattccctggattgtgaaatagtcagtgccaaatcttccgagatgaatgtcctcattcctacagaaggcggtgactttaatgaattcccagttcctgagcagttcaagaccctatggaacgggcagaagttggtcaccacagtgacagaaattgctggataagcgaagtgccactgggttctttgccctcccttcacaccatgggataaatctgtatcaagacggttcttttctagatttcctctacctttttgctcttactcaggctgaaatttggggtgggatagcaggtcagttgatcttctgcaggaaggtgcagcttttccatatcagctcaaccacgccgccagtccattcttaaggaactgccgactaggactgatgatgcattttagctttgagcttttgggggttattctaccaacaaacagtccattggaaagaaaacagtccctggaattaacagatcagaatgttcacactggttaatctttttttaacaatgagcatgaaggtagcagaagctggtgtgtttccagatggttcttctaaccaaactaatttttcactgttgacaagcgaggcaagggttgcactggaccaaaggctgaggcttggccatctagcattccatacaaaattgtttcctataagcattccttttattctctattctatcctgggtctgcctcaaccgtgagataggagagtctctggtactagctgctgtagcagtgcccttcatccagggcagttaatggagtcttggaccctttctttctctgggatccctgcccagcaccttcctatagagatgactttaaaaggaaaaaaaaaaaaaaaacaaacccacatgatttcaaggagtctggcattcctgaatccttcttccctgccaggtgcctgtcacctgtcttcactgcctccttttccctgtcatgctcatcagcttatggcttctgtctaagcacctgaacagaggactgaaacctccactgcaggctggttttaggtcttgaattatgtaagaatcttgcacagcactgctaatgtaaatttcagttgtttttccctctaggacaaacacttaccaaaatatgcaacttttttttggtgggaagagagattgtcctgtgatttctacccatttcctgaggcctgtggaaataaacctttatgtacttaaagttatacagaaaatagaataaagttaataccaaacttg

SEQ ID NO: 328145 - DNA, 2461 bp, Homo sapiens
aattcgcggccgcgtcgaccgagaagacgacagaagggggcggagagcggctgatcgcagtccggaggtgaggcggaactctgaggtggtccattatggctgacatgcaaaatctggtagaaagattggagagggcagtgggccgcctggaggcagtatctcatacctctgacatgcaccgtgggtatgcagacagtccttcaaaagcaggagcagctccatatgtgcaggcatttgactcgctgcttgctggtcctgtggcagagtacttgaagatcagtaaagagattgggggagacgtgcagaaacatgcggagatggtccacacaggtttgaagttggagcgagctctgttggttacagcttctcagtgtcaacagccagcagaaaataagctttccgatttgttggcacccatctcagagcagatcaaagaagtgataacctttcgggagaagaaccgaggcagcaagttgtttaatcacctgtcagctgtcagcgaaagtatccaggccctgggctgggtggctatggctcccaagcctggcccttatgtgaaagaaatgaatgatgccgccatgttttatacaaaccgagtcctcaaagagtacaaagatgtggataagaagcatgtagactgggtcaaagcttatttaagtatatggacagagctgcaggcttacattaaggagttccataccaccggactggcctggagcaaaacgccctgaaacatgtatctgatgacatgaagactcacaagaaccctgccctgaaggctcagagtggtccagtacgcagtggccccaaaccattctctgcacctaaaccccaaaccagcccatcccccaaacgagccacaaagaaggagccagctgtacttgaactggagggcaagaagtggagagtggaaaatcaggaaaatgtttccaacctggtgattgaggacacagagctgaaacaggtggcttacatatacaagtgtgtcaacacgacattgcaaatcaagggcaaaattaactccattacagtagataactgtaagaaacttggcctggtattcgatgacgtggtgggcattgtggagataatcaacagtaaggatgtcaaagttcaggtaatgggtaaagtgccaaccatatccatcaacaaaacagatggctgccatgcttacctgagcaagaattccctggattgtgaaatagtcagtgccaaatcttccgagatgaatgtcctcattcctacagaaggcggtgactttaatgaattcccagttcctgagcagttcaagaccctatggaacgggcagaagttggtcaccacagtgacagaaattgctggataagcgaagtgccactgggttctttgccctcccttcacaccatgggataaatctgtatcaagacggttcttttctagatttcctctacctttttgctcttaaaactgcttctctgctctgagaagcacagctacctgccttcactgaaatatacctcaggctgaaatttggggtgggatagcaggtcagttgatcttctgcaggaaggtgcagcttttccatatcagctcaaccacgccgccagtccattcttaaggaactgccgactaggactgatgatgcattttagctttgagcttttgggggttattctaccaacaaacagtccattggaaagaaaacagtccctggaattaacagatcagaatgttcacactggttaatctttttttaacaatgagcatgaaggtagcagaagctggtgtgtttccagatggttcttctaaccaaactaatttttcactgttgacaagcgaggcaagggttgcactggaccaaaggctgaggcttggccatctagcattccatacaaaattgtttcctataagcattccttttattctctattctatcctgggtctgcctcaaccgtgagataggagagtctctggtactagctgctgtagcagtgcccttcatccagggcagttaatggagtcttggaccctttctttctctgggatccctgcccagcaccttcctatagagatgactttaaaaggaaaaaaaaaaaaaaaacaaacccacatgatttcaaggagtctggcattcctgaatccttcttccctgccaggtgcctgtcacctgtcttcactgcctccttttccctgtcatgctcatcagcttatggcttctgtctaagcacctgaacagaggactgaaacctccactgcaggctggttttaggtcttgaattatgtaagaatcttgcacagcactgctaatgtaaatttcagttgtttttccctctaggacaaacacttaccaaaatatgcaacttttttttggtgggaagagagattgtcctgtgatttctacccatttcctgaggcctgtggaaataaacctttatgtacttaaagttatacagaaaatagaataaagttaataccaaacttg

SEQ ID NO: 328146 - DNA, 2120 bp, Homo sapiens
aattcgcggccgcgtcgaccgagaagacgacagaagggggcggagagcggctgatcgcagtccggaggtgaggcggaactctgaggtggtccattatggctgacatgcaaaatctggtagaaagattggagagggcagtgggccgcctggaggcagtatctcatacctctgacatgcaccgtgggtatgcagacagtccttcaaaagcaggagcagctccatatgtgcaggcatttgactcgctgcttgctggtcctgtggcagagtacttgaatccaccaggcccccctcctcccccagtctctaccagttcaggctcagatgagtctgcttcccgctcagcactgttcgcgcagattaatcagggggagagcattacacatgccctgaaacatgtatctgatgacatgaagactcacaagaaccctgccctgaaggctcagagtggtccagtacgcagtggccccaaaccattctctgcacctaaaccccaaaccagcccatcccccaaacgagccacaaagaaggagccagctgtacttgaactggagggcaagaagtggagagtggaaaatcaggaaaatgtttccaacctggtgattgaggacacagagctgaaacaggtggcttacatatacaagtgtgtcaacacgacattgcaaatcaagggcaaaattaactccattacagtagataactgtaagaaacttggcctggtattcgatgacgtggtgggcattgtggagataatcaacagtaaggatgtcaaagttcaggtaatgggtaaagtgccaaccatatccatcaacaaaacagatggctgccatgcttacctgagcaagaattccctggattgtgaaatagtcagtgccaaatcttccgagatgaatgtcctcattcctacagaaggcggtgactttaatgaattcccagttcctgagcagttcaagaccctatggaacgggcagaagttggtcaccacagtgacagaaattgctggataagcgaagtgccactgggttctttgccctcccttcacaccatgggataaatctgtatcaagacggttcttttctagatttcctctacctttttgctcttaaaactgcttctctgctctgagaagcacagctacctgccttcactgaaatatacctcaggctgaaatttggggtgggatagcaggtcagttgatcttctgcaggaaggtgcagcttttccatatcagctcaaccacgccgccagtccattcttaaggaactgccgactaggactgatgatgcattttagctttgagcttttgggggttattctaccaacaaacagtccattggaaagaaaacagtccctggaattaacagatcagaatgttcacactggttaatctttttttaacaatgagcatgaaggtagcagaagctggtgtgtttccagatggttcttctaaccaaactaatttttcactgttgacaagcgaggcaagggttgcactggaccaaaggctgaggcttggccatctagcattccatacaaaattgtttcctataagcattccttttattctctattctatcctgggtctgcctcaaccgtgagataggagagtctctggtactagctgctgtagcagtgcccttcatccagggcagttaatggagtcttggaccctttctttctctgggatccctgcccagcaccttcctatagagatgactttaaaaggaaaaaaaaaaaaaaaacaaacccacatgatttcaaggagtctggcattcctgaatccttcttccctgccaggtgcctgtcacctgtcttcactgcctccttttccctgtcatgctcatcagcttatggcttctgtctaagcacctgaacagaggactgaaacctccactgcaggctggttttaggtcttgaattatgtaagaatcttgcacagcactgctaatgtaaatttcagttgtttttccctctaggacaaacacttaccaaaatatgcaacttttttttggtgggaagagagattgtcctgtgatttctacccatttcctgaggcctgtggaaataaacctttatgtacttaaagttatacagaaaatagaataaagttaataccaaacttg

SEQ ID NO: 328147 - DNA, 2208 bp, Homo sapiens
aattcgcggccgcgtcgaccgagaagacgacagaagggggcggagagcggctgatcgcagtccggaggtgaggcggaactctgaggtggtccattatggctgacatgcaaaatctggtagaaagattggagagggcagtgggccgcctggaggcagtatctcatacctctgacatgcaccgtgggtatgcagacagtccttcaaaagcaggagcagctccatatgtgcaggcatttgactcgctgcttgctggtcctgtggcagagtacttgaagatcagtaaagagattgggggagacgtgcagaaacatgcggagatggtccacacaggtttgaagttggagcgagctctgttggttacagcttctcagtgtcaacagccagcagaaaataagctttccgatttgttggcacccatctcagagcagatcaaagaagtgataacctttcgggagaagaaccgaggcagcaagttgtttaatcacctgtcagctgtcagcgaaagtatccaggccctgggctgggtggctatggctcccaagcctggcccttatgtgaaagaaatgaatgatgccgccatgttttatacaaaccgagaaacgagccacaaagaaggagccagctgtacttgaactggagggcaagaagtggagagtggaaaatcaggaaaatgtttccaacctggtgattgaggacacagagctgaaacaggtggcttacatatacaagtgtgtcaacacgacattgcaaatcaagggcaaaattaactccattacagtagataactgtaagaaacttggcctggtattcgatgacgtggtgggcattgtggagataatcaacagtaaggatgtcaaagttcaggtaatgggtaaagtgccaaccatatccatcaacaaaacagatggctgccatgcttacctgagcaagaattccctggattgtgaaatagtcagtgccaaatcttccgagatgaatgtcctcattcctacagaaggcggtgactttaatgaattcccagttcctgagcagttcaagaccctatggaacgggcagaagttggtcaccacagtgacagaaattgctggataagcgaagtgccactgggttctttgccctcccttcacaccatgggataaatctgtatcaagacggttcttttctagatttcctctacctttttgctcttaaaactgcttctctgctctgagaagcacagctacctgccttcactgaaatatacctcaggctgaaatttggggtgggatagcaggtcagttgatcttctgcaggaaggtgcagcttttccatatcagctcaaccacgccgccagtccattcttaaggaactgccgactaggactgatgatgcattttagctttgagcttttgggggttattctaccaacaaacagtccattggaaagaaaacagtccctggaattaacagatcagaatgttcacactggttaatctttttttaacaatgagcatgaaggtagcagaagctggtgtgtttccagatggttcttctaaccaaactaatttttcactgttgacaagcgaggcaagggttgcactggaccaaaggctgaggcttggccatctagcattccatacaaaattgtttcctataagcattccttttattctctattctatcctgggtctgcctcaaccgtgagataggagagtctctggtactagctgctgtagcagtgcccttcatccagggcagttaatggagtcttggaccctttctttctctgggatccctgcccagcaccttcctatagagatgactttaaaaggaaaaaaaaaaaaaaaacaaacccacatgatttcaaggagtctggcattcctgaatccttcttccctgccaggtgcctgtcacctgtcttcactgcctccttttccctgtcatgctcatcagcttatggcttctgtctaagcacctgaacagaggactgaaacctccactgcaggctggttttaggtcttgaattatgtaagaatcttgcacagcactgctaatgtaaatttcagttgtttttccctctaggacaaacacttaccaaaatatgcaacttttttttggtgggaagagagattgtcctgtgatttctacccatttcctgaggcctgtggaaataaacctttatgtacttaaagttatacagaaaatagaataaagttaataccaaacttg

SEQ ID NO: 328148 - DNA, 2480 bp, Homo sapiens
aattcgcggccgcgtcgaccgagaagacgacagaagggggcggagagcggctgatcgcagtccggaggtgaggcggaactctgaggtggtccattatggctgacatgcaaaatctggtagaaagattggagagggcagtgggccgcctggaggcagtatctcatacctctgacatgcaccgtgggtatgcagacagtccttcaaaagcaggagcagctccatatgtgcaggcatttgactcgctgcttgctggtcctgtggcagagtacttgaagatcagtaaagagattgggggagacgtgcagaaacatgcggagatggtccacacaggtttgaagttggagcgagctctgttggttacagcttctcagtgtcaacagccagcagaaaataagctttccgatttgttggcacccatctcagagcagatcaaagaagtgataacctttcgggagaagaaccgaggcagcaagttgtttaatcacctgtcagctgtcagcgaaagtatccaggccctgggctgggtggctatggctcccaagcctggcccttatgtgaaagaaatgaatgatgccgccatgttttatacaaaccgagtcctcaaagagtacaaagatgtggataagaagcatgtagactgggtcaaagcttatttaagtatatggacagagctgcaggcttacattaaggagttccataccaccggactggcctggagcaaaacggggcctgtggcaaaagaactgagcggactgccatctggaccctctgccggatcaggtcctcctccccctccaccaggcccccctcctcccccagtctctaccagttcaggctcagatgagtctgcttcccgctcagcactgttcgcgcagattaatcagggggagagcattacacatgccctgaaacatgtatctgatgacatgaagactcacaagaaccctgccctgaaggctcagagtggtccagtacgcagtggccccaaaccattctctgcacctaaaccccaaaccagcccatcccccaaacgagccacaaagaaggagccagctgtacttgaactggagggcaagaagtggagagtggaaaatcaggaaaatgtttccaacctggtgattgaggacacagagctgaaacaggtggcttacatatacaagtgtgtcaacacgacattgcaaatcaagggcaaaattaactccattacagtagataactgtaagaaacttggcctggtattcgatgacgtggtgggcattgtggagataatcaacagtaaggatgtcaaagttcaggtaatgggtaaagtgccaaccatatccatcaacaaaacagatggctgccatgcttacctgagcaagaattccctggattgtgaaatagtcagtgccaaatcttccgagatgaatgtcctcattcctacagaaggcggtgactttaatgaattcccagttcctgagcagttcaagaccctatggaacgggcagaagttggtcaccacagtgacagaaattgctggataagcgaagtgccactgggttctttgccctcccttcacaccatgggataaatctgtatcaagacggttcttttctagatttcctctacctttttgctcttaaaactgcttctctgctctgagaagcacagctacctgccttcactgaaatatacctcaggctgaaatttggggtgggatagcaggtcagttgatcttctgcaggaaggtgcagcttttccatatcagctcaaccacgccgccagtccattcttaaggaactgccgactaggactgatgatgcattttagctttgagcttttgggggttattctaccaacaaacagtccattggaaagaaaacagtccctggaattaacagatcagaatgttcacactggttaatctttttttaacaatgagcatgaaggtagcagaagctggtgtgtttccagatggttcttctaaccaaactaatttttcactgttgacaagcgaggcaagggttgcactggaccaaaggctgaggcttggccatctagcattccatacaaaattgcttcctatagagatgactttaaaaggaaaaaaaaaaaaaaaacaaacccacatgatttcaaggagtctggcattcctgaatccttcttccctgccaggtgcctgtcacctgtcttcactgcctccttttccctgtcatgctcatcagcttatggcttctgtctaagcacctgaacagaggactgaaacctccactgcaggctggttttaggtcttgaattatgtaagaatcttgcacagcactgctaatgtaaatttcagttgtttttccctctaggacaaacacttaccaaaatatgcaacttttttttggtgggaagagagattgtcctgtgatttctacccatttcctgaggcctgtggaaataaacctttatgtacttaaagttatacagaaaatagaataaagttaataccaaacttg

SEQ ID NO: 328149 - DNA, 1389 bp, Homo sapiens
acccacgcgtcggagagattgtcctgtgatttctacccatttcctgaggcctgtggaaataaacctttatgtacttaaagttatacagaaaatagaataaagttaataccaaacttgaaaaaaaaaaaaaaaaaaaaaaaaaaatgattgtcctcttccctaaaaagggggggactttaggattccccgtcccggacgtaaaagaccacttatttgaacgccctatggaacgggcagaagttggtcaccacagtgacagaaattgctggataagcgaagtgccactgggttctttgccctcccttcacaccatgggataaatctgtatcaagacggttcttttctagatttcctctacctttttgctcttaaaactgcttctctgctctgagaagcacagctacctgccttcactgaaatatacctcaggctgaaatttggggtgggatagcaggtcagttgatcttctgcaggaaggtgcagcttttccatatcagctcaaccacgccgccagtccattcttaaggaactgccgactaggactgatgatgcattttagctttgagcttttgggggttattctaccaacaaacagtccattggaaagaaaacagtccctggaattaacagatcagaatgttcacactggttaatctttttttaacaatgagcatgaaggtagcagaagctggtgtgtttccagatggttcttctaaccaaactaatttttcactgttgacaagcgaggcaagggttgcactggaccaaaggctgaggcttggccatctagcattccatacaaaattgtttcctataagcattccttttattctctattctatcctgggtctgcctcaaccgtgagataggagagtctctggtactagctgctgtagcagtgcccttcatccagggcagttaatggagtcttggaccctttctttctctgggatccctgcccagcaccttcctatagagatgactttaaaaggaaaaaaaaaaaaaaaacaaacccacatgatttcaaggagtctggcattcctgaatccttcttccctgccaggtgcctgtcacctgtcttcactgcctccttttccctgtcatgctcatcagcttatggcttctgtctaagcacctgaacagaggactgaaacctccactgcaggctggttttaggtcttgaattatgtaagaatcttgcacagcactgctaatgtaaatttcagttgtttttccctctaggacaaacacttaccaaaatatgcaacttttttttggtgggaagagagattgtcctgtgatttctacccatttcctgaggcctgtggaaataaacctttatgtacttaaagttatacagaaaatagaataaagttaataccaaacttg

SEQ ID NO: 328150 - DNA, 1390 bp, Homo sapiens
aattcgcggccgcgtcgaccgagaagacgacagaagggggcggagagcggctgatcgcagtccggaggtgaggcggaactctgaggtggtccattatggctgacatgcaaaatctggtagaaagattggagagggcagtgggccgcctggaggcagtatctcatacctctgacatgcaccgtgggtatgcagacagtccttcaaaagcaggagcagctccatatgtgcaggcatttgactcgctgcttgctggtcctgtggcagagtacttgaagatcagtaaagagattgggggagacgtgcagaaacatgcggagatggtccacacaggtttgaagttggagcgagctctgttggttacagcttctcagtgtcaacagccagcagaaaataagctttccgatttgttggcacccatctcagagcagatcaaagaagtgataacctttcgggagaagaaccgaggcagcaagttgtttaatcacctgtcagctgtcagcgaaagtatccaggccctgggctgggtggctatggctcccaagcctggcccttatgtgaaagaaatgaatgatgccgccatgttttatacaaaccgagtcctcaaagagtacaaagatgtggataagaagcatgtagactgggtcaaagcttatttaagtatatggacagagctgcaggcttacattaaggagttccataccaccggactggcctggagcaaaacggggcctgtggcaaaagaactgagcggactgccatctggaccctctgccggatcaggtcctcctccccctccaccaggcccccctcctcccccagtctctaccagttcaggctcagatgagtctgcttcccgctcagcactgttcgcgcagattaatcagggggagagcattacacatgccctgaaacatgtatctgatgacatgaagactcacaagaaccctgccctgaaggctcagagtggtccagtacgcagtggccccaaaccattctctgcacctaaaccccaaaccagcccatcccccaaacgagccacaaagaaggagccagctgtacttgaactggagggcaagaagtggagagtggaaaatcaggaaaatgtttccaacctggtgattgaggacacagagctgaaacaggtggcttacatatacaagtgtgtcaacacgacattgcaaatcaagggcaaaattaactccattacagtagataactgtaagaaacttggcctggtattcgatgacgtggtgggcattgtggagataatcaacagtaaggatgtcaaagttcaggtaatgggtaaagtgccaaccatatccatcaacgccagtcgccattcttccgagatgaattgtcttattcctacagaaaggccgtgactttattt

SEQ ID NO: 328151 - DNA, 1510 bp, Homo sapiens
aattcgcggccgcgtcgaccgagaagacgacagaagggggcggagagcggctgatcgcagtccggaggtgaggcggaactctgaggtggtccattatggctgacatgcaaaatctggtagaaagattggagagggcagtgggccgcctggaggcagtatctcatacctctgacatgcaccgtgggtatgcagacagtccttcaaaagcaggagcagctccatatgtgcaggcatttgactcgctgcttgctggtcctgtggcagagtacttgaagatcagtaaagagattgggggagacgtgcagaaacatgcggagatggtccacacaggtttgaagttggagcgagctctgttggttacagcttctcagtgtcaacagccagcagaaaataagctttccgatttgttggcacccatctcagagcagatcaaagaagtgataacctttcgggagaagaaccgaggcagcaagttgtttaatcacctgtcagctgtcagcgaaagtatccaggccctgggctgggtggctatggctcccaagcctggcccttatgtgaaagaaatgaatgatgccgccatgttttatacaaaccgagtcctcaaagagtacaaagatgtggataagaagcatgtagactgggtcaaagcttatttaagtatatggacagagctgcaggcttacattaaggagttccataccaccggactggcctggagcaaaacggggcctgtggcaaaagaactgagcggactgccatctggaccctctgccggatcaggtcctcctccccctccaccaggcccccctcctcccccagtctctaccagttcaggctcagatgagtctgcttcccgctcagcactgttcgcgcagattaatcagggggagagcattacacatgccctgaaacatgtatctgatgacatgaagactcacaagaaccctgccctgaaggctcagagtggtccagtacgcagtggccccaaaccattctctgcacctaaaccccaaaccagcccatcccccaaacgagccacaaagaaggagccagctgtacttgaactggagggcaagaagtggagagtggaaaatcaggaaaatgtttccaacctggtgattgaggacacagagctgaaacaggtggcttacatatacaagtgtgtcaacacgacattgcaaatcaagggcaaaattaactccattacagtagataactgtaagaaacttggtctggagcttcggcgtgttgcacacgccgagtctccagacttgtcttccacaagcacgttcttaccttagccacgaagtgaccaagccacacgtactaaaggttgaactcaaagatatgtacagggtattaaacaaataccaagggaacagttaacttcaatacaaggtcaaaatcagcaacaagttctacaatccagtgctgatatcagatacaagcttcaaggacaatttcttttcgaaggcttgtcccagtttcgtttgggtactcggcgtgtgca

SEQ ID NO: 328152 - DNA, 919 bp, Homo sapiens
  misc_feature (795)..(795): n is a, c, g, or t
aattcgcggccgcgtcgaccgagaagacgacagaagggggcggagagcggctgatcgcagtccggaggtgaggcggaactctgaggtggtccattatggctgacatgcaaaatctggtagaaagattggagagggcagtgggccgcctggaggcagtatctcatacctctgacatgcaccgtgggtatgcagacagtccttcaaaagcaggagcagctccatatgtgcaggcatttgactcgctgcttgctggtcctgtggcagagtacttgaagatcagtaaagagattgggggagacgtgcagaaacatgcggagatggtccacacaggtttgaagttggagcgagctctgttggttacagcttctcagtgtcaacagccagcagaaaataagctttccgatttgttggcacccatctcagagcagatcaaagaagtgataacctttcgggagaagaaccgaggcagcaagttgtttaatcacctgtcagctgtcagcgaaagtatccaggccctgggctgggtggctatggctcccaagcctggcccttatgtgaaagaaatgaatgatgccgccatgttttatacaaaccgagtcctcaaagagtacaaagatgtggataagaagcatgtagactgggtcaaagcttatttaagtatatggacagagctgcaggcttacattaaggagttccataccaccggactggcctggagcaaaacggggcctgtggcaaaagaactgagcggactgccatctggaccctctgccggatcaggtcctcctccccccntcaccgcatacgagcaaagggcccccgttgctcacacacagttttaaccagcttcacggtccagatgagtcttgttcaccgggaaacatgtccggcaattaacaagggagaacatagcgaatgc

SEQ ID NO: 328153 - DNA, 773 bp, Homo sapiens
  misc_feature (20)..(20): n is a, c, g, or t
gcggccgcctactactactnctgctcgaattcaagcttctaacgatgtacggggacatgaaggtagcagaagctggtgtgtttccagatggttcttctaaccaaactaatttttcactgttgacaagcgaggcaagggttgcactggaccaaaggctgaggcttggccatctagcattccatacaaaattgtttcctataagcattccttttattctctattctatcctgggtctgcctcaaccgtgagataggagagtctctggtactagctgctgtagcagtgcccttcatccagggcagttaatggagtcttggaccctttctttctctgggatccctgcccagcaccttcctatagagatgactttaaaaggaaaaaaaaaaaaaaaacaaacccacatgatttcaaggagtctggcattcctgaatccttcttccctgccaggtgcctgtcacctgtcttcactgcctccttttccctgtcatgctcatcagcttatggcttctgtctaagcacctgaacagaggactgaaacctccactgcaggctggttttaggtcttgaattatgtaagaatcttgcacagcactgctaatgtaaatttcagttgtttttccctctaggacaaacacttaccaaaatatgcaacttttttttggtgggaagagagattgtcctgtgatttctacccatttcctgaggcctgtggaaataaacctttatgtacttaaagttatacagaaaatagaataaagttaataccaaacttg

SEQ ID NO: 328154 - DNA, 696 bp, Homo sapiens
tcaggggaggaggtcaatcgcttgccccccactttggcaaattggggactgaggactggaagggtggagagtaggcggaaccagcttggccatctagcattccatacaaaattgtttcctataagcattccttttattctctattctatcctgggtctgcctcaaccgtgagataggagagtctctggtactagctgctgtagcagtgcccttcatccagggcagttaatggagtcttggaccctttctttctctgggatccctgcccagcaccttcctatagagatgactttaaaaggaaaaaaaaaaaaaaaacaaacccacatgatttcaaggagtctggcattcctgaatccttcttccctgccaggtgcctgtcacctgtcttcactgcctccttttccctgtcatgctcatcagcttatggcttctgtctaagcacctgaacagaggactgaaacctccactgcaggctggttttaggtcttgaattatgtaagaatcttgcacagcactgctaatgtaaatttcagttgtttttccctctaggacaaacacttaccaaaatatgcaacttttttttggtgggaagagagattgtcctgtgatttctacccatttcctgaggcctgtggaaataaacctttatgtacttaaagttatacagaaaatagaataaagttaataccaaacttg

SEQ ID NO: 328155 - DNA, 535 bp, Homo sapiens
tttttttccttttaaagtcatctctggtactagctgctgtagcagtgcccttcatccagggcagttaatggagtcttggaccctttctttctctgggatccctgcccagcaccttcctatagagatgactttaaaaggaaaaaaaaaaaaaaaacaaacccacatgatttcaaggagtctggcattcctgaatccttcttccctgccaggtgcctgtcacctgtcttcactgcctccttttccctgtcatgctcatcagcttatggcttctgtctaagcacctgaacagaggactgaaacctccactgcaggctggttttaggtcttgaattatgtaagaatcttgcacagcactgctaatgtaaatttcagttgtttttccctctaggacaaacacttaccaaaatatgcaacttttttttggtgggaagagagattgtcctgtgatttctacccatttcctgaggcctgtggaaataaacctttatgtacttaaagttatacagaaaatagaataaagttaataccaaacttg

SEQ ID NO: 328156 - DNA, 1045 bp, Homo sapiens
aattcgcggccgcgtcgaccgagaagacgacagaagggggcggagagcggctgatcgcagtccggaggtgaggcggaactctgaggtggtccattatggctgacatgcaaaatctggtagaaagattggagagggcagtgggccgcctggaggcagtatctcatacctctgacatgcaccgtgggtatgcagacagtccttcaaaagcaggagcagctccatatgtgcaggcatttgactcgctgcttgctggtcctgtggcagagtacttgaagatcagtaaagagattgggggagacgtgcagaaacatgcggagatggtccacacaggtttgaagttggagcgagctctgttggttacagcttctcagtgtcaacagccagcagaaaataagctttccgatttgttggcacccatctcagagcagatcaaagaagtgataacctttcgggagaagaaccgaggcagcaagttgtttaatcacctgtcagctgtcagcgaaagtatccaggccctgggctgggtggctatggctcccaagcctggcccttatgtgaaagaaatgaatgatgccgccatgttttatacaaaccgagtcctcaaagagtacaaagatgtggataagaagcatgtagactgggtcaaagcttatttaagtatatggacagagctgcaggcttacattaaggagttccataccaccggactggcctggagcaaaacgcggggcttgtgccaaaagaacttgaaccgggacttgccattctgggaaccctctgccggaatagggtcgtacctccccaatcaacaggggaccagtgcagtacccaaggaatctaacaagtgaaggcaaaaagagcatggacgagggcagcagtgggagcgaaggatgaaaagggggagaacagaaatgcacgaaagggggggatgaggagaggaagaccggcaagttcaaaaggaaaaggaggcacaaatacggagatacactaaggagacacaaggaaaacacaaatggaacaaacgagaaaagaagaaaaggaaaag

SEQ ID NO: 328157 - DNA, 984 bp, Homo sapiens
  misc_feature (860)..(860): n is a, c, g, or t
aattcgcggccgcgtcgaccgagaagacgacagaagggggcggagagcggctgatcgcagtccggaggtgaggcggaactctgaggcagatatcctccctttcctcctcggctgctgctcttactttgacaagccaggctaacattgaaggtggtccattatggctgacatgcaaaatctggtagaaagattggagagggcagtgggccgcctggaggcagtatctcatacctctgacatgcaccgtgggtatgcagacagtccttcaaaagcaggagcagctccatatgtgcaggcatttgactcgctgcttgctggtcctgtggcagagtacttgaagatcagtaaagagattgggggagacgtgcagaaacatgcggagatggtccacacaggtttgaagttggagcgagctctgttggttacagcttctcagtgtcaacagccagcagaaaataagctttccgatttgttggcacccatctcagagcagatcaaagaagtgataacctttcgggagaagaaccgaggcagcaagttgtttaatcacctgtcagctgtcagcgaaagtatccaggccctgggctgggtggctatggctcccaagcctggcccttatgtgaaagaaatgaatgatgccgccatgttttatacaaaccgagtcctcaaagagtacaaagatgtggataagaagcatgtagactgggtcaaagcttatttaagtatatggacagagctgcaggcttacattaaggagttccataccaccggactggcctggagcaaaacggggcctgtggcaaaagaactgagcggactgccatctggaccctctgccggatcaggtcctcctccccccntcaccgcatacgagcaaagggcccccgttgctcacacacagttttaaccagcttcacggtccagatgagtcttgttcaccgggaaacatgtccggcaattaacaagggagaacatagcgaatgc

SEQ ID NO: 328158 - DNA, 689 bp, Homo sapiens
aattcgcggccgcgtcgaccgagaagacgacagaagggggcggagagcggctgatcgcagtccggaggtgaggcggaactctgaggtggtccattatggctgacatgcaaaatctggtagaaagattggagagggcagtgggccgcctggaggcagtatctcatacctctgacatgcaccgtgggtatgcagacagtccttcaaaagcaggagcagctccatatgtgcaggcatttgactcgctgcttgctggtcctgtggcagagtacttgaagatcagtaaagagattgggggagacgtgcagaaacatgcggagatggtccacacaggtttgaagttggagcgagctctgttggttacagcttctcagtgtcaacagccagcagaaaataagctttccgatttgttggcacccatctcagagcagatcaaagaagtgataacctttcgggagaagaaccgaggcagcaagttgtttaatcacctgtcagctgtcagcgaaagtatccaggccctgggctgggtggctatggctcccaagcctggcccttatgtgaaagaaatgaatgatgccgccatgttttatacaaaccgagtcctcaaagagtacaaagatgtggataagaagcactgttcgcgcagaattatcaggggggagagcattacacatgccctgaacatgtatctg

SEQ ID NO: 328159 - DNA, 524 bp, Homo sapiens
ataatggggatgagccatggcaccttgtcaggctggtgctataaagccatatgtactgttatttacaccccatagacttaatagtctgtccaagatcgctgaacactagaacatagcatggctctgtgggtttgtctcttgctacattgtaccgtgctcctggggttaagtggaagcaagcattgggagaaatgtgtgagatttagccccagctgttctttagctcagatttaaacctgctgtctcttctttatttgcagaatgaattcccagttcctgagcagttcaagaccctatggaacgggcagaagttggtcaccacagtgacagaaattgctggataagcgaagtgccactgggttctttgccctcccttcacaccatgggataaatctgtatcaagacggttcttttctagatttcctctacctttttgctcttaaaactgcttctctgctctgagaagcacagctacctgccttcactgaaatatacctcaggctgaaatttggggtgggatagca

SEQ ID NO: 328160 - DNA, 853 bp, Homo sapiens
tatttgtgcacatacatttgatatgtctttctagacatagaggataaggatttacatatccttatcctcacccacaatatacacacattccatgttgttgttaatggaaccatataatttaatcttggggagaagagaaatgataaaagtacttttccaaaactgcttgcaagagaacatctcaaaggctctggttttggctttgaattttctgttaaggatgtttaacatgacgatagcagctcaaaggtctggtatgaaggacaggaacaaggtagctgttgttcttacagccctgaaacatgtatctgatgacatgaagactcacaagaaccctgccctgaaggctcagagtggtccagtacgcagtggccccaaaccattctctgcacctaaaccccaaaccagcccatcccccaaacgagccacaaagaaggagccagctgtacttgaactggagggcaagaagtggagagtggtgagttaaaaatacctagacaggggcaggtatttttattattttatttttttgagatggagtttcactttgtcgcccaggctggagtgcagtggcgcgatttcggcttaccgcaacctccgcctcccggggaaaaggagtaggaacaggaggttaaatggagcttagctagatgagggcagagttctggcttcaattgcaagaacaaaaagtttgggatagcctggttattttttgttcggtgtgtgctttgtgatgagaatcctgggatctctctctaacagttaaaaacagaagggactgaagatttctggcattgaagaaagctattttatgaacattctgcactgagcaggtaaaaacccaataatgcac

SEQ ID NO: 328161 - DNA, 3108 bp, Homo sapiens
aattcgcggccgcgtcgaccgagaagacgacagaagggggcggagagcggctgatcgcagtccggaggtgaggcggaactctgaggtggtccattatggctgacatgcaaaatctggtagaaagattggagagggcagtgggccgcctggaggcagtatctcatacctctgacatgcaccgtgggtatgcagacagtccttcaaaagcaggagcagctccatatgtgcaggcatttgactcgctgcttgctggtcctgtggcagagtacttgaagatcagtaaagagattgggggagacgtgcagaaacatgcggagatggtccacacaggtttgaagttggagcgagctctgttggttacagcttctcagtgtcaacagccagcagaaaataagctttccgatttgttggcacccatctcagagcagatcaaagaagtgataacctttcgggagaagaaccgaggcagcaagttgtttaatcacctgtcagctgtcagcgaaagtatccaggccctgggctgggtggctatggctcccaagcctggcccttatgtgaaagaaatgaatgatgccgccatgttttatacaaaccgagtcctcaaagagtacaaagatgtggataagaagcatgtagactgggtcaaagcttatttaagtatatggacagagctgcaggcttacattaaggagttccataccaccggactggcctggagcaaaacggggcctgtggcaaaagaactgagcggactgccatctggaccctctgccggatcaggtcctcctccccctccaccaggcccccctcctcccccagtctctaccagttcaggctcagatgagtctgcttcccgctcagcactgttcgcgcagattaatcagggggagagcattacacatgccctgaaacatgtatctgatgacatgaagactcacaagaaccctgccctgaaggctcagagtggtccagtacgcagtggccccaaaccattctctgcacctaaaccccaaaccagcccatcccccaaacgagccacaaagaaggagccagctgtacttgaactggagggcaagaagtggagagtggaaaatcaggaaaatgtttccaacctggtgattgaggacacagagctgaaacaggtggcttacatatacaagtgtgtcaacacgacattgcaaatcaagggcaaaattaactccattacagtagataactgtaagaaacttggcctggtattcgatgacgtggtgggcattgtggagataatcaacagtaaggatgtcaaagttcaggtaatgggtaaagtgccaaccatatccatcaacaaaacagatggctgccatgcttacctgagcaagaattccctggattgtgaaatagtcagtgccaaatcttccgagatgaatgtcctcattcctacagaaggcggtgactttaatgaattcccagttcctgagcagttcaagaccctatggaacgggcagaagttggtcaccacagtgacagaaattgctggataagcgaagtgccactgggttctttgccctcccttcacaccatgggataaatctgtatcaagacggttcttttctagatttcctctacctttttgctcttaaaactgcttctctgctctgagaagcacagctacctgccttcactgaaatatacctcaggctgaaatttggggtgggatagcaggtcagttgatcttctgcaggaaggtgcagcttttccatatcagctcaaccacgccgccagtccattcttaaggaactgccgactaggactgatgatgcattttagctttgagcttttgggggttattctaccaacaaacagtccattggaaagaaaacagtccctggaattaacagatcagaatgttcacactggttaatctttttttaacaatgagcatgaaggtagcagaagctggtgtgtttccagatggttcttctaaccaaactaatttttcactgttgacaagcgaggcaagggttgcactggaccaaaggctgaggcttggccatctagcattccatacaaaattgtttcctataagcattccttttattctctattctatcctgggtctgcctcaaccgtgagataggagagtctctggtactagctgctgtagcagtgcccttcatccagggcagttaatggagtcttggaccctttctttctctgggatccctgcccagcaccttcctatagagatgactttaaaaggaaaaaaaaaaaaaaaacaaacccacatgatttcaaggagtctggcattcctgaatccttcttccctgccaggtgcctgtcacctgtcttcactgcctccttttccctgtcatgctcatcagcttatggcttctgtctaagcacctgaacagaggactgaaacctccactgcaggctggttttaggtcttgaattatgtaagaatcttgcacagcactgctaatgtaaatttcagttgtttttccctctaggacaaacacttaccaaaatatgcaacttttttttggtgggaagagagattgtcctgtgatttctacccatttcctgaggcctgtggaaataaacctttatgtacttaaagttatacagaaaatagaataaagttaataccaaacttgaaaaaaaaaaaaaaaaaaaaaaaaaaaaaccttgtgggcgccgcgcccgggccccggaaagcttttaaacccatccggtggggcgcgcggggccccaatagggaactggagaacacatgtggcgcacacctggtgtcccctaaggagaaactccggggccatgctagacatacgggccgggagttctccccccatataaaaaaaaaccgcccgggggttacccccgagcgtgtttcggggaacaacttccccagaatgggcgctctccaggagcggggcccataaccggggggtctttatcacaacgaggggtctcccaaggcggcgcttccgatattccaacatttacccgccccgctcctcgttagctccatcagcgcgctctctcctgtgcctctctcatcatcctctctctctcgtctaccctcagtcctccttacttgcggcatagtcccctcagcgttgcccg

SEQ ID NO: 328162 - DNA, 2581 bp, Homo sapiens
aattcgcggccgcgtcgaccgagaagacgacagaagggggcggagagcggctgatcgcagtccggaggtgaggcggaactctgaggtggtccattatggctgacatgcaaaatctggtagaaagattggagagggcagtgggccgcctggaggcagtatctcatacctctgacatgcaccgtgggtatgcagacagtccttcaaaagcaggagcagctccatatgtgcaggcatttgactcgctgcttgctggtcctgtggcagagtacttgaagatcagtaaagagattgggggagacgtgcagaaacatgcggagatggtccacacaggtttgaagttggagcgagctctgttggttacagcttctcagtgtcaacagccagcagaaaataagctttccgatttgttggcacccatctcagagcagatcaaagaagtgataacctttcgggagaagaaccgaggcagcaagttgtttaatcacctgtcagctgtcagcgaaagtatccaggccctgggctgggtggctatggctcccaagcctggcccttatgtgaaagaaatgaatgatgccgccatgttttatacaaaccgagtcctcaaagagtacaaagatgtggataagaagcatgtagactgggtcaaagcttatttaagtatatggacagagctgcaggcttacattaaggagttccataccaccggactggcctggagcaaaacggggcctgtggcaaaagaactgagcggactgccatctggaccctctgccggatcaggtcctcctccccctccaccaggcccccctcctcccccagtctctaccagttcaggctcagatgagtctgcttcccgctcagcactgttcgcgcagattaatcagggggagagcattacacatgccctgaaacatgtatctgatgacatgaagactcacaagaaccctgccctgaaggctcagagtggtccagtacgcagtggccccaaaccattctctgcacctaaaccccaaaccagcccatcccccaaacgagccacaaagaaggagccagctgtacttgaactggagggcaagaagtggagagtggaaaatcaggaaaatgtttccaacctggtgattgaggacacagagctgaaacaggtggcttacatatacaagtgtgtcaacacgacattgcaaatcaagggcaaaattaactccattacagtagataactgtaagaaacttggcctggtattcgatgacgtggtgggcattgtggagataatcaacagtaaggatgtcaaagttcaggtaatgggtaaagtgccaaccatatccatcaacaaaacagatggctgccatgcttacctgagcaagaattccctggattgtgaaatagtcagtgccaaatcttccgagatgaatgtcctcattcctacagaaggcggtgactttaatgaattcccagttcctgagcagttcaagaccctatggaacgggcagaagttggtcaccacagtgacagaaattgctggataagcgaagtgccactgggttctttgccctcccttcacaccatgggataaatctgtatcaagacggttcttttctagatttcctctacctttttgctcttaaaactgcttctctgctctgagaagcacagctacctgccttcactgaaatatacctcaggctgaaatttggggtgggatagcaggtcagttgatcttctgcaggaaggtgcagcttttccatatcagctcaaccacgccgccagtccattcttaaggaactgccgactaggactgatgatgcattttagctttgagcttttgggggttattctaccaacaaacagtccattggaaagaaaacagtccctggaattaacagatcagaatgttcacactggttaatctttttttaacaatgagcatgaaggtagcagaagctggtgtgtttccagatggttcttctaaccaaactaatttttcactgttgacaagcgaggcaagggttgcactggaccaaaggctgaggcttggccatctagcattccatacaaaattgtttcctataagcattccttttattctctattctatcctgggtctgcctcaaccgtgagataggagagtctctggtactagctgctgtagcagtgcccttcatccagggcagttaatggagtcttggaccctttctttctctgggatccctgcccagcaccttcctatagagatgactttaaaaggaaaaaaaaaaaaaaaacaaacccacatgatttcaaggagtctggcattcctgaatccttcttccctgccaggtgcctgtcacctgtcttcactgcctccttttccctgtcatgctggagggagttcgtcaaagcacgagctcagaggatgtgaaagttagattgcagggtgatgcaggtattgtattatgaaagaattaggcaaagcagggataagagtacagtctcacggagctcttgcctgtaggacggaaaggtatacaaaatataaacaggttataggtggaagagaggtgtattgagattactactatagtacatagtgctcggggaaagtagc

SEQ ID NO: 328163 - DNA, 2621 bp, Homo sapiens
aattcgcggccgcgtcgaccgagaagacgacagaagggggcggagagcggctgatcgcagtccggaggtggtccattatggctgacatgcaaaatctggtagaaagattggagagggcagtgggccgcctggaggcagtatctcatacctctgacatgcaccgtgggtatgcagacagtccttcaaaagcaggagcagctccatatgtgcaggcatttgactcgctgcttgctggtcctgtggcagagtacttgaagatcagtaaagagattgggggagacgtgcagaaacatgcggagatggtccacacaggtttgaagttggagcgagctctgttggttacagcttctcagtgtcaacagccagcagaaaataagctttccgatttgttggcacccatctcagagcagatcaaagaagtgataacctttcgggagaagaaccgaggcagcaagttgtttaatcacctgtcagctgtcagcgaaagtatccaggccctgggctgggtggctatggctcccaagcctggcccttatgtgaaagaaatgaatgatgccgccatgttttatacaaaccgagtcctcaaagagtacaaagatgtggataagaagcatgtagactgggtcaaagcttatttaagtatatggacagagctgcaggcttacattaaggagttccataccaccggactggcctggagcaaaacggggcctgtggcaaaagaactgagcggactgccatctggaccctctgccggatcaggtcctcctccccctccaccaggcccccctcctcccccagtctctaccagttcaggctcagatgagtctgcttcccgctcagcactgttcgcgcagattaatcagggggagagcattacacatgccctgaaacatgtatctgatgacatgaagactcacaagaaccctgccctgaaggctcagagtggtccagtacgcagtggccccaaaccattctctgcacctaaaccccaaaccagcccatcccccaaacgagccacaaagaaggagccagctgtacttgaactggagggcaagaagtggagagtggaaaatcaggaaaatgtttccaacctggtgattgaggacacagagctgaaacaggtggcttacatatacaagtgtgtcaacacgacattgcaaatcaagggcaaaattaactccattacagtagataactgtaagaaacttggcctggtattcgatgacgtggtgggcattgtggagataatcaacagtaaggatgtcaaagttcaggtaatgggtaaagtgccaaccatatccatcaacaaaacagatggctgccatgcttacctgagcaagaattccctggattgtgaaatagtcagtgccaaatcttccgagatgaatgtcctcattcctacagaaggcggtgactttaatgaattcccagttcctgagcagttcaagaccctatggaacgggcagaagttggtcaccacagtgacagaaattgctggataagcgaagtgccactgggttctttgccctcccttcacaccatgggataaatctgtatcaagacggttcttttctagatttcctctacctttttgctcttaaaactgcttctctgctctgagaagcacagctacctgccttcactgaaatatacctcaggctgaaatttggggtgggatagcaggtcagttgatcttctgcaggaaggtgcagcttttccatatcagctcaaccacgccgccagtccattcttaaggaactgccgactaggactgatgatgcattttagctttgagcttttgggggttattctaccaacaaacagtccattggaaagaaaacagtccctggaattaacagatcagaatgttcacactggttaatctttttttaacaatgagcatgaaggtagcagaagctggtgtgtttccagatggttcttctaaccaaactaatttttcactgttgacaagcgaggcaagggttgcactggaccaaaggctgaggcttggccatctagcattccatacaaaattgtttcctataagcattccttttattctctattctatcctgggtctgcctcaaccgtgagataggagagtctctggtactagctgctgtagcagtgcccttcatccagggcagttaatggagtcttggaccctttctttctctgggatccctgcccagcaccttcctatagagatgactttaaaaggaaaaaaaaaaaaaaaacaaacccacatgatttcaaggagtctggcattcctgaatccttcttccctgccaggtgcctgtcacctgtcttcactgcctccttttccctgtcatgctcatcagcttatggcttctgtctaagcacctgaacagaggactgaaacctccactgcaggctggttttaggtcttgaattatgtaagaatcttgcacagcactgctaatgtaaatttcagttgtttttccctctaggacaaacacttaccaaaatatgcaacttttttttggtgggaagagagattgtcctgtgatttctacccatttcctgaggcctgtggaaataaacctttatgtacttaaagttatacagaaaatagaataaagttaataccaaacttg

SEQ ID NO: 328164 - DNA, 2616 bp, Homo sapiens
  misc_feature (5)..(5): n is a, c, g, or t
  misc_feature (8)..(8): n is a, c, g, or t
  misc_feature (22)..(22): n is a, c, g, or t
tggcnagnacgaggccggtgtnaatcggcaccgaggggagagcggctgatcgcagtccggaggtggtccattatggctgacatgcaaaatctggtagaaagattggagagggcagtgggccgcctggaggcagtatctcatacctctgacatgcaccgtgggtatgcagacagtccttcaaaagcaggagcagctccatatgtgcaggcatttgactcgctgcttgctggtcctgtggcagagtacttgaagatcagtaaagagattgggggagacgtgcagaaacatgcggagatggtccacacaggtttgaagttggagcgagctctgttggttacagcttctcagtgtcaacagccagcagaaaataagctttccgatttgttggcacccatctcagagcagatcaaagaagtgataacctttcgggagaagaaccgaggcagcaagttgtttaatcacctgtcagctgtcagcgaaagtatccaggccctgggctgggtggctatggctcccaagcctggcccttatgtgaaagaaatgaatgatgccgccatgttttatacaaaccgagtcctcaaagagtacaaagatgtggataagaagcatgtagactgggtcaaagcttatttaagtatatggacagagctgcaggcttacattaaggagttccataccaccggactggcctggagcaaaacggggcctgtggcaaaagaactgagcggactgccatctggaccctctgccggatcaggtcctcctccccctccaccaggcccccctcctcccccagtctctaccagttcaggctcagatgagtctgcttcccgctcagcactgttcgcgcagattaatcagggggagagcattacacatgccctgaaacatgtatctgatgacatgaagactcacaagaaccctgccctgaaggctcagagtggtccagtacgcagtggccccaaaccattctctgcacctaaaccccaaaccagcccatcccccaaacgagccacaaagaaggagccagctgtacttgaactggagggcaagaagtggagagtggaaaatcaggaaaatgtttccaacctggtgattgaggacacagagctgaaacaggtggcttacatatacaagtgtgtcaacacgacattgcaaatcaagggcaaaattaactccattacagtagataactgtaagaaacttggcctggtattcgatgacgtggtgggcattgtggagataatcaacagtaaggatgtcaaagttcaggtaatgggtaaagtgccaaccatatccatcaacaaaacagatggctgccatgcttacctgagcaagaattccctggattgtgaaatagtcagtgccaaatcttccgagatgaatgtcctcattcctacagaaggcggtgactttaatgaattcccagttcctgagcagttcaagaccctatggaacgggcagaagttggtcaccacagtgacagaaattgctggataagcgaagtgccactgggttctttgccctcccttcacaccatgggataaatctgtatcaagacggttcttttctagatttcctctacctttttgctcttaaaactgcttctctgctctgagaagcacagctacctgccttcactgaaatatacctcaggctgaaatttggggtgggatagcaggtcagttgatcttctgcaggaaggtgcagcttttccatatcagctcaaccacgccgccagtccattcttaaggaactgccgactaggactgatgatgcattttagctttgagcttttgggggttattctaccaacaaacagtccattggaaagaaaacagtccctggaattaacagatcagaatgttcacactggttaatctttttttaacaatgagcatgaaggtagcagaagctggtgtgtttccagatggttcttctaaccaaactaatttttcactgttgacaagcgaggcaagggttgcactggaccaaaggctgaggcttggccatctagcattccatacaaaattgtttcctataagcattccttttattctctattctatcctgggtctgcctcaaccgtgagataggagagtctctggtactagctgctgtagcagtgcccttcatccagggcagttaatggagtcttggaccctttctttctctgggatccctgcccagcaccttcctatagagatgactttaaaaggaaaaaaaaaaaaaaaacaaacccacatgatttcaaggagtctggcattcctgaatccttcttccctgccaggtgcctgtcacctgtcttcactgcctccttttccctgtcatgctcatcagcttatggcttctgtctaagcacctgaacagaggactgaaacctccactgcaggctggttttaggtcttgaattatgtaagaatcttgcacagcactgctaatgtaaatttcagttgtttttccctctaggacaaacacttaccaaaatatgcaacttttttttggtgggaagagagattgtcctgtgatttctacccatttcctgaggcctgtggaaataaacctttatgtacttaaagttatacagaaaatagaataaagttaataccaaacttg

SEQ ID NO: 328165 - DNA, 2555 bp, Homo sapiens
  misc_feature (5)..(5): n is a, c, g, or t
  misc_feature (8)..(8): n is a, c, g, or t
  misc_feature (22)..(22): n is a, c, g, or t
tggcnagnacgaggccggtgtnaatcggcaccgaggaaagattggagagggcagtgggccgcctggaggcagtatctcatacctctgacatgcaccgtgggtatgcagacagtccttcaaaagcaggagcagctccatatgtgcaggcatttgactcgctgcttgctggtcctgtggcagagtacttgaagatcagtaaagagattgggggagacgtgcagaaacatgcggagatggtccacacaggtttgaagttggagcgagctctgttggttacagcttctcagtgtcaacagccagcagaaaataagctttccgatttgttggcacccatctcagagcagatcaaagaagtgataacctttcgggagaagaaccgaggcagcaagttgtttaatcacctgtcagctgtcagcgaaagtatccaggccctgggctgggtggctatggctcccaagcctggcccttatgtgaaagaaatgaatgatgccgccatgttttatacaaaccgagtcctcaaagagtacaaagatgtggataagaagcatgtagactgggtcaaagcttatttaagtatatggacagagctgcaggcttacattaaggagttccataccaccggactggcctggagcaaaacggggcctgtggcaaaagaactgagcggactgccatctggaccctctgccggatcaggtcctcctccccctccaccaggcccccctcctcccccagtctctaccagttcaggctcagatgagtctgcttcccgctcagcactgttcgcgcagattaatcagggggagagcattacacatgccctgaaacatgtatctgatgacatgaagactcacaagaaccctgccctgaaggctcagagtggtccagtacgcagtggccccaaaccattctctgcacctaaaccccaaaccagcccatcccccaaacgagccacaaagaaggagccagctgtacttgaactggagggcaagaagtggagagtggaaaatcaggaaaatgtttccaacctggtgattgaggacacagagctgaaacaggtggcttacatatacaagtgtgtcaacacgacattgcaaatcaagggcaaaattaactccattacagtagataactgtaagaaacttggcctggtattcgatgacgtggtgggcattgtggagataatcaacagtaaggatgtcaaagttcaggtaatgggtaaagtgccaaccatatccatcaacaaaacagatggctgccatgcttacctgagcaagaattccctggattgtgaaatagtcagtgccaaatcttccgagatgaatgtcctcattcctacagaaggcggtgactttaatgaattcccagttcctgagcagttcaagaccctatggaacgggcagaagttggtcaccacagtgacagaaattgctggataagcgaagtgccactgggttctttgccctcccttcacaccatgggataaatctgtatcaagacggttcttttctagatttcctctacctttttgctcttaaaactgcttctctgctctgagaagcacagctacctgccttcactgaaatatacctcaggctgaaatttggggtgggatagcaggtcagttgatcttctgcaggaaggtgcagcttttccatatcagctcaaccacgccgccagtccattcttaaggaactgccgactaggactgatgatgcattttagctttgagcttttgggggttattctaccaacaaacagtccattggaaagaaaacagtccctggaattaacagatcagaatgttcacactggttaatctttttttaacaatgagcatgaaggtagcagaagctggtgtgtttccagatggttcttctaaccaaactaatttttcactgttgacaagcgaggcaagggttgcactggaccaaaggctgaggcttggccatctagcattccatacaaaattgtttcctataagcattccttttattctctattctatcctgggtctgcctcaaccgtgagataggagagtctctggtactagctgctgtagcagtgcccttcatccagggcagttaatggagtcttggaccctttctttctctgggatccctgcccagcaccttcctatagagatgactttaaaaggaaaaaaaaaaaaaaaacaaacccacatgatttcaaggagtctggcattcctgaatccttcttccctgccaggtgcctgtcacctgtcttcactgcctccttttccctgtcatgctcatcagcttatggcttctgtctaagcacctgaacagaggactgaaacctccactgcaggctggttttaggtcttgaattatgtaagaatcttgcacagcactgctaatgtaaatttcagttgtttttccctctaggacaaacacttaccaaaatatgcaacttttttttggtgggaagagagattgtcctgtgatttctacccatttcctgaggcctgtggaaataaacctttatgtacttaaagttatacagaaaatagaataaagttaataccaaacttg

SEQ ID NO: 328166 - DNA, 2603 bp, Homo sapiens
aattcgcggccgcgtcgaccgagaagacgacagaagggggcggagagcggctgatcgcagtccggaggtgaggcggaactctgaggtggtccattatggctgacatgcaaaatctggtagaaagattggagagggcagtgggccgcctggaggcagtatctcatacctctgacatgcaccgtgggtatgcagacagtccttcaaaagcaggagcagctccatatgtgcaggcatttgactcgctgcttgctggtcctgtggcagagtacttgaagatcagtaaagagattgggggagacgtgcagaaacatgcggagatggtccacacaggtttgaagttggagcgagctctgttggttacagcttctcagtgtcaacagccagcagaacagatcaaagaagtgataacctttcgggagaagaaccgaggcagcaagttgtttaatcacctgtcagctgtcagcgaaagtatccaggccctgggctgggtggctatggctcccaagcctggcccttatgtgaaagaaatgaatgatgccgccatgttttatacaaaccgagtcctcaaagagtacaaagatgtggataagaagcatgtagactgggtcaaagcttatttaagtatatggacagagctgcaggcttacattaaggagttccataccaccggactggcctggagcaaaacggggcctgtggcaaaagaactgagcggactgccatctggaccctctgccggatcaggtcctcctccccctccaccaggcccccctcctcccccagtctctaccagttcaggctcagatgagtctgcttcccgctcagcactgttcgcgcagattaatcagggggagagcattacacatgccctgaaacatgtatctgatgacatgaagactcacaagaaccctgccctgaaggctcagagtggtccagtacgcagtggccccaaaccattctctgcacctaaaccccaaaccagcccatcccccaaacgagccacaaagaaggagccagctgtacttgaactggagggcaagaagtggagagtggaaaatcaggaaaatgtttccaacctggtgattgaggacacagagctgaaacaggtggcttacatatacaagtgtgtcaacacgacattgcaaatcaagggcaaaattaactccattacagtagataactgtaagaaacttggcctggtattcgatgacgtggtgggcattgtggagataatcaacagtaaggatgtcaaagttcaggtaatgggtaaagtgccaaccatatccatcaacaaaacagatggctgccatgcttacctgagcaagaattccctggattgtgaaatagtcagtgccaaatcttccgagatgaatgtcctcattcctacagaaggcggtgactttaatgaattcccagttcctgagcagttcaagaccctatggaacgggcagaagttggtcaccacagtgacagaaattgctggataagcgaagtgccactgggttctttgccctcccttcacaccatgggataaatctgtatcaagacggttcttttctagatttcctctacctttttgctcttaaaactgcttctctgctctgagaagcacagctacctgccttcactgaaatatacctcaggctgaaatttggggtgggatagcaggtcagttgatcttctgcaggaaggtgcagcttttccatatcagctcaaccacgccgccagtccattcttaaggaactgccgactaggactgatgatgcattttagctttgagcttttgggggttattctaccaacaaacagtccattggaaagaaaacagtccctggaattaacagatcagaatgttcacactggttaatctttttttaacaatgagcatgaaggtagcagaagctggtgtgtttccagatggttcttctaaccaaactaatttttcactgttgacaagcgaggcaagggttgcactggaccaaaggctgaggcttggccatctagcattccatacaaaattgtttcctataagcattccttttattctctattctatcctgggtctgcctcaaccgtgagataggagagtctctggtactagctgctgtagcagtgcccttcatccagggcagttaatggagtcttggaccctttctttctctgggatccctgcccagcaccttcctatagagatgactttaaaaggaaaaaaaaaaaaaaaacaaacccacatgatttcaaggagtctggcattcctgaatccttcttccctgccaggtgcctgtcacctgtcttcactgcctccttttccctgtcatgctcatcagcttatggcttctgtctaagcacctgaacagaggactgaaacctccactgcaggctggttttaggtcttgaattatgtaagaatcttgcacagcactgctaatgtaaatttcagttgtttttccctctaggacaaacacttaccaaaatatgcaacttttttttggtgggaagagagattgtcctgtgatttctacccatttcctgaggcctgtggaaataaacctttatgtacttaaagttatacagaaaatagaataaagttaataccaaacttg

SEQ ID NO: 328167 - DNA, 2121 bp, Homo sapiens
aattcgcggccgcgtcgaccgagaagacgacagaagggggcggagagcggctgatcgcagtccggaggtgaggcggaactctgaggtggtccattatggctgacatgcaaaatctggtagaaagattggagagggcagtgggccgcctggaggcagtatctcatacctctgacatgcaccgtgggtatgcagacagtccttcaaaaggggcctgtggcaaaagaactgagcggactgccatctggaccctctgccggatcaggtcctcctccccctccaccaggcccccctcctcccccagtctctaccagttcaggctcagatgagtctgcttcccgctcagcactgttcgcgcagattaatcagggggagagcattacacatgccctgaaacatgtatctgatgacatgaagactcacaagaaccctgccctgaaggctcagagtggtccagtacgcagtggccccaaaccattctctgcacctaaaccccaaaccagcccatcccccaaacgagccacaaagaaggagccagctgtacttgaactggagggcaagaagtggagagtggaaaatcaggaaaatgtttccaacctggtgattgaggacacagagctgaaacaggtggcttacatatacaagtgtgtcaacacgacattgcaaatcaagggcaaaattaactccattacagtagataactgtaagaaacttggcctggtattcgatgacgtggtgggcattgtggagataatcaacagtaaggatgtcaaagttcaggtaatgggtaaagtgccaaccatatccatcaacaaaacagatggctgccatgcttacctgagcaagaattccctggattgtgaaatagtcagtgccaaatcttccgagatgaatgtcctcattcctacagaaggcggtgactttaatgaattcccagttcctgagcagttcaagaccctatggaacgggcagaagttggtcaccacagtgacagaaattgctggataagcgaagtgccactgggttctttgccctcccttcacaccatgggataaatctgtatcaagacggttcttttctagatttcctctacctttttgctcttaaaactgcttctctgctctgagaagcacagctacctgccttcactgaaatatacctcaggctgaaatttggggtgggatagcaggtcagttgatcttctgcaggaaggtgcagcttttccatatcagctcaaccacgccgccagtccattcttaaggaactgccgactaggactgatgatgcattttagctttgagcttttgggggttattctaccaacaaacagtccattggaaagaaaacagtccctggaattaacagatcagaatgttcacactggttaatctttttttaacaatgagcatgaaggtagcagaagctggtgtgtttccagatggttcttctaaccaaactaatttttcactgttgacaagcgaggcaagggttgcactggaccaaaggctgaggcttggccatctagcattccatacaaaattgtttcctataagcattccttttattctctattctatcctgggtctgcctcaaccgtgagataggagagtctctggtactagctgctgtagcagtgcccttcatccagggcagttaatggagtcttggaccctttctttctctgggatccctgcccagcaccttcctatagagatgactttaaaaggaaaaaaaaaaaaaaaacaaacccacatgatttcaaggagtctggcattcctgaatccttcttccctgccaggtgcctgtcacctgtcttcactgcctccttttccctgtcatgctcatcagcttatggcttctgtctaagcacctgaacagaggactgaaacctccactgcaggctggttttaggtcttgaattatgtaagaatcttgcacagcactgctaatgtaaatttcagttgtttttccctctaggacaaacacttaccaaaatatgcaacttttttttggtgggaagagagattgtcctgtgatttctacccatttcctgaggcctgtggaaataaacctttatgtacttaaagttatacagaaaatagaataaagttaataccaaacttg

SEQ ID NO: 328168 - DNA, 2593 bp, Homo sapiens
aattcgcggccgcgtcgaccgagaagacgacagaagggggcggagagcggctgatcgcagtccggaggtgaggcggaactctgaggtggtccattatggctgacatgcaaaatctggtagaaagattggagagggcagtgggccgcctggaggcagtatctcatacctctgacatgcaccgtgggtatgcagacagtccttcaaaagcaggagcagctccatatgtgcaggcatttgactcgctgcttgctggtcctgtggcagagtacttgaagatcagtaaagagattgggggagacgtgcagaaacatgcggagatggtccacacaggtttgaagttggagcgagctctgttggttacagcttctcagtgtcaacagccagcagaaaataagctttccgatttgttggcacccatctcagagcagatcaaagaagtgataacctttcgggagaagaaccgaggcagcaagttgtttaatcacctgtcagctgtcagcgaaagtatccaggccctgggctgggtggctatggctcccaagcctggcccttatgtgaaagaaatgaatgatgccgccatgttttatacaaaccgagtcctcaaagagtacaaagatgtggataagaagcatgtagactgggtcaaagcttatttaagtatatggacagagctgcaggcttacattaaggagttccataccaccggactggcctggagcaaaacggggcctgtggcaaaagaactgagcggactgccatctggaccctctgccggatcaggtcctcctccccctccaccaggcccccctcctcccccagtctctaccagttcaggctcagatgagtctgcttcccgctcagcactgttcgcgcagattaatcagggggagagcattacacatgccctgaaacatgtatctgatgacatgaagactcacaagaaccctgccctgaaggctcagagtggtccagtacgcagtggccccaaaccattctctgcacctaaaccccaaaccagcccatcccccaaacgagccacaaagaaggagccagctgtacttgaactggagggcaagaagtggagagtggaaaatcaggaaaatgtttccaacctggtgattgaggacacagagctgaaacaggtggcttacatatacaagtgtgtcaacacgacattgcaaatcaagggcaaaattaactccattacagtagataactgtaagaaacttggcctggtattcgatgacgtggtgggcattgtggagataatcaacagtaaggatgtcaaagttcaggtaatgggtaaagtgccaaccatatccatcaacaaaacagatggctgccatgcttacctgagcaagaattccctggattgtgaaatagtcagtgccaaatcttccgagatgaatgtcctcattcctacagaaggcggtgactttaatgaattcccagttcctgagcagttcaagaccctatggaacgggcagaagttggtcaccacagtgacagaaattgctggataagcgaagtgccactgggttctttgccctcccttcacaccatgggataaatctgtatcaagacggttcttttctagatttcctctacctttttgctcttaaaactgcttctctgctctgagaagcacagctacctgccttcactgaaatatacctcaggctgaaatttggggtgggatagcaggtcagttgatcttctgcaggaaggtgcagcttttccatatcagctcaaccacgccgccagtccattcttaaggaactgccgactaggactgatgatgcattttagctttgagcttttgggggttattctaccaacaaacagtccattggaaagaaaacagtccctggaattaacagatcagaatgttcacactggttaatctttttttaacaatgagcatgaaggtagcagaagctggtgtgtttccagatggttcttctaaccaaactaatttttcactgttgacaagcgaggcaagggttgcactggaccaaaggctgaggcttggccatctagcattccatacaaaattgctcaaccgtgagataggagagtctctggtactagctgctgtagcagtgcccttcatccagggcagttaatggagtcttggaccctttctttctctgggatccctgcccagcaccttcctatagagatgactttaaaaggaaaaaaaaaaaaaaaacaaacccacatgatttcaaggagtctggcattcctgaatccttcttccctgccaggtgcctgtcacctgtcttcactgcctccttttccctgtcatgctcatcagcttatggcttctgtctaagcacctgaacagaggactgaaacctccactgcaggctggttttaggtcttgaattatgtaagaatcttgcacagcactgctaatgtaaatttcagttgtttttccctctaggacaaacacttaccaaaatatgcaacttttttttggtgggaagagagattgtcctgtgatttctacccatttcctgaggcctgtggaaataaacctttatgtacttaaagttatacagaaaatagaataaagttaataccaaacttg

SEQ ID NO: 328169 - DNA, 2432 bp, Homo sapiens
aattcgcggccgcgtcgaccgagaagacgacagaagggggcggagagcggctgatcgcagtccggaggcagatatcctccctttcctcctcggctgctgctcttactttgacaagccaggctaacattgaaggtggtccattatggctgacatgcaaaatctggtagaaagattggagagggcagtgggccgcctggaggcagtatctcatacctctgacatgcaccgtgggtatgcagacagtccttcaaaagcaggagcagctccatatgtgcaggcatttgactcgctgcttgctggtcctgtggcagagtacttgaagatcagtaaagagattgggggagacgtgcagaaacatgcggagatggtccacacaggtttgaagttggagcgagctctgttggttacagcttctcagtgtcaacagccagcagaaaataagctttccgatttgttggcacccatctcagagcagatcaaagaagtgataacctttcgggagaagaaccgaggcagcaagttgtttaatcacctgtcagctgtcagcgaaagtatccaggccctgggctgggtggctatggctcccaagcctggcccttatgtgaaagaaatgaatgatgccgccatgttttatacaaaccgagtcccgctcagcactgttcgcgcagattaatcagggggagagcattacacatgccctgaaacatgtatctgatgacatgaagactcacaagaaccctgccctgaaggctcagagtggtccagtacgcagtggccccaaaccattctctgcacctaaaccccaaaccagcccatcccccaaacgagccacaaagaaggagccagctgtacttgaactggagggcaagaagtggagagtggaaaatcaggaaaatgtttccaacctggtgattgaggacacagagctgaaacaggtggcttacatatacaagtgtgtcaacacgacattgcaaatcaagggcaaaattaactccattacagtagataactgtaagaaacttggcctggtattcgatgacgtggtgggcattgtggagataatcaacagtaaggatgtcaaagttcaggtaatgggtaaagtgccaaccatatccatcaacaaaacagatggctgccatgcttacctgagcaagaattccctggattgtgaaatagtcagtgccaaatcttccgagatgaatgtcctcattcctacagaaggcggtgactttaatgaattcccagttcctgagcagttcaagaccctatggaacgggcagaagttggtcaccacagtgacagaaattgctggataagcgaagtgccactgggttctttgccctcccttcacaccatgggataaatctgtatcaagacggttcttttctagatttcctctacctttttgctcttaaaactgcttctctgctctgagaagcacagctacctgccttcactgaaatatacctcaggctgaaatttggggtgggatagcaggtcagttgatcttctgcaggaaggtgcagcttttccatatcagctcaaccacgccgccagtccattcttaaggaactgccgactaggactgatgatgcattttagctttgagcttttgggggttattctaccaacaaacagtccattggaaagaaaacagtccctggaattaacagatcagaatgttcacactggttaatctttttttaacaatgagcatgaaggtagcagaagctggtgtgtttccagatggttcttctaaccaaactaatttttcactgttgacaagcgaggcaagggttgcactggaccaaaggctgaggcttggccatctagcattccatacaaaattgtttcctataagcattccttttattctctattctatcctgggtctgcctcaaccgtgagataggagagtctctggtactagctgctgtagcagtgcccttcatccagggcagttaatggagtcttggaccctttctttctctgggatccctgcccagcaccttcctatagagatgactttaaaaggaaaaaaaaaaaaaaaacaaacccacatgatttcaaggagtctggcattcctgaatccttcttccctgccaggtgcctgtcacctgtcttcactgcctccttttccctgtcatgctcatcagcttatggcttctgtctaagcacctgaacagaggactgaaacctccactgcaggctggttttaggtcttgaattatgtaagaatcttgcacagcactgctaatgtaaatttcagttgtttttccctctaggacaaacacttaccaaaatatgcaacttttttttggtgggaagagagattgtcctgtgatttctacccatttcctgaggcctgtggaaataaacctttatgtacttaaagttatacagaaaatagaataaagttaataccaaacttg

SEQ ID NO: 328170 - DNA, 1462 bp, Homo sapiens
aattcgcggccgcgtcgaccgagaagacgacagaagggggcggagagcggctgatcgcagtccggaggtgaggcggaactctgaggtggtccattatggctgacatgcaaaatctggtagaaagattggagagggcagtgggccgcctggaggcagtatctcatacctctgacatgcaccgtgggtatgcagacagtccttcaaaagcaggagcagctccatatgtgcaggcatttgactcgctgcttgctggtcctgtggcagagtacttgaagatcagtaaagagattgggggagacgtgcagaaacatgcggagatggtccacacaggtttgaagttggagcgagctctgttggttacagcttctcagtgtcaacagccagcagaaaataagctttccgatttgttggcacccatctcagagcagatcaaagaagtgataacctttcgggagaagaaccgaggcagcaagttgtttaatcacctgtcagctgtcagcgaaagtatccaggccctgggctgggtggctatggctcccaagcctggcccttatgtgaaagaaatgaatgatgccgccatgttttatacaaaccgagtcctcaaagagtacaaagatgtggataagaagcatgtagactgggtcaaagcttatttaagtatatggacagagctgcaggcttacattaaggagttccataccaccggactggcctggagcaaaacggggcctgtggcaaaagaactgagcggactgccatctggaccctctgccggatcaggtcctcctccccctccaccaggcccccctcctcccccagtctctaccagttcaggctcagatgagtctgcttcccgctcagcactgttcgcgcagattaatcagggggagagcattacacatgccctgaaacatgtatctgatgacatgaagactcacaagaaccctgccctgaaggctcagagtggtccagtacgcagtggccccaaaccattctctgcacctaaaccccaaaccagcccatcccccaaacgagccacaaagaaggagccagctgtacttgaactggagggcaagaagtggagagtggaaaatcaggaaaatgtttccaacctggtgattgaggacacagagctgaaacaggtggcttacatatacaagtgtgtcaacacgacattgcaaatcaagggcaaaattaactccattacagtagataactgtaagaaacttggcctggtattcgatgacgtggtgggcattgtggagataatcaacagtaaggatgtcaaagttcaggtaatgggtaaagtgccaaccatatccatcaacaaaacagatggctgccatgcttacctgagcaagaattccctggattgtgaaatagtcagtgccaaatcttccgagatgaatgtcctcattcctacagaaggcggtgactttgcagcgctacggtaccggctcgg

SEQ ID NO: 328171 - DNA, 1323 bp, Homo sapiens
aattcgcggccgcgtcgaccgagaagacgacagaagggggcggagagcggctgatcgcagtccggaggtgaggcggaactctgaggtggtccattatggctgacatgcaaaatctggtagaaagattggagagggcagtgggccgcctggaggcagtatctcatacctctgacatgcaccgtgggtatgcagacagtccttcaaaagcaggagcagctccatatgtgcaggcatttgactcgctgcttgctggtcctgtggcagagtacttgaagatcagtaaagagattgggggagacgtgcagaaacatgcggagatggtccacacaggtttgaagttggagcgagctctgttggttacagcttctcagtgtcaacagccagcagaaaataagctttccgatttgttggcacccatctcagagcagatcaaagaagtgataacctttcgggagaagaaccgaggcagcaagttgtttaatcacctgtcagctgtcagcgaaagtatccaggccctgggctgggtggctatggctcccaagcctggcccttatgtgaaagaaatgaatgatgccgccatgttttatacaaaccgagtcctcaaagagtacaaagatgtggataagaagcatgtagactgggtcaaagcttatttaagtatatggacagagctgcaggcttacattaaggagttccataccaccggactggcctggagcaaaacggggcctgtggcaaaagaactgagcggactgccatctggaccctctgccggatcaggtcctcctccccctccaccaggcccccctcctcccccagtctctaccagttcaggctcagatgagtctgcttcccgctcagcactgttcgcgcagattaatcagggggagagcattacacatgccctgaaacatgtatctgatgacatgaagactcacaagaaccctgccctgaaggctcagagtggtccagtacgcagtggccccaaaccattctctgcacctaaaccccaaaccagcccatcccccaaacgagccacaaagaaggagccagctgtacttgaactggagggcaagaagtggagagtggaaaatcaggaaaatgtttccaacctggtgattgaggacacagagctgaaacaggtggcttacatatacaagtgtgtcaacacgacattgcaaatcaagggcaaaattaactccattacagtagataactgtaagaaacttggcctggtattcgatgacgtggtgggcattgtggagataatcaacagtaaggatgtcaaagttcaggtaatggtaataccaggaccgagctcga

SEQ ID NO: 328172 - DNA, 967 bp, Homo sapiens
aattcgcggccgcgtcgaccgagaagacgacagaagggggcggagagcggctgatcgcagtccggaggtgaggcggaactctgaggtggtccattatggctgacatgcaaaatctggtagaaagattggagagggcagtgggccgcctggaggcagtatctcatacctctgacatgcaccgtgggtatgcagacagtccttcaaaagcaggagcagctccatatgtgcaggcatttgactcgctgcttgctggtcctgtggcagagtacttgaagatcagtaaagagattgggggagacgtgcagaaacatgcggagatggtccacacaggtttgaagttggagcgagctctgttggttacagcttctcagtgtcaacagccagcagaaaataagctttccgatttgttggcacccatctcagagcagatcaaagaagtgataacctttcgggagaagaaccgaggcagcaagttgtttaatcacctgtcagctgtcagcgaaagtatccaggccctgggctgggtggctatggctcccaagcctggcccttatgtgaaagaaatgaatgatgccgccatgttttatacaaaccgagtcctcaaagagtacaaagatgtggataagaagcatgtagactgggtcaaagcttatttaagtatatggacagagctgcaggcttacattaaggagttccataccaccggactggcctggagcaaaacggggcctgtggcaaaagaactgagcggactgccatctggaccctctgccggatcaggtcctcctcccccacgataccagaaagggacccgatcggtcgcccaggcgtcacaaagtcaggctcagaagagtctggtacccgatcagcacgggacgagcagaattaaacagggggcgaggcataacaagtgcccggaaaaatgtagctgaggacagacgaacgaagaaaccatgcgaaggtcaaa

SEQ ID NO: 328173 - DNA, 993 bp, Homo sapiens
aattcgcggccgcgtcgaccgagaagacgacagaagggggcggagagcggctgatcgcagtccggaggtgaggcggaactctgaggtggtccattatggctgacatgcaaaatctggtagaaagattggagagggcagtgggccgcctggaggcagtatctcatacctctgacatgcaccgtgggtatgcagacagtccttcaaaagcaggagcagctccatatgtgcaggcatttgactcgctgcttgctggtcctgtggcagagtacttgaagatcagtaaagagattgggggagacgtgcagaaacatgcggagatggtccacacaggtttgaagttggagcgagctctgttggttacagcttctcagtgtcaacagccagcagaaaataagctttccgatttgttggcacccatctcagagcagatcaaagaagtgataacctttcgggagaagaaccgaggcagcaagttgtttaatcacctgtcagctgtcagcgaaagtatccaggccctgggctgggtggctatggctcccaagcctggcccttatgtgaaagaaatgaatgatgccgccatgttttatacaaaccgagtcctcaaagagtacaaagatgtggataagaagcatgtagactgggtcaaagcttatttaagtatatggacagagctgcaggcttacattaaggagttccataccaccggactggcctggagcaaaacgtgggccttggaagccactaacggtggccttgtgcgctacagaacctggagctggactgaccatcttggagccttctgtccggatctacgtgtcctactatccacaataaacaaatgaacccaataaattactccacaaaccgcacacaagctacagcacacgacataaacatgaccacacacacaaaaagagaaaatacaaaaacatagcgcacacctcaacatcgcccacaacaaagaaacaatacaacaccgacctacacacgaca

SEQ ID NO: 328174 - DNA, 892 bp, Homo sapiens
aattcgcggccgcgtcgaccgagaagacgacagaagggggcggagagcggctgatcgcagtccggaggtgaggcggaactctgaggtggtccattatggctgacatgcaaaatctggtagaaagattggagagggcagtgggccgcctggaggcagtatctcatacctctgacatgcaccgtgggtatgcagacagtccttcaaaagcaggagcagctccatatgtgcaggcatttgactcgctgcttgctggtcctgtggcagagtacttgaagatcagtaaagagattgggggagacgtgcagaaacatgcggagatggtccacacaggtttgaagttggagcgagctctgttggttacagcttctcagtgtcaacagccagcagaaaataagctttccgatttgttggcacccatctcagagcagatcaaagaagtgataacctttcgggagaagaaccgaggcagcaagttgtttaatcacctgtcagctgtcagcgaaagtatccaggccctgggctgggtggctatggctcccaagcctggcccttatgtgaaagaaatgaatgatgccgccatgttttatacaaaccgagaaacgagccacaaagaaggagccagctgtacttgaactggagggcaagaagtggagagtggaaaatcaggaaaatgtttccaacctggtgattgaggacacagagctgaaacaggtggcttacatatacaagtgtgtcaacacgacattgcaaatcaagggcaaaattaactccattacagtagataactgtaagaaacttggcctggtattcgatgacgtggtgggcattgtggagataatcaacagtaaggatgtcaaagttcaggtaatggtaataccaggaccgagctcga

SEQ ID NO: 328175 - DNA, 1369 bp, Homo sapiens
tgttgatacaaggaagagcttcaccagtggcttgctgtagagttttcaaattaactgaaccctttcctcggcttgataataatgggattcttcttcaacatacaacaaactttgtttttcttgggagattttaacagtgttacattctgaattttttaggttatgtccccatgtctcagctacgtgagactttctgcttttctgttagttactgggacctacccgtggccccactgttattgttactagaaagcctggcctaatgtgagaaataattacagataaaactttttttttcagtgctgccttaacaatttcaggaaaagactaaaatgcttccgatgtggagcagacaagtttggtaagactggattcagctgtttgcaatatgcattaaaacctactaactggggcagggagcagtggctcactgtaatcccaccactttgcaaggccaaggtgggaagatcacttgaggacaggagttcaataccagcctggcaagagatagcaagaccctgcctgtacaaaaaaagaaattttaaattatctgggtgtggtggcacacacctgtagtcctagctactcaggaggtttaggtgagaggattgcttgagtccaggagttgaaggctgcagtgagctatggtcataccactgcactccagcctgggcaacaaacaagaccctgcctctcaaaaaaaaacaaaacaaaaatctgacaaatagggttgttaactgtgagcctgaggaaaagtatagattttagtgtacttaaacaacttgtctgttttctttaaatcttttcccttaggttagataatgctgctcatgattgtgagagcacagaaagttcttttgttttctagaattaagtctgctcacctggtttgcattctgcatctgcctttctttagtgcagggtagtgtcagtcccactgtggcccaaagtttgcattctgcgttaaccaagtcacaattaatgaggttttactataggcacaaatgcttaaaaaagaaaaaaacgattgttttgtgtggttaaaataaaaacttgtggggattttaatgtatttctttggtgaaaatacattagttgtttgtctctaattggatcactttcccttctagactctgaacaggaagtgcctcctggaaccacagagtcggttcagtctgtggattactactgtgatagtaagttcatacacgatcttttggtcttcatgttaaaaattgacctcagttgtcaggagatggagaccatcctggctaacacggtgaaaccctgtctctactaaaaatacaaaaaattagctgggtgtggtggcacacacctgtaatcccagctactccgtctcaaaaaaaaa

SEQ ID NO: 328176 - DNA, 461 bp, Homo sapiens
tttttttttcaagactgtctcaaaaaaaaaaaaaagaaactgctacaagtattgatttgagtgttagaaacccaagagcaaaacagcccagcaggttagaacatgacccatatttctttcattgaggtattgggctgaactcttagttttggggttgtagcatttatgtcagtattatttggattcttaaaaattgggcttcacattttattcatactaagttcttagagcattttgcaatttgttattgttaccatatcttgactgtcagcctgtgtacttagggaaaaaagccctggaaatctcaaagcttttcaagcagtatttatgaatgactttggttatatgtgataacatctaatggaaatatttgtaggtggaagtaagagtaaaaggggtttgttacagggcatatagttgagataagatccttaatggctcattctcatggcacaggggat

SEQ ID NO: 328177 - DNA, 544 bp, Homo sapiens
  misc_feature (536)..(536): n is a, c, g, or t
tgttgatacaaggaagagcttcaccagtggcttgctgtagagttttcaaattaactgaaccctttcctcggcttgataataatgggattcttcttcaacatacaacaaactttgtttttcttgggagattttaacagtgttacattctgaattttttaggttatgtccccatgtctcagctacgtgagactttctgcttttctgttagttactgggacctacccgtggccccactgttattgttactagaaagcctggcctaatgtgagaaataattacagataaaactttttttttcagtgctgccttaacaatttcaggaaaagactaaaatgcttccgatgtggagcagacaagtttggtaagactggattcagctgtttgcaatatgcattaaaacctactaactggggcagggagcagtggctcactgtaatcccaccactttgcaaggccaaggtgggaagatcacttgaggacaggagttcaataccagcctggcaagagatagcaagaccccacctgcctcgtgccanattcttgg

SEQ ID NO: 328178 - DNA, 406 bp, Homo sapiens
gttgtgtctgttagccacgccaccttacccagaagagacagacactgtctcctgggtccctgttgagcagatagagtgagcgactggaaaatagaggagaggatatgtgacacctctcctctgttgcaattcctgctgagcttgggtcccttcaccaacacctccttccagctctgtgctagtgtttacaccctgtgtgtggttgcctggtatccaatggattctatgtggatgggcccaatgatgagctgttgtcatggcagatgtctgaactccatgacacgcccacctgttctggctgcctggtttatgtaaatagtctcagaacattttcatcactcgaagaagaaaccctgtacctgttaaacagtcactccccattctgtactctcctccagtaactact

SEQ ID NO: 328179 - DNA, 3307 bp, Homo sapiens
tgtgggtaggagacggccgtcggcggaggcgccattttgtgtagccgccgaaccttgttggaggttctggggcgcagaaccgctactgctgcttcggtctctccttgggaaaaaataaaatttgaaccttttggagctgtgtgctaaatcttcagtgggacaatgggttcagacaaaagagtgagtagaacagagcgtagtggaagatacggttccatcatagacagggatgaccgtgatgagcgtgaatcccgaagcaggcggagggactcagattacaaaagatctagtgatgatcggaggggtgatagatatgatgactaccgagactatgacagtccagagagagagcgtgaaagaaggaacagtgaccgatccgaagatggctaccattcagatggtgactatggtgagcacgactataggcatgacatcagtgacgagagggagagcaagaccatcatgctgcgcggccttcccatcaccatcacagagagcgatattcgagaaatgatggagtccttcgaaggccctcagcctgcggatgtgaggctgatgaagaggaaaacaggtgtaagccgtggtttcgccttcgtggagttttatcacttgcaagatgctaccagctggatggaagccaatcagaaaaagttggtgattcaaggaaagcacattgcaatgcattatagcaatcccagacctaagtttgaagattggctttgtaacaagtgctgccttaacaatttcaggaaaagactaaaatgcttccgatgtggagcagacaagtttgactctgaacaggaagtgcctcctggaaccacagagtcggttcagtctgtggattactactgtgatacgatcattcttcggaacatagctccgcacactgtggtggattccatcatgacagcactgtctccttacgcgtctttagctgtcaataacatccgcctcataaaagacaaacagacccagcagaacagaggcttcgcatttgtgcagctgtcctctgcaatggatgcttctcagctgcttcagatattacagagtctccatcctcctttgaaaattgatggcaaaactattggggttgattttgcaaaaagtgccagaaaagacttggtcctctcagatggtaaccgcgtcagcgccttctctgtagctagtacggctattgctgctgctcagtggtcatccacccagtctcaaagtggtgaaggaggcagtgttgactacagttatctgcaaccaggtcaagatggctatgcccaatatgctcagtattcacaggattatcagcagttttatcaacaacaagctggaggattggaatctgatgcatcatctgcatcaggcacagcagtgaccaccacctcagcggctgtagtgtcccagagtcctcagctgtataatcaaacctccaatccacctggctctccgactgaggaagcacagcctagcactagcacaagtacacaggccccagccgcttcccctactggtgtagttcctggtaccaaatatgcagtacctgacacgtccacttaccagtatgatgaatcttcaggatattactatgatccgacaacagggctctattatgaccccaactcgcaatactactataattccttgacccagcagtacctttactgggatggggaaaaagagacctacgtgccagctgcagagtctagctcccaccagcagtcgggcctgcctcctgcaaaagaggggaaagagaagaaggagaaacccaagagcaaaacagcccagcagattgccaaagacatggaacgctgggctaagagtttgaataagcagaaagaaaactttaaaaatagctttcagcctgtcaattccttgagggaagaagaaaggagagaatctgctgcagcagacgctggctttgctctctttgagaagaagggagccttagctgaaaggcagcagctcatcccagaattggtgcgaaatggagatgaggagaatcccctcaaaaggggtctggttgctgcttacagtggtgacagtgacaatgaggaggagctggtggagagacttgagagtgaggaagagaagctagctgactggaagaagatggcctgtctgctctgccggcgccagttcccgaacaaagatgccctagtcaggcaccagcaactctcagaccttcacaagcaaaacatggacatctaccgacgatccaggctgagcgagcaggagctggaagccttggagctaagggagagagagatgaaataccgagaccgagctgcagaaagacgggagaagtacggcattccagaacctccagagcccaagcgcaagaagcagtttgatgccggcactgtgaattacgagcaacccaccaaagatggcattgaccacagtaacattggcaacaagatgctgcaggccatgggctggcgggaaggctctggcttgggacgaaagtgtcaaggcattacggctcccattgaggctcaagttcggctaaagggagctggcctaggagccaaaggcagcgcatatggtttgtcgggcgccgattcctacaaagatgctgtccggaaagccatgtttgcccggttcactgagatggagtgagagagagagagagagagagatgacaaggagcacaagaagtggtccatctcccgaattcgctgttaccgcctgtctctttaagggcatgccttgtgctgttaatagatcttagggtgaaccacttcattctgcagggttctccctcccaccttaaagaagttccccttatgtgggttgcctggtgaatggccttccttcccgccagagggcttgtgaacagaccggagaggacagtggattgtttatactccagtgtacatagtgtaatgtagcgtgtttacatgtgtagcctatgttgtggtccatcagcccctcacattcctaggggtttgagatgctgtaggtggtatgtgacaccaaagccacctctgtcatttgttgtgatgtcttttcttggcaaaagccttgtgtatatttgtatattacacatttgtacagaattttggaagattttcagtctagttgccaaatctggctcctttacaaaagaaataccttgagaaaaaaaaaaaaaaaaaaaagaaacaaaaaaagaacgacagaagaaaaaacagaaacaaacgcacgaacaaggcaaacacagcacaagaaaacaaggggggggcggggggggacgaaaagaatccccccggggggggcgcccacaatgggcggcccccagcttattgtggaagaaaaggggcggcccatagggggg

SEQ ID NO: 328180 - DNA, 6260 bp, Homo sapiens
tgtgggtaggagacggccgtcggcggaggcgccattttgtgtagccgccgaaccttgttggaggttctggggcgcagaaccgctactgctgcttcggtctctccttgggaaaaaataaaatttgaaccttttggagctgtgtgctaaatcttcagtgggacaatgggttcagacaaaagagtgagtagaacagagcgtagtggaagatacggttccatcatagacagggatgaccgtgatgagcgtgaatcccgaagcaggcggagggactcagattacaaaagatctagtgatgatcggaggggtgatagatatgatgactaccgagactatgacagtccagagagagagcgtgaaagaaggaacagtgaccgatccgaagatggctaccattcagatggtgactatggtgagcacgactataggcatgacatcagtgacgagagggagagcaagaccatcatgctgcgcggccttcccatcaccatcacagagagcgatattcgagaaatgatggagtccttcgaaggccctcagcctgcggatgtgaggctgatgaagaggaaaacaggtgagagcttgcttagttcctgatattattgttctcttccccattcccacctcagtccctaaagaacatcctgattcccccagtcttcaagcacatgaattcagaatgaaaggtttgccatggctaaggaatgtgactctttgaaaaccatgttagcatctgaggaacttttttaaactttgttttagggacttttttttccttaggtaagtaatgatttataaactcctttttttttttgactatagtcggttgcatggttactttaagcgtggaatcaaatggagtggcatttagttcaggcggcttgttccttgccatggcaaagtatcaagaagatccccaagtcaagtcacatttgtaaagctgcttcccaattggctttgtcacgcagtgttgaagcagtgggagagagattcacctgttataaaggaactgactaacacaagtatcccgtctatatctgaatgctgtctctaggtgtaagccgtggtttcgccttcgtggagttttatcacttgcaagatgctaccagctggatggaagccaatcaggttgcttcactcaccaagtctagatattcatgaaaatggaacaagtctgtacaattttaaaaaaaggttgaaggagtggtttgttccaaaggagtgacttttttttaaaaaaaaagctttgtatatattaaaattgatgttactagaataagtacagtaccaaggacttcattatagaatttgttctgcctttaaacatggctacctacctggcagggctttgttaactactgaatacctgtctggtaatcactaaaacatcttaatgtttcccttttttctagtttgttatattcctattatgtccattgagagtaagcttagtatatcaaactctccatttgacagtgaagagaacatagtgaaagtctgtggcggcatttttataagtaattccttatttctgcctgaagaccacaaagcctcctggaggcgtaactgctcagaccggtcttcagggaatatttaaggacttagtggaatttatgaacaataagtctgatgagattagcctgggagtggtgtcctgcagctgtctaatctagagtggcattaacattctaatctccttgagaatgccttttatagtctgttcaaagcaagtcattgatggttcttcgaggtagtgttaactgaagtgttcttcagtttgtcaagataatgttcagtgcttggcacttaaataacattttttgcaagaactccaaggcacattattgaatgcctttaaccaagtgcattctgggaagtttgcttgactcattatcttgcttttctgcagcattctgtgatttgagtcatccatgaatccatgaataaaagttacattctttgattggtaatattgccatttataacaagactcactaatgagggtatcactttgactgactgatttgttaaagtttttaagcctctcattttcctaacccagaaatcacagcctgattttattaaaagtagagcttcattcatttcataccatagataccatcctagtaaatccagaacatatacaaggttcatgtgagtctgctttcttgacatgatagcattgtttgatgcagtggatatgtcagaatgactaacctaggagtttaaaactcctaagaaactaaaacctgtaagacatttaaaagtctccacaattttaatgtatacaaagctatgttactgtgtaacacattacagttcaaattcactccagaaataaaaggccagtaggattagggactcactggtagtttggagtctcccagcacacatccctcctagtgggatgatctattcacatatctcccagcttttttatttttgcttctgtatatcacagtgagtggatggcccttcagctttttctctcctggccagacatgcagtcttgcctttagatatcgcagagacaaaattcacagcatgtcttaaatcttccaggatttgcaagaaccaaattgctcaacagtatgtatgtttagaggggttagactcctttttaaaatctggatatctaaccacctacttaaatctgtttgatagtgtcaaaccacccccacccttgatcctcccacccccaagaaaaagaaaagatgctcctgttaaatgaaggctctttaggggtaggtgctaggtatactcttggctagattgattcagctcagaattttgactttttaaagctaagtccttgtagtcacatggttgacttgaaggatgaggtggtgtgtgcatttatgagcttttcctacccccctgaagaaacttcattggcctcctggttactcaccttgaagagagtaccatccattttagtgaaaaacacatctgtcacctaggacatgacatggttgcagttgacaggaaaaaaaaaatctcatttagttgttttagagttggtggcattcagaatagtccctcttgagaaagaattgtaaccagattccctttaaaaatgagttcccctccctttccccccaaaggactcatcctgaagcagaaggtgtggggggaaggagaaatgtaaaggcttttactttgcataaggatgggggactggggaaaaaggtgaagcgaagcccaaggacaccatgctaagggcaaaagtaagagacagtctcagaactgagagaattgtgtcttctgctttttgaagtagactgtcacactcaggcagcctgtcaatgctgaatgttaggacttctgtctccgctggagacacggcctggtgcaagtcagcgtttagtgtttgacagctttctcagcactccctgactccgtttacctttactccgcatcccattctcttactgcctatctgaaggattggatgggcagagtataggtggcggtggttggtcctccccgtatgttgtccatttaattccagagcactgatttttccgaagtgtgctctgccctgggaaaatggacacatgttcctcacaatgggaataactaattacttcttttcttacagaaaaagttggtgattcaaggaaagcacattgcaatgcattatagcaatcccagacctaagtttgaagattggctttgtaacaagtgctgccttaacaatttcaggaaaagactaaaatgcttccgatgtggagcagacaagtttgactctgaacaggaagtgcctcctggaaccacagagtcggttcagtctgtggattactactgtgatacgatcattcttcggaacatagctccgcacactgtggtggattccatcatgacagcactgtctccttacgcgtctttagctgtcaataacatccgcctcataaaagacaaacagacccagcagaacagaggcttcgcatttgtgcagctgtcctctgcaatggatgcttctcagctgcttcagatattacagagtctccatcctcctttgaaaattgatggcaaaactattggggttgattttgcaaaaagtgccagaaaagacttggtcctctcagatggtaaccgcgtcagcgccttctctgtagctagtacggctattgctgctgctcagtggtcatccacccagtctcaaagtggtgaaggaggcagtgttgactacagttatctgcaaccaggtcaagatggctatgcccaatatgctcagtattcacaggattatcagcagttttatcaacaacaagctggaggattggaatctgatgcatcatctgcatcaggcacagcagtgaccaccacctcagcggctgtagtgtcccagagtcctcagctgtataatcaaacctccaatccacctggctctccgactgaggaagcacagcctagcactagcacaagtacacaggccccagccgcttcccctactggtgtagttcctggtaccaaatatgcagtacctgacacgtccacttaccagtatgatgaatcttcaggatattactatgatccgacaacagggctctattatgaccccaactcgcaatactactataattccttgacccagcagtacctttactgggatggggaaaaagagacctacgtgccagctgcagagtctagctcccaccagcagtcgggcctgcctcctgcaaaagaggggaaagagaagaaggagaaacccaagagcaaaacagcccagcagattgccaaagacatggaacgctgggctaagagtttgaataagcagaaagaaaactttaaaaatagctttcagcctgtcaattccttgagggaagaagaaaggagagaatctgctgcagcagacgctggctttgctctctttgagaagaagggagccttagctgaaaggcagcagctcatcccagaattggtgcgaaatggagatgaggagaatcccctcaaaaggggtctggttgctgcttacagtggtgacagtgacaatgaggaggagctggtggagagacttgagagtgaggaagagaagctagctgactggaagaagatggcctgtctgctctgccggcgccagttcccgaacaaagatgccctagtcaggcaccagcaactctcagaccttcacaagcaaaacatggacatctaccgacgatccaggctgagcgagcaggagctggaagccttggagctaagggagagagagatgaaataccgagaccgagctgcagaaagacgggagaagtacggcattccagaacctccagagcccaagcgcaagaagcagtttgatgccggcactgtgaattacgagcaacccaccaaagatggcattgaccacagtaacattggcaacaagatgctgcaggccatgggctggcgggaaggctctggcttgggacgaaagtgtcaaggcattacggctcccattgaggctcaagttcggctaaagggagctggcctaggagccaaaggcagcgcatatggtttgtcgggcgccgattcctacaaagatgctgtccggaaagccatgtttgcccggttcactgagatggagtgagagagagagagagagagagatgacaaggagcacaagaagtggtccatctcccgaattcgctgttaccgcctgtctctttaagggcatgccttgtgctgttaatagatcttagggtgaaccacttcattctgcagggttctccctcccaccttaaagaagttccccttatgtgggttgcctggtgaatggccttccttcccgccagagggcttgtgaacagaccggagaggacagtggattgtttatactccagtgtacatagtgtaatgtagcgtgtttacatgtgtagcctatgttgtggtccatcagcccctcacattcctaggggtttgagatgctgtaggtggtatgtgacaccaaagccacctctgtcatttgttgtgatgtcttttcttggcaaaagccttgtgtatatttgtatattacacatttgtacagaattttggaagattttcagtctagttgccaaatctggctcctttacaaaagaaataccttgagaaaaaaaaaaaaaaaaaaaagaaacaaaaaaagaacgacagaagaaaaaacagaaacaaacgcacgaacaaggcaaacacagcacaagaaaacaaggggggggcggggggggacgaaaagaatccccccggggggggcgcccacaatgggcggcccccagcttattgtggaagaaaaggggcggcccatagggggg

SEQ ID NO: 328181 - DNA, 6238 bp, Homo sapiens
gcgtcgacggctacacaaaatgccgccgaaccttgttggaggttctggggcgcagaaccgctactgctgcttcggtctctccttgggaaaaaataaaatttgaaccttttggagctgtgtgctaaatcttcagtgggacaatgggttcagacaaaagagtgagtagaacagagcgtagtggaagatacggttccatcatagacagggatgaccgtgatgagcgtgaatcccgaagcaggcggagggactcagattacaaaagatctagtgatgatcggaggggtgatagatatgatgactaccgagactatgacagtccagagagagagcgtgaaagaaggaacagtgaccgatccgaagatggctaccattcagatggtgactatggtgagcacgactataggcatgacatcagtgacgagagggagagcaagaccatcatgctgcgcggccttcccatcaccatcacagagagcgatattcgagaaatgatggagtccttcgaaggccctcagcctgcggatgtgaggctgatgaagaggaaaacaggtgagagcttgcttagttcctgatattattgttctcttccccattcccacctcagtccctaaagaacatcctgattcccccagtcttcaagcacatgaattcagaatgaaaggtttgccatggctaaggaatgtgactctttgaaaaccatgttagcatctgaggaacttttttaaactttgttttagggacttttttttccttaggtaagtaatgatttataaactcctttttttttttgactatagtcggttgcatggttactttaagcgtggaatcaaatggagtggcatttagttcaggcggcttgttccttgccatggcaaagtatcaagaagatccccaagtcaagtcacatttgtaaagctgcttcccaattggctttgtcacgcagtgttgaagcagtgggagagagattcacctgttataaaggaactgactaacacaagtatcccgtctatatctgaatgctgtctctaggtgtaagccgtggtttcgccttcgtggagttttatcacttgcaagatgctaccagctggatggaagccaatcaggttgcttcactcaccaagtctagatattcatgaaaatggaacaagtctgtacaattttaaaaaaaggttgaaggagtggtttgttccaaaggagtgacttttttttaaaaaaaaagctttgtatatattaaaattgatgttactagaataagtacagtaccaaggacttcattatagaatttgttctgcctttaaacatggctacctacctggcagggctttgttaactactgaatacctgtctggtaatcactaaaacatcttaatgtttcccttttttctagtttgttatattcctattatgtccattgagagtaagcttagtatatcaaactctccatttgacagtgaagagaacatagtgaaagtctgtggcggcatttttataagtaattccttatttctgcctgaagaccacaaagcctcctggaggcgtaactgctcagaccggtcttcagggaatatttaaggacttagtggaatttatgaacaataagtctgatgagattagcctgggagtggtgtcctgcagctgtctaatctagagtggcattaacattctaatctccttgagaatgccttttatagtctgttcaaagcaagtcattgatggttcttcgaggtagtgttaactgaagtgttcttcagtttgtcaagataatgttcagtgcttggcacttaaataacattttttgcaagaactccaaggcacattattgaatgcctttaaccaagtgcattctgggaagtttgcttgactcattatcttgcttttctgcagcattctgtgatttgagtcatccatgaatccatgaataaaagttacattctttgattggtaatattgccatttataacaagactcactaatgagggtatcactttgactgactgatttgttaaagtttttaagcctctcattttcctaacccagaaatcacagcctgattttattaaaagtagagcttcattcatttcataccatagataccatcctagtaaatccagaacatatacaaggttcatgtgagtctgctttcttgacatgatagcattgtttgatgcagtggatatgtcagaatgactaacctaggagtttaaaactcctaagaaactaaaacctgtaagacatttaaaagtctccacaattttaatgtatacaaagctatgttactgtgtaacacattacagttcaaattcactccagaaataaaaggccagtaggattagggactcactggtagtttggagtctcccagcacacatccctcctagtgggatgatctattcacatatctcccagcttttttatttttgcttctgtatatcacagtgagtggatggcccttcagctttttctctcctggccagacatgcagtcttgcctttagatatcgcagagacaaaattcacagcatgtcttaaatcttccaggatttgcaagaaccaaattgctcaacagtatgtatgtttagaggggttagactcctttttaaaatctggatatctaaccacctacttaaatctgtttgatagtgtcaaaccacccccacccttgatcctcccacccccaagaaaaagaaaagatgctcctgttaaatgaaggctctttaggggtaggtgctaggtatactcttggctagattgattcagctcagaattttgactttttaaagctaagtccttgtagtcacatggttgacttgaaggatgaggtggtgtgtgcatttatgagcttttcctacccccctgaagaaacttcattggcctcctggttactcaccttgaagagagtaccatccattttagtgaaaaacacatctgtcacctaggacatgacatggttgcagttgacaggaaaaaaaaaatctcatttagttgttttagagttggtggcattcagaatagtccctcttgagaaagaattgtaaccagattccctttaaaaatgagttcccctccctttccccccaaaggactcatcctgaagcagaaggtgtggggggaaggagaaatgtaaaggcttttactttgcataaggatgggggactggggaaaaaggtgaagcgaagcccaaggacaccatgctaagggcaaaagtaagagacagtctcagaactgagagaattgtgtcttctgctttttgaagtagactgtcacactcaggcagcctgtcaatgctgaatgttaggacttctgtctccgctggagacacggcctggtgcaagtcagcgtttagtgtttgacagctttctcagcactccctgactccgtttacctttactccgcatcccattctcttactgcctatctgaaggattggatgggcagagtataggtggcggtggttggtcctccccgtatgttgtccatttaattccagagcactgatttttccgaagtgtgctctgccctgggaaaatggacacatgttcctcacaatgggaataactaattacttcttttcttacagaaaaagttggtgattcaaggaaagcacattgcaatgcattatagcaatcccagacctaagtttgaagattggctttgtaacaagtgctgccttaacaatttcaggaaaagactaaaatgcttccgatgtggagcagacaagtttgactctgaacaggaagtgcctcctggaaccacagagtcggttcagtctgtggattactactgtgatacgatcattcttcggaacatagctccgcacactgtggtggattccatcatgacagcactgtctccttacgcgtctttagctgtcaataacatccgcctcataaaagacaaacagacccagcagaacagaggcttcgcatttgtgcagctgtcctctgcaatggatgcttctcagctgcttcagatattacagagtctccatcctcctttgaaaattgatggcaaaactattggggttgattttgcaaaaagtgccagaaaagacttggtcctctcagatggtaaccgcgtcagcgccttctctgtagctagtacggctattgctgctgctcagtggtcatccacccagtctcaaagtggtgaaggaggcagtgttgactacagttatctgcaaccaggtcaagatggctatgcccaatatgctcagtattcacaggattatcagcagttttatcaacaacaagctggaggattggaatctgatgcatcatctgcatcaggcacagcagtgaccaccacctcagcggctgtagtgtcccagagtcctcagctgtataatcaaacctccaatccacctggctctccgactgaggaagcacagcctagcactagcacaagtacacaggccccagccgcttcccctactggtgtagttcctggtaccaaatatgcagtacctgacacgtccacttaccagtatgatgaatcttcaggatattactatgatccgacaacagggctctattatgaccccaactcgcaatactactataattccttgacccagcagtacctttactgggatggggaaaaagagacctacgtgccagctgcagagtctagctcccaccagcagtcgggcctgcctcctgcaaaagaggggaaagagaagaaggagaaacccaagagcaaaacagcccagcagattgccaaagacatggaacgctgggctaagagtttgaataagcagaaagaaaactttaaaaatagctttcagcctgtcaattccttgagggaagaagaaaggagagaatctgctgcagcagacgctggctttgctctctttgagaagaagggagccttagctgaaaggcagcagctcatcccagaattggtgcgaaatggagatgaggagaatcccctcaaaaggggtctggttgctgcttacagtggtgacagtgacaatgaggaggagctggtggagagacttgagagtgaggaagagaagctagctgactggaagaagatggcctgtctgctctgccggcgccagttcccgaacaaagatgccctagtcaggcaccagcaactctcagaccttcacaagcaaaacatggacatctaccgacgatccaggctgagcgagcaggagctggaagccttggagctaagggagagagagatgaaataccgagaccgagctgcagaaagacgggagaagtacggcattccagaacctccagagcccaagcgcaagaagcagtttgatgccggcactgtgaattacgagcaacccaccaaagatggcattgaccacagtaacattggcaacaagatgctgcaggccatgggctggcgggaaggctctggcttgggacgaaagtgtcaaggcattacggctcccattgaggctcaagttcggctaaagggagctggcctaggagccaaaggcagcgcatatggtttgtcgggcgccgattcctacaaagatgctgtccggaaagccatgtttgcccggttcactgagatggagtgagagagagagagagagagagatgacaaggagcacaagaagtggtccatctcccgaattcgctgttaccgcctgtctctttaagggcatgccttgtgctgttaatagatcttagggtgaaccacttcattctgcagggttctccctcccaccttaaagaagttccccttatgtgggttgcctggtgaatggccttccttcccgccagagggcttgtgaacagaccggagaggacagtggattgtttatactccagtgtacatagtgtaatgtagcgtgtttacatgtgtagcctatgttgtggtccatcagcccctcacattcctaggggtttgagatgctgtaggtggtatgtgacaccaaagccacctctgtcatttgttgtgatgtcttttcttggcaaaagccttgtgtatatttgtatattacacatttgtacagaattttggaagattttcagtctagttgccaaatctggctcctttacaaaagaaataccttgagaaaaaaaaaaaaaaaaaaaagaaacaaaaaaagaacgacagaagaaaaaacagaaacaaacgcacgaacaaggcaaacacagcacaagaaaacaaggggggggcggggggggacgaaaagaatccccccggggggggcgcccacaatgggcggcccccagcttattgtggaagaaaaggggcggcccatagggggg

SEQ ID NO: 328182 - DNA, 6099 bp, Homo sapiens
tgtgggtaggagacggccgtcggcggaggcgccattttgtgtagccgccgaaccttgttggaggttctggggcgcagaaccgctactgctgcttcggtctctccttgggaaaaaataaaatttgaaccttttggagctgtgtgctaaatcttcagtgggacaatgggttcagacaaaagagtgagtagaacagagcgtagtggaagatacggttccatcatagacagggatgaccgtgatgagcgtgaatcccgaagcaggcggagggactcagattacaaaagatctagtgatgatcggaggggtgatagatatgatgactaccgagactatgacagtccagagagagagcgtgaaagaaggaacagtgaccgatccgaagatggctaccattcagatggtgactatggtgagcacgactataggcatgacatcagtgacgagagggagagcaagaccatcatgctgcgcggccttcccatcaccatcacagagagcgatattcgagaaatgatggagtccttcgaaggccctcagcctgcggatgtgaggctgatgaagaggaaaacaggtgagagcttgcttagttcctgatattattgttctcttccccattcccacctcagtccctaaagaacatcctgattcccccagtcttcaagcacatgaattcagaatgaaaggtttgccatggctaaggaatgtgactctttgaaaaccatgttagcatctgaggaacttttttaaactttgttttagggacttttttttccttaggtaagtaatgatttataaactcctttttttttttgactatagtcggttgcatggttactttaagcgtggaatcaaatggagtggcatttagttcaggcggcttgttccttgccatggcaaagtatcaagaagatccccaagtcaagtcacatttgtaaagctgcttcccaattggctttgtcacgcagtgttgaagcagtgggagagagattcacctgttataaaggaactgactaacacaagtatcccgtctatatctgaatgctgtctctaggtgtaagccgtggtttcgccttcgtggagttttatcacttgcaagatgctaccagctggatggaagccaatcaggttgcttcactcaccaagtctagatattcatgaaaatggaacaagtctgtacaattttaaaaaaaggttgaaggagtggtttgttccaaaggagtgacttttttttaaaaaaaaagctttgtatatattaaaattgatgttactagaataagtacagtaccaaggacttcattatagaatttgttctgcctttaaacatggctacctacctggcagggctttgttaactactgaatacctgtctggtaatcactaaaacatcttaatgtttcccttttttctagtttgttatattcctattatgtccattgagagtaagcttagtatatcaaactctccatttgacagtgaagagaacatagtgaaagtctgtggcggcatttttataagtaattccttatttctgcctgaagaccacaaagcctcctggaggcgtaactgctcagaccggtcttcagggaatatttaaggacttagtggaatttatgaacaataagtctgatgagattagcctgggagtggtgtcctgcagctgtctaatctagagtggcattaacattctaatctccttgagaatgccttttatagtctgttcaaagcaagtcattgatggttcttcgaggtagtgttaactgaagtgttcttcagtttgtcaagataatgttcagtgcttggcacttaaataacattttttgcaagaactccaaggcacattattgaatgcctttaaccaagtgcattctgggaagtttgcttgactcattatcttgcttttctgcagcattctgtgatttgagtcatccatgaatccatgaataaaagttacattctttgattggtaatattgccatttataacaagactcactaatgagggtatcactttgactgactgatttgttaaagtttttaagcctctcattttcctaacccagaaatcacagcctgattttattaaaagtagagcttcattcatttcataccatagataccatcctagtaaatccagaacatatacaaggttcatgtgagtctgctttcttgacatgatagcattgtttgatgcagtggatatgtcagaatgactaacctaggagtttaaaactcctaagaaactaaaacctgtaagacatttaaaagtctccacaattttaatgtatacaaagctatgttactgtgtaacacattacagttcaaattcactccagaaataaaaggccagtaggattagggactcactggtagtttggagtctcccagcacacatccctcctagtgggatgatctattcacatatctcccagcttttttatttttgcttctgtatatcacagtgagtggatggcccttcagctttttctctcctggccagacatgcagtcttgcctttagatatcgcagagacaaaattcacagcatgtcttaaatcttccaggatttgcaagaaccaaattgctcaacagtatgtatgtttagaggggttagactcctttttaaaatctggatatctaaccacctacttaaatctgtttgatagtgtcaaaccacccccacccttgatcctcccacccccaagaaaaagaaaagatgctcctgttaaatgaaggctctttaggggtaggtgctaggtatactcttggctagattgattcagctcagaattttgactttttaaagctaagtccttgtagtcacatggttgacttgaaggatgaggtggtgtgtgcatttatgagcttttcctacccccctgaagaaacttcattggcctcctggttactcaccttgaagagagtaccatccattttagtgaaaaacacatctgtcacctaggacatgacatggttgcagttgacaggaaaaaaaaaatctcatttagttgttttagagttggtggcattcagaatagtccctcttgagaaagaattgtaaccagattccctttaaaaatgagttcccctccctttccccccaaaggactcatcctgaagcagaaggtgtggggggaaggagaaatgtaaaggcttttactttgcataaggatgggggactggggaaaaaggtgaagcgaagcccaaggacaccatgctaagggcaaaagtaagagacagtctcagaactgagagaattgtgtcttctgctttttgaagtagactgtcacactcaggcagcctgtcaatgctgaatgttaggacttctgtctccgctggagacacggcctggtgcaagtcagcgtttagtgtttgacagctttctcagcactccctgactccgtttacctttactccgcatcccattctcttactgcctatctgaaggattggatgggcagagtataggtggcggtggttggtcctccccgtatgttgtccatttaattccagagcactgatttttccgaagtgtgctctgccctgggaaaatggacacatgttcctcacaatgggaataactaattacttcttttcttacagaaaaagttggtgattcaaggaaagcacattgcaatgcattatagcaatcccagacctaagtttgaagattggctttgtaacaagtgctgccttaacaatttcaggaaaagactaaaatgcttccgatgtggagcagacaagtttgactctgaacaggaagtgcctcctggaaccacagagtcggttcagtctgtggattactactgtgatagatgcttctcagctgcttcagatattacagagtctccatcctcctttgaaaattgatggcaaaactattggggttgattttgcaaaaagtgccagaaaagacttggtcctctcagatggtaaccgcgtcagcgccttctctgtagctagtacggctattgctgctgctcagtggtcatccacccagtctcaaagtggtgaaggaggcagtgttgactacagttatctgcaaccaggtcaagatggctatgcccaatatgctcagtattcacaggattatcagcagttttatcaacaacaagctggaggattggaatctgatgcatcatctgcatcaggcacagcagtgaccaccacctcagcggctgtagtgtcccagagtcctcagctgtataatcaaacctccaatccacctggctctccgactgaggaagcacagcctagcactagcacaagtacacaggccccagccgcttcccctactggtgtagttcctggtaccaaatatgcagtacctgacacgtccacttaccagtatgatgaatcttcaggatattactatgatccgacaacagggctctattatgaccccaactcgcaatactactataattccttgacccagcagtacctttactgggatggggaaaaagagacctacgtgccagctgcagagtctagctcccaccagcagtcgggcctgcctcctgcaaaagaggggaaagagaagaaggagaaacccaagagcaaaacagcccagcagattgccaaagacatggaacgctgggctaagagtttgaataagcagaaagaaaactttaaaaatagctttcagcctgtcaattccttgagggaagaagaaaggagagaatctgctgcagcagacgctggctttgctctctttgagaagaagggagccttagctgaaaggcagcagctcatcccagaattggtgcgaaatggagatgaggagaatcccctcaaaaggggtctggttgctgcttacagtggtgacagtgacaatgaggaggagctggtggagagacttgagagtgaggaagagaagctagctgactggaagaagatggcctgtctgctctgccggcgccagttcccgaacaaagatgccctagtcaggcaccagcaactctcagaccttcacaagcaaaacatggacatctaccgacgatccaggctgagcgagcaggagctggaagccttggagctaagggagagagagatgaaataccgagaccgagctgcagaaagacgggagaagtacggcattccagaacctccagagcccaagcgcaagaagcagtttgatgccggcactgtgaattacgagcaacccaccaaagatggcattgaccacagtaacattggcaacaagatgctgcaggccatgggctggcgggaaggctctggcttgggacgaaagtgtcaaggcattacggctcccattgaggctcaagttcggctaaagggagctggcctaggagccaaaggcagcgcatatggtttgtcgggcgccgattcctacaaagatgctgtccggaaagccatgtttgcccggttcactgagatggagtgagagagagagagagagagagatgacaaggagcacaagaagtggtccatctcccgaattcgctgttaccgcctgtctctttaagggcatgccttgtgctgttaatagatcttagggtgaaccacttcattctgcagggttctccctcccaccttaaagaagttccccttatgtgggttgcctggtgaatggccttccttcccgccagagggcttgtgaacagaccggagaggacagtggattgtttatactccagtgtacatagtgtaatgtagcgtgtttacatgtgtagcctatgttgtggtccatcagcccctcacattcctaggggtttgagatgctgtaggtggtatgtgacaccaaagccacctctgtcatttgttgtgatgtcttttcttggcaaaagccttgtgtatatttgtatattacacatttgtacagaattttggaagattttcagtctagttgccaaatctggctcctttacaaaagaaataccttgagaaaaaaaaaaaaaaaaaaaagaaacaaaaaaagaacgacagaagaaaaaacagaaacaaacgcacgaacaaggcaaacacagcacaagaaaacaaggggggggcggggggggacgaaaagaatccccccggggggggcgcccacaatgggcggcccccagcttattgtggaagaaaaggggcggcccatagggggg

SEQ ID NO: 328183 - DNA, 6944 bp, Homo sapiens
tgtgggtaggagacggccgtcggcggaggcgccattttgtgtagccgccgaaccttgttggaggttctggggcgcagaaccgctactgctgcttcggtctctccttgggaaaaaataaaatttgaaccttttggagctgtgtgctaaatcttcagtgggacaatgggttcagacaaaagagtgagtagaacagagcgtagtggaagatacggttccatcatagacagggatgaccgtgatgagcgtgaatcccgaagcaggcggagggactcagattacaaaagatctagtgatgatcggaggggtgatagatatgatgactaccgagactatgacagtccagagagagagcgtgaaagaaggaacagtgaccgatccgaagatggctaccattcagatggtgactatggtgagcacgactataggcatgacatcagtgacgagagggagagcaagaccatcatgctgcgcggccttcccatcaccatcacagagagcgatattcgagaaatgatggagtccttcgaaggccctcagcctgcggatgtgaggctgatgaagaggaaaacaggtgagagcttgcttagttcctgatattattgttctcttccccattcccacctcagtccctaaagaacatcctgattcccccagtcttcaagcacatgaattcagaatgaaaggtttgccatggctaaggaatgtgactctttgaaaaccatgttagcatctgaggaacttttttaaactttgttttagggacttttttttccttaggtaagtaatgatttataaactcctttttttttttgactatagtcggttgcatggttactttaagcgtggaatcaaatggagtggcatttagttcaggcggcttgttccttgccatggcaaagtatcaagaagatccccaagtcaagtcacatttgtaaagctgcttcccaattggctttgtcacgcagtgttgaagcagtgggagagagattcacctgttataaaggaactgactaacacaagtatcccgtctatatctgaatgctgtctctaggtgtaagccgtggtttcgccttcgtggagttttatcacttgcaagatgctaccagctggatggaagccaatcaggttgcttcactcaccaagtctagatattcatgaaaatggaacaagtctgtacaattttaaaaaaaggttgaaggagtggtttgttccaaaggagtgacttttttttaaaaaaaaagctttgtatatattaaaattgatgttactagaataagtacagtaccaaggacttcattatagaatttgttctgcctttaaacatggctacctacctggcagggctttgttaactactgaatacctgtctggtaatcactaaaacatcttaatgtttcccttttttctagtttgttatattcctattatgtccattgagagtaagcttagtatatcaaactctccatttgacagtgaagagaacatagtgaaagtctgtggcggcatttttataagtaattccttatttctgcctgaagaccacaaagcctcctggaggcgtaactgctcagaccggtcttcagggaatatttaaggacttagtggaatttatgaacaataagtctgatgagattagcctgggagtggtgtcctgcagctgtctaatctagagtggcattaacattctaatctccttgagaatgccttttatagtctgttcaaagcaagtcattgatggttcttcgaggtagtgttaactgaagtgttcttcagtttgtcaagataatgttcagtgcttggcacttaaataacattttttgcaagaactccaaggcacattattgaatgcctttaaccaagtgcattctgggaagtttgcttgactcattatcttgcttttctgcagcattctgtgatttgagtcatccatgaatccatgaataaaagttacattctttgattggtaatattgccatttataacaagactcactaatgagggtatcactttgactgactgatttgttaaagtttttaagcctctcattttcctaacccagaaatcacagcctgattttattaaaagtagagcttcattcatttcataccatagataccatcctagtaaatccagaacatatacaaggttcatgtgagtctgctttcttgacatgatagcattgtttgatgcagtggatatgtcagaatgactaacctaggagtttaaaactcctaagaaactaaaacctgtaagacatttaaaagtctccacaattttaatgtatacaaagctatgttactgtgtaacacattacagttcaaattcactccagaaataaaaggccagtaggattagggactcactggtagtttggagtctcccagcacacatccctcctagtgggatgatctattcacatatctcccagcttttttatttttgcttctgtatatcacagtgagtggatggcccttcagctttttctctcctggccagacatgcagtcttgcctttagatatcgcagagacaaaattcacagcatgtcttaaatcttccaggatttgcaagaaccaaattgctcaacagtatgtatgtttagaggggttagactcctttttaaaatctggatatctaaccacctacttaaatctgtttgatagtgtcaaaccacccccacccttgatcctcccacccccaagaaaaagaaaagatgctcctgttaaatgaaggctctttaggggtaggtgctaggtatactcttggctagattgattcagctcagaattttgactttttaaagctaagtccttgtagtcacatggttgacttgaaggatgaggtggtgtgtgcatttatgagcttttcctacccccctgaagaaacttcattggcctcctggttactcaccttgaagagagtaccatccattttagtgaaaaacacatctgtcacctaggacatgacatggttgcagttgacaggaaaaaaaaaatctcatttagttgttttagagttggtggcattcagaatagtccctcttgagaaagaattgtaaccagattccctttaaaaatgagttcccctccctttccccccaaaggactcatcctgaagcagaaggtgtggggggaaggagaaatgtaaaggcttttactttgcataaggatgggggactggggaaaaaggtgaagcgaagcccaaggacaccatgctaagggcaaaagtaagagacagtctcagaactgagagaattgtgtcttctgctttttgaagtagactgtcacactcaggcagcctgtcaatgctgaatgttaggacttctgtctccgctggagacacggcctggtgcaagtcagcgtttagtgtttgacagctttctcagcactccctgactccgtttacctttactccgcatcccattctcttactgcctatctgaaggattggatgggcagagtataggtggcggtggttggtcctccccgtatgttgtccatttaattccagagcactgatttttccgaagtgtgctctgccctgggaaaatggacacatgttcctcacaatgggaataactaattacttcttttcttacagaaaaagttggtgattcaaggaaagcacattgcaatgcattatagcaatcccagacctaagtttgaagattggctttgtaacaagtgctgccttaacaatttcaggaaaagactaaaatgcttccgatgtggagcagacaagtttggtaagactggattcagctgtttgcaatatgcattaaaacctactaactggggcagggagcagtggctcactgtaatcccaccactttgcaaggccaaggtgggaagatcacttgaggacaggagttcaataccagcctggcaagagatagcaagaccctgcctgtacaaaaaaagaaattttaaattatctgggtgtggtggcacacacctgtagtcctagctactcaggaggtttaggtgagaggattgcttgagtccaggagttgaaggctgcagtgagctatggtcataccactgcactccagcctgggcaacaaacaagaccctgcctctcaaaaaaaaacaaaacaaaaatctgacaaatagggttgttaactgtgagcctgaggaaaagtatagattttagtgtacttaaacaacttgtctgttttctttaaatcttttcccttaggttagataatgctgctcatgattgtgagagcacagaaagttcttttgttttctagaattaagtctgctcacctggtttgcattctgcatctgcctttctttagtgcagggtagtgtcagtcccactgtggcccaaagtttgcattctgcgttaaccaagtcacaattaatgaggttttactataggcacaaatgcttaaaaaagaaaaaaacgattgttttgtgtggttaaaataaaaacttgtggggattttaatgtatttctttggtgaaaatacattagttgtttgtctctaattggatcactttcccttctagactctgaacaggaagtgcctcctggaaccacagagtcggttcagtctgtggattactactgtgatacgatcattcttcggaacatagctccgcacactgtggtggattccatcatgacagcactgtctccttacgcgtctttagctgtcaataacatccgcctcataaaagacaaacagacccagcagaacagaggcttcgcatttgtgcagctgtcctctgcaatggatgcttctcagctgcttcagatattacagagtctccatcctcctttgaaaattgatggcaaaactattggggttgattttgcaaaaagtgccagaaaagacttggtcctctcagatggtaaccgcgtcagcgccttctctgtagctagtacggctattgctgctgctcagtggtcatccacccagtctcaaagtggtgaaggaggcagtgttgactacagttatctgcaaccaggtcaagatggctatgcccaatatgctcagtattcacaggattatcagcagttttatcaacaacaagctggaggattggaatctgatgcatcatctgcatcaggcacagcagtgaccaccacctcagcggctgtagtgtcccagagtcctcagctgtataatcaaacctccaatccacctggctctccgcagtacctgacacgtccacttaccagtatgatgaatcttcaggatattactatgatccgacaacagggctctattatgaccccaactcgcaatactactataattccttgacccagcagtacctttactgggatggggaaaaagagacctacgtgccagctgcagagtctagctcccaccagcagtcgggcctgcctcctgcaaaagaggggaaagagaagaaggagaaacccaagagcaaaacagcccagcagattgccaaagacatggaacgctgggctaagagtttgaataagcagaaagaaaactttaaaaatagctttcagcctgtcaattccttgagggaagaagaaaggagagaatctgctgcagcagacgctggctttgctctctttgagaagaagggagccttagctgaaaggcagcagctcatcccagaattggtgcgaaatggagatgaggagaatcccctcaaaaggggtctggttgctgcttacagtggtgacagtgacaatgaggaggagctggtggagagacttgagagtgaggaagagaagctagctgactggaagaagatggcctgtctgctctgccggcgccagttcccgaacaaagatgccctagtcaggcaccagcaactctcagaccttcacaagcaaaacatggacatctaccgacgatccaggctgagcgagcaggagctggaagccttggagctaagggagagagagatgaaataccgagaccgagctgcagaaagacgggagaagtacggcattccagaacctccagagcccaagcgcaagaagcagtttgatgccggcactgtgaattacgagcaacccaccaaagatggcattgaccacagtaacattggcaacaagatgctgcaggccatgggctggcgggaaggctctggcttgggacgaaagtgtcaaggcattacggctcccattgaggctcaagttcggctaaagggagctggcctaggagccaaaggcagcgcatatggtttgtcgggcgccgattcctacaaagatgctgtccggaaagccatgtttgcccggttcactgagatggagtgagagagagagagagagagagatgacaaggagcacaagaagtggtccatctcccgaattcgctgttaccgcctgtctctttaagggcatgccttgtgctgttaatagatcttagggtgaaccacttcattctgcagggttctccctcccaccttaaagaagttccccttatgtgggttgcctggtgaatggccttccttcccgccagagggcttgtgaacagaccggagaggacagtggattgtttatactccagtgtacatagtgtaatgtagcgtgtttacatgtgtagcctatgttgtggtccatcagcccctcacattcctaggggtttgagatgctgtaggtggtatgtgacaccaaagccacctctgtcatttgttgtgatgtcttttcttggcaaaagccttgtgtatatttgtatattacacatttgtacagaattttggaagattttcagtctagttgccaaatctggctcctttacaaaagaaataccttgagaaaaaaaaaaaaaaaaaaaagaaacaaaaaaagaacgacagaagaaaaaacagaaacaaacgcacgaacaaggcaaacacagcacaagaaaacaaggggggggcggggggggacgaaaagaatccccccggggggggcgcccacaatgggcggcccccagcttattgtggaagaaaaggggcggcccatagggggg

SEQ ID NO: 328184 - DNA, 6338 bp, Homo sapiens
tgtgggtaggagacggccgtcggcggaggcgccattttgtgtagccgccgaaccttgttggaggttctggggcgcagaaccgctactgctgcttcggtctctccttgggaaaaaataaaatttgaaccttttggagctgtgtgctaaatcttcagtgggacaatgggttcagacaaaagagtgagtagaacagagcgtagtggaagatacggttccatcatagacagggatgaccgtgatgagcgtgaatcccgaagcaggcggagggactcagattacaaaagatctagtgatgatcggaggggtgatagatatgatgactaccgagactatgacagtccagagagagagcgtgaaagaaggaacagtgaccgatccgaagatggctaccattcagatggtgactatggtgagcacgactataggcatgacatcagtgacgagagggagagcaagaccatcatgctgcgcggccttcccatcaccatcacagagagcgatattcgagaaatgatggagtccttcgaaggccctcagcctgcggatgtgaggctgatgaagaggaaaacaggtgagagcttgcttagttcctgatattattgttctcttccccattcccacctcagtccctaaagaacatcctgattcccccagtcttcaagcacatgaattcagaatgaaaggtttgccatggctaaggaatgtgactctttgaaaaccatgttagcatctgaggaacttttttaaactttgttttagggacttttttttccttaggtaagtaatgatttataaactcctttttttttttgactatagtcggttgcatggttactttaagcgtggaatcaaatggagtggcatttagttcaggcggcttgttccttgccatggcaaagtatcaagaagatccccaagtcaagtcacatttgtaaagctgcttcccaattggctttgtcacgcagtgttgaagcagtgggagagagattcacctgttataaaggaactgactaacacaagtatcccgtctatatctgaatgctgtctctaggtgtaagccgtggtttcgccttcgtggagttttatcacttgcaagatgctaccagctggatggaagccaatcaggttgcttcactcaccaagtctagatattcatgaaaatggaacaagtctgtacaattttaaaaaaaggttgaaggagtggtttgttccaaaggagtgacttttttttaaaaaaaaagctttgtatatattaaaattgatgttactagaataagtacagtaccaaggacttcattatagaatttgttctgcctttaaacatggctacctacctggcagggctttgttaactactgaatacctgtctggtaatcactaaaacatcttaatgtttcccttttttctagtttgttatattcctattatgtccattgagagtaagcttagtatatcaaactctccatttgacagtgaagagaacatagtgaaagtctgtggcggcatttttataagtaattccttatttctgcctgaagaccacaaagcctcctggaggcgtaactgctcagaccggtcttcagggaatatttaaggacttagtggaatttatgaacaataagtctgatgagattagcctgggagtggtgtcctgcagctgtctaatctagagtggcattaacattctaatctccttgagaatgccttttatagtctgttcaaagcaagtcattgatggttcttcgaggtagtgttaactgaagtgttcttcagtttgtcaagataatgttcagtgcttggcacttaaataacattttttgcaagaactccaaggcacattattgaatgcctttaaccaagtgcattctgggaagtttgcttgactcattatcttgcttttctgcagcattctgtgatttgagtcatccatgaatccatgaataaaagttacattctttgattggtaatattgccatttataacaagactcactaatgagggtatcactttgactgactgatttgttaaagtttttaagcctctcattttcctaacccagaaatcacagcctgattttattaaaagtagagcttcattcatttcataccatagataccatcctagtaaatccagaacatatacaaggttcatgtgagtctgctttcttgacatgatagcattgtttgatgcagtggatatgtcagaatgactaacctaggagtttaaaactcctaagaaactaaaacctgtaagacatttaaaagtctccacaattttaatgtatacaaagctatgttactgtgtaacacattacagttcaaattcactccagaaataaaaggccagtaggattagggactcactggtagtttggagtctcccagcacacatccctcctagtgggatgatctattcacatatctcccagcttttttatttttgcttctgtatatcacagtgagtggatggcccttcagctttttctctcctggccagacatgcagtcttgcctttagatatcgcagagacaaaattcacagcatgtcttaaatcttccaggatttgcaagaaccaaattgctcaacagtatgtatgtttagaggggttagactcctttttaaaatctggatatctaaccacctacttaaatctgtttgatagtgtcaaaccacccccacccttgatcctcccacccccaagaaaaagaaaagatgctcctgttaaatgaaggctctttaggggtaggtgctaggtatactcttggctagattgattcagctcagaattttgactttttaaagctaagtccttgtagtcacatggttgacttgaaggatgaggtggtgtgtgcatttatgagcttttcctacccccctgaagaaacttcattggcctcctggttactcaccttgaagagagtaccatccattttagtgaaaaacacatctgtcacctaggacatgacatggttgcagttgacaggaaaaaaaaaatctcatttagttgttttagagttggtggcattcagaatagtccctcttgagaaagaattgtaaccagattccctttaaaaatgagttcccctccctttccccccaaaggactcatcctgaagcagaaggtgtggggggaaggagaaatgtaaaggcttttactttgcataaggatgggggactggggaaaaaggtgaagcgaagcccaaggacaccatgctaagggcaaaagtaagagacagtctcagaactgagagaattgtgtcttctgctttttgaagtagactgtcacactcaggcagcctgtcaatgctgaatgttaggacttctgtctccgctggagacacggcctggtgcaagtcagcgtttagtgtttgacagctttctcagcactccctgactccgtttacctttactccgcatcccattctcttactgcctatctgaaggattggatgggcagagtataggtggcggtggttggtcctccccgtatgttgtccatttaattccagagcactgatttttccgaagtgtgctctgccctgggaaaatggacacatgttcctcacaatgggaataactaattacttcttttcttacagaaaaagttggtgattcaaggaaagcacattgcaatgcattatagcaatcccagacctaagtttgaagattggctttgtaacaagtgctgccttaacaatttcaggaaaagactaaaatgcttccgatgtggagcagacaagtttgactctgaacaggaagtgcctcctggaaccacagagtcggttcagtctgtggattactactgtgatacgatcattcttcggaacatagctccgcacactgtggtggattccatcatgacagcactgtctccttacgcgtctttagctgtcaataacatccgcctcataaaagacaaacagacccagcagaacagaggcttcgcatttgtgcagctgtcctctgcaatggatgcttctcagctgcttcagatattacagagtctccatcctcctttgaaaattgatggcaaaactattggggttgattttgcaaaaagtgccagaaaagacttggtcctctcagatggtaaccgcgtcagcgccttctctgtagctagtacggctattgctgctgctcagtggtcatccacccagtctcaaagtggtgaaggaggcagtgttgactacagttatctgcaaccaggtcaagatggctatgcccaatatgctcagtattcacaggattatcagcagttttatcaacaacaagctggaggattggaatctgatgcatcatctgcatcaggcacagcagtgaccaccacctcagcggctgtagtgtcccagagtcctcagctgtataatcaaacctccaatccacctggctctccgactgaggaagcacagcctagcactagcacaagtacacaggccccagccgcttcccctactggtgtagttcctggtaccaaatatgcagtacctgacacgtccacttaccagtatgatgaatcttcaggatattactatgatccgacaacagggctctattatgaccccaactcgcaatactactataattccttgacccagcagtacctttactgggatggggaaaaagagacctacgtgccagctgcagagtctagctcccaccagcagtcgggcctgcctcctgcaaaagaggggaaagagaagaaggagaaacccaagagcaaaacagcccagcagattgccaaagacatggaacgctgggctaagagtttgaataagcagaaagaaaactttaaaaatagctttcagcctgtcaattccttgagggaagaagaaaggagagaatctgctgcagcagacgctggctttgctctctttgagaagaagggagccttagctgaaaggcagcagctcatcccagaattggtgcgaaatggagatgaggagaatcccctcaaaaggggtctggttgctgcttacagtggtgacagtgacaatgaggaggagctggtggagagacttgagagtgaggaagagaagctagctgactggaagaagatggcctgtctgctctgccggcgccagttcccgaacaaagatgccctagtcaggcaccagcaactctcagaccttcacaagcaaaacatggacatctaccgacgatccaggctgagcgagcaggagctggaagccttggagctaagggagagagagatgaaataccgagaccgagctgcagaaagacgggagaagtacggcattccagaacctccagagcccaagcgcaagaagcagtttgatgccggcactgtgtatgtgatgtgcacattttccagttcgtaagctggggccctggctgttttaagtaactgtgtgtttgccactggcaggaattacgagcaacccaccaaagatggcattgaccacagtaacattggcaacaagatgctgcaggccatgggctggcgggaaggctctggcttgggacgaaagtgtcaaggcattacggctcccattgaggctcaagttcggctaaagggagctggcctaggagccaaaggcagcgcatatggtttgtcgggcgccgattcctacaaagatgctgtccggaaagccatgtttgcccggttcactgagatggagtgagagagagagagagagagagatgacaaggagcacaagaagtggtccatctcccgaattcgctgttaccgcctgtctctttaagggcatgccttgtgctgttaatagatcttagggtgaaccacttcattctgcagggttctccctcccaccttaaagaagttccccttatgtgggttgcctggtgaatggccttccttcccgccagagggcttgtgaacagaccggagaggacagtggattgtttatactccagtgtacatagtgtaatgtagcgtgtttacatgtgtagcctatgttgtggtccatcagcccctcacattcctaggggtttgagatgctgtaggtggtatgtgacaccaaagccacctctgtcatttgttgtgatgtcttttcttggcaaaagccttgtgtatatttgtatattacacatttgtacagaattttggaagattttcagtctagttgccaaatctggctcctttacaaaagaaataccttgagaaaaaaaaaaaaaaaaaaaagaaacaaaaaaagaacgacagaagaaaaaacagaaacaaacgcacgaacaaggcaaacacagcacaagaaaacaaggggggggcggggggggacgaaaagaatccccccggggggggcgcccacaatgggcggcccccagcttattgtggaagaaaaggggcggcccatagggggg

SEQ ID NO: 328185 - DNA, 1880 bp, Homo sapiens
aaggattgtgaagatgatgagtgtagagggaaggttaatggttgatattgctaggggtgccgcttcccctactggtgtagttcctggtaccaaatatgcagtacctgacacgtccacttaccagtatgatgaatcttcaggatattactatgatccgacaacagggctctattatgaccccaactcgcaatactactataattccttgacccagcagtacctttactgggatggggaaaaagagacctacgtgccagctgcagagtctagctcccaccagcagtcgggcctgcctcctgcaaaagaggggaaagagaagaaggagaaacccaagagcaaaacagcccagcagattgccaaagacatggaacgctgggctaagagtttgaataagcagaaagaaaactttaaaaatagctttcagcctgtcaattccttgagggaagaagaaaggagagaatctgctgcagcagacgctggctttgctctctttgagaagaagggagccttagctgaaaggcagcagctcatcccagaattggtgcgaaatggagatgaggagaatcccctcaaaaggggtctggttgctgcttacagtggtgacagtgacaatgaggaggagctggtggagagacttgagagtgaggaagagaagctagctgactggaagaagatggcctgtctgctctgccggcgccagttcccgaacaaagatgccctagtcaggcaccagcaactctcagaccttcacaagcaaaacatggacatctaccgacgatccaggctgagcgagcaggagctggaagccttggagctaagggagagagagatgaaataccgagaccgagctgcagaaagacgggagaagtacggcattccagaacctccagagcccaagcgcaagaagcagtttgatgccggcactgtgaattacgagcaacccaccaaagatggcattgaccacagtaacattggcaacaagatgctgcaggccatgggctggcgggaaggctctggcttgggacgaaagtgtcaaggcattacggctcccattgaggctcaagttcggctaaagggagctggcctaggagccaaaggcagcgcatatggtttgtcgggcgccgattcctacaaagatgctgtccggaaagccatgtttgcccggttcactgagatggagtgagagagagagagagagagagatgacaaggagcacaagaagtggtccatctcccgaattcgctgttaccgcctgtctctttaagggcatgccttgtgctgttaatagatcttagggtgaaccacttcattctgcagggttctccctcccaccttaaagaagttccccttatgtgggttgcctggtgaatggccttccttcccgccagagggcttgtgaacagaccggagaggacagtggattgtttatactccagtgtacatagtgtaatgtagcgtgtttacatgtgtagcctatgttgtggtccatcagcccctcacattcctaggggtttgagatgctgtaggtggtatgtgacaccaaagccacctctgtcatttgttgtgatgtcttttcttggcaaaagccttgtgtatatttgtatattacacatttgtacagaattttggaagattttcagtctagttgccaaatctggctcctttacaaaagaaataccttgagaaaaaaaaaaaaaaaaaaaagaaacaaaaaaagaacgacagaagaaaaaacagaaacaaacgcacgaacaaggcaaacacagcacaagaaaacaaggggggggcggggggggacgaaaagaatccccccggggggggcgcccacaatgggcggcccccagcttattgtggaagaaaaggggcggcccatagggggg

SEQ ID NO: 328186 - DNA, 6231 bp, Homo sapiens
tgtgggtaggagacggccgtcggcggaggcgccattttgtgtagccgccgaaccttgttggaggttctggggcgcagaaccgctactgctgcttcggtctctccttgggaaaaaataaaatttgaaccttttggagctgtgtgctaaatcttcagtgggacaatgggttcagacaaaagagtgagtagaacagagcgtagtggaagatacggttccatcatagacagggatgaccgtgatgagcgtgaatcccgaagcaggcggagggactcagattacaaaagatctagtgatgatcggaggggtgatagatatgatgactaccgagactatgacagtccagagagagagcgtgaaagaaggaacagtgaccgatccgaagatggctaccattcagatggtgactatggtgagcacgactataggcatgacatcagtgacgagagggagagcaagaccatcatgctgcgcggccttcccatcaccatcacagagagcgatattcgagaaatgatggagtccttcgaaggccctcagcctgcggatgtgaggctgatgaagaggaaaacaggtgagagcttgcttagttcctgatattattgttctcttccccattcccacctcagtccctaaagaacatcctgattcccccagtcttcaagcacatgaattcagaatgaaaggtttgccatggctaaggaatgtgactctttgaaaaccatgttagcatctgaggaacttttttaaactttgttttagggacttttttttccttaggtaagtaatgatttataaactcctttttttttttgactatagtcggttgcatggttactttaagcgtggaatcaaatggagtggcatttagttcaggcggcttgttccttgccatggcaaagtatcaagaagatccccaagtcaagtcacatttgtaaagctgcttcccaattggctttgtcacgcagtgttgaagcagtgggagagagattcacctgttataaaggaactgactaacacaagtatcccgtctatatctgaatgctgtctctaggtgtaagccgtggtttcgccttcgtggagttttatcacttgcaagatgctaccagctggatggaagccaatcaggttgcttcactcaccaagtctagatattcatgaaaatggaacaagtctgtacaattttaaaaaaaggttgaaggagtggtttgttccaaaggagtgacttttttttaaaaaaaaagctttgtatatattaaaattgatgttactagaataagtacagtaccaaggacttcattatagaatttgttctgcctttaaacatggctacctacctggcagggctttgttaactactgaatacctgtctggtaatcactaaaacatcttaatgtttcccttttttctagtttgttatattcctattatgtccattgagagtaagcttagtatatcaaactctccatttgacagtgaagagaacatagtgaaagtctgtggcggcatttttataagtaattccttatttctgcctgaagaccacaaagcctcctggaggcgtaactgctcagaccggtcttcagggaatatttaaggacttagtggaatttatgaacaataagtctgatgagattagcctgggagtggtgtcctgcagctgtctaatctagagtggcattaacattctaatctccttgagaatgccttttatagtctgttcaaagcaagtcattgatggttcttcgaggtagtgttaactgaagtgttcttcagtttgtcaagataatgttcagtgcttggcacttaaataacattttttgcaagaactccaaggcacattattgaatgcctttaaccaagtgcattctgggaagtttgcttgactcattatcttgcttttctgcagcattctgtgatttgagtcatccatgaatccatgaataaaagttacattctttgattggtaatattgccatttataacaagactcactaatgagggtatcactttgactgactgatttgttaaagtttttaagcctctcattttcctaacccagaaatcacagcctgattttattaaaagtagagcttcattcatttcataccatagataccatcctagtaaatccagaacatatacaaggttcatgtgagtctgctttcttgacatgatagcattgtttgatgcagtggatatgtcagaatgactaacctaggagtttaaaactcctaagaaactaaaacctgtaagacatttaaaagtctccacaattttaatgtatacaaagctatgttactgtgtaacacattacagttcaaattcactccagaaataaaaggccagtaggattagggactcactggtagtttggagtctcccagcacacatccctcctagtgggatgatctattcacatatctcccagcttttttatttttgcttctgtatatcacagtgagtggatggcccttcagctttttctctcctggccagacatgcagtcttgcctttagatatcgcagagacaaaattcacagcatgtcttaaatcttccaggatttgcaagaaccaaattgctcaacagtatgtatgtttagaggggttagactcctttttaaaatctggatatctaaccacctacttaaatctgtttgatagtgtcaaaccacccccacccttgatcctcccacccccaagaaaaagaaaagatgctcctgttaaatgaaggctctttaggggtaggtgctaggtatactcttggctagattgattcagctcagaattttgactttttaaagctaagtccttgtagtcacatggttgacttgaaggatgaggtggtgtgtgcatttatgagcttttcctacccccctgaagaaacttcattggcctcctggttactcaccttgaagagagtaccatccattttagtgaaaaacacatctgtcacctaggacatgacatggttgcagttgacaggaaaaaaaaaatctcatttagttgttttagagttggtggcattcagaatagtccctcttgagaaagaattgtaaccagattccctttaaaaatgagttcccctccctttccccccaaaggactcatcctgaagcagaaggtgtggggggaaggagaaatgtaaaggcttttactttgcataaggatgggggactggggaaaaaggtgaagcgaagcccaaggacaccatgctaagggcaaaagtaagagacagtctcagaactgagagaattgtgtcttctgctttttgaagtagactgtcacactcaggcagcctgtcaatgctgaatgttaggacttctgtctccgctggagacacggcctggtgcaagtcagcgtttagtgtttgacagctttctcagcactccctgactccgtttacctttactccgcatcccattctcttactgcctatctgaaggattggatgggcagagtataggtggcggtggttggtcctccccgtatgttgtccatttaattccagagcactgatttttccgaagtgtgctctgccctgggaaaatggacacatgttcctcacaatgggaataactaattacttcttttcttacagaaaaagttggtgattcaaggaaagcacattgcaatgcattatagcaatcccagacctaagtttgaagattggctttgtaacaagtgctgccttaacaatttcaggaaaagactaaaatgcttccgatgtggagcagacaagtttgactctgaacaggaagtgcctcctggaaccacagagtcggttcagtctgtggattactactgtgatacgatcattcttcggaacatagctccgcacactgtggtggattccatcatgacagcactgtctccttacgcgtctttagctgtcaataacatccgcctcataaaagacaaacagacccagcagaacagaggcttcgcatttgtgcagctgtcctctgcaatggatgcttctcagctgcttcagatattacagagtctccatcctcctttgaaaattgatggcaaaactattggggttgattttgcaaaaagtgccagaaaagacttggtcctctcagatggtaaccgcgtcagcgccttctctgtagctagtacggctattgctgctgctcagtggtcatccacccagtctcaaagtggtgaaggaggcagtgttgactacagttatctgcaaccaggtcaagatggctatgcccaatatgctcagtattcacaggattatcagcagttttatcaacaacaagctggaggattggaatctgatgcatcatctgcatcaggcacagcagtgaccaccacctcagcggctgtagtgtcccagagtcctcagctgtataatcaaacctccaatccacctggctctccgactgaggaagcacagcctagcactagcacaagtacacaggccccagccgcttcccctactggtgtagttcctggtaccaaatatgcagtacctgacacgtccacttaccagtatgatgaatcttcaggatattactatgatccgacaacagggctctattatgaccccaactcgcaatactactataattccttgacccagcagtacctttactgggatggggaaaaagagacctacgtgccagctgcagagtctagctcccaccagcagtcgggcctgcctcctgcaaaagaggggaaagagaagaaggagaaacccaagagcaaaacagcccagcagattgccaaagacatggaacgctgggctaagagtttgaataagcagaaagaaaactttaaaaatagctttcagcctgtcaattccttgagggaagaagaaaggagagaatctgctgcagcagacgctggctttgctctctttgagaagaagggagccttagctgaaaggcagcagctcatcccagaattggtgcgaaatggagatgaggagaatcccctcaaaaggggtctggttgctgcttacagtggtgacagtgacaatgaggaggagctggtggagagacttgagagtgaggaagagaagctagctgactggaagaagatggcctgtctgctctgccggcgccagttcccgaacaaagatgccctagtcaggcaccagcaactctcagaccttcacaagcaaaacatggacatctaccgacgatccaggctgagcgagcaggagctggaagccttggagctaagggagagagagatgaaataccgagaccgagctgcagaaagacgggagaagtacggcattccagaacctccagagcccaagcgcaagaagcagtttgatgccggcactgtgaattacgagcaacccaccaaagatggcattgaccacagtaacattggcaacaagatgctgcaggccatgggctggcgggaaggctctggcttgggacgaaagtgtcaaggcattacggctcccattgaggctcaagttcggctaaagggagctggcctaggagccaaaggcagcgcatatggtttgtcgggcgccgattcctacaaagatgctgtccggaaagccatgtttgcccggttcactgagatggagtgagagagagagagagagagagatgacaaggagcacaagaagtggtccatctcccgaattcgctgttaccgcctgtctctttaagggcatgccttgtgctgttaatagatcttagggtgaaccacttcattctgcagggttctccctcccaccttaaagatggccttccttcccgccagagggcttgtgaacagaccggagaggacagtggattgtttatactccagtgtacatagtgtaatgtagcgtgtttacatgtgtagcctatgttgtggtccatcagcccctcacattcctaggggtttgagatgctgtaggtggtatgtgacaccaaagccacctctgtcatttgttgtgatgtcttttcttggcaaaagccttgtgtatatttgtatattacacatttgtacagaattttggaagattttcagtctagttgccaaatctggctcctttacaaaagaaataccttgagaaaaaaaaaaaaaaaaaaaagaaacaaaaaaagaacgacagaagaaaaaacagaaacaaacgcacgaacaaggcaaacacagcacaagaaaacaaggggggggcggggggggacgaaaagaatccccccggggggggcgcccacaatgggcggcccccagcttattgtggaagaaaaggggcggcccatagggggg

SEQ ID NO: 328187 - DNA, 5939 bp, Homo sapiens
tgtgggtaggagacggccgtcggcggaggcgccattttgtgtagccgccgaaccttgttggaggttctggggcgcagaaccgctactgctgcttcggtctctccttgggaaaaaataaaatttgaaccttttggagctgtgtgctaaatcttcagtgggacaatgggttcagacaaaagagtgagtagaacagagcgtagtggaagatacggttccatcatagacagggatgaccgtgatgagcgtgaatcccgaagcaggcggagggactcagattacaaaagatctagtgatgatcggaggggtgatagatatgatgactaccgagactatgacagtccagagagagagcgtgaaagaaggaacagtgaccgatccgaagatggctaccattcagatggtgactatggtgagcacgactataggcatgacatcagtgacgagagggagagcaagaccatcatgctgcgcggccttcccatcaccatcacagagagcgatattcgagaaatgatggagtccttcgaaggccctcagcctgcggatgtgaggctgatgaagaggaaaacaggtgagagcttgcttagttcctgatattattgttctcttccccattcccacctcagtccctaaagaacatcctgattcccccagtcttcaagcacatgaattcagaatgaaaggtttgccatggctaaggaatgtgactctttgaaaaccatgttagcatctgaggaacttttttaaactttgttttagggacttttttttccttaggtaagtaatgatttataaactcctttttttttttgactatagtcggttgcatggttactttaagcgtggaatcaaatggagtggcatttagttcaggcggcttgttccttgccatggcaaagtatcaagaagatccccaagtcaagtcacatttgtaaagctgcttcccaattggctttgtcacgcagtgttgaagcagtgggagagagattcacctgttataaaggaactgactaacacaagtatcccgtctatatctgaatgctgtctctaggtgtaagccgtggtttcgccttcgtggagttttatcacttgcaagatgctaccagctggatggaagccaatcaggttgcttcactcaccaagtctagatattcatgaaaatggaacaagtctgtacaattttaaaaaaaggttgaaggagtggtttgttccaaaggagtgacttttttttaaaaaaaaagctttgtatatattaaaattgatgttactagaataagtacagtaccaaggacttcattatagaatttgttctgcctttaaacatggctacctacctggcagggctttgttaactactgaatacctgtctggtaatcactaaaacatcttaatgtttcccttttttctagtttgttatattcctattatgtccattgagagtaagcttagtatatcaaactctccatttgacagtgaagagaacatagtgaaagtctgtggcggcatttttataagtaattccttatttctgcctgaagaccacaaagcctcctggaggcgtaactgctcagaccggtcttcagggaatatttaaggacttagtggaatttatgaacaataagtctgatgagattagcctgggagtggtgtcctgcagctgtctaatctagagtggcattaacattctaatctccttgagaatgccttttatagtctgttcaaagcaagtcattgatggttcttcgaggtagtgttaactgaagtgttcttcagtttgtcaagataatgttcagtgcttggcacttaaataacattttttgcaagaactccaaggcacattattgaatgcctttaaccaagtgcattctgggaagtttgcttgactcattatcttgcttttctgcagcattctgtgatttgagtcatccatgaatccatgaataaaagttacattctttgattggtaatattgccatttataacaagactcactaatgagggtatcactttgactgactgatttgttaaagtttttaagcctctcattttcctaacccagaaatcacagcctgattttattaaaagtagagcttcattcatttcataccatagataccatcctagtaaatccagaacatatacaaggttcatgtgagtctgctttcttgacatgatagcattgtttgatgcagtggatatgtcagaatgactaacctaggagtttaaaactcctaagaaactaaaacctgtaagacatttaaaagtctccacaattttaatgtatacaaagctatgttactgtgtaacacattacagttcaaattcactccagaaataaaaggccagtaggattagggactcactggtagtttggagtctcccagcacacatccctcctagtgggatgatctattcacatatctcccagcttttttatttttgcttctgtatatcacagtgagtggatggcccttcagctttttctctcctggccagacatgcagtcttgcctttagatatcgcagagacaaaattcacagcatgtcttaaatcttccaggatttgcaagaaccaaattgctcaacagtatgtatgtttagaggggttagactcctttttaaaatctggatatctaaccacctacttaaatctgtttgatagtgtcaaaccacccccacccttgatcctcccacccccaagaaaaagaaaagatgctcctgttaaatgaaggctctttaggggtaggtgctaggtatactcttggctagattgattcagctcagaattttgactttttaaagctaagtccttgtagtcacatggttgacttgaaggatgaggtggtgtgtgcatttatgagcttttcctacccccctgaagaaacttcattggcctcctggttactcaccttgaagagagtaccatccattttagtgaaaaacacatctgtcacctaggacatgacatggttgcagttgacaggaaaaaaaaaatctcatttagttgttttagagttggtggcattcagaatagtccctcttgagaaagaattgtaaccagattccctttaaaaatgagttcccctccctttccccccaaaggactcatcctgaagcagaaggtgtggggggaaggagaaatgtaaaggcttttactttgcataaggatgggggactggggaaaaaggtgaagcgaagcccaaggacaccatgctaagggcaaaagtaagagacagtctcagaactgagagaattgtgtcttctgctttttgaagtagactgtcacactcaggcagcctgtcaatgctgaatgttaggacttctgtctccgctggagacacggcctggtgcaagtcagcgtttagtgtttgacagctttctcagcactccctgactccgtttacctttactccgcatcccattctcttactgcctatctgaaggattggatgggcagagtataggtggcggtggttggtcctccccgtatgttgtccatttaattccagagcactgatttttccgaagtgtgctctgccctgggaaaatggacacatgttcctcacaatgggaataactaattacttcttttcttacagaaaaagttggtgattcaaggaaagcacattgcaatgcattatagcaatcccagacctaagtttgaagattggctttgtaacaagtgctgccttaacaatttcaggaaaagactaaaatgcttccgatgtggagcagacaagtttgactctgaacaggaagtgcctcctggaaccacagagtcggttcagtctgtggattactactgtgatacgatcattcttcggaacatagctccgcacactgtggtggattccatcatgacagcactgtctccttacgcgtctttagctgtcaataacatccgcctcataaaagacaaacagacccagcagaacagaggcttcgcatttgtgcagctgtcctctgcaatggatgcttctcagctgcttcagatattacagagtctccatcctcctttgaaaattgatggcaaaactattggggttgattttgcaaaaagtgccagaaaagacttggtcctctcagatggtaaccgcgtcagcgccttctctgtagctagtacggctattgctgctgctcagtggtcatccacccagtctcaaagtggtgaaggaggcagtgttgactacagttatctgcaaccaggtcaagatggctatgcccaatatgctcagtattcacaggattatcagcagttttatcaacaacaagctggaggattggaatctgatgcatcatctgcatcaggcacagcagtgaccaccacctcagcggctgtagtgtcccagagtcctcagctgtataatcaaacctccaatccacctggctctccgactgaggaagcacagcctagcactagcacaagtacacaggccccagccgcttcccctactggtgtagttcctggtaccaaatatgcagtacctgacacgtccacttaccagtatgatgaatcttcaggatattactatgatccgacaacagggctctattatgaccccaactcgcaatactactataattccttgacccagcagtacctttactgggatggggaaaaagagacctacgtgccagctgcagagtctagctcccaccagcagtcgggcctgcctcctgcaaaagaggggaaagagaagaaggagaaacccaagagcaaaacagcccagcagattgccaaagacatggaacgctgggctaagagtttgaataagcagaaagaaaactttaaaaatagctttcagcctgtcaattccttgagggaagaagaaaggagagaatctgctgcagcagacgctggctttgctctctttgagaagaagggagccttagctgaaaggcagcagctcatcccagaattggtgcgaaatggagatgaggagaatcccctcaaaaggggtctggttgctgcttacagtggtgacagtgacaatgaggaggagctggtggagagacttgagagtgaggaagagaagctagctgactggaagaagatggcctgtctgctctgccggcgccagttcccgaacaaagatgccctagtcaggcaccagcaactctcagaccttcacaagcaaaacatggacatctaccgacgatccaggctgagcgagcaggagctggaagccttggagctaagggagagagagatgaaataccgagaccgagctgcagaaagacgggagaagtacggcattccagaacctccagagcccaagcgcaagaagcagtttgatgccggcactgtgaattacgagcaacccaccaaagatggcattgaccacagtaacattggcaacaagatgctgcaggccatgggctggcgggaaggctctggcttgggacgaaagtgtcaaggcattacggctcccattgaggctcaagttcggctaaagggagctggcctaggagccaaaggcagcgcatatggtttgtcgggcgccgattcctacaaagatgctgtccggaaagccatgtttgcccggttcactgagatggagtgagagagagagagagagagagatgacaaggagcacaagaagtggtccatctcccgaattcgctgttaccgcctgtctctttaagggcatgccttgtgctgttaatagatcttagggtgaaccacttcattctgcagggttctccctcccaccttaaagaagttccccttatgtgggttgcctggtgaatggccttccttcccgccagagggcttgtgaacagaccggagaggacagtggattgtttatactccagtgtacatagtgtaatgtagcgtgtttacatgtgtagcctatgttgtggtccatcagcccctcacattcctaggggtttgagatgctgtaggtgggtacttggggatccttctagagtctagca

SEQ ID NO: 328188 - DNA, 5756 bp, Homo sapiens
tgtgggtaggagacggccgtcggcggaggcgccattttgtgtagccgccgaaccttgttggaggttctggggcgcagaaccgctactgctgcttcggtctctccttgggaaaaaataaaatttgaaccttttggagctgtgtgctaaatcttcagtgggacaatgggttcagacaaaagagtgagtagaacagagcgtagtggaagatacggttccatcatagacagggatgaccgtgatgagcgtgaatcccgaagcaggcggagggactcagattacaaaagatctagtgatgatcggaggggtgatagatatgatgactaccgagactatgacagtccagagagagagcgtgaaagaaggaacagtgaccgatccgaagatggctaccattcagatggtgactatggtgagcacgactataggcatgacatcagtgacgagagggagagcaagaccatcatgctgcgcggccttcccatcaccatcacagagagcgatattcgagaaatgatggagtccttcgaaggccctcagcctgcggatgtgaggctgatgaagaggaaaacaggtgagagcttgcttagttcctgatattattgttctcttccccattcccacctcagtccctaaagaacatcctgattcccccagtcttcaagcacatgaattcagaatgaaaggtttgccatggctaaggaatgtgactctttgaaaaccatgttagcatctgaggaacttttttaaactttgttttagggacttttttttccttaggtaagtaatgatttataaactcctttttttttttgactatagtcggttgcatggttactttaagcgtggaatcaaatggagtggcatttagttcaggcggcttgttccttgccatggcaaagtatcaagaagatccccaagtcaagtcacatttgtaaagctgcttcccaattggctttgtcacgcagtgttgaagcagtgggagagagattcacctgttataaaggaactgactaacacaagtatcccgtctatatctgaatgctgtctctaggtgtaagccgtggtttcgccttcgtggagttttatcacttgcaagatgctaccagctggatggaagccaatcaggttgcttcactcaccaagtctagatattcatgaaaatggaacaagtctgtacaattttaaaaaaaggttgaaggagtggtttgttccaaaggagtgacttttttttaaaaaaaaagctttgtatatattaaaattgatgttactagaataagtacagtaccaaggacttcattatagaatttgttctgcctttaaacatggctacctacctggcagggctttgttaactactgaatacctgtctggtaatcactaaaacatcttaatgtttcccttttttctagtttgttatattcctattatgtccattgagagtaagcttagtatatcaaactctccatttgacagtgaagagaacatagtgaaagtctgtggcggcatttttataagtaattccttatttctgcctgaagaccacaaagcctcctggaggcgtaactgctcagaccggtcttcagggaatatttaaggacttagtggaatttatgaacaataagtctgatgagattagcctgggagtggtgtcctgcagctgtctaatctagagtggcattaacattctaatctccttgagaatgccttttatagtctgttcaaagcaagtcattgatggttcttcgaggtagtgttaactgaagtgttcttcagtttgtcaagataatgttcagtgcttggcacttaaataacattttttgcaagaactccaaggcacattattgaatgcctttaaccaagtgcattctgggaagtttgcttgactcattatcttgcttttctgcagcattctgtgatttgagtcatccatgaatccatgaataaaagttacattctttgattggtaatattgccatttataacaagactcactaatgagggtatcactttgactgactgatttgttaaagtttttaagcctctcattttcctaacccagaaatcacagcctgattttattaaaagtagagcttcattcatttcataccatagataccatcctagtaaatccagaacatatacaaggttcatgtgagtctgctttcttgacatgatagcattgtttgatgcagtggatatgtcagaatgactaacctaggagtttaaaactcctaagaaactaaaacctgtaagacatttaaaagtctccacaattttaatgtatacaaagctatgttactgtgtaacacattacagttcaaattcactccagaaataaaaggccagtaggattagggactcactggtagtttggagtctcccagcacacatccctcctagtgggatgatctattcacatatctcccagcttttttatttttgcttctgtatatcacagtgagtggatggcccttcagctttttctctcctggccagacatgcagtcttgcctttagatatcgcagagacaaaattcacagcatgtcttaaatcttccaggatttgcaagaaccaaattgctcaacagtatgtatgtttagaggggttagactcctttttaaaatctggatatctaaccacctacttaaatctgtttgatagtgtcaaaccacccccacccttgatcctcccacccccaagaaaaagaaaagatgctcctgttaaatgaaggctctttaggggtaggtgctaggtatactcttggctagattgattcagctcagaattttgactttttaaagctaagtccttgtagtcacatggttgacttgaaggatgaggtggtgtgtgcatttatgagcttttcctacccccctgaagaaacttcattggcctcctggttactcaccttgaagagagtaccatccattttagtgaaaaacacatctgtcacctaggacatgacatggttgcagttgacaggaaaaaaaaaatctcatttagttgttttagagttggtggcattcagaatagtccctcttgagaaagaattgtaaccagattccctttaaaaatgagttcccctccctttccccccaaaggactcatcctgaagcagaaggtgtggggggaaggagaaatgtaaaggcttttactttgcataaggatgggggactggggaaaaaggtgaagcgaagcccaaggacaccatgctaagggcaaaagtaagagacagtctcagaactgagagaattgtgtcttctgctttttgaagtagactgtcacactcaggcagcctgtcaatgctgaatgttaggacttctgtctccgctggagacacggcctggtgcaagtcagcgtttagtgtttgacagctttctcagcactccctgactccgtttacctttactccgcatcccattctcttactgcctatctgaaggattggatgggcagagtataggtggcggtggttggtcctccccgtatgttgtccatttaattccagagcactgatttttccgaagtgtgctctgccctgggaaaatggacacatgttcctcacaatgggaataactaattacttcttttcttacagaaaaagttggtgattcaaggaaagcacattgcaatgcattatagcaatcccagacctaagtttgaagattggctttgtaacaagtgctgccttaacaatttcaggaaaagactaaaatgcttccgatgtggagcagacaagtttgactctgaacaggaagtgcctcctggaaccacagagtcggttcagtctgtggattactactgtgatacgatcattcttcggaacatagctccgcacactgtggtggattccatcatgacagcactgtctccttacgcgtctttagctgtcaataacatccgcctcataaaagacaaacagacccagcagaacagaggcttcgcatttgtgcagctgtcctctgcaatggatgcttctcagctgcttcagatattacagagtctccatcctcctttgaaaattgatggcaaaactattggggttgattttgcaaaaagtgccagaaaagacttggtcctctcagatggtaaccgcgtcagcgccttctctgtagctagtacggctattgctgctgctcagtggtcatccacccagtctcaaagtggtgaaggaggcagtgttgactacagttatctgcaaccaggtcaagatggctatgcccaatatgctcagtattcacaggattatcagcagttttatcaacaacaagctggaggattggaatctgatgcatcatctgcatcaggcacagcagtgaccaccacctcagcggctgtagtgtcccagagtcctcagctgtataatcaaacctccaatccacctggctctccgactgaggaagcacagcctagcactagcacaagtacacaggccccagccgcttcccctactggtgtagttcctggtaccaaatatgcagtacctgacacgtccacttaccagtatgatgaatcttcaggatattactatgatccgacaacagggctctattatgaccccaactcgcaatactactataattccttgacccagcagtacctttactgggatggggaaaaagagacctacgtgccagctgcagagtctagctcccaccagcagtcgggcctgcctcctgcaaaagaggggaaagagaagaaggagaaacccaagagcaaaacagcccagcagattgccaaagacatggaacgctgggctaagagtttgaataagcagaaagaaaactttaaaaatagctttcagcctgtcaattccttgagggaagaagaaaggagagaatctgctgcagcagacgctggctttgctctctttgagaagaagggagccttagctgaaaggcagcagctcatcccagaattggtgcgaaatggagatgaggagaatcccctcaaaaggggtctggttgctgcttacagtggtgacagtgacaatgaggaggagctggtggagagacttgagagtgaggaagagaagctagctgactggaagaagatggcctgtctgctctgccggcgccagttcccgaacaaagatgccctagtcaggcaccagcaactctcagaccttcacaagcaaaacatggacatctaccgacgatccaggcttgggacgaaagtgtcaaggcattacggctcccattgaggctcaagttcggctaaagggagctggcctaggagccaaaggcagcgcatatggtttgtcgagggcttgtgaacagaccggagaggacagtggattgtttatactccagtgtacatagtgtaatgtagcgtgtttacatgtgtagcctatgttgtggtccatcagcccctcacattcctaggggtttgagatgctgtaggtggtatgtgacaccaaagccacctctgtcatttgttgtgatgtcttttcttggcaaaagccttgtgtatatttgtatattacacatttgtacagaattttggaagattttcagtctagttgccaaatctggctcctttacaaaagaaataccttgagaaaaaaaaaaaaaaaaaaaagaaacaaaaaaagaacgacagaagaaaaaacagaaacaaacgcacgaacaaggcaaacacagcacaagaaaacaaggggggggcggggggggacgaaaagaatccccccggggggggcgcccacaatgggcggcccccagcttattgtggaagaaaaggggcggcccatagggggg

SEQ ID NO: 328189 - DNA, 5491 bp, Homo sapiens
tgtgggtaggagacggccgtcggcggaggcgccattttgtgtagccgccgaaccttgttggaggttctggggcgcagaaccgctactgctgcttcggtctctccttgggaaaaaataaaatttgaaccttttggagctgtgtgctaaatcttcagtgggacaatgggttcagacaaaagagtgagtagaacagagcgtagtggaagatacggttccatcatagacagggatgaccgtgatgagcgtgaatcccgaagcaggcggagggactcagattacaaaagatctagtgatgatcggaggggtgatagatatgatgactaccgagactatgacagtccagagagagagcgtgaaagaaggaacagtgaccgatccgaagatggctaccattcagatggtgactatggtgagcacgactataggcatgacatcagtgacgagagggagagcaagaccatcatgctgcgcggccttcccatcaccatcacagagagcgatattcgagaaatgatggagtccttcgaaggccctcagcctgcggatgtgaggctgatgaagaggaaaacaggtgagagcttgcttagttcctgatattattgttctcttccccattcccacctcagtccctaaagaacatcctgattcccccagtcttcaagcacatgaattcagaatgaaaggtttgccatggctaaggaatgtgactctttgaaaaccatgttagcatctgaggaacttttttaaactttgttttagggacttttttttccttaggtaagtaatgatttataaactcctttttttttttgactatagtcggttgcatggttactttaagcgtggaatcaaatggagtggcatttagttcaggcggcttgttccttgccatggcaaagtatcaagaagatccccaagtcaagtcacatttgtaaagctgcttcccaattggctttgtcacgcagtgttgaagcagtgggagagagattcacctgttataaaggaactgactaacacaagtatcccgtctatatctgaatgctgtctctaggtgtaagccgtggtttcgccttcgtggagttttatcacttgcaagatgctaccagctggatggaagccaatcaggttgcttcactcaccaagtctagatattcatgaaaatggaacaagtctgtacaattttaaaaaaaggttgaaggagtggtttgttccaaaggagtgacttttttttaaaaaaaaagctttgtatatattaaaattgatgttactagaataagtacagtaccaaggacttcattatagaatttgttctgcctttaaacatggctacctacctggcagggctttgttaactactgaatacctgtctggtaatcactaaaacatcttaatgtttcccttttttctagtttgttatattcctattatgtccattgagagtaagcttagtatatcaaactctccatttgacagtgaagagaacatagtgaaagtctgtggcggcatttttataagtaattccttatttctgcctgaagaccacaaagcctcctggaggcgtaactgctcagaccggtcttcagggaatatttaaggacttagtggaatttatgaacaataagtctgatgagattagcctgggagtggtgtcctgcagctgtctaatctagagtggcattaacattctaatctccttgagaatgccttttatagtctgttcaaagcaagtcattgatggttcttcgaggtagtgttaactgaagtgttcttcagtttgtcaagataatgttcagtgcttggcacttaaataacattttttgcaagaactccaaggcacattattgaatgcctttaaccaagtgcattctgggaagtttgcttgactcattatcttgcttttctgcagcattctgtgatttgagtcatccatgaatccatgaataaaagttacattctttgattggtaatattgccatttataacaagactcactaatgagggtatcactttgactgactgatttgttaaagtttttaagcctctcattttcctaacccagaaatcacagcctgattttattaaaagtagagcttcattcatttcataccatagataccatcctagtaaatccagaacatatacaaggttcatgtgagtctgctttcttgacatgatagcattgtttgatgcagtggatatgtcagaatgactaacctaggagtttaaaactcctaagaaactaaaacctgtaagacatttaaaagtctccacaattttaatgtatacaaagctatgttactgtgtaacacattacagttcaaattcactccagaaataaaaggccagtaggattagggactcactggtagtttggagtctcccagcacacatccctcctagtgggatgatctattcacatatctcccagcttttttatttttgcttctgtatatcacagtgagtggatggcccttcagctttttctctcctggccagacatgcagtcttgcctttagatatcgcagagacaaaattcacagcatgtcttaaatcttccaggatttgcaagaaccaaattgctcaacagtatgtatgtttagaggggttagactcctttttaaaatctggatatctaaccacctacttaaatctgtttgatagtgtcaaaccacccccacccttgatcctcccacccccaagaaaaagaaaagatgctcctgttaaatgaaggctctttaggggtaggtgctaggtatactcttggctagattgattcagctcagaattttgactttttaaagctaagtccttgtagtcacatggttgacttgaaggatgaggtggtgtgtgcatttatgagcttttcctacccccctgaagaaacttcattggcctcctggttactcaccttgaagagagtaccatccattttagtgaaaaacacatctgtcacctaggacatgacatggttgcagttgacaggaaaaaaaaaatctcatttagttgttttagagttggtggcattcagaatagtccctcttgagaaagaattgtaaccagattccctttaaaaatgagttcccctccctttccccccaaaggactcatcctgaagcagaaggtgtggggggaaggagaaatgtaaaggcttttactttgcataaggatgggggactggggaaaaaggtgaagcgaagcccaaggacaccatgctaagggcaaaagtaagagacagtctcagaactgagagaattgtgtcttctgctttttgaagtagactgtcacactcaggcagcctgtcaatgctgaatgttaggacttctgtctccgctggagacacggcctggtgcaagtcagcgtttagtgtttgacagctttctcagcactccctgactccgtttacctttactccgcatcccattctcttactgcctatctgaaggattggatgggcagagtataggtggcggtggttggtcctccccgtatgttgtccatttaattccagagcactgatttttccgaagtgtgctctgccctgggaaaatggacacatgttcctcacaatgggaataactaattacttcttttcttacagaaaaagttggtgattcaaggaaagcacattgcaatgcattatagcaatcccagacctaagtttgaagattggctttgtaacaagtgctgccttaacaatttcaggaaaagactaaaatgcttccgatgtggagcagacaagtttgactctgaacaggaagtgcctcctggaaccacagagtcggttcagtctgtggattactactgtgatacgatcattcttcggaacatagctccgcacactgtggtggattccatcatgacagcactgtctccttacgcgtctttagctgtcaataacatccgcctcataaaagacaaacagacccagcagaacagaggcttcgcatttgtgcagctgtcctctgcaatggatgcttctcagctgcttcagatattacagagtctccatcctcctttgaaaattgatggcaaaactattggggttgattttgcaaaaagtgccagaaaagacttggtcctctcagatggtaaccgcgtcagcgccttctctgtagctagtacggctattgctgctgctcagtggtcatccacccagtctcaaagtggtgaaggaggcagtgttgactacagttatctgcaaccaggtcaagatggctatgcccaatatgctcagtattcacaggattatcagcagttttatcaacaacaagctggaggattggaatctgatgcatcatctgcatcaggcacagcagtgaccaccacctcagcggctgtagtgtcccagagtcctcagctgtataatcaaacctccaatccacctggctctccgactgaggaagcacagcctagcactagcacaagtacacaggccccagccgcttcccctactggtgtagttcctggtaccaaatatgcagtacctgacacgtccacttaccagtatgatgaatcttcaggatattactatgatccgacaacagggctctattatgaccccaactcgcaatactactataattccttgacccagcagtacctttactgggatggggaaaaagagacctacgtgccagctgcagagtctagctcccaccagcagtcgggcctgcctcctgcaaaagaggggaaagagaagaaggagaaacccaagagcaaaacagcccagcagattgccaaagacatggaacgctgggctaagagtttgaataagcagaaagaaaactttaaaaatagctttcagcctgtcaattccttgagggaagaagaaaggagagaatctgctgcagcagacgctggctttgctctctttgagaagaagggagccttagctgaaaggcagcagctcatcccagaattggtgcgaaatggagatgaggagaatcccctcaaaaggggtctggttgctgcttacagtggtgacagtgacaatgaggagagggcttgtgaacagaccggagaggacagtggattgtttatactccagtgtacatagtgtaatgtagcgtgtttacatgtgtagcctatgttgtggtccatcagcccctcacattcctaggggtttgagatgctgtaggtggtatgtgacaccaaagccacctctgtcatttgttgtgatgtcttttcttggcaaaagccttgtgtatatttgtatattacacatttgtacagaattttggaagattttcagtctagttgccaaatctggctcctttacaaaagaaataccttgagaaaaaaaaaaaaaaaaaaaagaaacaaaaaaagaacgacagaagaaaaaacagaaacaaacgcacgaacaaggcaaacacagcacaagaaaacaaggggggggcggggggggacgaaaagaatccccccggggggggcgcccacaatgggcggcccccagcttattgtggaagaaaaggggcggcccatagggggg

SEQ ID NO: 328190 - DNA, 5248 bp, Homo sapiens
tgtgggtaggagacggccgtcggcggaggcgccattttgtgtagccgccgaaccttgttggaggttctggggcgcagaaccgctactgctgcttcggtctctccttgggaaaaaataaaatttgaaccttttggagctgtgtgctaaatcttcagtgggacaatgggttcagacaaaagagtgagtagaacagagcgtagtggaagatacggttccatcatagacagggatgaccgtgatgagcgtgaatcccgaagcaggcggagggactcagattacaaaagatctagtgatgatcggaggggtgatagatatgatgactaccgagactatgacagtccagagagagagcgtgaaagaaggaacagtgaccgatccgaagatggctaccattcagatggtgactatggtgagcacgactataggcatgacatcagtgacgagagggagagcaagaccatcatgctgcgcggccttcccatcaccatcacagagagcgatattcgagaaatgatggagtccttcgaaggccctcagcctgcggatgtgaggctgatgaagaggaaaacaggtgagagcttgcttagttcctgatattattgttctcttccccattcccacctcagtccctaaagaacatcctgattcccccagtcttcaagcacatgaattcagaatgaaaggtttgccatggctaaggaatgtgactctttgaaaaccatgttagcatctgaggaacttttttaaactttgttttagggacttttttttccttaggtaagtaatgatttataaactcctttttttttttgactatagtcggttgcatggttactttaagcgtggaatcaaatggagtggcatttagttcaggcggcttgttccttgccatggcaaagtatcaagaagatccccaagtcaagtcacatttgtaaagctgcttcccaattggctttgtcacgcagtgttgaagcagtgggagagagattcacctgttataaaggaactgactaacacaagtatcccgtctatatctgaatgctgtctctaggtgtaagccgtggtttcgccttcgtggagttttatcacttgcaagatgctaccagctggatggaagccaatcaggttgcttcactcaccaagtctagatattcatgaaaatggaacaagtctgtacaattttaaaaaaaggttgaaggagtggtttgttccaaaggagtgacttttttttaaaaaaaaagctttgtatatattaaaattgatgttactagaataagtacagtaccaaggacttcattatagaatttgttctgcctttaaacatggctacctacctggcagggctttgttaactactgaatacctgtctggtaatcactaaaacatcttaatgtttcccttttttctagtttgttatattcctattatgtccattgagagtaagcttagtatatcaaactctccatttgacagtgaagagaacatagtgaaagtctgtggcggcatttttataagtaattccttatttctgcctgaagaccacaaagcctcctggaggcgtaactgctcagaccggtcttcagggaatatttaaggacttagtggaatttatgaacaataagtctgatgagattagcctgggagtggtgtcctgcagctgtctaatctagagtggcattaacattctaatctccttgagaatgccttttatagtctgttcaaagcaagtcattgatggttcttcgaggtagtgttaactgaagtgttcttcagtttgtcaagataatgttcagtgcttggcacttaaataacattttttgcaagaactccaaggcacattattgaatgcctttaaccaagtgcattctgggaagtttgcttgactcattatcttgcttttctgcagcattctgtgatttgagtcatccatgaatccatgaataaaagttacattctttgattggtaatattgccatttataacaagactcactaatgagggtatcactttgactgactgatttgttaaagtttttaagcctctcattttcctaacccagaaatcacagcctgattttattaaaagtagagcttcattcatttcataccatagataccatcctagtaaatccagaacatatacaaggttcatgtgagtctgctttcttgacatgatagcattgtttgatgcagtggatatgtcagaatgactaacctaggagtttaaaactcctaagaaactaaaacctgtaagacatttaaaagtctccacaattttaatgtatacaaagctatgttactgtgtaacacattacagttcaaattcactccagaaataaaaggccagtaggattagggactcactggtagtttggagtctcccagcacacatccctcctagtgggatgatctattcacatatctcccagcttttttatttttgcttctgtatatcacagtgagtggatggcccttcagctttttctctcctggccagacatgcagtcttgcctttagatatcgcagagacaaaattcacagcatgtcttaaatcttccaggatttgcaagaaccaaattgctcaacagtatgtatgtttagaggggttagactcctttttaaaatctggatatctaaccacctacttaaatctgtttgatagtgtcaaaccacccccacccttgatcctcccacccccaagaaaaagaaaagatgctcctgttaaatgaaggctctttaggggtaggtgctaggtatactcttggctagattgattcagctcagaattttgactttttaaagctaagtccttgtagtcacatggttgacttgaaggatgaggtggtgtgtgcatttatgagcttttcctacccccctgaagaaacttcattggcctcctggttactcaccttgaagagagtaccatccattttagtgaaaaacacatctgtcacctaggacatgacatggttgcagttgacaggaaaaaaaaaatctcatttagttgttttagagttggtggcattcagaatagtccctcttgagaaagaattgtaaccagattccctttaaaaatgagttcccctccctttccccccaaaggactcatcctgaagcagaaggtgtggggggaaggagaaatgtaaaggcttttactttgcataaggatgggggactggggaaaaaggtgaagcgaagcccaaggacaccatgctaagggcaaaagtaagagacagtctcagaactgagagaattgtgtcttctgctttttgaagtagactgtcacactcaggcagcctgtcaatgctgaatgttaggacttctgtctccgctggagacacggcctggtgcaagtcagcgtttagtgtttgacagctttctcagcactccctgactccgtttacctttactccgcatcccattctcttactgcctatctgaaggattggatgggcagagtataggtggcggtggttggtcctccccgtatgttgtccatttaattccagagcactgatttttccgaagtgtgctctgccctgggaaaatggacacatgttcctcacaatgggaataactaattacttcttttcttacagaaaaagttggtgattcaaggaaagcacattgcaatgcattatagcaatcccagacctaagtttgaagattggctttgtaacaagtgctgccttaacaatttcaggaaaagactaaaatgcttccgatgtggagcagacaagtttgactctgaacaggaagtgcctcctggaaccacagagtcggttcagtctgtggattactactgtgatacgatcattcttcggaacatagctccgcacactgtggtggattccatcatgacagcactgtctccttacgcgtctttagctgtcaataacatccgcctcataaaagacaaacagacccagcagaacagaggcttcgcatttgtgcagctgtcctctgcaatggatgcttctcagctgcttcagatattacagagtctccatcctcctttgaaaattgatggcaaaactattggggttgattttgcaaaaagtgccagaaaagacttggtcctctcagatggtaaccgcgtcagcgccttctctgtagctagtacggctattgctgctgctcagtggtcatccacccagtctcaaagtggtgaaggaggcagtgttgactacagttatctgcaaccaggtcaagatggctatgcccaatatgctcagtattcacaggattatcagcagttttatcaacaacaagctggaggattggaatctgatgcatcatctgcatcaggcacagcagtgaccaccacctcagcggctgtagtgtcccagagtcctcagctgtataatcaaacctccaatccacctggctctccgactgaggaagcacagcctagcactagcacaagtacacaggccccagccgcttcccctactggtgtagttcctggtaccaaatatgcagtacctgacacgtccacttaccagtatgatgaatcttcaggatattactatgatccgacaacagggctctattatgaccccaactcgcaatactactataattccttgacccagcagtacctttactgggatggggaaaaagagacctacgtgccagctgcagagtctagctcccaccagcagtcgggcctgcctcctgcaaaagaggggaaagagaagaaggagaaacccaagagcaaaacagcccagcagattgccaaagacatggaacgctgggctaagagtttgaataagcagaaagaaaactttaaaaatagctttcagcctgtcaattccttgagggaagaagaaaggagagaatctgctgcagcagacgctggctttgctctctttgagaagaagggagccttagctgaaaggcagcagctcatcccagaattggtgcgaaatggagatgaggagaatcccctcaaaaggggtctggttgctgcttacagtggtgacagtgacaatgaggaggagctggtggagagacttgagagtgaggaagagaagctagctgactggaagaagatggcctgtctgctctgccggcgccagttcccgaacaaagatgccctagtcaggcaccagcaactctcagaccttcacaagcaaaacatggacatctaccgacgatccaggctgagcgagcaggagctggaagccttggagctaagggagagagagataccgagaaccgctactgctgcttcggtctctccttgg

SEQ ID NO: 328191 - DNA, 1611 bp, Homo sapiens
gccgaggagggtagattgcctgagcccagaagtttgagaccagcctgggcaacacggtgaaaccccgtctctactaaaatacaaaatattaactggacgtggcagcgtgtgcctgtaatcccagctagtcaggaagctgaggcaggagaattgctagaacctggcaggaggaggttgcagtgagccgagatcacgccactgcactccagcctgggcaacagcgactctgtctcaaaaaaaaaaaaaaatttagtagggttttcacccatgataagaaatctttaaattgatcagagcccacattgaggcatcatatcccaggatcggaggcccctacccactggccttctaggcaggagctccacccgtaattgcccctgctctgtcctgggagcacagcttaggtcagactcttgtagaccatgttcatcctgtttatgtgagttctgctgacattgagctatcctgtataatgtgtgcctgtaattaccagacctttcccagaccttcagaggaatactttggggccctttcctaggcgtggatgcttgctgagcaggcattgaggggtgggtgatttgcttcatctgcctgtgttccgtagcccattttattcctccagtccttatacttgctcctggtctcttctggagaaatccttgtcttcatatacagttttctctcttctgtctcctggtgggtggtcctgctgggtaaggagtgggcatggtgagaggtggagcagcccataccctacctcccagctgacagtctctgtgctttcccaggctcaagttcggctaaagggagctggcctaggagccaaaggcagcgcatatggtttgtcgggcgccgattcctacaaagatgctgtccggaaagccatgtttgcccggttcactgagatggagtgagagagagagagagagagagatgacaaggagcacaagaagtggtccatctcccgaattcgctgttaccgcctgtctctttaagggcatgccttgtgctgttaatagatcttagggtgaaccacttcattctgcagggttctccctcccaccttaaagaagttccccttatgtgggttgcctggtgaatggccttccttcccgccagagggcttgtgaacagaccggagaggacagtggattgtttatactccagtgtacatagtgtaatgtagcgtgtttacatgtgtagcctatgttgtggtccatcagcccctcacattcctaggggtttgagatgctgtaggtggtatgtgacaccaaagccacctctgtcatttgttgtgatgtcttttcttggcaaaagccttgtgtatatttgtatattacacatttgtacagaattttggaagattttcagtctagttgccaaatctggctcctttacaaaagaaataccttgagaaaaaaaaaaaaaaaaaaaagaaacaaaaaaagaacgacagaagaaaaaacagaaacaaacgcacgaacaaggcaaacacagcacaagaaaacaaggggggggcggggggggacgaaaagaatccccccggggggggcgcccacaatgggcggcccccagcttattgtggaagaaaaggggcggcccatagggggg

SEQ ID NO: 328192 - DNA, 5446 bp, Homo sapiens
tgtgggtaggagacggccgtcggcggaggcgccattttgtgtagccgccgaaccttgttggaggttctggggcgcagaaccgctactgctgcttcggtctctccttgggaaaaaataaaatttgaaccttttggagctgtgtgctaaatcttcagtgggacaatgggttcagacaaaagagtgagtagaacagagcgtagtggaagatacggttccatcatagacagggatgaccgtgatgagcgtgaatcccgaagcaggcggagggactcagattacaaaagatctagtgatgatcggaggggtgatagatatgatgactaccgagactatgacagtccagagagagagcgtgaaagaaggaacagtgaccgatccgaagatggctaccattcagatggtgactatggtgagcacgactataggcatgacatcagtgacgagagggagagcaagaccatcatgctgcgcggccttcccatcaccatcacagagagcgatattcgagaaatgatggagtccttcgaaggccctcagcctgcggatgtgaggctgatgaagaggaaaacaggtgagagcttgcttagttcctgatattattgttctcttccccattcccacctcagtccctaaagaacatcctgattcccccagtcttcaagcacatgaattcagaatgaaaggtttgccatggctaaggaatgtgactctttgaaaaccatgttagcatctgaggaacttttttaaactttgttttagggacttttttttccttaggtaagtaatgatttataaactcctttttttttttgactatagtcggttgcatggttactttaagcgtggaatcaaatggagtggcatttagttcaggcggcttgttccttgccatggcaaagtatcaagaagatccccaagtcaagtcacatttgtaaagctgcttcccaattggctttgtcacgcagtgttgaagcagtgggagagagattcacctgttataaaggaactgactaacacaagtatcccgtctatatctgaatgctgtctctaggtgtaagccgtggtttcgccttcgtggagttttatcacttgcaagatgctaccagctggatggaagccaatcaggttgcttcactcaccaagtctagatattcatgaaaatggaacaagtctgtacaattttaaaaaaaggttgaaggagtggtttgttccaaaggagtgacttttttttaaaaaaaaagctttgtatatattaaaattgatgttactagaataagtacagtaccaaggacttcattatagaatttgttctgcctttaaacatggctacctacctggcagggctttgttaactactgaatacctgtctggtaatcactaaaacatcttaatgtttcccttttttctagtttgttatattcctattatgtccattgagagtaagcttagtatatcaaactctccatttgacagtgaagagaacatagtgaaagtctgtggcggcatttttataagtaattccttatttctgcctgaagaccacaaagcctcctggaggcgtaactgctcagaccggtcttcagggaatatttaaggacttagtggaatttatgaacaataagtctgatgagattagcctgggagtggtgtcctgcagctgtctaatctagagtggcattaacattctaatctccttgagaatgccttttatagtctgttcaaagcaagtcattgatggttcttcgaggtagtgttaactgaagtgttcttcagtttgtcaagataatgttcagtgcttggcacttaaataacattttttgcaagaactccaaggcacattattgaatgcctttaaccaagtgcattctgggaagtttgcttgactcattatcttgcttttctgcagcattctgtgatttgagtcatccatgaatccatgaataaaagttacattctttgattggtaatattgccatttataacaagactcactaatgagggtatcactttgactgactgatttgttaaagtttttaagcctctcattttcctaacccagaaatcacagcctgattttattaaaagtagagcttcattcatttcataccatagataccatcctagtaaatccagaacatatacaaggttcatgtgagtctgctttcttgacatgatagcattgtttgatgcagtggatatgtcagaatgactaacctaggagtttaaaactcctaagaaactaaaacctgtaagacatttaaaagtctccacaattttaatgtatacaaagctatgttactgtgtaacacattacagttcaaattcactccagaaataaaaggccagtaggattagggactcactggtagtttggagtctcccagcacacatccctcctagtgggatgatctattcacatatctcccagcttttttatttttgcttctgtatatcacagtgagtggatggcccttcagctttttctctcctggccagacatgcagtcttgcctttagatatcgcagagacaaaattcacagcatgtcttaaatcttccaggatttgcaagaaccaaattgctcaacagtatgtatgtttagaggggttagactcctttttaaaatctggatatctaaccacctacttaaatctgtttgatagtgtcaaaccacccccacccttgatcctcccacccccaagaaaaagaaaagatgctcctgttaaatgaaggctctttaggggtaggtgctaggtatactcttggctagattgattcagctcagaattttgactttttaaagctaagtccttgtagtcacatggttgacttgaaggatgaggtggtgtgtgcatttatgagcttttcctacccccctgaagaaacttcattggcctcctggttactcaccttgaagagagtaccatccattttagtgaaaaacacatctgtcacctaggacatgacatggttgcagttgacaggaaaaaaaaaatctcatttagttgttttagagttggtggcattcagaatagtccctcttgagaaagaattgtaaccagattccctttaaaaatgagttcccctccctttccccccaaaggactcatcctgaagcagaaggtgtggggggaaggagaaatgtaaaggcttttactttgcataaggatgggggactggggaaaaaggtgaagcgaagcccaaggacaccatgctaagggcaaaagtaagagacagtctcagaactgagagaattgtgtcttctgctttttgaagtagactgtcacactcaggcagcctgtcaatgctgaatgttaggacttctgtctccgctggagacacggcctggtgcaagtcagcgtttagtgtttgacagctttctcagcactccctgactccgtttacctttactccgcatcccattctcttactgcctatctgaaggattggatgggcagagtataggtggcggtggttggtcctccccgtatgttgtccatttaattccagagcactgatttttccgaagtgtgctctgccctgggaaaatggacacatgttcctcacaatgggaataactaattacttcttttcttacagaaaaagttggtgattcaaggaaagcacattgcaatgcattatagcaatcccagacctaagtttgaagattggctttgtaacaagtgctgccttaacaatttcaggaaaagactaaaatgcttccgatgtggagcagacaagtttgactctgaacaggaagtgcctcctggaaccacagagtcggttcagtctgtggattactactgtgatacgatcattcttcggaacatagctccgcacactgtggtggattccatcatgacagcactgtctccttacgcgtctttagctgtcaataacatccgcctcataaaagacaaacagacccagcagaacagaggcttcgcatttgtgcagctgtcctctgcaatggatgcttctcagctgcttcagatattacagagtctccatcctcctttgaaaattgatggcaaaactattggggttgattttgcaaaaagtgccagaaaagacttggtcctctcagatggtaaccgcgtcagcgccttctctgtagctagtacggctattgctgctgctcagtggtcatccacccagtctcaaagtggtgaaggaggcagtgttgactacagttatctgcaaccaggtcaagatggctatgcccaatatgctcagtattcacaggattatcagcagttttatcaacaacaagctggaggattggaatctgatgcatcatctgcatcaggcacagcagtgaccaccacctcagcggctgtagtgtcccagagtcctcagctgtataatcaaacctccaatccacctggctctccgactgaggaagcacagcctagcactagcacaagtacacaggccccagccgcttcccctactggtgtagttcctggtaccaaatatgcagtacctgacacgtccacttaccagtatgatgaatcttcaggatattactatgatccgacaacagggctctattatgaccccaactcgcaagtaaatgtgctgctttcctcctcaatttcactagaagtagtttcgcttagtgcatttatgaggcataaaatgaaatatttcctgcaaaagaatatatgactgagattagttttaacttcttcaaagccaccaaaatgtaatttttatatggagattgtaagttttaattgtagggttaaaaaatgttttgaggtataatatacacacaaaaaaatacacaaaacagaaatgtgcaattctttgaatgtttatacatgtctatacatttgtatattacatgtgtatatacaccaccatgtgcccagccctctgttcttgacatttcatataagtggagtcagacaatagattaccttttgtgtccagcatcctttactttgcctccctgtgtattcttgagggtagaatttagcagatgtatggagtgatgttttatttttggtggcatatataacttttaaaagggaaaaacaactttaacaccccataaataactctatttatgaccgggagctgtatatatagaacagtaataagtatttttaacaggaacttggcattgataggttgtggtttctgagagattgaagtgtgaagctgtgtgtgacgtgcctaagcaggccaagcctctgcatacctcttccatccacttctctcatttgtgaagcctggccatttatttccctgtcagttctttttttttttttttttttttcccgtcagttctctttggtggccttagaagttgtgtctgtaggctgggcgcagtggctcacgcctgtaatcccagcactttgggaggccaagatgggaggatcactaggtcaggagattgagaccatcctggctaacacagtgaaaccccgtctctactaa

SEQ ID NO: 328193 - DNA, 4751 bp, Homo sapiens
tgtgggtaggagacggccgtcggcggaggcgccattttgtgtagccgccgaaccttgttggaggttctggggcgcagaaccgctactgctgcttcggtctctccttgggaaaaaataaaatttgaaccttttggagctgtgtgctaaatcttcagtgggacaatgggttcagacaaaagagtgagtagaacagagcgtagtggaagatacggttccatcatagacagggatgaccgtgatgagcgtgaatcccgaagcaggcggagggactcagattacaaaagatctagtgatgatcggaggggtgatagatatgatgactaccgagactatgacagtccagagagagagcgtgaaagaaggaacagtgaccgatccgaagatggctaccattcagatggtgactatggtgagcacgactataggcatgacatcagtgacgagagggagagcaagaccatcatgctgcgcggccttcccatcaccatcacagagagcgatattcgagaaatgatggagtccttcgaaggccctcagcctgcggatgtgaggctgatgaagaggaaaacaggtgagagcttgcttagttcctgatattattgttctcttccccattcccacctcagtccctaaagaacatcctgattcccccagtcttcaagcacatgaattcagaatgaaaggtttgccatggctaaggaatgtgactctttgaaaaccatgttagcatctgaggaacttttttaaactttgttttagggacttttttttccttaggtaagtaatgatttataaactcctttttttttttgactatagtcggttgcatggttactttaagcgtggaatcaaatggagtggcatttagttcaggcggcttgttccttgccatggcaaagtatcaagaagatccccaagtcaagtcacatttgtaaagctgcttcccaattggctttgtcacgcagtgttgaagcagtgggagagagattcacctgttataaaggaactgactaacacaagtatcccgtctatatctgaatgctgtctctaggtgtaagccgtggtttcgccttcgtggagttttatcacttgcaagatgctaccagctggatggaagccaatcaggttgcttcactcaccaagtctagatattcatgaaaatggaacaagtctgtacaattttaaaaaaaggttgaaggagtggtttgttccaaaggagtgacttttttttaaaaaaaaagctttgtatatattaaaattgatgttactagaataagtacagtaccaaggacttcattatagaatttgttctgcctttaaacatggctacctacctggcagggctttgttaactactgaatacctgtctggtaatcactaaaacatcttaatgtttcccttttttctagtttgttatattcctattatgtccattgagagtaagcttagtatatcaaactctccatttgacagtgaagagaacatagtgaaagtctgtggcggcatttttataagtaattccttatttctgcctgaagaccacaaagcctcctggaggcgtaactgctcagaccggtcttcagggaatatttaaggacttagtggaatttatgaacaataagtctgatgagattagcctgggagtggtgtcctgcagctgtctaatctagagtggcattaacattctaatctccttgagaatgccttttatagtctgttcaaagcaagtcattgatggttcttcgaggtagtgttaactgaagtgttcttcagtttgtcaagataatgttcagtgcttggcacttaaataacattttttgcaagaactccaaggcacattattgaatgcctttaaccaagtgcattctgggaagtttgcttgactcattatcttgcttttctgcagcattctgtgatttgagtcatccatgaatccatgaataaaagttacattctttgattggtaatattgccatttataacaagactcactaatgagggtatcactttgactgactgatttgttaaagtttttaagcctctcattttcctaacccagaaatcacagcctgattttattaaaagtagagcttcattcatttcataccatagataccatcctagtaaatccagaacatatacaaggttcatgtgagtctgctttcttgacatgatagcattgtttgatgcagtggatatgtcagaatgactaacctaggagtttaaaactcctaagaaactaaaacctgtaagacatttaaaagtctccacaattttaatgtatacaaagctatgttactgtgtaacacattacagttcaaattcactccagaaataaaaggccagtaggattagggactcactggtagtttggagtctcccagcacacatccctcctagtgggatgatctattcacatatctcccagcttttttatttttgcttctgtatatcacagtgagtggatggcccttcagctttttctctcctggccagacatgcagtcttgcctttagatatcgcagagacaaaattcacagcatgtcttaaatcttccaggatttgcaagaaccaaattgctcaacagtatgtatgtttagaggggttagactcctttttaaaatctggatatctaaccacctacttaaatctgtttgatagtgtcaaaccacccccacccttgatcctcccacccccaagaaaaagaaaagatgctcctgttaaatgaaggctctttaggggtaggtgctaggtatactcttggctagattgattcagctcagaattttgactttttaaagctaagtccttgtagtcacatggttgacttgaaggatgaggtggtgtgtgcatttatgagcttttcctacccccctgaagaaacttcattggcctcctggttactcaccttgaagagagtaccatccattttagtgaaaaacacatctgtcacctaggacatgacatggttgcagttgacaggaaaaaaaaaatctcatttagttgttttagagttggtggcattcagaatagtccctcttgagaaagaattgtaaccagattccctttaaaaatgagttcccctccctttccccccaaaggactcatcctgaagcagaaggtgtggggggaaggagaaatgtaaaggcttttactttgcataaggatgggggactggggaaaaaggtgaagcgaagcccaaggacaccatgctaagggcaaaagtaagagacagtctcagaactgagagaattgtgtcttctgctttttgaagtagactgtcacactcaggcagcctgtcaatgctgaatgttaggacttctgtctccgctggagacacggcctggtgcaagtcagcgtttagtgtttgacagctttctcagcactccctgactccgtttacctttactccgcatcccattctcttactgcctatctgaaggattggatgggcagagtataggtggcggtggttggtcctccccgtatgttgtccatttaattccagagcactgatttttccgaagtgtgctctgccctgggaaaatggacacatgttcctcacaatgggaataactaattacttcttttcttacagaaaaagttggtgattcaaggaaagcacattgcaatgcattatagcaatcccagacctaagtttgaagattggctttgtaacaagtgctgccttaacaatttcaggaaaagactaaaatgcttccgatgtggagcagacaagtttggtaagactggattcagctgtttgcaatatgcattaaaacctactaactggggcagggagcagtggctcactgtaatcccaccactttgcaaggccaaggtgggaagatcacttgaggacaggagttcaataccagcctggcaagagatagcaagaccctgcctgtacaaaaaaagaaattttaaattatctgggtgtggtggcacacacctgtagtcctagctactcaggaggtttaggtgagaggattgcttgagtccaggagttgaaggctgcagtgagctatggtcataccactgcactccagcctgggcaacaaacaagaccctgcctctcaaaaaaaaacaaaacaaaaatctgacaaatagggttgttaactgtgagcctgaggaaaagtatagattttagtgtacttaaacaacttgtctgttttctttaaatcttttcccttaggttagataatgctgctcatgattgtgagagcacagaaagttcttttgttttctagaattaagtctgctcacctggtttgcattctgcatctgcctttctttagtgcagggtagtgtcagtcccactgtggcccaaagtttgcattctgcgttaaccaagtcacaattaatgaggttttactataggcacaaatgcttaaaaaagaaaaaaacgattgttttgtgtggttaaaataaaaacttgtggggattttaatgtatttctttggtgaaaatacattagttgtttgtctctaattggatcactttcccttctagactctgaacaggaagtgcctcctggaaccacagagtcggttcagtctgtggattactactgtgatagtaagttcatacacgatcttttggtcttcatgttaaaaattgacctcagttgtcaggagatggagaccatcctggctaacacggtgaaaccctgtctctactaaaaatacaaaaaattagctgggtgtggtggcacacacctgtaatcccagctactccgtctcaaaaaaaaa

SEQ ID NO: 328194 - DNA, 3715 bp, Homo sapiens
tgtgggtaggagacggccgtcggcggaggcgccattttgtgtagccgccgaaccttgttggaggttctggggcgcagaaccgctactgctgcttcggtctctccttgggaaaaaataaaatttgaaccttttggagctgtgtgctaaatcttcagtgggacaatgggttcagacaaaagagtgagtagaacagagcgtagtggaagatacggttccatcatagacagggatgaccgtgatgagcgtgaatcccgaagcaggcggagggactcagattacaaaagatctagtgatgatcggaggggtgatagatatgatgactaccgagactatgacagtccagagagagagcgtgaaagaaggaacagtgaccgatccgaagatggctaccattcagatggtgactatggtgagcacgactataggcatgacatcagtgacgagagggagagcaagaccatcatgctgcgcggccttcccatcaccatcacagagagcgatattcgagaaatgatggagtccttcgaaggccctcagcctgcggatgtgaggctgatgaagaggaaaacaggtgagagcttgcttagttcctgatattattgttctcttccccattcccacctcagtccctaaagaacatcctgattcccccagtcttcaagcacatgaattcagaatgaaaggtttgccatggctaaggaatgtgactctttgaaaaccatgttagcatctgaggaacttttttaaactttgttttagggacttttttttccttaggtaagtaatgatttataaactcctttttttttttgactatagtcggttgcatggttactttaagcgtggaatcaaatggagtggcatttagttcaggcggcttgttccttgccatggcaaagtatcaagaagatccccaagtcaagtcacatttgtaaagctgcttcccaattggctttgtcacgcagtgttgaagcagtgggagagagattcacctgttataaaggaactgactaacacaagtatcccgtctatatctgaatgctgtctctaggtgtaagccgtggtttcgccttcgtggagttttatcacttgcaagatgctaccagctggatggaagccaatcaggttgcttcactcaccaagtctagatattcatgaaaatggaacaagtctgtacaattttaaaaaaaggttgaaggagtggtttgttccaaaggagtgacttttttttaaaaaaaaagctttgtatatattaaaattgatgttactagaataagtacagtaccaaggacttcattatagaatttgttctgcctttaaacatggctacctacctggcagggctttgttaactactgaatacctgtctggtaatcactaaaacatcttaatgtttcccttttttctagtttgttatattcctattatgtccattgagagtaagcttagtatatcaaactctccatttgacagtgaagagaacatagtgaaagtctgtggcggcatttttataagtaattccttatttctgcctgaagaccacaaagcctcctggaggcgtaactgctcagaccggtcttcagggaatatttaaggacttagtggaatttatgaacaataagtctgatgagattagcctgggagtggtgtcctgcagctgtctaatctagagtggcattaacattctaatctccttgagaatgccttttatagtctgttcaaagcaagtcattgatggttcttcgaggtagtgttaactgaagtgttcttcagtttgtcaagataatgttcagtgcttggcacttaaataacattttttgcaagaactccaaggcacattattgaatgcctttaaccaagtgcattctgggaagtttgcttgactcattatcttgcttttctgcagcattctgtgatttgagtcatccatgaatccatgaataaaagttacattctttgattggtaatattgccatttataacaagactcactaatgagggtatcactttgactgactgatttgttaaagtttttaagcctctcattttcctaacccagaaatcacagcctgattttattaaaagtagagcttcattcatttcataccatagataccatcctagtaaatccagaacatatacaaggttcatgtgagtctgctttcttgacatgatagcattgtttgatgcagtggatatgtcagaatgactaacctaggagtttaaaactcctaagaaactaaaacctgtaagacatttaaaagtctccacaattttaatgtatacaaagctatgttactgtgtaacacattacagttcaaattcactccagaaataaaaggccagtaggattagggactcactggtagtttggagtctcccagcacacatccctcctagtgggatgatctattcacatatctcccagcttttttatttttgcttctgtatatcacagtgagtggatggcccttcagctttttctctcctggccagacatgcagtcttgcctttagatatcgcagagacaaaattcacagcatgtcttaaatcttccaggatttgcaagaaccaaattgctcaacagtatgtatgtttagaggggttagactcctttttaaaatctggatatctaaccacctacttaaatctgtttgatagtgtcaaaccacccccacccttgatcctcccacccccaagaaaaagaaaagatgctcctgttaaatgaaggctctttaggggtaggtgctaggtatactcttggctagattgattcagctcagaattttgactttttaaagctaagtccttgtagtcacatggttgacttgaaggatgaggtggtgtgtgcatttatgagcttttcctacccccctgaagaaacttcattggcctcctggttactcaccttgaagagagtaccatccattttagtgaaaaacacatctgtcacctaggacatgacatggttgcagttgacaggaaaaaaaaaatctcatttagttgttttagagttggtggcattcagaatagtccctcttgagaaagaattgtaaccagattccctttaaaaatgagttcccctccctttccccccaaaggactcatcctgaagcagaaggtgtggggggaaggagaaatgtaaaggcttttactttgcataaggatgggggactggggaaaaaggtgaagcgaagcccaaggacaccatgctaagggcaaaagtaagagacagtctcagaactgagagaattgtgtcttctgctttttgaagtagactgtcacactcaggcagcctgtcaatgctgaatgttaggacttctgtctccgctggagacacggcctggtgcaagtcagcgtttagtgtttgacagctttctcagcactccctgactccgtttacctttactccgcatcccattctcttactgcctatctgaaggattggatgggcagagtataggtggcggtggttggtcctccccgtatgttgtccatttaattccagagcactgatttttccgaagtgtgctctgccctgggaaaatggacacatgttcctcacaatgggaataactaattacttcttttcttacagaaaaagttggtgattcaaggaaagcacattgcaatgcattatagcaatcccagacctaagtttgaagattggctttgtaacaaggtaagcatatgttcttcccaaatagacaaaact

SEQ ID NO: 328195 - DNA, 2856 bp, Homo sapiens
tgtgggtaggagacggccgtcggcggaggcgccattttgtgtagccgccgaaccttgttggaggttctggggcgcagaaccgctactgctgcttcggtctctccttgggaaaaaataaaatttgaaccttttggagctgtgtgctaaatcttcagtgggacaatgggttcagacaaaagagtgagtagaacagagcgtagtggaagatacggttccatcatagacagggatgaccgtgatgagcgtgaatcccgaagcaggcggagggactcagattacaaaagatctagtgatgatcggaggggtgatagatatgatgactaccgagactatgacagtccagagagagagcgtgaaagaaggaacagtgaccgatccgaagatggctaccattcagatggtgactatggtgagcacgactataggcatgacatcagtgacgagagggagagcaagaccatcatgctgcgcggccttcccatcaccatcacagagagcgatattcgagaaatgatggagtccttcgaaggccctcagcctgcggatgtgaggctgatgaagaggaaaacaggtgagagcttgcttagttcctgatattattgttctcttccccattcccacctcagtccctaaagaacatcctgattcccccagtcttcaagcacatgaattcagaatgaaaggtttgccatggctaaggaatgtgactctttgaaaaccatgttagcatctgaggaacttttttaaactttgttttagggacttttttttccttaggtaagtaatgatttataaactcctttttttttttgactatagtcggttgcatggttactttaagcgtggaatcaaatggagtggcatttagttcaggcggcttgttccttgccatggcaaagtatcaagaagatccccaagtcaagtcacatttgtaaagctgcttcccaattggctttgtcacgcagtgttgaagcagtgggagagagattcacctgttataaaggaactgactaacacaagtatcccgtctatatctgaatgctgtctctaggtgtaagccgtggtttcgccttcgtggagttttatcacttgcaagatgctaccagctggatggaagccaatcaggttgcttcactcaccaagtctagatattcatgaaaatggaacaagtctgtacaattttaaaaaaaggttgaaggagtggtttgttccaaaggagtgacttttttttaaaaaaaaagctttgtatatattaaaattgatgttactagaataagtacagtaccaaggacttcattatagaatttgttctgcctttaaacatggctacctacctggcagggctttgttaactactgaatacctgtctggtaatcactaaaacatcttaatgtttcccttttttctagtttgttatattcctattatgtccattgagagtaagcttagtatatcaaactctccatttgacagtgaagagaacatagtgaaagtctgtggcggcatttttataagtaattccttatttctgcctgaagaccacaaagcctcctggaggcgtaactgctcagaccggtcttcagggaatatttaaggacttagtggaatttatgaacaataagtctgatgagattagcctgggagtggtgtcctgcagctgtctaatctagagtggcattaacattctaatctccttgagaatgccttttatagtctgttcaaagcaagtcattgatggttcttcgaggtagtgttaactgaagtgttcttcagtttgtcaagataatgttcagtgcttggcacttaaataacattttttgcaagaactccaaggcacattattgaatgcctttaaccaagtgcattctgggaagtttgcttgactcattatcttgcttttctgcagcattctgtgatttgagtcatccatgaatccatgaataaaagttacattctttgattggtaatattgccatttataacaagactcactaatgagggtatcactttgactgactgatttgttaaagtttttaagcctctcattttcctaacccagaaatcacagcctgattttattaaaagtagagcttcattcatttcataccatagataccatcctagtaaatccagaacatatacaaggttcatgtgagtctgctttcttgacatgatagcattgtttgatgcagtggatatgtcagaatgactaacctaggagtttaaaactcctaagaaactaaaacctgtaagacatttaaaagtctccacaattttaatgtatacaaagctatgttactgtgtaacacattacagttcaaattcactccagaaataaaaggccagtaggattagggactcactggtagtttggagtctcccagcacacatccctcctagtgggatgatctattcacatatctcccagcttttttatttttgcttctgtatatcacagtgagtggatggcccttcagctttttctctcctggccagacatgcagtcttgcctttagatatcgcagagacaaaattcacagcatgtcttaaatcttccaggatttgcaagaaccaaattgctcaacagtatgtatgtttagaggggttagactcctttttaaaatctggatatctaaccacctacttaaatctgtttgatagtgtcaaaccacccccacccttgatcctcccacccccaagaaaaagaaaagatgctcctgttaaatgaaggctctttaggggtaggtgctaggtatactcttggctagattgattcagctcagaattttgactttttaaagctaagtccttgtagtcacatggttgacttgaaggacttagctttaaaaaaaaaaa

SEQ ID NO: 328196 - DNA, 644 bp, Homo sapiens
tgtgggtaggagacggccgtcggcggaggcgccattttgtgtagccgccgaaccttgttggaggttctggggcgcagaaccgctactgctgcttcggtctctccttgggaaaaaataaaatttgaaccttttggagctgtgtgctaaatcttcagtgggacaatgggttcagacaaaagagtgagtagaacagagcgtagtggaagatacggttccatcatagacagggatgaccgtgatgagcgtgaatcccgaagcaggcggagggactcagattacaaaagatctagtgatgatcggaggggtgatagatatgatgactaccgagactatgacagtccagagagagagcgtgaaagaaggaacagtgaccgatccgaagatggctaccattcagatggtgactatggtgagcacgactataggcatgacatcagtgacgagagggagagcaagaccatcatgctgcgcggccttcccatcaccatcacagagagcgatgtaaggggaaatgacagttataaccagcagtcagtaggcacaatgaactttgagcttctaccattattttctcatgctattgttttatcttaagccaatagaggttgagtatcccttatccaaaatgcttgggaccagaactg

SEQ ID NO: 328197 - DNA, 1037 bp, Homo sapiens
tgtgggtaggagacggccgtcggcggaggcgccattttgtgtagccgccgaaccttgttggaggttctggggcgcagaaccgctactgctgcttcggtctctccttgggaaaaaataaaatttgaaccttttggagctgtgtgctaaatcttcagtgggacaatgggttcagacaaaagagtgagtagaacagagcgtagtggaagatacggttccatcatagacagggatgaccgtgatgagcgtgaatcccgaagcaggcggagggactcagattacaaaagatctagtgatgatcggaggggtgatagatatgatgactaccgagactatgacagtccagaggtgagtgaccagcggctgtataaccccccaaaacactctgagccttatagtaatagaaataacagccaggcagccaggtccagtggccccttcccataatcctatcactttgggaggccaaggcggccagatcacttgaggtcaggagtttaagaccagtctggccaacatagtaaaacccgtctctactaaaaatacaaaaattagctgagtggggtggtgggcgcctgtaatcccagctacttgggagactgaggtaagagaatcacttgaaacctgggaggcggaggttgcagtgagctgagattgtatcagtgctctccagcatgggtgacaaagcaagactccatcttcaaaaaaaaaaaaaaaagaaaagaaataatggccagggtttacatagggatcaccatgtacttttgagcacttgacttcatgaattcatttaggtctcagtacaacctgataaggtaggtgttattcccattttaaagatgaaacaatggggttatgataacatattagttctgtgttttgaaatgaatgataaatataagttgttggccaggcacagtggctcacacctgtaatcccaaagtgctgagattacagatgtgagccaccacacttggccgaacacttaattctaacatcttttcctcatatgaactttcccgtcccagaacaccgtcgaa

SEQ ID NO: 328198 - DNA, 523 bp, Homo sapiens
gcgtcgacggctacacaaaatgccgccgaaccttgttggaggttctggggcgcagaaccgctactgctgcttcggtctctccttggggtaagtgcggcggctgtctgtaacgacggtaggttcttgccatttgggctggcccccaagcctcccttgtcagctgccggaggcgactgatcagctccagccggttctgtagaggggctaaattaccccaggcgttggagggccgcgcccttccttgttgccagctctgtcagtttccagagggtgtccagccagctcagccttgggcctgcttctttctggctgtgactttgccccttgtggatacacgtcccctaatcttcagcccaacggagcagtggagccgtcgcctgtccctcgggcactccttgggagctccctggcagtctctggccgccatcccccgctcaactgcaactgaatcgccctctccgaaaagctgttcggtgatcgcccatctgcgggtttggaacctcttgggaggcgggaggggcat

SEQ ID NO: 328199 - DNA, 298 bp, Homo sapiens
gaatttggtatttcagagcagtctaaaaaaagcattcttcagatttaaaaatacttgaggggatagttttgaataggtgcattagacggttacaggttgaagtctgtgaacatttccagcagtgttttttctcccatgtagatgaaataccgagaccgagctgcagaaagacgggagaagtacggcattccagaacctccagagcccaagcgcaagaagcagtttgatgccggcactgtgtatgtgatgtgcacattttccagttcgtaagctggggccctggctgttttaagtaact

SEQ ID NO: 328200 - DNA, 481 bp, Homo sapiens
atggggatttgttaacatttcggatgaggcattactttatccaggtacatagccaccgccatcttcctattgtacatttccagtgacctgtcctccttttgtctccagaggggtctggttgctgcttacagtggtgacagtgacaatgaggaggagctggtggagagacttgagagtgaggaagagaagctagctgactggaagaagatggcctgtctgctctgccggcgccagttcccgaacaaagatgccctagtcaggcaccagcaactctcagaccttcacaaggtggccatgcttctgagctgatctgagggggcgaggggaggcagtgagacaatttgagtgccctaacagtcctgacggttccaaaaatacctgccatctaatgatggccttacagaaagctgttcccgatgacagtggacggagtctggcagctccacacacatcaaactatagtttttatgtgattgtgtat

SEQ ID NO: 328201 - DNA, 359 bp, Homo sapiens
cagaacctccagagcccaagcgcaagaagcagtttgatgccggcactgtgtatgtgatgtgcacattttccagttcgtaagctggggccctggctgttttaagtaactgtgtgtttgccactggcaggaattacgagcaacccaccaaagatggcattgaccacagtaacattggcaacaagatgctgcaggccatgggctggcgggaaggctctggcttgggacgaaagtgtcaaggcattacggctcccattgaggtaagcagtggggtcaggtcttgatgtttgccaggcttacaggccggttccagagatgagatcagagcactcatagagcctgggagccaggagcagctttac

SEQ ID NO: 328202 - DNA, 463 bp, Homo sapiens
caagctatggagctgctgacttaagtgatctctgagatttatagcaattaatctctcttgtctcctagaaaaaataaaatttgaaccttttggagctgtgtgctaaatcttcagtgggacaatgggttcagacaaaaggtaagttactacagtacgtggctttgatctcaacatttcagtggggactgaactccttgtttaaaatagtttatcaaactaatatatgagtgttttgcgccaggcattgctaacgaacacctttatgatcctgttgtcacaaactacagtctagtgagagaattaaagtactgtgtgaacatgctgtgataaagtgtagggtgctcttagaacacataggaagtatgtctttttcttgttcacagccaggaaagcttcctggagaaaatattctctggaaggaagctgaaggataagaaagaattttaggcaaagaagggcaggg

SEQ ID NO: 328203 - DNA, 655 bp, Homo sapiens
tccaagaaggttggtaccaggaggctgtcaggcctagcactcaaggacctgactgctccacgcagttgacaaaatgtgattcattactaaagtgtgacatgcagtaatggggatttgttaacatttcggatgaggcattactttatccaggtacatagccaccgccatcttcctattgtacatttccagtgacctgtcctccttttgtctccagaggggtctggttgctgcttacagtggtgacagtgacaatgaggaggagctggtggagagacttgagagtgaggaagagaagctagctgactggaagaagatggcctgtctgctctgccggcgccagttcccgaacaaagatgccctagtcaggcaccagcaactctcagaccttcacaagcaaaacatggacatctaccgacgatccaggctgagcgagcaggagctggaagccttggagctaagggagagagaggtgaatgggaaactgtgccacaaggaagaggatattgggataattgcctttagcttttatttgtagcatttagttccagatcccaggggcagggtaggaggatttgtcatacccttgtcatctgaccattgtagttcatgtagcctagacccagcctctgtgtgccttgtgagcctcacattgtcc

SEQ ID NO: 328204 - DNA, 7029 bp, Homo sapiens
tgtgggtaggagacggccgtcggcggaggcgccattttgtgtagccgccgaaccttgttggaggttctggggcgcagaaccgctactgctgcttcggtctctccttgggaaaaaataaaatttgaaccttttggagctgtgtgctaaatcttcagtgggacaatgggttcagacaaaagagtgagtagaacagagcgtagtggaagatacggttccatcatagacagggatgaccgtgatgagcgtgaatcccgaagcaggcggagggactcagattacaaaagatctagtgatgatcggaggggtgatagatatgatgactaccgagactatgacagtccagagagagagcgtgaaagaaggaacagtgaccgatccgaagatggctaccattcagatggtgactatggtgagcacgactataggcatgacatcagtgacgagagggagagcaagaccatcatgctgcgcggccttcccatcaccatcacagagagcgatattcgagaaatgatggagtccttcgaaggccctcagcctgcggatgtgaggctgatgaagaggaaaacaggtgagagcttgcttagttcctgatattattgttctcttccccattcccacctcagtccctaaagaacatcctgattcccccagtcttcaagcacatgaattcagaatgaaaggtttgccatggctaaggaatgtgactctttgaaaaccatgttagcatctgaggaacttttttaaactttgttttagggacttttttttccttaggtaagtaatgatttataaactcctttttttttttgactatagtcggttgcatggttactttaagcgtggaatcaaatggagtggcatttagttcaggcggcttgttccttgccatggcaaagtatcaagaagatccccaagtcaagtcacatttgtaaagctgcttcccaattggctttgtcacgcagtgttgaagcagtgggagagagattcacctgttataaaggaactgactaacacaagtatcccgtctatatctgaatgctgtctctaggtgtaagccgtggtttcgccttcgtggagttttatcacttgcaagatgctaccagctggatggaagccaatcaggttgcttcactcaccaagtctagatattcatgaaaatggaacaagtctgtacaattttaaaaaaaggttgaaggagtggtttgttccaaaggagtgacttttttttaaaaaaaaagctttgtatatattaaaattgatgttactagaataagtacagtaccaaggacttcattatagaatttgttctgcctttaaacatggctacctacctggcagggctttgttaactactgaatacctgtctggtaatcactaaaacatcttaatgtttcccttttttctagtttgttatattcctattatgtccattgagagtaagcttagtatatcaaactctccatttgacagtgaagagaacatagtgaaagtctgtggcggcatttttataagtaattccttatttctgcctgaagaccacaaagcctcctggaggcgtaactgctcagaccggtcttcagggaatatttaaggacttagtggaatttatgaacaataagtctgatgagattagcctgggagtggtgtcctgcagctgtctaatctagagtggcattaacattctaatctccttgagaatgccttttatagtctgttcaaagcaagtcattgatggttcttcgaggtagtgttaactgaagtgttcttcagtttgtcaagataatgttcagtgcttggcacttaaataacattttttgcaagaactccaaggcacattattgaatgcctttaaccaagtgcattctgggaagtttgcttgactcattatcttgcttttctgcagcattctgtgatttgagtcatccatgaatccatgaataaaagttacattctttgattggtaatattgccatttataacaagactcactaatgagggtatcactttgactgactgatttgttaaagtttttaagcctctcattttcctaacccagaaatcacagcctgattttattaaaagtagagcttcattcatttcataccatagataccatcctagtaaatccagaacatatacaaggttcatgtgagtctgctttcttgacatgatagcattgtttgatgcagtggatatgtcagaatgactaacctaggagtttaaaactcctaagaaactaaaacctgtaagacatttaaaagtctccacaattttaatgtatacaaagctatgttactgtgtaacacattacagttcaaattcactccagaaataaaaggccagtaggattagggactcactggtagtttggagtctcccagcacacatccctcctagtgggatgatctattcacatatctcccagcttttttatttttgcttctgtatatcacagtgagtggatggcccttcagctttttctctcctggccagacatgcagtcttgcctttagatatcgcagagacaaaattcacagcatgtcttaaatcttccaggatttgcaagaaccaaattgctcaacagtatgtatgtttagaggggttagactcctttttaaaatctggatatctaaccacctacttaaatctgtttgatagtgtcaaaccacccccacccttgatcctcccacccccaagaaaaagaaaagatgctcctgttaaatgaaggctctttaggggtaggtgctaggtatactcttggctagattgattcagctcagaattttgactttttaaagctaagtccttgtagtcacatggttgacttgaaggatgaggtggtgtgtgcatttatgagcttttcctacccccctgaagaaacttcattggcctcctggttactcaccttgaagagagtaccatccattttagtgaaaaacacatctgtcacctaggacatgacatggttgcagttgacaggaaaaaaaaaatctcatttagttgttttagagttggtggcattcagaatagtccctcttgagaaagaattgtaaccagattccctttaaaaatgagttcccctccctttccccccaaaggactcatcctgaagcagaaggtgtggggggaaggagaaatgtaaaggcttttactttgcataaggatgggggactggggaaaaaggtgaagcgaagcccaaggacaccatgctaagggcaaaagtaagagacagtctcagaactgagagaattgtgtcttctgctttttgaagtagactgtcacactcaggcagcctgtcaatgctgaatgttaggacttctgtctccgctggagacacggcctggtgcaagtcagcgtttagtgtttgacagctttctcagcactccctgactccgtttacctttactccgcatcccattctcttactgcctatctgaaggattggatgggcagagtataggtggcggtggttggtcctccccgtatgttgtccatttaattccagagcactgatttttccgaagtgtgctctgccctgggaaaatggacacatgttcctcacaatgggaataactaattacttcttttcttacagaaaaagttggtgattcaaggaaagcacattgcaatgcattatagcaatcccagacctaagtttgaagattggctttgtaacaagtgctgccttaacaatttcaggaaaagactaaaatgcttccgatgtggagcagacaagtttggtaagactggattcagctgtttgcaatatgcattaaaacctactaactggggcagggagcagtggctcactgtaatcccaccactttgcaaggccaaggtgggaagatcacttgaggacaggagttcaataccagcctggcaagagatagcaagaccctgcctgtacaaaaaaagaaattttaaattatctgggtgtggtggcacacacctgtagtcctagctactcaggaggtttaggtgagaggattgcttgagtccaggagttgaaggctgcagtgagctatggtcataccactgcactccagcctgggcaacaaacaagaccctgcctctcaaaaaaaaacaaaacaaaaatctgacaaatagggttgttaactgtgagcctgaggaaaagtatagattttagtgtacttaaacaacttgtctgttttctttaaatcttttcccttaggttagataatgctgctcatgattgtgagagcacagaaagttcttttgttttctagaattaagtctgctcacctggtttgcattctgcatctgcctttctttagtgcagggtagtgtcagtcccactgtggcccaaagtttgcattctgcgttaaccaagtcacaattaatgaggttttactataggcacaaatgcttaaaaaagaaaaaaacgattgttttgtgtggttaaaataaaaacttgtggggattttaatgtatttctttggtgaaaatacattagttgtttgtctctaattggatcactttcccttctagactctgaacaggaagtgcctcctggaaccacagagtcggttcagtctgtggattactactgtgatacgatcattcttcggaacatagctccgcacactgtggtggattccatcatgacagcactgtctccttacgcgtctttagctgtcaataacatccgcctcataaaagacaaacagacccagcagaacagaggcttcgcatttgtgcagctgtcctctgcaatggatgcttctcagctgcttcagatattacagagtctccatcctcctttgaaaattgatggcaaaactattggggttgattttgcaaaaagtgccagaaaagacttggtcctctcagatggtaaccgcgtcagcgccttctctgtagctagtacggctattgctgctgctcagtggtcatccacccagtctcaaagtggtgaaggaggcagtgttgactacagttatctgcaaccaggtcaagatggctatgcccaatatgctcagtattcacaggattatcagcagttttatcaacaacaagctggaggattggaatctgatgcatcatctgcatcaggcacagcagtgaccaccacctcagcggctgtagtgtcccagagtcctcagctgtataatcaaacctccaatccacctggctctccgactgaggaagcacagcctagcactagcacaagtacacaggccccagccgcttcccctactggtgtagttcctggtaccaaatatgcagtacctgacacgtccacttaccagtatgatgaatcttcaggatattactatgatccgacaacagggctctattatgaccccaactcgcaatactactataattccttgacccagcagtacctttactgggatggggaaaaagagacctacgtgccagctgcagagtctagctcccaccagcagtcgggcctgcctcctgcaaaagaggggaaagagaagaaggagaaacccaagagcaaaacagcccagcagattgccaaagacatggaacgctgggctaagagtttgaataagcagaaagaaaactttaaaaatagctttcagcctgtcaattccttgagggaagaagaaaggagagaatctgctgcagcagacgctggctttgctctctttgagaagaagggagccttagctgaaaggcagcagctcatcccagaattggtgcgaaatggagatgaggagaatcccctcaaaaggggtctggttgctgcttacagtggtgacagtgacaatgaggaggagctggtggagagacttgagagtgaggaagagaagctagctgactggaagaagatggcctgtctgctctgccggcgccagttcccgaacaaagatgccctagtcaggcaccagcaactctcagaccttcacaagcaaaacatggacatctaccgacgatccaggctgagcgagcaggagctggaagccttggagctaagggagagagagatgaaataccgagaccgagctgcagaaagacgggagaagtacggcattccagaacctccagagcccaagcgcaagaagcagtttgatgccggcactgtgaattacgagcaacccaccaaagatggcattgaccacagtaacattggcaacaagatgctgcaggccatgggctggcgggaaggctctggcttgggacgaaagtgtcaaggcattacggctcccattgaggctcaagttcggctaaagggagctggcctaggagccaaaggcagcgcatatggtttgtcgggcgccgattcctacaaagatgctgtccggaaagccatgtttgcccggttcactgagatggagtgagagagagagagagagagagatgacaaggagcacaagaagtggtccatctcccgaattcgctgttaccgcctgtctctttaagggcatgccttgtgctgttaatagatcttagggtgaaccacttcattctgcagggttctccctcccaccttaaagaagttccccttatgtgggttgcctggtgaatggccttccttcccgccagagggcttgtgaacagaccggagaggacagtggattgtttatactccagtgtacatagtgtaatgtagcgtgtttacatgtgtagcctatgttgtggtccatcagcccctcacattcctaggggtttgagatgctgtaggtggtatgtgacaccaaagccacctctgtcatttgttgtgatgtcttttcttggcaaaagccttgtgtatatttgtatattacacatttgtacagaattttggaagattttcagtctagttgccaaatctggctcctttacaaaagaaataccttgagaaaaaaaaaaaaaaaaaaaagaaacaaaaaaagaacgacagaagaaaaaacagaaacaaacgcacgaacaaggcaaacacagcacaagaaaacaaggggggggcggggggggacgaaaagaatccccccggggggggcgcccacaatgggcggcccccagcttattgtggaagaaaaggggcggcccatagggggg

SEQ ID NO: 328205 - DNA, 7281 bp, Homo sapiens
tgtgggtaggagacggccgtcggcggaggcgccattttgtgtagccgccgaaccttgttggaggttctggggcgcagaaccgctactgctgcttcggtctctccttgggaaaaaataaaatttgaaccttttggagctgtgtgctaaatcttcagtgggacaatgggttcagacaaaagagtgagtagaacagagcgtagtggaagatacggttccatcatagacagggatgaccgtgatgagcgtgaatcccgaagcaggcggagggactcagattacaaaagatctagtgatgatcggaggggtgatagatatgatgactaccgagactatgacagtccagagagagagcgtgaaagaaggaacagtgaccgatccgaagatggctaccattcagatggtgactatggtgagcacgactataggcatgacatcagtgacgagagggagagcaagaccatcatgctgcgcggccttcccatcaccatcacagagagcgatattcgagaaatgatggagtccttcgaaggccctcagcctgcggatgtgaggctgatgaagaggaaaacaggtgagagcttgcttagttcctgatattattgttctcttccccattcccacctcagtccctaaagaacatcctgattcccccagtcttcaagcacatgaattcagaatgaaaggtttgccatggctaaggaatgtgactctttgaaaaccatgttagcatctgaggaacttttttaaactttgttttagggacttttttttccttaggtaagtaatgatttataaactcctttttttttttgactatagtcggttgcatggttactttaagcgtggaatcaaatggagtggcatttagttcaggcggcttgttccttgccatggcaaagtatcaagaagatccccaagtcaagtcacatttgtaaagctgcttcccaattggctttgtcacgcagtgttgaagcagtgggagagagattcacctgttataaaggaactgactaacacaagtatcccgtctatatctgaatgctgtctctaggtgtaagccgtggtttcgccttcgtggagttttatcacttgcaagatgctaccagctggatggaagccaatcaggttgcttcactcaccaagtctagatattcatgaaaatggaacaagtctgtacaattttaaaaaaaggttgaaggagtggtttgttccaaaggagtgacttttttttaaaaaaaaagctttgtatatattaaaattgatgttactagaataagtacagtaccaaggacttcattatagaatttgttctgcctttaaacatggctacctacctggcagggctttgttaactactgaatacctgtctggtaatcactaaaacatcttaatgtttcccttttttctagtttgttatattcctattatgtccattgagagtaagcttagtatatcaaactctccatttgacagtgaagagaacatagtgaaagtctgtggcggcatttttataagtaattccttatttctgcctgaagaccacaaagcctcctggaggcgtaactgctcagaccggtcttcagggaatatttaaggacttagtggaatttatgaacaataagtctgatgagattagcctgggagtggtgtcctgcagctgtctaatctagagtggcattaacattctaatctccttgagaatgccttttatagtctgttcaaagcaagtcattgatggttcttcgaggtagtgttaactgaagtgttcttcagtttgtcaagataatgttcagtgcttggcacttaaataacattttttgcaagaactccaaggcacattattgaatgcctttaaccaagtgcattctgggaagtttgcttgactcattatcttgcttttctgcagcattctgtgatttgagtcatccatgaatccatgaataaaagttacattctttgattggtaatattgccatttataacaagactcactaatgagggtatcactttgactgactgatttgttaaagtttttaagcctctcattttcctaacccagaaatcacagcctgattttattaaaagtagagcttcattcatttcataccatagataccatcctagtaaatccagaacatatacaaggttcatgtgagtctgctttcttgacatgatagcattgtttgatgcagtggatatgtcagaatgactaacctaggagtttaaaactcctaagaaactaaaacctgtaagacatttaaaagtctccacaattttaatgtatacaaagctatgttactgtgtaacacattacagttcaaattcactccagaaataaaaggccagtaggattagggactcactggtagtttggagtctcccagcacacatccctcctagtgggatgatctattcacatatctcccagcttttttatttttgcttctgtatatcacagtgagtggatggcccttcagctttttctctcctggccagacatgcagtcttgcctttagatatcgcagagacaaaattcacagcatgtcttaaatcttccaggatttgcaagaaccaaattgctcaacagtatgtatgtttagaggggttagactcctttttaaaatctggatatctaaccacctacttaaatctgtttgatagtgtcaaaccacccccacccttgatcctcccacccccaagaaaaagaaaagatgctcctgttaaatgaaggctctttaggggtaggtgctaggtatactcttggctagattgattcagctcagaattttgactttttaaagctaagtccttgtagtcacatggttgacttgaaggatgaggtggtgtgtgcatttatgagcttttcctacccccctgaagaaacttcattggcctcctggttactcaccttgaagagagtaccatccattttagtgaaaaacacatctgtcacctaggacatgacatggttgcagttgacaggaaaaaaaaaatctcatttagttgttttagagttggtggcattcagaatagtccctcttgagaaagaattgtaaccagattccctttaaaaatgagttcccctccctttccccccaaaggactcatcctgaagcagaaggtgtggggggaaggagaaatgtaaaggcttttactttgcataaggatgggggactggggaaaaaggtgaagcgaagcccaaggacaccatgctaagggcaaaagtaagagacagtctcagaactgagagaattgtgtcttctgctttttgaagtagactgtcacactcaggcagcctgtcaatgctgaatgttaggacttctgtctccgctggagacacggcctggtgcaagtcagcgtttagtgtttgacagctttctcagcactccctgactccgtttacctttactccgcatcccattctcttactgcctatctgaaggattggatgggcagagtataggtggcggtggttggtcctccccgtatgttgtccatttaattccagagcactgatttttccgaagtgtgctctgccctgggaaaatggacacatgttcctcacaatgggaataactaattacttcttttcttacagaaaaagttggtgattcaaggaaagcacattgcaatgcattatagcaatcccagacctaagtttgaagattggctttgtaacaagtgctgccttaacaatttcaggaaaagactaaaatgcttccgatgtggagcagacaagtttgactctgaacaggaagtgcctcctggaaccacagagtcggttcagtctgtggattactactgtgatacgatcattcttcggaacatagctccgcacactgtggtggattccatcatgacagcactgtctccttacgcgtctttagctgtcaataacatccgcctcataaaagacaaacagacccagcagaacagaggcttcgcatttgtgcagctgtcctctgcaatggatgcttctcagctgcttcagatattacagagtctccatcctcctttgaaaattgatggcaaaactattggggttgattttgcaaaaagtgccagaaaagacttggtcctctcagatggtaaccgcgtcagcgccttctctgtagctagtacggctattgctgctgctcagtggtcatccacccagtctcaaagtggtgaaggaggcagtgttgactacagttatctgcaaccaggtcaagatggctatgcccaatatgctcagtattcacaggattatcagcagttttatcaacaacaagctggaggattggaatctgatgcatcatctgcatcaggcacagcagtgaccaccacctcagcggctgtagtgtcccagagtcctcagctgtataatcaaacctccaatccacctggctctccgactgaggaagcacagcctagcactagcacaagtacacaggccccagccgcttcccctactggtgtagttcctggtaccaaatatgcagtacctgacacgtccacttaccagtatgatgaatcttcaggatattactatgatccgacaacagggctctattatgaccccaactcgcaagtaaatgtgctgctttcctcctcaatttcactagaagtagtttcgcttagtgcatttatgaggcataaaatgaaatatttcctgcaaaagaatatatgactgagattagttttaacttcttcaaagccaccaaaatgtaatttttatatggagattgtaagttttaattgtagggttaaaaaatgttttgaggtataatatacacacaaaaaaatacacaaaacagaaatgtgcaattctttgaatgtttatacatgtctatacatttgtatattacatgtgtatatacaccaccatgtgcccagccctctgttcttgacatttcatataagtggagtcagacaatagattaccttttgtgtccagcatcctttactttgcctccctgtgtattcttgagggtagaatttagcagatgtatggagtgatgttttatttttggtggcatatataacttttaaaagggaaaaacaactttaacaccccataaataactctatttatgaccgggagctgtatatatagaacagtaataagtatttttaacaggaacttggcattgataggttgtggtttctgagagattgaagtgtgaagctgtgtgtgacgtgcctaagcaggccaagcctctgcatacctcttccatccacttctctcatttgtgaagcctggccatttatttccctgtcagttctttttttttttttttttttttcccgtcagttctctttggtggccttagaagttgtgtctgtaggctgggattacgggcatgagccactgctcccggctgggaactaaactttttaaagaaatcatattctatttttactctagcagtgtcacacctctttgctaggtggttcatcacctttacttataccaaggtgtgcccagggtcttttctgggcaggaaatatcactagtccacaacatactttatcttttttttgacaaaatatgtaatcgactgacatagcagaaagtctgcattaattgttttttgtttgttgttttctagtactactataattccttgacccagcagtacctttactgggatggggaaaaagagacctacgtgccagctgcagagtctagctcccaccagcagtcgggcctgcctcctgcaaaagaggggaaagagaagaaggagaaacccaagagcaaaacagcccagcagattgccaaagacatggaacgctgggctaagagtttgaataagcagaaagaaaactttaaaaatagctttcagcctgtcaattccttgagggaagaagaaaggagagaatctgctgcagcagacgctggctttgctctctttgagaagaagggagccttagctgaaaggcagcagctcatcccagaattggtgcgaaatggagatgaggagaatcccctcaaaaggggtctggttgctgcttacagtggtgacagtgacaatgaggaggagctggtggagagacttgagagtgaggaagagaagctagctgactggaagaagatggcctgtctgctctgccggcgccagttcccgaacaaagatgccctagtcaggcaccagcaactctcagaccttcacaagcaaaacatggacatctaccgacgatccaggctgagcgagcaggagctggaagccttggagctaagggagagagagatgaaataccgagaccgagctgcagaaagacgggagaagtacggcattccagaacctccagagcccaagcgcaagaagcagtttgatgccggcactgtgaattacgagcaacccaccaaagatggcattgaccacagtaacattggcaacaagatgctgcaggccatgggctggcgggaaggctctggcttgggacgaaagtgtcaaggcattacggctcccattgaggctcaagttcggctaaagggagctggcctaggagccaaaggcagcgcatatggtttgtcgggcgccgattcctacaaagatgctgtccggaaagccatgtttgcccggttcactgagatggagtgagagagagagagagagagagatgacaaggagcacaagaagtggtccatctcccgaattcgctgttaccgcctgtctctttaagggcatgccttgtgctgttaatagatcttagggtgaaccacttcattctgcagggttctccctcccaccttaaagaagttccccttatgtgggttgcctggtgaatggccttccttcccgccagagggcttgtgaacagaccggagaggacagtggattgtttatactccagtgtacatagtgtaatgtagcgtgtttacatgtgtagcctatgttgtggtccatcagcccctcacattcctaggggtttgagatgctgtaggtggtatgtgacaccaaagccacctctgtcatttgttgtgatgtcttttcttggcaaaagccttgtgtatatttgtatattacacatttgtacagaattttggaagattttcagtctagttgccaaatctggctcctttacaaaagaaataccttgagaaaaaaaaaaaaaaaaaaaagaaacaaaaaaagaacgacagaagaaaaaacagaaacaaacgcacgaacaaggcaaacacagcacaagaaaacaaggggggggcggggggggacgaaaagaatccccccggggggggcgcccacaatgggcggcccccagcttattgtggaagaaaaggggcggcccatagggggg

SEQ ID NO: 328206 - DNA, 6340 bp, Homo sapiens
tgtgggtaggagacggccgtcggcggaggcgccattttgtgtagccgccgaaccttgttggaggttctggggcgcagaaccgctactgctgcttcggtctctccttgggaaaaaataaaatttgaaccttttggagctgtgtgctaaatcttcagtgggacaatgggttcagacaaaagagtgagtagaacagagcgtagtggaagatacggttccatcatagacagggatgaccgtgatgagcgtgaatcccgaagcaggcggagggactcagattacaaaagatctagtgatgatcggaggggtgatagatatgatgactaccgagactatgacagtccagagagagagcgtgaaagaaggaacagtgaccgatccgaagatggctaccattcagatggtgactatggtgagcacgactataggcatgacatcagtgacgagagggagagcaagaccatcatgctgcgcggccttcccatcaccatcacagagagcgatattcgagaaatgatggagtccttcgaaggccctcagcctgcggatgtgaggctgatgaagaggaaaacaggtgagagcttgcttagttcctgatattattgttctcttccccattcccacctcagtccctaaagaacatcctgattcccccagtcttcaagcacatgaattcagaatgaaaggtttgccatggctaaggaatgtgactctttgaaaaccatgttagcatctgaggaacttttttaaactttgttttagggacttttttttccttaggtaagtaatgatttataaactcctttttttttttgactatagtcggttgcatggttactttaagcgtggaatcaaatggagtggcatttagttcaggcggcttgttccttgccatggcaaagtatcaagaagatccccaagtcaagtcacatttgtaaagctgcttcccaattggctttgtcacgcagtgttgaagcagtgggagagagattcacctgttataaaggaactgactaacacaagtatcccgtctatatctgaatgctgtctctaggtgtaagccgtggtttcgccttcgtggagttttatcacttgcaagatgctaccagctggatggaagccaatcaggttgcttcactcaccaagtctagatattcatgaaaatggaacaagtctgtacaattttaaaaaaaggttgaaggagtggtttgttccaaaggagtgacttttttttaaaaaaaaagctttgtatatattaaaattgatgttactagaataagtacagtaccaaggacttcattatagaatttgttctgcctttaaacatggctacctacctggcagggctttgttaactactgaatacctgtctggtaatcactaaaacatcttaatgtttcccttttttctagtttgttatattcctattatgtccattgagagtaagcttagtatatcaaactctccatttgacagtgaagagaacatagtgaaagtctgtggcggcatttttataagtaattccttatttctgcctgaagaccacaaagcctcctggaggcgtaactgctcagaccggtcttcagggaatatttaaggacttagtggaatttatgaacaataagtctgatgagattagcctgggagtggtgtcctgcagctgtctaatctagagtggcattaacattctaatctccttgagaatgccttttatagtctgttcaaagcaagtcattgatggttcttcgaggtagtgttaactgaagtgttcttcagtttgtcaagataatgttcagtgcttggcacttaaataacattttttgcaagaactccaaggcacattattgaatgcctttaaccaagtgcattctgggaagtttgcttgactcattatcttgcttttctgcagcattctgtgatttgagtcatccatgaatccatgaataaaagttacattctttgattggtaatattgccatttataacaagactcactaatgagggtatcactttgactgactgatttgttaaagtttttaagcctctcattttcctaacccagaaatcacagcctgattttattaaaagtagagcttcattcatttcataccatagataccatcctagtaaatccagaacatatacaaggttcatgtgagtctgctttcttgacatgatagcattgtttgatgcagtggatatgtcagaatgactaacctaggagtttaaaactcctaagaaactaaaacctgtaagacatttaaaagtctccacaattttaatgtatacaaagctatgttactgtgtaacacattacagttcaaattcactccagaaataaaaggccagtaggattagggactcactggtagtttggagtctcccagcacacatccctcctagtgggatgatctattcacatatctcccagcttttttatttttgcttctgtatatcacagtgagtggatggcccttcagctttttctctcctggccagacatgcagtcttgcctttagatatcgcagagacaaaattcacagcatgtcttaaatcttccaggatttgcaagaaccaaattgctcaacagtatgtatgtttagaggggttagactcctttttaaaatctggatatctaaccacctacttaaatctgtttgatagtgtcaaaccacccccacccttgatcctcccacccccaagaaaaagaaaagatgctcctgttaaatgaaggctctttaggggtaggtgctaggtatactcttggctagattgattcagctcagaattttgactttttaaagctaagtccttgtagtcacatggttgacttgaaggatgaggtggtgtgtgcatttatgagcttttcctacccccctgaagaaacttcattggcctcctggttactcaccttgaagagagtaccatccattttagtgaaaaacacatctgtcacctaggacatgacatggttgcagttgacaggaaaaaaaaaatctcatttagttgttttagagttggtggcattcagaatagtccctcttgagaaagaattgtaaccagattccctttaaaaatgagttcccctccctttccccccaaaggactcatcctgaagcagaaggtgtggggggaaggagaaatgtaaaggcttttactttgcataaggatgggggactggggaaaaaggtgaagcgaagcccaaggacaccatgctaagggcaaaagtaagagacagtctcagaactgagagaattgtgtcttctgctttttgaagtagactgtcacactcaggcagcctgtcaatgctgaatgttaggacttctgtctccgctggagacacggcctggtgcaagtcagcgtttagtgtttgacagctttctcagcactccctgactccgtttacctttactccgcatcccattctcttactgcctatctgaaggattggatgggcagagtataggtggcggtggttggtcctccccgtatgttgtccatttaattccagagcactgatttttccgaagtgtgctctgccctgggaaaatggacacatgttcctcacaatgggaataactaattacttcttttcttacagaaaaagttggtgattcaaggaaagcacattgcaatgcattatagcaatcccagacctaagtttgaagattggctttgtaacaagtgctgccttaacaatttcaggaaaagactaaaatgcttccgatgtggagcagacaagtttgactctgaacaggaagtgcctcctggaaccacagagtcggttcagtctgtggattactactgtgatacgatcattcttcggaacatagctccgcacactgtggtggattccatcatgacagcactgtctccttacgcgtctttagctgtcaataacatccgcctcataaaagacaaacagacccagcagaacagaggcttcgcatttgtgcagctgtcctctgcaatggatgcttctcagctgcttcagatattacagagtctccatcctcctttgaaaattgatggcaaaactattggggttgattttgcaaaaagtgccagaaaagacttggtcctctcagatggtaaccgcgtcagcgccttctctgtagctagtacggctattgctgctgctcagtggtcatccacccagtctcaaagtggtgaaggaggcagtgttgactacagttatctgcaaccaggtcaagatggctatgcccaatatgctcagtattcacaggattatcagcagttttatcaacaacaagctggaggattggaatctgatgcatcatctgcatcaggcacagcagtgaccaccacctcagcggctgtagtgtcccagagtcctcagctgtataatcaaacctccaatccacctggctctccgactgaggaagcacagcctagcactagcacaagtacacaggccccagccgcttcccctactggtgtagttcctggtaccaaatatgcagtacctgacacgtccacttaccagtatgatgaatcttcaggatattactatgatccgacaacagggctctattatgaccccaactcgcaatactactataattccttgacccagcagtacctttactgggatggggaaaaagagacctacgtgccagctgcagagtctagctcccaccagcagtcgggcctgcctcctgcaaaagaggggaaagagaagaaggagaaacccaagagcaaaacagcccagcagattgccaaagacatggaacgctgggctaagagtttgaataagcagaaagaaaactttaaaaatagctttcagcctgtcaattccttgagggaagaagaaaggagagaatctgctgcagcagacgctggctttgctctctttgagaagaaggtaatagcaggaatggccagtatgtcatgatgggaacttacctaaaacttgagtctcatggcttgtcctctgtttcccagggagccttagctgaaaggcagcagctcatcccagaattggtgcgaaatggagatgaggagaatcccctcaaaaggggtctggttgctgcttacagtggtgacagtgacaatgaggaggagctggtggagagacttgagagtgaggaagagaagctagctgactggaagaagatggcctgtctgctctgccggcgccagttcccgaacaaagatgccctagtcaggcaccagcaactctcagaccttcacaagcaaaacatggacatctaccgacgatccaggctgagcgagcaggagctggaagccttggagctaagggagagagagatgaaataccgagaccgagctgcagaaagacgggagaagtacggcattccagaacctccagagcccaagcgcaagaagcagtttgatgccggcactgtgaattacgagcaacccaccaaagatggcattgaccacagtaacattggcaacaagatgctgcaggccatgggctggcgggaaggctctggcttgggacgaaagtgtcaaggcattacggctcccattgaggctcaagttcggctaaagggagctggcctaggagccaaaggcagcgcatatggtttgtcgggcgccgattcctacaaagatgctgtccggaaagccatgtttgcccggttcactgagatggagtgagagagagagagagagagagatgacaaggagcacaagaagtggtccatctcccgaattcgctgttaccgcctgtctctttaagggcatgccttgtgctgttaatagatcttagggtgaaccacttcattctgcagggttctccctcccaccttaaagaagttccccttatgtgggttgcctggtgaatggccttccttcccgccagagggcttgtgaacagaccggagaggacagtggattgtttatactccagtgtacatagtgtaatgtagcgtgtttacatgtgtagcctatgttgtggtccatcagcccctcacattcctaggggtttgagatgctgtaggtggtatgtgacaccaaagccacctctgtcatttgttgtgatgtcttttcttggcaaaagccttgtgtatatttgtatattacacatttgtacagaattttggaagattttcagtctagttgccaaatctggctcctttacaaaagaaataccttgagaaaaaaaaaaaaaaaaaaaagaaacaaaaaaagaacgacagaagaaaaaacagaaacaaacgcacgaacaaggcaaacacagcacaagaaaacaaggggggggcggggggggacgaaaagaatccccccggggggggcgcccacaatgggcggcccccagcttattgtggaagaaaaggggcggcccatagggggg

SEQ ID NO: 328207 - DNA, 3233 bp, Homo sapiens
tgtgggtaggagacggccgtcggcggaggcgccattttgtgtagccgccgaaccttgttggaggttctggggcgcagaaccgctactgctgcttcggtctctccttgggaaaaaataaaatttgaaccttttggagctgtgtgctaaatcttcagtgggacaatgggttcagacaaaagagtgagtagaacagagcgtagtggaagatacggttccatcatagacagggatgaccgtgatgagcgtgaatcccgaagcaggcggagggactcagattacaaaagatctagtgatgatcggaggggtgatagatatgatgactaccgagactatgacagtccagagagagagcgtgaaagaaggaacagtgaccgatccgaagatggctaccattcagatggtgactatggtgagcacgactataggcatgacatcagtgacgagagggagagcaagaccatcatgctgcgcggccttcccatcaccatcacagagagcgatattcgagaaatgatggagtccttcgaaggccctcagcctgcggatgtgaggctgatgaagaggaaaacagaaaaagttggtgattcaaggaaagcacattgcaatgcattatagcaatcccagacctaagtttgaagattggctttgtaacaagtgctgccttaacaatttcaggaaaagactaaaatgcttccgatgtggagcagacaagtttgactctgaacaggaagtgcctcctggaaccacagagtcggttcagtctgtggattactactgtgatacgatcattcttcggaacatagctccgcacactgtggtggattccatcatgacagcactgtctccttacgcgtctttagctgtcaataacatccgcctcataaaagacaaacagacccagcagaacagaggcttcgcatttgtgcagctgtcctctgcaatggatgcttctcagctgcttcagatattacagagtctccatcctcctttgaaaattgatggcaaaactattggggttgattttgcaaaaagtgccagaaaagacttggtcctctcagatggtaaccgcgtcagcgccttctctgtagctagtacggctattgctgctgctcagtggtcatccacccagtctcaaagtggtgaaggaggcagtgttgactacagttatctgcaaccaggtcaagatggctatgcccaatatgctcagtattcacaggattatcagcagttttatcaacaacaagctggaggattggaatctgatgcatcatctgcatcaggcacagcagtgaccaccacctcagcggctgtagtgtcccagagtcctcagctgtataatcaaacctccaatccacctggctctccgactgaggaagcacagcctagcactagcacaagtacacaggccccagccgcttcccctactggtgtagttcctggtaccaaatatgcagtacctgacacgtccacttaccagtatgatgaatcttcaggatattactatgatccgacaacagggctctattatgaccccaactcgcaatactactataattccttgacccagcagtacctttactgggatggggaaaaagagacctacgtgccagctgcagagtctagctcccaccagcagtcgggcctgcctcctgcaaaagaggggaaagagaagaaggagaaacccaagagcaaaacagcccagcagattgccaaagacatggaacgctgggctaagagtttgaataagcagaaagaaaactttaaaaatagctttcagcctgtcaattccttgagggaagaagaaaggagagaatctgctgcagcagacgctggctttgctctctttgagaagaagggagccttagctgaaaggcagcagctcatcccagaattggtgcgaaatggagatgaggagaatcccctcaaaaggggtctggttgctgcttacagtggtgacagtgacaatgaggaggagctggtggagagacttgagagtgaggaagagaagctagctgactggaagaagatggcctgtctgctctgccggcgccagttcccgaacaaagatgccctagtcaggcaccagcaactctcagaccttcacaagcaaaacatggacatctaccgacgatccaggctgagcgagcaggagctggaagccttggagctaagggagagagagatgaaataccgagaccgagctgcagaaagacgggagaagtacggcattccagaacctccagagcccaagcgcaagaagcagtttgatgccggcactgtgaattacgagcaacccaccaaagatggcattgaccacagtaacattggcaacaagatgctgcaggccatgggctggcgggaaggctctggcttgggacgaaagtgtcaaggcattacggctcccattgaggctcaagttcggctaaagggagctggcctaggagccaaaggcagcgcatatggtttgtcgggcgccgattcctacaaagatgctgtccggaaagccatgtttgcccggttcactgagatggagtgagagagagagagagagagagatgacaaggagcacaagaagtggtccatctcccgaattcgctgttaccgcctgtctctttaagggcatgccttgtgctgttaatagatcttagggtgaaccacttcattctgcagggttctccctcccaccttaaagaagttccccttatgtgggttgcctggtgaatggccttccttcccgccagagggcttgtgaacagaccggagaggacagtggattgtttatactccagtgtacatagtgtaatgtagcgtgtttacatgtgtagcctatgttgtggtccatcagcccctcacattcctaggggtttgagatgctgtaggtggtatgtgacaccaaagccacctctgtcatttgttgtgatgtcttttcttggcaaaagccttgtgtatatttgtatattacacatttgtacagaattttggaagattttcagtctagttgccaaatctggctcctttacaaaagaaataccttgagaaaaaaaaaaaaaaaaaaaagaaacaaaaaaagaacgacagaagaaaaaacagaaacaaacgcacgaacaaggcaaacacagcacaagaaaacaaggggggggcggggggggacgaaaagaatccccccggggggggcgcccacaatgggcggcccccagcttattgtggaagaaaaggggcggcccatagggggg

SEQ ID NO: 328208 - DNA, 2844 bp, Homo sapiens
  misc_feature (391)..(391): n is a, c, g, or t
gagtactgtctctggccaccgagcagagccagtgacagcagcgtcctggtaggcaggcaggcgtatcaggtttcagaggatgcggctgggaacgggagtagaggtgaggggtcgttgcatctgtcgcggtgtgtatcttttgggggttcagcgccaccagcgacttgggcctcattcatcgcgcttacatttctccacctcatttgaagaacgagcttcgtagcccacggagctgaggtatatgagctccctgaaagcacaaagcagttatttccatcttcagatcattcagagattatgaaggcacaaaccctgccttcaatttgcttatagtcaagtggagcagacacaagtcaatgattgcagtatagccactgaagtaatctaaaanagcgatcattcttcggaacatagctccgcacactgtggtggattccatcatgacagcactgtctccttacgcgtctttagctgtcaataacatccgcctcataaaagacaaacagacccagcagaacagaggcttcgcatttgtgcagctgtcctctgcaatggatgcttctcagctgcttcagatattacagagtctccatcctcctttgaaaattgatggcaaaactattggggttgattttgcaaaaagtgccagaaaagacttggtcctctcagatggtaaccgcgtcagcgccttctctgtagctagtacggctattgctgctgctcagtggtcatccacccagtctcaaagtggtgaaggaggcagtgttgactacagttatctgcaaccaggtcaagatggctatgcccaatatgctcagtattcacaggattatcagcagttttatcaacaacaagctggaggattggaatctgatgcatcatctgcatcaggcacagcagtgaccaccacctcagcggctgtagtgtcccagagtcctcagctgtataatcaaacctccaatccacctggctctccgactgaggaagcacagcctagcactagcacaagtacacaggccccagccgcttcccctactggtgtagttcctggtaccaaatatgcagtacctgacacgtccacttaccagtatgatgaatcttcaggatattactatgatccgacaacagggctctattatgaccccaactcgcaatactactataattccttgacccagcagtacctttactgggatggggaaaaagagacctacgtgccagctgcagagtctagctcccaccagcagtcgggcctgcctcctgcaaaagaggggaaagagaagaaggagaaacccaagagcaaaacagcccagcagattgccaaagacatggaacgctgggctaagagtttgaataagcagaaagaaaactttaaaaatagctttcagcctgtcaattccttgagggaagaagaaaggagagaatctgctgcagcagacgctggctttgctctctttgagaagaagggagccttagctgaaaggcagcagctcatcccagaattggtgcgaaatggagatgaggagaatcccctcaaaaggggtctggttgctgcttacagtggtgacagtgacaatgaggaggagctggtggagagacttgagagtgaggaagagaagctagctgactggaagaagatggcctgtctgctctgccggcgccagttcccgaacaaagatgccctagtcaggcaccagcaactctcagaccttcacaagcaaaacatggacatctaccgacgatccaggctgagcgagcaggagctggaagccttggagctaagggagagagagatgaaataccgagaccgagctgcagaaagacgggagaagtacggcattccagaacctccagagcccaagcgcaagaagcagtttgatgccggcactgtgaattacgagcaacccaccaaagatggcattgaccacagtaacattggcaacaagatgctgcaggccatgggctggcgggaaggctctggcttgggacgaaagtgtcaaggcattacggctcccattgaggctcaagttcggctaaagggagctggcctaggagccaaaggcagcgcatatggtttgtcgggcgccgattcctacaaagatgctgtccggaaagccatgtttgcccggttcactgagatggagtgagagagagagagagagagagatgacaaggagcacaagaagtggtccatctcccgaattcgctgttaccgcctgtctctttaagggcatgccttgtgctgttaatagatcttagggtgaaccacttcattctgcagggttctccctcccaccttaaagaagttccccttatgtgggttgcctggtgaatggccttccttcccgccagagggcttgtgaacagaccggagaggacagtggattgtttatactccagtgtacatagtgtaatgtagcgtgtttacatgtgtagcctatgttgtggtccatcagcccctcacattcctaggggtttgagatgctgtaggtggtatgtgacaccaaagccacctctgtcatttgttgtgatgtcttttcttggcaaaagccttgtgtatatttgtatattacacatttgtacagaattttggaagattttcagtctagttgccaaatctggctcctttacaaaagaaataccttgagaaaaaaaaaaaaaaaaaaaagaaacaaaaaaagaacgacagaagaaaaaacagaaacaaacgcacgaacaaggcaaacacagcacaagaaaacaaggggggggcggggggggacgaaaagaatccccccggggggggcgcccacaatgggcggcccccagcttattgtggaagaaaaggggcggcccatagggggg

SEQ ID NO: 328209 - DNA, 1886 bp, Homo sapiens
tgataccaaaatatagtttgaactgcgtattagcaggtgagcaggagcaccttcaaatgaatcttcaaattggaaaatactgctacaccaccatgttggggatggagttgcaaatgccagtcttctcccatcagggacatttaacacgaaaccacaataaggcatcatttatacccactaagatggtaaaaatgaaaaagatggacaataacacaggtgcacataggatttgaacctccgtgcatcgctgatgggagcaagatgcgcgcagtctagctcccaccagcagtcgggcctgcctcctgcaaaagaggggaaagagaagaaggagaaacccaagagcaaaacagcccagcagattgccaaagacatggaacgctgggctaagagtttgaataagcagaaagaaaactttaaaaatagctttcagcctgtcaattccttgagggaagaagaaaggagagaatctgctgcagcagacgctggctttgctctctttgagaagaagggagccttagctgaaaggcagcagctcatcccagaattggtgcgaaatggagatgaggagaatcccctcaaaaggggtctggttgctgcttacagtggtgacagtgacaatgaggaggagctggtggagagacttgagagtgaggaagagaagctagctgactggaagaagatggcctgtctgctctgccggcgccagttcccgaacaaagatgccctagtcaggcaccagcaactctcagaccttcacaagcaaaacatggacatctaccgacgatccaggctgagcgagcaggagctggaagccttggagctaagggagagagagatgaaataccgagaccgagctgcagaaagacgggagaagtacggcattccagaacctccagagcccaagcgcaagaagcagtttgatgccggcactgtgaattacgagcaacccaccaaagatggcattgaccacagtaacattggcaacaagatgctgcaggccatgggctggcgggaaggctctggcttgggacgaaagtgtcaaggcattacggctcccattgaggctcaagttcggctaaagggagctggcctaggagccaaaggcagcgcatatggtttgtcgggcgccgattcctacaaagatgctgtccggaaagccatgtttgcccggttcactgagatggagtgagagagagagagagagagagatgacaaggagcacaagaagtggtccatctcccgaattcgctgttaccgcctgtctctttaagggcatgccttgtgctgttaatagatcttagggtgaaccacttcattctgcagggttctccctcccaccttaaagaagttccccttatgtgggttgcctggtgaatggccttccttcccgccagagggcttgtgaacagaccggagaggacagtggattgtttatactccagtgtacatagtgtaatgtagcgtgtttacatgtgtagcctatgttgtggtccatcagcccctcacattcctaggggtttgagatgctgtaggtggtatgtgacaccaaagccacctctgtcatttgttgtgatgtcttttcttggcaaaagccttgtgtatatttgtatattacacatttgtacagaattttggaagattttcagtctagttgccaaatctggctcctttacaaaagaaataccttgagaaaaaaaaaaaaaaaaaaaagaaacaaaaaaagaacgacagaagaaaaaacagaaacaaacgcacgaacaaggcaaacacagcacaagaaaacaaggggggggcggggggggacgaaaagaatccccccggggggggcgcccacaatgggcggcccccagcttattgtggaagaaaaggggcggcccatagggggg

SEQ ID NO: 328210 - DNA, 6135 bp, Homo sapiens
tgtgggtaggagacggccgtcggcggaggcgccattttgtgtagccgccgaaccttgttggaggttctggggcgcagaaccgctactgctgcttcggtctctccttgggaaaaaataaaatttgaaccttttggagctgtgtgctaaatcttcagtgggacaatgggttcagacaaaagagtgagtagaacagagcgtagtggaagatacggttccatcatagacagggatgaccgtgatgagcgtgaatcccgaagcaggcggagggactcagattacaaaagatctagtgatgatcggaggggtgatagatatgatgactaccgagactatgacagtccagagagagagcgtgaaagaaggaacagtgaccgatccgaagatggctaccattcagatggtgactatggtgagcacgactataggcatgacatcagtgacgagagggagagcaagaccatcatgctgcgcggccttcccatcaccatcacagagagcgatattcgagaaatgatggagtccttcgaaggccctcagcctgcggatgtgaggctgatgaagaggaaaacaggtgagagcttgcttagttcctgatattattgttctcttccccattcccacctcagtccctaaagaacatcctgattcccccagtcttcaagcacatgaattcagaatgaaaggtttgccatggctaaggaatgtgactctttgaaaaccatgttagcatctgaggaacttttttaaactttgttttagggacttttttttccttaggtaagtaatgatttataaactcctttttttttttgactatagtcggttgcatggttactttaagcgtggaatcaaatggagtggcatttagttcaggcggcttgttccttgccatggcaaagtatcaagaagatccccaagtcaagtcacatttgtaaagctgcttcccaattggctttgtcacgcagtgttgaagcagtgggagagagattcacctgttataaaggaactgactaacacaagtatcccgtctatatctgaatgctgtctctaggtgtaagccgtggtttcgccttcgtggagttttatcacttgcaagatgctaccagctggatggaagccaatcaggttgcttcactcaccaagtctagatattcatgaaaatggaacaagtctgtacaattttaaaaaaaggttgaaggagtggtttgttccaaaggagtgacttttttttaaaaaaaaagctttgtatatattaaaattgatgttactagaataagtacagtaccaaggacttcattatagaatttgttctgcctttaaacatggctacctacctggcagggctttgttaactactgaatacctgtctggtaatcactaaaacatcttaatgtttcccttttttctagtttgttatattcctattatgtccattgagagtaagcttagtatatcaaactctccatttgacagtgaagagaacatagtgaaagtctgtggcggcatttttataagtaattccttatttctgcctgaagaccacaaagcctcctggaggcgtaactgctcagaccggtcttcagggaatatttaaggacttagtggaatttatgaacaataagtctgatgagattagcctgggagtggtgtcctgcagctgtctaatctagagtggcattaacattctaatctccttgagaatgccttttatagtctgttcaaagcaagtcattgatggttcttcgaggtagtgttaactgaagtgttcttcagtttgtcaagataatgttcagtgcttggcacttaaataacattttttgcaagaactccaaggcacattattgaatgcctttaaccaagtgcattctgggaagtttgcttgactcattatcttgcttttctgcagcattctgtgatttgagtcatccatgaatccatgaataaaagttacattctttgattggtaatattgccatttataacaagactcactaatgagggtatcactttgactgactgatttgttaaagtttttaagcctctcattttcctaacccagaaatcacagcctgattttattaaaagtagagcttcattcatttcataccatagataccatcctagtaaatccagaacatatacaaggttcatgtgagtctgctttcttgacatgatagcattgtttgatgcagtggatatgtcagaatgactaacctaggagtttaaaactcctaagaaactaaaacctgtaagacatttaaaagtctccacaattttaatgtatacaaagctatgttactgtgtaacacattacagttcaaattcactccagaaataaaaggccagtaggattagggactcactggtagtttggagtctcccagcacacatccctcctagtgggatgatctattcacatatctcccagcttttttatttttgcttctgtatatcacagtgagtggatggcccttcagctttttctctcctggccagacatgcagtcttgcctttagatatcgcagagacaaaattcacagcatgtcttaaatcttccaggatttgcaagaaccaaattgctcaacagtatgtatgtttagaggggttagactcctttttaaaatctggatatctaaccacctacttaaatctgtttgatagtgtcaaaccacccccacccttgatcctcccacccccaagaaaaagaaaagatgctcctgttaaatgaaggctctttaggggtaggtgctaggtatactcttggctagattgattcagctcagaattttgactttttaaagctaagtccttgtagtcacatggttgacttgaaggatgaggtggtgtgtgcatttatgagcttttcctacccccctgaagaaacttcattggcctcctggttactcaccttgaagagagtaccatccattttagtgaaaaacacatctgtcacctaggacatgacatggttgcagttgacaggaaaaaaaaaatctcatttagttgttttagagttggtggcattcagaatagtccctcttgagaaagaattgtaaccagattccctttaaaaatgagttcccctccctttccccccaaaggactcatcctgaagcagaaggtgtggggggaaggagaaatgtaaaggcttttactttgcataaggatgggggactggggaaaaaggtgaagcgaagcccaaggacaccatgctaagggcaaaagtaagagacagtctcagaactgagagaattgtgtcttctgctttttgaagtagactgtcacactcaggcagcctgtcaatgctgaatgttaggacttctgtctccgctggagacacggcctggtgcaagtcagcgtttagtgtttgacagctttctcagcactccctgactccgtttacctttactccgcatcccattctcttactgcctatctgaaggattggatgggcagagtataggtggcggtggttggtcctccccgtatgttgtccatttaattccagagcactgatttttccgaagtgtgctctgccctgggaaaatggacacatgttcctcacaatgggaataactaattacttcttttcttacagaaaaagttggtgattcaaggaaagcacattgcaatgcattatagcaatcccagacctaagtttgaagattggctttgtaacaagtgctgccttaacaatttcaggaaaagactaaaatgcttccgatgtggagcagacaagtttgactctgaacaggaagtgcctcctggaaccacagagtcggttcagtctgtggattactactgtgatacgatcattcttcggaacatagctccgcacactgtggtggattccatcatgacagcactgtctccttacgcgtctttagctgtcaataacatccgcctcataaaagacaaacagacccagcagaacagaggcttcgcatttgtgcagctgtcctctgcaatggatgcttctcagctgcttcagatattacagagtctccatcctcctttgaaaattgatggcaaaactattggggttgattttgcaaaaagtgccagaaaagacttggtcctctcagatggtaaccgcgtcagcgccttctctgtagctagtacggctattgctgctgctcagtggtcatccacccagtctcaaagtggtgaaggaggcagtgttgactacagttatctgcaaccaggtcaagatggctatgcccaatatgctcagtattcacaggattatcagcagttttatcaacaacaagctggaggattggaatctgatgcatcatctgcatcaggcacagcagtgaccaccacctcagcggctgtagtgtcccagagtcctcagctgtataatcaaacctccaatccacctggctctccgactgaggaagcacagcctagcactagcacaagtacacaggccccagccgcttcccctactggtgtagttcctggtaccaaatatgcagtacctgacacgtccacttaccagtatgatgaatcttcaggatattactatgatccgacaacagggctctattatgaccccaactcgcaatactactataattccttgacccagcagtacctttactgggatggggaaaaagagacctacgtgccagctgcagagtctagctcccaccagcagtcgggcctgcctcctgcaaaagaggggaaagagaagaaggagaaacccaagagcaaaacagcccagcagattgccaaagacatggaacgctgggctaagagtttgaataagcagaaagaaaactttaaaaatagctttcagcctgtcaattccttgagggaagaagaaaggagagaatctgctgcagcagacgctggctttgctctctttgagaagaagggagccttagctgaaaggcagcagctcatcccagaattggtgcgaaatggagatgaggagaatcccctcaaaaggggtctggttgctgcttacagtggtgacagtgacaatgaggaggagctggtggagagacttgagagtgaggaagagaagctagctgactggaagaagatggcctgtctgctctgccggcgccagttcccgaacaaagatgccctagtcaggcaccagcaactctcagaccttcacaagcaaaacatggacatctaccgacgatccaggctgagcgagcaggagctggaagccttggagctaagggagagagagatgaaataccgagaccgagctgcagaaagacgggagaagtacggcattccagaacctccagagcccaagcgcaagaagcagtttgatgccggcactgtgaattacgagcaacccaccaaagatggcattgaccacagtaacattggcaacaagatgctgcaggccatgggctggcgggaaggctctggcttgggacgaaagtgtcaaggcattacggctcccattgaggctcaagttcggctaaagggagctggcctaggagccaaaggcagcgcatatggtttgtcgggcgccgattcctacaaagatgctgtccggaaagccatgtttgcccggttcactgagatggagtgagagagagagagagagagagatgacaaggagcacaagaagtggtccatctcccgaattcgctgttaccgcctgtctctttaagggcttgtgaacagaccggagaggacagtggattgtttatactccagtgtacatagtgtaatgtagcgtgtttacatgtgtagcctatgttgtggtccatcagcccctcacattcctaggggtttgagatgctgtaggtggtatgtgacaccaaagccacctctgtcatttgttgtgatgtcttttcttggcaaaagccttgtgtatatttgtatattacacatttgtacagaattttggaagattttcagtctagttgccaaatctggctcctttacaaaagaaataccttgagaaaaaaaaaaaaaaaaaaaagaaacaaaaaaagaacgacagaagaaaaaacagaaacaaacgcacgaacaaggcaaacacagcacaagaaaacaaggggggggcggggggggacgaaaagaatccccccggggggggcgcccacaatgggcggcccccagcttattgtggaagaaaaggggcggcccatagggggg

SEQ ID NO: 328211 - DNA, 1405 bp, Homo sapiens
cgaaagtgtcaaggcattacggctcccattgaggctcaagttcggctaaagggagctggcctaggagccaaaggagcgcatatggtttgtcgggcgccgattcctacaaagatgctgtccggaaagccatgtttgcccggttcagagctggtggagagacttgagagtgaggaagagaagctagctgactggaagaagatggcctgtctgctctgccggcgccagttcccgaacaaagatgccctagtcaggcaccagcaactctcagaccttcacaagcaaaacatggacatctaccgacgatccaggctgagcgagcaggagctggaagccttggagctaagggagagagagatgaaataccgagaccgagctgcagaaagacgggagaagtacggcattccagaacctccagagcccaagcgcaagaagcagtttgatgccggcactgtgaattacgagcaacccaccaaagatggcattgaccacagtaacattggcaacaagatgctgcaggccatgggctggcgggaaggctctggcttgggacgaaagtgtcaaggcattacggctcccattgaggctcaagttcggctaaagggagctggcctaggagccaaaggcagcgcatatggtttgtcgggcgccgattcctacaaagatgctgtccggaaagccatgtttgcccggttcactgagatggagtgagagagagagagagagagagatgacaaggagcacaagaagtggtccatctcccgaattcgctgttaccgcctgtctctttaagggcatgccttgtgctgttaatagatcttagggtgaaccacttcattctgcagggttctccctcccaccttaaagaagttccccttatgtgggttgcctggtgaatggccttccttcccgccagagggcttgtgaacagaccggagaggacagtggattgtttatactccagtgtacatagtgtaatgtagcgtgtttacatgtgtagcctatgttgtggtccatcagcccctcacattcctaggggtttgagatgctgtaggtggtatgtgacaccaaagccacctctgtcatttgttgtgatgtcttttcttggcaaaagccttgtgtatatttgtatattacacatttgtacagaattttggaagattttcagtctagttgccaaatctggctcctttacaaaagaaataccttgagaaaaaaaaaaaaaaaaaaaagaaacaaaaaaagaacgacagaagaaaaaacagaaacaaacgcacgaacaaggcaaacacagcacaagaaaacaaggggggggcggggggggacgaaaagaatccccccggggggggcgcccacaatgggcggcccccagcttattgtggaagaaaaggggcggcccatagggggg

SEQ ID NO: 328212 - DNA, 5204 bp, Homo sapiens
tgtgggtaggagacggccgtcggcggaggcgccattttgtgtagccgccgaaccttgttggaggttctggggcgcagaaccgctactgctgcttcggtctctccttgggaaaaaataaaatttgaaccttttggagctgtgtgctaaatcttcagtgggacaatgggttcagacaaaagagtgagtagaacagagcgtagtggaagatacggttccatcatagacagggatgaccgtgatgagcgtgaatcccgaagcaggcggagggactcagattacaaaagatctagtgatgatcggaggggtgatagatatgatgactaccgagactatgacagtccagagagagagcgtgaaagaaggaacagtgaccgatccgaagatggctaccattcagatggtgactatggtgagcacgactataggcatgacatcagtgacgagagggagagcaagaccatcatgctgcgcggccttcccatcaccatcacagagagcgatattcgagaaatgatggagtccttcgaaggccctcagcctgcggatgtgaggctgatgaagaggaaaacaggtgagagcttgcttagttcctgatattattgttctcttccccattcccacctcagtccctaaagaacatcctgattcccccagtcttcaagcacatgaattcagaatgaaaggtttgccatggctaaggaatgtgactctttgaaaaccatgttagcatctgaggaacttttttaaactttgttttagggacttttttttccttaggtaagtaatgatttataaactcctttttttttttgactatagtcggttgcatggttactttaagcgtggaatcaaatggagtggcatttagttcaggcggcttgttccttgccatggcaaagtatcaagaagatccccaagtcaagtcacatttgtaaagctgcttcccaattggctttgtcacgcagtgttgaagcagtgggagagagattcacctgttataaaggaactgactaacacaagtatcccgtctatatctgaatgctgtctctaggtgtaagccgtggtttcgccttcgtggagttttatcacttgcaagatgctaccagctggatggaagccaatcaggttgcttcactcaccaagtctagatattcatgaaaatggaacaagtctgtacaattttaaaaaaaggttgaaggagtggtttgttccaaaggagtgacttttttttaaaaaaaaagctttgtatatattaaaattgatgttactagaataagtacagtaccaaggacttcattatagaatttgttctgcctttaaacatggctacctacctggcagggctttgttaactactgaatacctgtctggtaatcactaaaacatcttaatgtttcccttttttctagtttgttatattcctattatgtccattgagagtaagcttagtatatcaaactctccatttgacagtgaagagaacatagtgaaagtctgtggcggcatttttataagtaattccttatttctgcctgaagaccacaaagcctcctggaggcgtaactgctcagaccggtcttcagggaatatttaaggacttagtggaatttatgaacaataagtctgatgagattagcctgggagtggtgtcctgcagctgtctaatctagagtggcattaacattctaatctccttgagaatgccttttatagtctgttcaaagcaagtcattgatggttcttcgaggtagtgttaactgaagtgttcttcagtttgtcaagataatgttcagtgcttggcacttaaataacattttttgcaagaactccaaggcacattattgaatgcctttaaccaagtgcattctgggaagtttgcttgactcattatcttgcttttctgcagcattctgtgatttgagtcatccatgaatccatgaataaaagttacattctttgattggtaatattgccatttataacaagactcactaatgagggtatcactttgactgactgatttgttaaagtttttaagcctctcattttcctaacccagaaatcacagcctgattttattaaaagtagagcttcattcatttcataccatagataccatcctagtaaatccagaacatatacaaggttcatgtgagtctgctttcttgacatgatagcattgtttgatgcagtggatatgtcagaatgactaacctaggagtttaaaactcctaagaaactaaaacctgtaagacatttaaaagtctccacaattttaatgtatacaaagctatgttactgtgtaacacattacagttcaaattcactccagaaataaaaggccagtaggattagggactcactggtagtttggagtctcccagcacacatccctcctagtgggatgatctattcacatatctcccagcttttttatttttgcttctgtatatcacagtgagtggatggcccttcagctttttctctcctggccagacatgcagtcttgcctttagatatcgcagagacaaaattcacagcatgtcttaaatcttccaggatttgcaagaaccaaattgctcaacagtatgtatgtttagaggggttagactcctttttaaaatctggatatctaaccacctacttaaatctgtttgatagtgtcaaaccacccccacccttgatcctcccacccccaagaaaaagaaaagatgctcctgttaaatgaaggctctttaggggtaggtgctaggtatactcttggctagattgattcagctcagaattttgactttttaaagctaagtccttgtagtcacatggttgacttgaaggatgaggtggtgtgtgcatttatgagcttttcctacccccctgaagaaacttcattggcctcctggttactcaccttgaagagagtaccatccattttagtgaaaaacacatctgtcacctaggacatgacatggttgcagttgacaggaaaaaaaaaatctcatttagttgttttagagttggtggcattcagaatagtccctcttgagaaagaattgtaaccagattccctttaaaaatgagttcccctccctttccccccaaaggactcatcctgaagcagaaggtgtggggggaaggagaaatgtaaaggcttttactttgcataaggatgggggactggggaaaaaggtgaagcgaagcccaaggacaccatgctaagggcaaaagtaagagacagtctcagaactgagagaattgtgtcttctgctttttgaagtagactgtcacactcaggcagcctgtcaatgctgaatgttaggacttctgtctccgctggagacacggcctggtgcaagtcagcgtttagtgtttgacagctttctcagcactccctgactccgtttacctttactccgcatcccattctcttactgcctatctgaaggattggatgggcagagtataggtggcggtggttggtcctccccgtatgttgtccatttaattccagagcactgatttttccgaagtgtgctctgccctgggaaaatggacacatgttcctcacaatgggaataactaattacttcttttcttacagaaaaagttggtgattcaaggaaagcacattgcaatgcattatagcaatcccagacctaagtttgaagattggctttgtaacaagtgctgccttaacaatttcaggaaaagactaaaatgcttccgatgtggagcagacaagtttgactctgaacaggaagtgcctcctggaaccacagagtcggttcagtctgtggattactactgtgatacgatcattcttcggaacatagctccgcacactgtggtggattccatcatgacagcactgtctccttacgcgtctttagctgtcaataacatccgcctcataaaagacaaacagacccagcagaacagaggcttcgcatttgtgcagctgtcctctgcaatggatgcttctcagctgcttcagatattacagagtctccatcctcctttgaaaattgatggcaaaactattggggttgattttgcaaaaagtgccagaaaagacttggtcctctcagatggtaaccgcgtcagcgccttctctgtagctagtacggctattgctgctgctcagtggtcatccacccagtctcaaagtggtgaaggaggcagtgttgactacagttatctgcaaccaggtcaagatggctatgcccaatatgctcagtattcacaggattatcagcagttttatcaacaacaagctggaggattggaatctgatgcatcatctgcatcaggcacagcagtgaccaccacctcagcggctgtagtgtcccagagtcctcagctgtataatcaaacctccaatccacctggctctccgactgaggaagcacagcctagcactagcacaagtacacaggccccagccgcttcccctactggtgtagttcctggtaccaaatatgcagtacctgacacgtccacttaccagtatgatgaatcttcaggatattactatgatccgacaacagggctctattatgaccccaactcgcaatactactataattccttgacccagcagtacctttactgggatggggaaaaagagacctacgtgccagctgcagagtctagctcccaccagcagtcgggcctgcctcctgcaaaagaggggaaagagaagaaggagaaacccaagagcaaaacagcccagcagattgccaaagacatggaacgctgggctaagagtttgaataagcagaaagaaaactttaaaaatagctttcagcctgtcaattccttgagggaagaagaaaggagagaatctgctgcagcagacgctggctttgctctctttgagaagaagggagccttagctgaaaggcagcagctcatcccagaattggtgcgaaatggagatgaggagaatcccctcaaaaggggtctggttgctgcttacagtggtgacagtgacaatgaggaggagctggtggagagacttgagagtgaggaagccagtcttctcccatcaggcctttaaacattcagcaatgcaagtaccataaggtggaattcattcctcatctgaaccaaaaagcaaaaatggtaaaacttttttttttttttgggaggagaagtctcgctctgtaattcaagccggggcgacagagaaagactccgtctcaaaa

SEQ ID NO: 328213 - DNA, 5235 bp, Homo sapiens
tgtgggtaggagacggccgtcggcggaggcgccattttgtgtagccgccgaaccttgttggaggttctggggcgcagaaccgctactgctgcttcggtctctccttgggaaaaaataaaatttgaaccttttggagctgtgtgctaaatcttcagtgggacaatgggttcagacaaaagagtgagtagaacagagcgtagtggaagatacggttccatcatagacagggatgaccgtgatgagcgtgaatcccgaagcaggcggagggactcagattacaaaagatctagtgatgatcggaggggtgatagatatgatgactaccgagactatgacagtccagagagagagcgtgaaagaaggaacagtgaccgatccgaagatggctaccattcagatggtgactatggtgagcacgactataggcatgacatcagtgacgagagggagagcaagaccatcatgctgcgcggccttcccatcaccatcacagagagcgatattcgagaaatgatggagtccttcgaaggccctcagcctgcggatgtgaggctgatgaagaggaaaacaggtgagagcttgcttagttcctgatattattgttctcttccccattcccacctcagtccctaaagaacatcctgattcccccagtcttcaagcacatgaattcagaatgaaaggtttgccatggctaaggaatgtgactctttgaaaaccatgttagcatctgaggaacttttttaaactttgttttagggacttttttttccttaggtaagtaatgatttataaactcctttttttttttgactatagtcggttgcatggttactttaagcgtggaatcaaatggagtggcatttagttcaggcggcttgttccttgccatggcaaagtatcaagaagatccccaagtcaagtcacatttgtaaagctgcttcccaattggctttgtcacgcagtgttgaagcagtgggagagagattcacctgttataaaggaactgactaacacaagtatcccgtctatatctgaatgctgtctctaggtgtaagccgtggtttcgccttcgtggagttttatcacttgcaagatgctaccagctggatggaagccaatcaggttgcttcactcaccaagtctagatattcatgaaaatggaacaagtctgtacaattttaaaaaaaggttgaaggagtggtttgttccaaaggagtgacttttttttaaaaaaaaagctttgtatatattaaaattgatgttactagaataagtacagtaccaaggacttcattatagaatttgttctgcctttaaacatggctacctacctggcagggctttgttaactactgaatacctgtctggtaatcactaaaacatcttaatgtttcccttttttctagtttgttatattcctattatgtccattgagagtaagcttagtatatcaaactctccatttgacagtgaagagaacatagtgaaagtctgtggcggcatttttataagtaattccttatttctgcctgaagaccacaaagcctcctggaggcgtaactgctcagaccggtcttcagggaatatttaaggacttagtggaatttatgaacaataagtctgatgagattagcctgggagtggtgtcctgcagctgtctaatctagagtggcattaacattctaatctccttgagaatgccttttatagtctgttcaaagcaagtcattgatggttcttcgaggtagtgttaactgaagtgttcttcagtttgtcaagataatgttcagtgcttggcacttaaataacattttttgcaagaactccaaggcacattattgaatgcctttaaccaagtgcattctgggaagtttgcttgactcattatcttgcttttctgcagcattctgtgatttgagtcatccatgaatccatgaataaaagttacattctttgattggtaatattgccatttataacaagactcactaatgagggtatcactttgactgactgatttgttaaagtttttaagcctctcattttcctaacccagaaatcacagcctgattttattaaaagtagagcttcattcatttcataccatagataccatcctagtaaatccagaacatatacaaggttcatgtgagtctgctttcttgacatgatagcattgtttgatgcagtggatatgtcagaatgactaacctaggagtttaaaactcctaagaaactaaaacctgtaagacatttaaaagtctccacaattttaatgtatacaaagctatgttactgtgtaacacattacagttcaaattcactccagaaataaaaggccagtaggattagggactcactggtagtttggagtctcccagcacacatccctcctagtgggatgatctattcacatatctcccagcttttttatttttgcttctgtatatcacagtgagtggatggcccttcagctttttctctcctggccagacatgcagtcttgcctttagatatcgcagagacaaaattcacagcatgtcttaaatcttccaggatttgcaagaaccaaattgctcaacagtatgtatgtttagaggggttagactcctttttaaaatctggatatctaaccacctacttaaatctgtttgatagtgtcaaaccacccccacccttgatcctcccacccccaagaaaaagaaaagatgctcctgttaaatgaaggctctttaggggtaggtgctaggtatactcttggctagattgattcagctcagaattttgactttttaaagctaagtccttgtagtcacatggttgacttgaaggatgaggtggtgtgtgcatttatgagcttttcctacccccctgaagaaacttcattggcctcctggttactcaccttgaagagagtaccatccattttagtgaaaaacacatctgtcacctaggacatgacatggttgcagttgacaggaaaaaaaaaatctcatttagttgttttagagttggtggcattcagaatagtccctcttgagaaagaattgtaaccagattccctttaaaaatgagttcccctccctttccccccaaaggactcatcctgaagcagaaggtgtggggggaaggagaaatgtaaaggcttttactttgcataaggatgggggactggggaaaaaggtgaagcgaagcccaaggacaccatgctaagggcaaaagtaagagacagtctcagaactgagagaattgtgtcttctgctttttgaagtagactgtcacactcaggcagcctgtcaatgctgaatgttaggacttctgtctccgctggagacacggcctggtgcaagtcagcgtttagtgtttgacagctttctcagcactccctgactccgtttacctttactccgcatcccattctcttactgcctatctgaaggattggatgggcagagtataggtggcggtggttggtcctccccgtatgttgtccatttaattccagagcactgatttttccgaagtgtgctctgccctgggaaaatggacacatgttcctcacaatgggaataactaattacttcttttcttacagaaaaagttggtgattcaaggaaagcacattgcaatgcattatagcaatcccagacctaagtttgaagattggctttgtaacaagtgctgccttaacaatttcaggaaaagactaaaatgcttccgatgtggagcagacaagtttggtaagactggattcagctgtttgcaatatgcattaaaacctactaactggggcagggagcagtggctcactgtaatcccaccactttgcaaggccaaggtgggaagatcacttgaggacaggagttcaataccagcctggcaagagatagcaagaccctgcctgtacaaaaaaagaaattttaaattatctgggtgtggtggcacacacctgtagtcctagctactcaggaggtttaggtgagaggattgcttgagtccaggagttgaaggctgcagtgagctatggtcataccactgcactccagcctgggcaacaaacaagaccctgcctctcaaaaaaaaacaaaacaaaaatctgacaaatagggttgttaactgtgagcctgaggaaaagtatagattttagtgtacttaaacaacttgtctgttttctttaaatcttttcccttaggttagataatgctgctcatgattgtgagagcacagaaagttcttttgttttctagaattaagtctgctcacctggtttgcattctgcatctgcctttctttagtgcagggtagtgtcagtcccactgtggcccaaagtttgcattctgcgttaaccaagtcacaattaatgaggttttactataggcacaaatgcttaaaaaagaaaaaaacgattgttttgtgtggttaaaataaaaacttgtggggattttaatgtatttctttggtgaaaatacattagttgtttgtctctaattggatcactttcccttctagactctgaacaggaagtgcctcctggaaccacagagtcggttcagtctgtggattactactgtgatacgatcattcttcggaacatagctccgcacactgtggtggattccatcatgacagcactgtctccttacgcgtctttagctgtcaataacatccgcctcataaaagacaaacagacccagcagaacagaggcttcgcatttgtgcagctgtcctctgcaatggatgcttctcagctgcttcagatattacagagtctccatcctcctttgaaaattgatggcaaaactattggggttgattttgcaaaaagtgccagaaaagacttggtcctctcagatggtaaccgcgtcagcgccttctctgtagctagtacggctattgctgctgctcagtggtcatccacccagtctcaaagtggtgaagaagagagagagaaaatataggagagaatcatcattcccattttacagatggtgatactgaggttcagtgttccacgtcacatagctatttagggggaaaaccaggggtctaacgcaggccttctgactttggtcctggtgagaaaaaaagattgatgtttaggaaacagctttgcccctccaagccaagggggccttgcgaaaggtaatggtgaagcacacagcctcgtgccaccaagctggagagtgaatcctgatttgctggctgtgtgaccacaggcaagcctagctctat

SEQ ID NO: 328214 - DNA, 2658 bp, Homo sapiens
tgtgggtaggagacggccgtcggcggaggcgccattttgtgtagccgccgaaccttgttggaggttctggggcgcagaaccgctactgctgcttcggtctctccttgggaaaaaataaaatttgaaccttttggagctgtgtgctaaatcttcagtgggacaatgggttcagacaaaagagtgagtagaacagagcgtagtggaagatacggttccatcatagacagggatgaccgtgatgagcgtgaatcccgaagcaggcggagggactcagattacaaaagatctagtgatgatcggaggggtgatagatatgatgactaccgagactatgacagtccagagagagagcgtgaaagaaggaacagtgaccgatccgaagatggctaccattcagatggtgactatggtgagcacgactataggcatgacatcagtgacgagagggagagcaagaccatcatgctgcgcggccttcccatcaccatcacagagagcgatattcgagaaatgatggagtccttcgaaggccctcagcctgcggatgtgaggctgatgaagaggaaaacaggtgagagcttgcttagttcctgatattattgttctcttccccattcccacctcagtccctaaagaacatcctgattcccccagtcttcaagcacatgaattcagaatgaaaggtttgccatggctaaggaatgtgactctttgaaaaccatgttagcatctgaggaacttttttaaactttgttttagggacttttttttccttaggtaagtaatgatttataaactcctttttttttttgactatagtcggttgcatggttactttaagcgtggaatcaaatggagtggcatttagttcaggcggcttgttccttgccatggcaaagtatcaagaagatccccaagtcaagtcacatttgtaaagctgcttcccaattggctttgtcacgcagtgttgaagcagtgggagagagattcacctgttataaaggaactgactaacacaagtatcccgtctatatctgaatgctgtctctaggtgtaagccgtggtttcgccttcgtggagttttatcacttgcaagatgctaccagctggatggaagccaatcaggttgcttcactcaccaagtctagatattcatgaaaatggaacaagtctgtacaattttaaaaaaaggttgaaggagtggtttgttccaaaggagtgacttttttttaaaaaaaaagctttgtatatattaaaattgatgttactagaataagtacagtaccaaggacttcattatagaatttgttctgcctttaaacatggctacctacctggcagggctttgttaactactgaatacctgtctggtaatcactaaaacatcttaatgtttcccttttttctagtttgttatattcctattatgtccattgagagtaagcttagtatatcaaactctccatttgacagtgaagagaacatagtgaaagtctgtggcggcatttttataagtaattccttatttctgcctgaagaccacaaagcctcctggaggcgtaactgctcagaccggtcttcagggaatatttaaggacttagtggaatttatgaacaataagtctgatgagattagcctgggagtggtgtcctgcagctgtctaatctagagtggcattaacattctaatctccttgagaatgccttttatagtctgttcaaagcaagtcattgatggttcttcgaggtagtgttaactgaagtgttcttcagtttgtcaagataatgttcagtgcttggcacttaaataacattttttgcaagaactccaaggcacattattgaatgcctttaaccaagtgcattctgggaagtttgcttgactcattatcttgcttttctgcagcattctgtgatttgagtcatccatgaatccatgaataaaagttacattctttgattggtaatattgccatttataacaagactcactaatgagggtatcactttgactgactgatttgttaaagtttttaagcctctcattttcctaacccagaaatcacagcctgattttattaaaagtagagcttcattcatttcataccatagataccatcctagtaaatccagaacatatacaaggttcatgtgagtctgctttcttgacatgatagcattgtttgatgcagtggatatgtcagaatgactaacctaggagtttaaaactcctaagaaactaaaacctgtaagacatttaaaagtctccacaattttaatgtatacaaagctatgttactgtgtaacacattacagttcaaattcactccagaaataaaaggccagtaggattagggactcactggtagtttggagtctcccagcacacatccctcctagtgggatgatctattcacatatctcccagttcaagcgattctcctgcctcagcctcctgagtagctgggattacaggtgcccgccaccacgcctgggctgatttttgtagatatgaggtctcactatgttgcccgggctggtctcaaactcctgggattcaagtgatcctcccacctcagcctcctgagtcactggggactattcagacttgcaccactggcacctgggctgttagccagaacaattttttaaaggagg

SEQ ID NO: 328215 - DNA, 380 bp, Homo sapiens
aaaaaaaaaattgcagtgaacattaccatggagtgcttgtgtaatctctgtacacttcctgctaaggataatttctaggagtggagggtctgtttcaaagagtacagggtgatgttaattgtgattttgtttattgtaactcagagagagcgtgaaagaaggaacagtgaccgatccgaagatggctaccattcagatggtgactatggtgagcacgactataggcatgacatcagtgacgagagggagagcaagaccatcatgctgcgcggccttcccatcaccatcacagagagcgatgtaaggggaaatgacagttataaccagcagtcagtaggcacaatgaactttgagcttctaccattattttctcatgctat

SEQ ID NO: 328216 - DNA, 1556 bp, Homo sapiens
  misc_feature (4)..(4): n is a, c, g, or t
agcngcacgcaccacagctcgagcaccgcccttccggttggagccattgcaagccccccccacgccccgcccccctcgctaggcgctcgccacgcccatgcctccgtcgctgcgcggcccaccccggatgtcagccccccgcgccgaccagaatccgtgaacatggcgaacgaggttatcaagtgcaaggctgcagttgcttgggaggctggaaagcctctctccatagaggagatagaggtggcacccccaaaggctcatgaagttcgaatcaagatcattgccactgcggtttgccacaccgatgcctataccctgagtggagctgatcctgagggttgttttccagtgatcttgggacatgaaggtgctggaattgtggaaagtgttggtgagggagttactaagctgaaggcgggtgacactgtcatcccactttacatcccacagtgtggagaatgcaaattttgtctaaatcctaaaactaacctttgccagaagataagagtcactcaagggaaaggattaatgccagatggtaccagcagatttacttgcaaaggaaagacaattttgcattacatgggaaccagcacattttctgaatacacagttgtggctgatatctctgttgctaaaatagatcctttagcacctttggataaagtctgccttctaggttgtggcatttcaaccggttatggtgctgctgtgaacactgccaagttggagcctggctctgtttgtgccgtctttggtctgggaggagtcggattggcagttatcatgggctgtaaagtggctggtgcttcccggatcattggtgtggacatcaataaagataaatttgcaagggccaaagagtttggagccactgaatgtattaaccctcaggattttagtaaacccatccaggaagtgctcattgagatgaccgatggaggagtggactattcctttgaatgtattggtaatgtgaaggtcatgagagcagcacttgaggcatgtcacaagggctggggcgtcagcgtcgtggttggagtagctgcttcaggtgaagaaattgccactcgtccattccagctggtaacaggtcgcacatggaaaggcactgcctttggaggatggaagagtgtagaaagtgtcccaaagttggtgtctgaatatatgtccaaaaagataaaagttgatgaatttgtgactcacaatctgtcttttgatgaaatcaacaaagcctttgaactgatgcattctggaaagagcattcgaactgttgtaaagatttaattcaaaagagaaaaataatgtccatcctgtcgtgatgtgataggagcagcttaacaggcagggagaagcgcctccaacctcacagcctcgtagagcttcacagctactccagaaaatagggttatgtgtgtcattcatgaatctctataatcaaggacaaggataattcagtcatgaacctgttttctggatgctcctccacataaataattgctagtttattaaggaatattttaacataataaaagtaatttctacatttgtgtgga

SEQ ID NO: 328217 - DNA, 2870 bp, Homo sapiens
  misc_feature (4)..(4): n is a, c, g, or t
agcngcacgcaccacagctcgagcaccgcccttccggttggagccattgcaagccccccccacgccccgcccccctcgctaggcgctcgccacgcccatgcctccgtcgctgcgcggcccaccccggatgtcagccccccgcgccgaccagaatccgtgaacatggcgaacgaggttatcaagtgcaaggctgcagttgcttgggaggctggaaagcctctctccatagaggagatagaggtggcacccccaaaggctcatgaagttcgaatcaagatcattgccactgcggtttgccacaccgatgcctataccctgagtggagctgatcctgagggttgttttccagtgatcttgggacatgaaggtgctggaattgtggaaagtgttggtgagggagttactaagctgaaggcgggtgacactgtcatcccactttacatcccacagtgtggagaatgcaaattttgtctaaatcctaaaactaacctttgccagaagataagagtcactcaagggaaaggattaatgccagatggtaccagcagatttacttgcaaaggaaagacaattttgcattacatgggaaccagcacattttctgaatacacagttgtggctgatatctctgttgctaaaatagatcctttagcacctttggataaagtctgccttctaggttgtggcatttcaaccggttatggtgctgctgtgaacactgccaagttggagcctggctctgtttgtgccgtctttggtctgggaggagtcggattggcagttatcatgggctgtaaagtggctggtgcttcccggatcattggtgtggacatcaataaagataaatttgcaagggccaaagagtttggagccactgaatgtattaaccctcaggattttagtaaacccatccaggaagtgctcattgagatgaccgatggaggagtggactattcctttgaatgtattggtaatgtgaaggtcatgagagcagcacttgaggcatgtcacaagggctggggcgtcagcgtcgtggttggagtagctgcttcaggtgaagaaattgccactcgtccattccagctggtaacaggtcgcacatggaaaggcactgcctttggaggatggaagagtgtagaaagtgtcccaaagttggtgtctgaatatatgtccaaaaagataaaagttgatgaatttgtgactcacaatctgtcttttgatgaaatcaacaaagcctttgaactgatgcattctggaaagaggtaggctttctctttatatatcatagaatgtaataatgatgttgagtttgaggggatggagagtcgaaaaacacaattttagttgtcttaaaggtatcatttaaaacttagtatgttgcttccttttacagcattcgaactgttgtaaagatttaattcaaaagagaaaaataatgtccatcctgtcgtgatgtgataggagcagcttaacaggcagggagaagcgcctccaacctcacagcctcgtagagcttcacagctactccagaaaatagggttatgtgtgtcattcatgaatctctataatcaaggacaaggataattcagtcatgaacctgttttctggatgctcctccacataaataattgctagtttattaaggaatattttaacataataaaagtaatttctacatttgtgtggaaattgtcttgttttatgctgtcatcattgtcacggtttgtctgcccattatcttcattctgcaagggaaagggaaaggaagcagggcagtggtgggtgtctgaaacctcagaaacataacgttgaacttttaagggtctcagtccccgttgattaaagaacagatcctagccatcagtgacaaagttaatcaggacccaagtctgcttctgtgatattatctttaagggaggtactgtgccttgttcatacctgtaccccaaattcctaggatggcatctgcccttcagggggcactaaaatgtattattgaaacagcattctgggcttaaataggtgtatgtatgtgttggttgtgactgtactatttctagtatagtgaactacatactgaatatccaagttctcagcacctacttttgtcaaatcttaacattttgccacttcgagatcacattgccattcctcccctccagaggtaacaattatccacaatttgatgtttatcattcctgtgttgttgtactttcactgtgtataacctaaaccatctactctttagtactgttttatatatttttaagcctcatacttgctcattctacagcttttttcactcattattgtataattatatctgaagctctcgttcattaattttagtcctgtgtagcagaattcaattacgggaactaccataatttatctgttctccagttgaaggcatgaagttgttgccagtttctgtattataacactgtagtggaacattcttctgcattgggctcactgcgtgttacctaagacgtatcacagaataaacacatttagccttatagacattgccaaattgctcttcaaagtaaatgtgagtttttgtgaattacatgagtatggaatggtgttttattatgactttagtttgcattttcctcaattctcgttaaatccttcattctaatggacattttattgtgaagaacctgttcatatcctgtgctcaactttgtattgaattatttttctctgaataatttttaggagttcttttattctagacatcaatcatttgtcagttttatatgttgcaaatatcttctagtctatcttgtgacttttctttttactttatggtattttgttgaataaagttttaatgtagtcacctaaatcttcctggtggt

SEQ ID NO: 328218 - DNA, 1975 bp, Homo sapiens
  misc_feature (4)..(4): n is a, c, g, or t
agcngcacgcaccacagctcgagcaccgcccttccggttggagccattgcaagccccccccacgccccgcccccctcgctaggcgctcgccacgcccatgcctccgtcgctgcgcggcccaccccggatgtcagccccccgcgccgaccagaatccgtgaacatggcgaacgaggttatcaagtgcaaggctgcagttgcttgggaggctggaaagcctctctccatagaggagatagaggtggcacccccaaaggctcatgaagttcgaatcaagatcattgccactgcggtttgccacaccgatgcctataccctgagtggagctgatcctgagggttgttttccagtgatcttgggacatgaaggtgctggaattgtggaaagtgttggtgagggagttactaagctgaaggcgggtgacactgtcatcccactttacatcccacagtgtggagaatgcaaattttgtctaaatcctaaaactaacctttgccagaagataagagtcactcaagggaaaggattaatgccagatggtaccagcagatttacttgcaaaggaaagacaattttgcattacatgggaaccagcacattttctgaatacacagttgtggctgatatctctgttgctaaaatagatcctttagcacctttggataaagtctgccttctaggttgtggcatttcaaccggttatggtgctgctgtgaacactgccaagttggagcctggctctgtttgtgccgtctttggtctgggaggagtcggattggcagttatcatgggctgtaaagtggctggtgcttcccggatcattggtgtggacatcaataaagataaatttgcaagggccaaagagtttggagccactgaatgtattaaccctcaggattttagtaaacccatccaggaagtgctcattgagatgaccgatggaggagtggactattcctttgaatgtattggtaatgtgaaggtcatgagagcagcacttgaggcatgtcacaagggctggggcgtcagcgtcgtggttggagtagctgcttcaggtgaagaaattgccactcgtccattccagctggtaacaggtcgcacatggaaaggcactgcctttggaggatggaagagtgtagaaagtgtcccaaagttggtgtctgaatatatgtccaaaaagataaaagttgatgaatttgtgactcacaatctgtcttttgatgaaatcaacaaagcctttgaactgatgcattctggaaagagcattcgaactgttgtaaagatttaattcaaaagagaaaaataatgtccatcctgtcgtgatgtgataggagcagcttaacaggcagggagaagcgcctccaacctcacagcctcgtagagcttcacagctactccagaaaatagggttatgtgtgtcattcatgaatctctataatcaaggacaaggataattcagtcatgaacctgttttctggatgctcctccacataaataattgctagtttattaaggaatattttaacataataaaagtaatttctacatttgtgtggaaattgtcttgttttatgctgtcatcattgtcacggtttgtctgcccattatcttcattctgcaagggaaagggaaaggaagcagggcagtggtgggtgtctgaaacctcagaaacataacgttgaacttttaagggtctcagtccccgttgattaaagaacagatcctagccatcagtgacaaagttaatcaggacccaagtctgcttctgtgatattatctttaagggaggtactgtgccttgttcatacctgtaccccaaattcctaggatggcatctgcccttcagggggcactaaaatgtattattgaaacagcattctgagaacttggatattcagtatgtagttcactatactagaaatagtacagtcacaaccaacacacacatacacctatttaagcccagaatggtcgac

SEQ ID NO: 328219 - DNA, 1565 bp, Homo sapiens
  misc_feature (4)..(4): n is a, c, g, or t
agcngcacgcaccacagctcgagcaccgcccttccggttggagccattgcaagccccccccacgccccgcccccctcgctaggcgctcgccacgcccatgcctccgtcgctgcgcggcccaccccggatgtcagccccccgcgccgaccagaatccgtgaacatggcgaacgaggttatcaagtgcaaggctgcagttgcttgggaggctggaaagcctctctccatagaggagatagaggtggcacccccaaaggctcatgaagttcgaatcaagatcattgccactgcggtttgccacaccgatgcctataccctgagtggagctgatcctgagggttgttttccagtgatcttgggacatgaaggtgctggaattgtggaaagtgttggtgagggagttactaagctgaaggcgggtgacactgtcatcccactttacatcccacagtgtggagaatgcaaattttgtctaaatcctaaaactaacctttgccagaagataagagtcactcaagggaaaggattaatgccagatggtaccagcagatttacttgcaaaggaaagacaattttgcattacatgggaaccagcacattttctgaatacacagttgtggctgatatctctgttgctaaaatagatcctttagcacctttggataaagtctgccttctaggttgtggcatttcaaccggttatggtgctgctgtgaacactgccaagttggagcctggctctgtttgtgccgtctttggtctgggaggagtcggattggcagttatcatgggctgtaaagtggctggtgcttcccggatcattggtgtggacatcaataaagataaatttgcaagggccaaagagtttggagccactgaatgtattaaccctcaggattttagtaaacccatccaggaagtgctcattgagatgaccgatggaggagtggactattcctttgaatgtattggtaatgtgaaggtcatgagagcagcacttgaggcatgtcacaagggctggggcgtcagcgtcgtggttggagtagctgcttcaggtgaagaaattgccactcgtccattccagctggtaacaggtcgcacatggaaaggcactgcctttggaggatggaagagtgtagaaagtgtcccaaagttggtgtctgaatatatgtccaaaaagataaaagttgatgaatttgtgactcacaatctgtcttttgatgaaatcaacaaagcctttgaactgatgcattctggaaagagcattcgaactgttgtaaagatttaattcaaaagagaaaaataatgtccatcctgtcgtgatgtgataggagcagcttaacaggcagggagaagcgcctccaacctcacagcctcgtagagcttcacagctactccagaaaatagggttatgtgtgtcattcatgaatctctataatcaaggacaaggataattcagtcatgaacctgttttctggatgctcctccacataaatgtagaaattacttttattatgttaaaatattccttaataaactagcaattatgtcgacgcggccgcgaat

SEQ ID NO: 328220 - DNA, 1888 bp, Homo sapiens
  misc_feature (4)..(4): n is a, c, g, or t
agcngcacgcaccacagctcgagcaccgcccttccggttggagccattgcaagccccccccacgccccgcccccctcgctaggcgctcgccacgcccatgcctccgtcgctgcgcggcccaccccggatgtcagccccccgcgccgaccagaatccgtgaacatggcgaacgaggttatcaagtgcaaggctgcagttgcttgggaggctggaaagcctctctccatagaggagatagaggtggcacccccaaaggctcatgaagttcgaatcaagatcattgccactgcggtttgccacaccgatgcctataccctgagtggagctgatcctgagggttgttttccagtgatcttgggacatgaaggtgctggaattgtggaaagtgttggtgagggagttactaagctgaaggcgggtgacactgtcatcccactttacatcccacagtgtggagaatgcaaattttgtctaaatcctaaaactaacctttgccagaagataagagtcactcaagggaaaggattaatgccagatggtaccagcagatttacttgcaaaggaaagacaattttgcattacatgggaaccagcacattttctgaatacacagttgtggctgatatctctgttgctaaaatagatcctttagcacctttggataaagtctgccttctaggttgtggcatttcaaccggttatggtgctgctgtgaacactgccaagttggagcctggctctgtttgtgccgtctttggtctgggaggagtcggattggcagttatcatgggctgtaaagtggctggtgcttcccggatcattggtgtggacatcaataaagataaatttgcaagggccaaagagtttggagccactgaatgtattaaccctcaggattttagtaaacccatccaggaagtgctcattgagatgaccgatggaggagtggactattcctttgaatgtattggtaatgtgaaggtcatgagagcagcacttgaggcatgtcacaagggctggggcgtcagcgtcgtggttggagtagctgcttcaggtgaagaaattgccactcgtccattccagctggtaacaggtcgcacatggaaaggcactgcctttggaggatggaagagtgtagaaagtgtcccaaagttggtgtctgaatatatgtccaaaaagataaaagttgatgaatttgtgactcacaatctgtcttttgatgaaatcaacaaagcctttgaactgatgcattctggaaagaggtaggctttctctttatatatcatagaatgtaataatgatgttgagtttgaggggatggagagtcgaaaaacacaattttagttgtcttaaaggtatcatttaaaacttagtatgttgcttccttttacagcattcgaactgttgtaaagatttaattcaaaagagaaaaataatgtccatcctgtcgtgatgtgataggagcagcaccaccaggacctggtggtgctgctgtcctggtggtgctgctgtcctggtggtgctgctgtcctggtggtgctgctggagtagctggaccctctttggggaagggcagattcaccactgaaggagtgggggtctctttggggggtagtgttactcctttgggagacagaggagtcacagctgagggagtaggggcccctttgggggatggaggagtgggagaatgcgtcgtggctggtgagtctttagagccttggaaagaaagactattctctggaagaaatgaagcttcaactggagaaacaggggatgagagatttccaataggagtatcagggccagcagaacccttcttggttggaggtcttttagtctgaggagacacatctaacccctaaaggagatcggggtatctagctag

SEQ ID NO: 328221 - DNA, 2775 bp, Homo sapiens
agccggtggtattcagaacagcctgagcaaaagaatttcttcaggcatatgttaagcatgcagatttcttggaccccatgccagacctgctgaatcagattctctcggaacttgtgttcttaacctgctcttgcatatgcactgtagaaggccattaaatatttgatgagtacaactttttaaccaaaagatacttttctatctgaccaggttatcaagtgcaaggctgcagttgcttgggaggctggaaagcctctctccatagaggagatagaggtggcacccccaaaggctcatgaagttcgaatcaagatcattgccactgcggtttgccacaccgatgcctataccctgagtggagctgatcctgagggttgttttccagtgatcttgggacatgaaggtgctggaattgtggaaagtgttggtgagggagttactaagctgaaggcgggtgacactgtcatcccactttacatcccacagtgtggagaatgcaaattttgtctaaatcctaaaactaacctttgccagaagataagagtcactcaagggaaaggattaatgccagatggtaccagcagatttacttgcaaaggaaagacaattttgcattacatgggaaccagcacattttctgaatacacagttgtggctgatatctctgttgctaaaatagatcctttagcacctttggataaagtctgccttctaggttgtggcatttcaaccggttatggtgctgctgtgaacactgccaagttggagcctggctctgtttgtgccgtctttggtctgggaggagtcggattggcagttatcatgggctgtaaagtggctggtgcttcccggatcattggtgtggacatcaataaagataaatttgcaagggccaaagagtttggagccactgaatgtattaaccctcaggattttagtaaacccatccaggaagtgctcattgagatgaccgatggaggagtggactattcctttgaatgtattggtaatgtgaaggtcatgagagcagcacttgaggcatgtcacaagggctggggcgtcagcgtcgtggttggagtagctgcttcaggtgaagaaattgccactcgtccattccagctggtaacaggtcgcacatggaaaggcactgcctttggaggatggaagagtgtagaaagtgtcccaaagttggtgtctgaatatatgtccaaaaagataaaagttgatgaatttgtgactcacaatctgtcttttgatgaaatcaacaaagcctttgaactgatgcattctggaaagagcattcgaactgttgtaaagatttaattcaaaagagaaaaataatgtccatcctgtcgtgatgtgataggagcagcttaacaggcagggagaagcgcctccaacctcacagcctcgtagagcttcacagctactccagaaaatagggttatgtgtgtcattcatgaatctctataatcaaggacaaggataattcagtcatgaacctgttttctggatgctcctccacataaataattgctagtttattaaggaatattttaacataataaaagtaatttctacatttgtgtggaaattgtcttgttttatgctgtcatcattgtcacggtttgtctgcccattatcttcattctgcaagggaaagggaaaggaagcagggcagtggtgggtgtctgaaacctcagaaacataacgttgaacttttaagggtctcagtccccgttgattaaagaacagatcctagccatcagtgacaaagttaatcaggacccaagtctgcttctgtgatattatctttaagggaggtactgtgccttgttcatacctgtaccccaaattcctaggatggcatctgcccttcagggggcactaaaatgtattattgaaacagcattctgggcttaaataggtgtatgtatgtgttggttgtgactgtactatttctagtatagtgaactacatactgaatatccaagttctcagcacctacttttgtcaaatcttaacattttgccacttcgagatcacattgccattcctcccctccagaggtaacaattatccacaatttgatgtttatcattcctgtgttgttgtactttcactgtgtataacctaaaccatctactctttagtactgttttatatatttttaagcctcatacttgctcattctacagcttttttcactcattattgtataattatatctgaagctctcgttcattaattttagtcctgtgtagcagaattcaattacgggaactaccataatttatctgttctccagttgaaggcatgaagttgttgccagtttctgtattataacactgtagtggaacattcttctgcattgggctcactgcgtgttacctaagacgtatcacagaataaacacatttagccttatagacattgccaaattgctcttcaaagtaaatgtgagtttttgtgaattacatgagtatggaatggtgttttattatgactttagtttgcattttcctcaattctcgttaaatccttcattctaatggacattttattgtgaagaacctgttcatatcctgtgctcaactttgtattgaattatttttctctgaataatttttaggagttcttttattctagacatcaatcatttgtcagttttatatgttgcaaatatcttctagtctatcttgtgacttttctttttactttatggtattttgttgaataaagttttaatgtagtcacctaaatcttcctggtggt

SEQ ID NO: 328222 - DNA, 2550 bp, Homo sapiens
  misc_feature (24)..(25): n is a, c, g, or t
tggcctactggaaaagaatccgtnnacatggcgaacgaggttatcaagtgcaaggctgcagttgcttgggaggctggaaagcctctctccatagaggagatagaggtggcacccccaaaggctcatgaagttcgaatcaagatcattgccactgcggtttgccacaccgatgcctataccctgagtggagctgatcctgagggttgttttccagtgatcttgggacatgaaggtgctggaattgtggaaagtgttggtgagggagttactaagctgaaggcgggtgacactgtcatcccactttacatcccacagtgtggagaatgcaaattttgtctaaatccagatggtaccagcagatttacttgcaaaggaaagacaattttgcattacatgggaaccagcacattttctgaatacacagttgtggctgatatctctgttgctaaaatagatcctttagcacctttggataaagtctgccttctaggttgtggcatttcaaccggttatggtgctgctgtgaacactgccaagttggagcctggctctgtttgtgccgtctttggtctgggaggagtcggattggcagttatcatgggctgtaaagtggctggtgcttcccggatcattggtgtggacatcaataaagataaatttgcaagggccaaagagtttggagccactgaatgtattaaccctcaggattttagtaaacccatccaggaagtgctcattgagatgaccgatggaggagtggactattcctttgaatgtattggtaatgtgaaggtcatgagagcagcacttgaggcatgtcacaagggctggggcgtcagcgtcgtggttggagtagctgcttcaggtgaagaaattgccactcgtccattccagctggtaacaggtcgcacatggaaaggcactgcctttggaggatggaagagtgtagaaagtgtcccaaagttggtgtctgaatatatgtccaaaaagataaaagttgatgaatttgtgactcacaatctgtcttttgatgaaatcaacaaagcctttgaactgatgcattctggaaagagcattcgaactgttgtaaagatttaattcaaaagagaaaaataatgtccatcctgtcgtgatgtgataggagcagcttaacaggcagggagaagcgcctccaacctcacagcctcgtagagcttcacagctactccagaaaatagggttatgtgtgtcattcatgaatctctataatcaaggacaaggataattcagtcatgaacctgttttctggatgctcctccacataaataattgctagtttattaaggaatattttaacataataaaagtaatttctacatttgtgtggaaattgtcttgttttatgctgtcatcattgtcacggtttgtctgcccattatcttcattctgcaagggaaagggaaaggaagcagggcagtggtgggtgtctgaaacctcagaaacataacgttgaacttttaagggtctcagtccccgttgattaaagaacagatcctagccatcagtgacaaagttaatcaggacccaagtctgcttctgtgatattatctttaagggaggtactgtgccttgttcatacctgtaccccaaattcctaggatggcatctgcccttcagggggcactaaaatgtattattgaaacagcattctgggcttaaataggtgtatgtatgtgttggttgtgactgtactatttctagtatagtgaactacatactgaatatccaagttctcagcacctacttttgtcaaatcttaacattttgccacttcgagatcacattgccattcctcccctccagaggtaacaattatccacaatttgatgtttatcattcctgtgttgttgtactttcactgtgtataacctaaaccatctactctttagtactgttttatatatttttaagcctcatacttgctcattctacagcttttttcactcattattgtataattatatctgaagctctcgttcattaattttagtcctgtgtagcagaattcaattacgggaactaccataatttatctgttctccagttgaaggcatgaagttgttgccagtttctgtattataacactgtagtggaacattcttctgcattgggctcactgcgtgttacctaagacgtatcacagaataaacacatttagccttatagacattgccaaattgctcttcaaagtaaatgtgagtttttgtgaattacatgagtatggaatggtgttttattatgactttagtttgcattttcctcaattctcgttaaatccttcattctaatggacattttattgtgaagaacctgttcatatcctgtgctcaactttgtattgaattatttttctctgaataatttttaggagttcttttattctagacatcaatcatttgtcagttttatatgttgcaaatatcttctagtctatcttgtgacttttctttttactttatggtattttgttgaataaagttttaatgtagtcacctaaatcttcctggtggt

SEQ ID NO: 328223 - DNA, 1042 bp, Homo sapiens
  misc_feature (4)..(4): n is a, c, g, or t
agcngcacgcaccacagctcgagcaccgcccttccggttggagccattgcaagccccccccacgccccgcccccctcgctaggcgctcgccacgcccatgcctccgtcgctgcgcggcccaccccggatgtcagccccccgcgccgaccagaatccgtgaacatggcgaacgaggttatcaagtgcaaggctgcagttgcttgggaggctggaaagcctctctccatagaggagatagaggtggcacccccaaaggctcatgaagttcgaatcaagatcattgccactgcggtttgccacaccgatgcctataccctgagtggagctgatcctgagggttgttttccagtgatcttgggacatgaaggtgctggaattgtggaaagtgttggtgagggagttactaagctgaaggcgggtgacactgtcatcccactttacatcccacagtgtggagaatgcaaattttgtctaaatcctaaaactaacctttgccagaagataagagtcactcaagggaaaggattaatgccagatggtaccagcagatttacttgcaaaggaaagacaattttgcattacatgggaaccagcacattttctgaatacacagttgtggctgatatctctgttgctaaaatagatcctttagcacctttggataaagtctgccttctaggttgtggcatttcaaccggttatggtgctgctgtgaacactgccaagttggagcctggctctgtttgtgccgtctttggtctgggaggagtcggattggcagttatcatgggctgtaaagtggctggtgcttcccggatcattggtgtggacatcaataaagataaatttgcaagggccaaagagttgggcctggatgtttacctcagattttgtatacctccgggtgtcctggatgacgagggggaggccatcctgagtttggagggagctaagcggctgggggtccgggggcagccgtggaaaccgggggaaagcccccccccgggaggccagaaggggctgggggaggagcccccgctgt

SEQ ID NO: 328224 - DNA, 2180 bp, Homo sapiens
gggaggcagagcttgcaatgagctgagatcacgcaactgtactccagcctaggcgatagagcgagactccgtctcaaaaacaaacgaacaaacaaacttagcatttagctaaagagttctacttcatttttcagtttcatagttttctgttctgatatgctatccctatttcattgttaaatttaaaaccaaggaaataaagtcctgtattagtttttttcttccttgaatatcatgattatagaaatctttgctgatgtggacctaaataagcttgttgttgagacttccagagttctgtcctgggtagtttaaaagtctcaattggccaaaactttaatgaggttttagtaaatcttaatacagaggaagggaaatttcaaaagtatttacttcttcactgaaaggtgttggtcaaattcttcatctccatgctattttggagtttctcattactctttaactcatcaaaaaattcattcttttaaatgccttttgtcctcagctaagtaacaagcatactgcagaaatttgttgaataaattaatgtgtgatttcttttaggatggaagagtgtagaaagtgtcccaaagttggtgtctgaatatatgtccaaaaagataaaagttgatgaatttgtgactcacaatctgtcttttgatgaaatcaacaaagcctttgaactgatgcattctggaaagagcattcgaactgttgtaaagatttaattcaaaagagaaaaataatgtccatcctgtcgtgatgtgataggagcagcttaacaggcagggagaagcgcctccaacctcacagcctcgtagagcttcacagctactccagaaaatagggttatgtgtgtcattcatgaatctctataatcaaggacaaggataattcagtcatgaacctgttttctggatgctcctccacataaataattgctagtttattaaggaatattttaacataataaaagtaatttctacatttgtgtggaaattgtcttgttttatgctgtcatcattgtcacggtttgtctgcccattatcttcattctgcaagggaaagggaaaggaagcagggcagtggtgggtgtctgaaacctcagaaacataacgttgaacttttaagggtctcagtccccgttgattaaagaacagatcctagccatcagtgacaaagttaatcaggacccaagtctgcttctgtgatattatctttaagggaggtactgtgccttgttcatacctgtaccccaaattcctaggatggcatctgcccttcagggggcactaaaatgtattattgaaacagcattctgggcttaaataggtgtatgtatgtgttggttgtgactgtactatttctagtatagtgaactacatactgaatatccaagttctcagcacctacttttgtcaaatcttaacattttgccacttcgagatcacattgccattcctcccctccagaggtaacaattatccacaatttgatgtttatcattcctgtgttgttgtactttcactgtgtataacctaaaccatctactctttagtactgttttatatatttttaagcctcatacttgctcattctacagcttttttcactcattattgtataattatatctgaagctctcgttcattaattttagtcctgtgtagcagaattcaattacgggaactaccataatttatctgttctccagttgaaggcatgaagttgttgccagtttctgtattataacactgtagtggaacattcttctgcattgggctcactgcgtgttacctaagacgtatcacagaataaacacatttagccttatagacattgccaaattgctcttcaaagtaaatgtgagtttttgtgaattacatgagtatggaatggtgttttattatgactttagtttgcattttcctcaattctcgttaaatccttcattctaatggacattttattgtgaagaacctgttcatatcctgtgctcaactttgtattgaattatttttctctgaataatttttaggagttcttttattctagacatcaatcatttgtcagttttatatgttgcaaatatcttctagtctatcttgtgacttttctttttactttatggtattttgttgaataaagttttaatgtagtcacctaaatcttcctggtggt

SEQ ID NO: 328225 - DNA, 2739 bp, Homo sapiens
  misc_feature (4)..(4): n is a, c, g, or t
agcngcacgcaccacagctcgagcaccgcccttccggttggagccattgcaagccccccccacgccccgcccccctcgctaggcgctcgccacgcccatgcctccgtcgctgcgcggcccaccccggatgtcagccccccgcgccgaccagaatccgtgaacatggcgaacgaggttatcaagtgcaaggctgcagttgcttgggaggctggaaagcctctctccatagaggagatagaggtggcacccccaaaggctcatgaagttcgaatcaagatcattgccactgcggtttgccacaccgatgcctataccctgagtggagctgatcctgagggttgttttccagtgatcttgggacatgaaggtgctggaattgtggaaagtgttggtgagggagttactaagctgaaggcgggtgacactgtcatcccactttacatcccacagtgtggagaatgcaaattttgtctaaatcctaaaactaacctttgccagaagataagagtcactcaagggaaaggattaatgccagatggtaccagcagatttacttgcaaaggaaagacaattttgcattacatgggaaccagcacattttctgaatacacagttgtggctgatatctctgttgctaaaatagatcctttagcacctttggataaagtctgccttctaggttgtggcatttcaaccggttatggtgctgctgtgaacactgccaagttggagcctggctctgtttgtgccgtctttggtctgggaggagtcggattggcagttatcatgggctgtaaagtggctggtgcttcccggatcattggtgtggacatcaataaagataaatttgcaagggccaaagagtttggagccactgaatgtattaaccctcaggattttagtaaacccatccaggaagtgctcattgagatgaccgatggaggagtggactattcctttgaatgtattggtaatgtgaaggtcatgagagcagcacttgaggcatgtcacaagggctggggcgtcagcgtcgtggttggagtagctgcttcaggtgaagaaattgccactcgtccattccagctggtaacaggtcgcacatggaaaggcactgcctttggaggatggaagagtgtagaaagtgtcccaaagttggtgtctgaatatatgtccaaaaagataaaagttgatgaatttgtgactcacaatctgtcttttgatgaaatcaacaaagcctttgaactgatgcattctggaaagagcattcgaactgttgtaaagatttaattcaaaagagaaaaataatgtccatcctgtcgtgatgtgataggagcagcttaacaggcagggagaagcgcctccaacctcacagcctcgtagagcttcacagctactccagaaaatagggttatgtgtgtcattcatgaatctctataatcaaggacaaggataattcagtcatgaacctgttttctggatgctcctccacataaataattgctagtttattaaggaatattttaacataataaaagtaatttctacatttgtgtggaaattgtcttgttttatgctgtcatcattgtcacggtttgtctgcccattatcttcattctgcaagggaaagggaaaggaagcagggcagtggtgggtgtctgaaacctcagaaacataacgttgaacttttaagggtctcagtccccgttgattaaagaacagatcctagccatcagtgacaaagttaatcaggacccaagtctgcttctgtgatattatctttaagggaggtactgtgccttgttcatacctgtaccccaaattcctaggatggcatctgcccttcagggggcactaaaatgtattattgaaacagcattctgggcttaaataggtgtatgtatgtgttggttgtgactgtactatttctagtatagtgaactacatactgaatatccaagttctcagcacctacttttgtcaaatcttaacattttgccacttcgagatcacattgccattcctcccctccagaggtaacaattatccacaatttgatgtttatcattcctgtgttgttgtactttcactgtgtataacctaaaccatctactctttagtactgttttatatatttttaagcctcatacttgctcattctacagcttttttcactcattattgtataattatatctgaagctctcgttcattaattttagtcctgtgtagcagaattcaattacgggaactaccataatttatctgttctccagttgaaggcatgaagttgttgccagtttctgtattataacactgtagtggaacattcttctgcattgggctcactgcgtgttacctaagacgtatcacagaataaacacatttagccttatagacattgccaaattgctcttcaaagtaaatgtgagtttttgtgaattacatgagtatggaatggtgttttattatgactttagtttgcattttcctcaattctcgttaaatccttcattctaatggacattttattgtgaagaacctgttcatatcctgtgctcaactttgtattgaattatttttctctgaataatttttaggagttcttttattctagacatcaatcatttgtcagttttatatgttgcaaatatcttctagtctatcttgtgacttttctttttactttatggtattttgttgaataaagttttaatgtagtcacctaaatcttcctggtggt

SEQ ID NO: 328226 - DNA, 2297 bp, Homo sapiens
  misc_feature (4)..(4): n is a, c, g, or t
agcngcacgcaccacagctcgagcaccgcccttccggttggagccattgcaagccccccccacgccccgcccccctcgctaggcgctcgccacgcccatgcctccgtcgctgcgcggcccaccccggatgtcagccccccgcgccgaccagaatccgtgaacatggcgaacgaggttatcaagtgcaaggctgcagttgcttgggaggctggaaagcctctctccatagaggagatagaggtggcacccccaaaggctcatgaagttcgaatcaagatcattgccactgcggtttgccacaccgatgcctataccctgagtggagctgatcctgagggttgttttccagtgatcttgggacatgaaggtgctggaattgtggaaagtgttggtgagggagttactaagctgaaggcgggtgacactgtcatcccactttacatcccacagtgtggagaatgcaaattttgtctaaatcctaaaactaacctttgccagaagataagagtcactcaagggaaaggattaatgccagatggtaccagcagatttacttgcaaaggaaagacaattttgcattacatgggaaccagcacattttctgaatacacagttgtggctgatatctctgttgctaaaatagatcctttagcacctttggataaagtctgccttctaggttgtggcatttcaaccggttatggtgctgctgtgaacactgccaagttggagcctggctctgtttgtgccgtctttggtctgggaggagtcggattggcagttatcatgggctgtaaagtggctggtgcttcccggatcattggtgtggacatcaataaagataaatttgcaagggccaaagagtttggagccactgaatgtattaaccctcaggattttagtaaacccatccaggaagtgctcattgagatgaccgatggaggagtggactattcctttgaatgtattggtaatgtgaaggtcatgagagcagcacttgaggcatgtcacaagggctggggcgtcagcgtcgtggttggagtagctgcttcaggtgaagaaattgccactcgtccattccagctggtaacaggtcgcacatggaaaggcactgcctttggaggatggaagagtgtagaaagtgtcccaaagttggtgtctgaatatatgtccaaaaagataaaagttgatgaatttgtgactcacaatctgtcttttgatgaaatcaacaaagcctttgaactgatgcattctggaaagagcattcgaactgttgtaaagatttaattcaaaagagaaaaataatgtccatcctgtcgtgatgtgataggagcagcttaacaggcagggagaagcgcctccaacctcacagcctcgtagagcttcacagctactccagaaaatagggttatgtgtgtcattcatgaatctctataatcaaggacaaggataattcagtcatgaacctgttttctggatgctcctccacataaataattgctagtttattaaggaatattttaacataataaaagtaatttctacatttgtgtggaaattgtcttgttttatgctgtcatcattgtcacggtttgtctgcccattatcttcattctgcaagggaaagggaaaggaagcagggcagtggtgggtgtctgaaacctcagaaacataacgttgaacttttaagggtctcagtccccgttgattaaagaacagatcctagccatcagtgacaaagttaatcaggacccaagtctgcttctgtgatattatctttaagggaggtactgtgccttgttcatacctgtaccccaaattcctaggatggcatctgcccttcagggggcactaaaatgtattattgaaacagcattctgggcttaaataggtgtatgtatgtgttggttgtgactgtactatttctagtatagtgaactacatactgaatatccaagttctcagcacctacttttgtcaaatcttaacattttgccacttcgagatcacattgccattcctcccctccagaggtaacaattttcctcaattctcgttaaatccttcattctaatggacattttattgtgaagaacctgttcatatcctgtgctcaactttgtattgaattatttttctctgaataatttttaggagttcttttattctagacatcaatcatttgtcagttttatatgttgcaaatatcttctagtctatcttgtgacttttctttttactttatggtattttgttgaataaagttttaatgtagtcacctaaatcttcctggtggt

SEQ ID NO: 328227 - DNA, 2394 bp, Homo sapiens
  misc_feature (4)..(4): n is a, c, g, or t
  misc_feature (1962)..(1963): n is a, c, g, or t
  misc_feature (2078)..(2079): n is a, c, g, or t
agcngcacgcaccacagctcgagcaccgcccttccggttggagccattgcaagccccccccacgccccgcccccctcgctaggcgctcgccacgcccatgcctccgtcgctgcgcggcccaccccggatgtcagccccccgcgccgaccagaatccgtgaacatggcgaacgaggttatcaagtgcaaggctgcagttgcttgggaggctggaaagcctctctccatagaggagatagaggtggcacccccaaaggctcatgaagttcgaatcaagatcattgccactgcggtttgccacaccgatgcctataccctgagtggagctgatcctgagggttgttttccagtgatcttgggacatgaaggtgctggaattgtggaaagtgttggtgagggagttactaagctgaaggcgggtgacactgtcatcccactttacatcccacagtgtggagaatgcaaattttgtctaaatcctaaaactaacctttgccagaagataagagtcactcaagggaaaggattaatgccagatggtaccagcagatttacttgcaaaggaaagacaattttgcattacatgggaaccagcacattttctgaatacacagttgtggctgatatctctgttgctaaaatagatcctttagcacctttggataaagtctgccttctaggttgtggcatttcaaccggttatggtgctgctgtgaacactgccaagttggagcctggctctgtttgtgccgtctttggtctgggaggagtcggattggcagttatcatgggctgtaaagtggctggtgcttcccggatcattggtgtggacatcaataaagataaatttgcaagggccaaagagtttggagccactgaatgtattaaccctcaggattttagtaaacccatccaggaagtgctcattgagatgaccgatggaggagtggactattcctttgaatgtattggtaatgtgaaggtcatgagagcagcacttgaggcatgtcacaagggctggggcgtcagcgtcgtggttggagtagctgcttcaggtgaagaaattgccactcgtccattccagctggtaacaggtcgcacatggaaaggcactgcctttggaggatggaagagtgtagaaagtgtcccaaagttggtgtctgaatatatgtccaaaaagataaaagttgatgaatttgtgactcacaatctgtcttttgatgaaatcaacaaagcctttgaactgatgcattctggaaagagcattcgaactgttgtaaagatttaattcaaaagagaaaaataatgtccatcctgtcgtgatgtgataggagcagcttaacaggcagggagaagcgcctccaacctcacagcctcgtagagcttcacagctactccagaaaatagggttatgtgtgtcattcatgaatctctataatcaaggacaaggataattcagtcatgaacctgttttctggatgctcctccacataaataattgctagtttattaaggaatattttaacataataaaagtaatttctacatttgtgtggaaattgtcttgttttatgctgtcatcattgtcacggtttgtctgcccattatcttcattctgcaagggaaagggaaaggaagcagggcagtggtgggtgtctgaaacctcagaaacataacgttgaacttttaagggtctcagtccccgttgattaaagaacagatcctagccatcagtgacaaagttaatcaggacccaagtctgcttctgtgatattatctttaagggaggtactgtgccttgttcatacctgtaccccaaattcctaggatggcatctgcccttcagggggcactaaaatgtattattgaaacagcattctgggcttaaataggtgtatgtatgtgttggttgtgactgtactatttctagtatagtgaactacatactgaatatccaagttcnntcagcatgctgtattcaataatcacatctttacgtgcctcctcgaatgtgcatgatgccatccttacggaatttgcgggtacacggtatgatacaatggcacatgtacctccctnntaaacgataatatacacatgaatgctggacttcgggtcctcgattaactattgtcactcgatggctaggatctgttctttaatcaacggggactgagacccttaaaagttcaacgttatgtttctgaggtttcagacacccaccactgccctgcttcctttccctttcccttgcagaatgaagataatgggcagcaaaccgtgacaatcatgacacgcataaaacaagacaatttccacacaaatgtagaaattacttttattatgttaaaatattccttaataaactagcaattatgtcgacgcggccgcgaat

SEQ ID NO: 328228 - DNA, 1687 bp, Homo sapiens
  misc_feature (4)..(4): n is a, c, g, or t
agcngcacgcaccacagctcgagcaccgcccttccggttggagccattgcaagccccccccacgccccgcccccctcgctaggcgctcgccacgcccatgcctccgtcgctgcgcggcccaccccggatgtcagccccccgcgccgaccagaatccgtgaacatggcgaacgaggttatcaagtgcaaggctgcagttgcttgggaggctggaaagcctctctccatagaggagatagaggtggcacccccaaaggctcatgaagttcgaatcaagatcattgccactgcggtttgccacaccgatgcctataccctgagtggagctgatcctgagggttgttttccagtgatcttgggacatgaaggtgctggaattgtggaaagtgttggtgagggagttactaagctgaaggcgggtgacactgtcatcccactttacatcccacagtgtggagaatgcaaattttgtctaaatcctaaaactaacctttgccagaagataagagtcactcaagggaaaggattaatgccagatggtaccagcagatttacttgcaaaggaaagacaattttgcattacatgggaaccagcacattttctgaatacacagttgtggctgatatctctgttgctaaaatagatcctttagcacctttggataaagtctgccttctaggttgtggcatttcaaccggttatggtgctgctgtgaacactgccaagttggagcctggctctgtttgtgccgtctttggtctgggaggagtcggattggcagttatcatgggctgtaaagtggctggtgcttcccggatcattggtgtggacatcaataaagataaatttgcaagggccaaagagtttggagccactgaatgtattaaccctcaggattttagtaaacccatccaggaagtgctcattgagatgaccgatggaggagtggactattcctttgaatgtattggtaatgtgaaggtcatgagagcagcacttgaggcatgtcacaagggctggggcgtcagcgtcgtggttggagtagctgcttcaggtgaagaaattgccactcgtccattccagctggtaacaggtcgcacatggaaaggcactgcctttggaggatggaagagtgtagaaagtgtcccaaagttggtgtctgaatatatgtccaaaaagataaaagttgatgaatttgtgactcacaatctgtcttttgatgaaatcaacaaagcctttgaactgatgcattctggaaagaggtaggctttctctttatatatcatagaatgtaataatgatgttgagtttgaggggatggagagtcgaaaaacacaattttagttgtcttaaaggtatcatttaaaacttagtatgttgcttccttttacagcattcgaactgttgtaaagatttaattcaaaagagaaaaataatgtccatcctgtcgtgatgtgataggagcagcttaacaggcagggagaagcgcctccaacctcacagcctcgtagagcttcacagctactccagaaaatagggttatgtgtgtcattcatgaatctctataatcaaggacaaggataattcagtcatgaacctgttttctggatgctcctccacataaataattgctagtttattaaggaatattttaacataataaaagtaatttctacatttgtgtgga

SEQ ID NO: 328229 - DNA, 2604 bp, Homo sapiens
  misc_feature (24)..(25): n is a, c, g, or t
tggcctactggaaaagaatccgtnnacatggcgaacgaggttatcaagtgcaaggctgcagttgcttgggaggctggaaagcctctctccatagaggagatagaggtggcacccccaaaggctcatgaagttcgaatcaagatcattgccactgcggtttgccacaccgatgcctataccctgagtggagctgatcctgagggttgttttccagtgatcttgggacatgaaggtgctggaattgtggaaagtgttggtgagggagttactaagctgaaggcgggtgacactgtcatcccactttacatcccacagtgtggagaatgcaaattttgtctaaatcctaaaactaacctttgccagaagataagagtcactcaagggaaaggattaatgccagatggtaccagcagatttacttgcaaaggaaagacaattttgcattacatgggaaccagcacattttctgaatacacagttgtggctgatatctctgttgctaaaatagatcctttagcacctttggataaagtctgccttctaggttgtggcatttcaaccggttatggtgctgctgtgaacactgccaagttggagcctggctctgtttgtgccgtctttggtctgggaggagtcggattggcagttatcatgggctgtaaagtggctggtgcttcccggatcattggtgtggacatcaataaagataaatttgcaagggccaaagagtttggagccactgaatgtattaaccctcaggattttagtaaacccatccaggaagtgctcattgagatgaccgatggaggagtggactattcctttgaatgtattggtaatgtgaaggtcatgagagcagcacttgaggcatgtcacaagggctggggcgtcagcgtcgtggttggagtagctgcttcaggtgaagaaattgccactcgtccattccagctggtaacaggtcgcacatggaaaggcactgcctttggaggatggaagagtgtagaaagtgtcccaaagttggtgtctgaatatatgtccaaaaagataaaagttgatgaatttgtgactcacaatctgtcttttgatgaaatcaacaaagcctttgaactgatgcattctggaaagagcattcgaactgttgtaaagatttaattcaaaagagaaaaataatgtccatcctgtcgtgatgtgataggagcagcttaacaggcagggagaagcgcctccaacctcacagcctcgtagagcttcacagctactccagaaaatagggttatgtgtgtcattcatgaatctctataatcaaggacaaggataattcagtcatgaacctgttttctggatgctcctccacataaataattgctagtttattaaggaatattttaacataataaaagtaatttctacatttgtgtggaaattgtcttgttttatgctgtcatcattgtcacggtttgtctgcccattatcttcattctgcaagggaaagggaaaggaagcagggcagtggtgggtgtctgaaacctcagaaacataacgttgaacttttaagggtctcagtccccgttgattaaagaacagatcctagccatcagtgacaaagttaatcaggacccaagtctgcttctgtgatattatctttaagggaggtactgtgccttgttcatacctgtaccccaaattcctaggatggcatctgcccttcagggggcactaaaatgtattattgaaacagcattctgggcttaaataggtgtatgtatgtgttggttgtgactgtactatttctagtatagtgaactacatactgaatatccaagttctcagcacctacttttgtcaaatcttaacattttgccacttcgagatcacattgccattcctcccctccagaggtaacaattatccacaatttgatgtttatcattcctgtgttgttgtactttcactgtgtataacctaaaccatctactctttagtactgttttatatatttttaagcctcatacttgctcattctacagcttttttcactcattattgtataattatatctgaagctctcgttcattaattttagtcctgtgtagcagaattcaattacgggaactaccataatttatctgttctccagttgaaggcatgaagttgttgccagtttctgtattataacactgtagtggaacattcttctgcattgggctcactgcgtgttacctaagacgtatcacagaataaacacatttagccttatagacattgccaaattgctcttcaaagtaaatgtgagtttttgtgaattacatgagtatggaatggtgttttattatgactttagtttgcattttcctcaattctcgttaaatccttcattctaatggacattttattgtgaagaacctgttcatatcctgtgctcaactttgtattgaattatttttctctgaataatttttaggagttcttttattctagacatcaatcatttgtcagttttatatgttgcaaatatcttctagtctatcttgtgacttttctttttactttatggtattttgttgaataaagttttaatgtagtcacctaaatcttcctggtggt

SEQ ID NO: 328230 - DNA, 290 bp, Homo sapiens
cctgcgtctcccctcttcctttatccttttgcttttctttctccagtttctttaaccagacttcctctctctctctctccctgacttggccctttggaatgcgtcccatcccatccctccttggctggcctcccccgcttccctttctactccagattcttggaaaagcctggagaagctggggagatgcggttcacaatgcctcggtataggaggctgtgttgagctgacattcaaatggattctttaataataatgaaactggcgagtatttattgtgcaaaatttgg

SEQ ID NO: 328231 - DNA, 2723 bp, Homo sapiens
attggctcttctggctcgccttccatccctgctcctgcaccggtctgcatctcccagcagaaggcgcagccatgaatccgttattcggccccaacctcttcctcctgcagcaggagcagcagggcctggccgggccactgggggactcactgggaggcgaccacttcgccgggggaggagacttgcccccggcgcctctctcgccggccggccctgctgcctactcgccgcccgggccgggcccggccccgcctgccgccatggccctccgcaatgacctgggctccaacatcaacgtgctcaagaccctgaacctccggttccgctgcttcctggccaaggtgcatgagctggagcgccggaaccggctgttggagaagcaactgcagcaagcgctggaggagggtaagcagggccggcggggcctgggtcgtcgcgaccaggcagtgcagaccggcttcgtcagccccatccggcccctggggctgcagctgggcgcccggccggccgctgtctgcagcccttcggcgcgcgtgctgggctcgcccgcgcgctccccggccggccccctcgcgccctccgcggccagcctctcgtcgtcctccacctccacctccaccacctattcctcgtcggcccgcttcatgcccggcaccatctggtcgttctcgcacgcccgccggctcgggccgggactggagcccactctggtgcaagggcctggcttgtcgtgggtgcacccggatggggtgggcgtccagatcgacaccatcacgcccgagatccgcgctctctacaacgtgctggccaaagtgaagcgggagcgggacgagtacaagcggaggtgggaagaggagtacacggtgcggatccagctgcaagaccgtgtaaatgagctccaggaggaagcccaggaggctgatgcctgccaggaggagctggcactgaaggtggaacagttgaaggctgagctggtggtcttcaaggggctcatgagtaacaacctgtcggagctggacaccaagatccaggagaaagccatgaaggtggatatggacatctgccgccgcatcgacatcaccgccaagctctgcgatgtggctcagcagcgcaactgcgaggacatgatccagatgttccagaagctggtcccatccatgggggggcggaagcgggagcgcaaggctgccgtcgaggaggacacctccctgtcggagagtgaggggccccgccagcccgatggggatgaggaggagagcacagccctcagcatcaacgaggagatgcagcgcatgctcaaccagctgagggagtatgattttgaggacgactgtgacagcctgacttgggaggagactgaggagaccctgctgctttgggaggatttctcaggctatgccatggcagctgcagaggcccagggagagcagcaggaagatagcctggagaaggtgattaaagatacggagtccctgttcaaaacccgggagaaggagtatcaggagaccattgaccagatagagctggagttggccacggccaagaacgacatgaaccggcacctgcacgagtacatggagatgtgcagcatgaagcgcggcctggacgtgcagatggagacctgccgccggctcatcacccagtctggagaccgaaagtctcctgctttcactgcggtcccgcttagcgacccgccgccgccgccaagcgaggctgaggactccgatcgcgatgtctcatctgacagctccatgagatagagacctgcctcccccttgcacccgaggccctcgcagcagggagctcagcgaggcagagggtggggctgcacagaggggaacatcagctgcagctctgcaccaggccggtccctggggactggggcgctcctccctcaggctttctccctcagtcttggcttctccagggctctggggtgtctggagctaggcttggccctaccattctggggccatttccaccacagttggggctctcctgccttcacgcgtgggtgtctgctacttccccatctttaaaatgctgccagagcgattgcggcccctcaccttgtccacgtatcaggaatgtgaatgtgggacctttcctccatccctgttgtccggagccagctcactgtcttccacactggtgctaactggcccaggcactggagtggaatagaatgcagctggaggctacgcatggcctctgcagcacacgcagctggagagggcttctgtccctgtcagcggcagagggcgttggggctggccggggcaccttgtccctgctatggtccacatgctcacgctgtccacctgccaggtggagtgtatgtggctgtggccctccctcgtggaggtgccgtgctttaaagaggccttagtgcccgggatgggcacagtgttttgaagggaggtgggagctcttgctctcctggtcactgcagaatgacagagaaggtgaagctccatgcatgtgtgcgcgggtgtatgtgcgctcagggtctctgtttaagtatcagctaaagatgtgcttcctccgtgtctgtcatacactgagaccaacaggctacagtgtccctgattcttggaaaagcctggagaagctggggagatgcggttcacaatgcctcggtataggaggctgtgttgagctgacattcaaatggattctttaataataatgaaactggcgagtatttattgtgcaaaatttgg

SEQ ID NO: 328232 - DNA, 2614 bp, Homo sapiens
attggctcttctggctcgccttccatccctgctcctgcaccggtctgcatctcccagcagaaggcgcagccatgaatccgttattcggccccaacctcttcctcctgctgcctactcgccgcccgggccgggcccggccccgcctgccgccatggccctccgcaatgacctgggctccaacatcaacgtgctcaagaccctgaacctccggttccgctgcttcctggccaaggtgcatgagctggagcgccggaaccggctgttggagaagcaactgcagcaagcgctggaggagggtaagcagggccggcggggcctgggtcgtcgcgaccaggcagtgcagaccggcttcgtcagccccatccggcccctggggctgcagctgggcgcccggccggccgctgtctgcagcccttcggcgcgcgtgctgggctcgcccgcgcgctccccggccggccccctcgcgccctccgcggccagcctctcgtcgtcctccacctccacctccaccacctattcctcgtcggcccgcttcatgcccggcaccatctggtcgttctcgcacgcccgccggctcgggccgggactggagcccactctggtgcaagggcctggcttgtcgtgggtgcacccggatggggtgggcgtccagatcgacaccatcacgcccgagatccgcgctctctacaacgtgctggccaaagtgaagcgggagcgggacgagtacaagcggaggtgggaagaggagtacacggtgcggatccagctgcaagaccgtgtaaatgagctccaggaggaagcccaggaggctgatgcctgccaggaggagctggcactgaaggtggaacagttgaaggctgagctggtggtcttcaaggggctcatgagtaacaacctgtcggagctggacaccaagatccaggagaaagccatgaaggtggatatggacatctgccgccgcatcgacatcaccgccaagctctgcgatgtggctcagcagcgcaactgcgaggacatgatccagatgttccagaagctggtcccatccatgggggggcggaagcgggagcgcaaggctgccgtcgaggaggacacctccctgtcggagagtgaggggccccgccagcccgatggggatgaggaggagagcacagccctcagcatcaacgaggagatgcagcgcatgctcaaccagctgagggagtatgattttgaggacgactgtgacagcctgacttgggaggagactgaggagaccctgctgctttgggaggatttctcaggctatgccatggcagctgcagaggcccagggagagcagcaggaagatagcctggagaaggtgattaaagatacggagtccctgttcaaaacccgggagaaggagtatcaggagaccattgaccagatagagctggagttggccacggccaagaacgacatgaaccggcacctgcacgagtacatggagatgtgcagcatgaagcgcggcctggacgtgcagatggagacctgccgccggctcatcacccagtctggagaccgaaagtctcctgctttcactgcggtcccgcttagcgacccgccgccgccgccaagcgaggctgaggactccgatcgcgatgtctcatctgacagctccatgagatagagacctgcctcccccttgcacccgaggccctcgcagcagggagctcagcgaggcagagggtggggctgcacagaggggaacatcagctgcagctctgcaccaggccggtccctggggactggggcgctcctccctcaggctttctccctcagtcttggcttctccagggctctggggtgtctggagctaggcttggccctaccattctggggccatttccaccacagttggggctctcctgccttcacgcgtgggtgtctgctacttccccatctttaaaatgctgccagagcgattgcggcccctcaccttgtccacgtatcaggaatgtgaatgtgggacctttcctccatccctgttgtccggagccagctcactgtcttccacactggtgctaactggcccaggcactggagtggaatagaatgcagctggaggctacgcatggcctctgcagcacacgcagctggagagggcttctgtccctgtcagcggcagagggcgttggggctggccggggcaccttgtccctgctatggtccacatgctcacgctgtccacctgccaggtggagtgtatgtggctgtggccctccctcgtggaggtgccgtgctttaaagaggccttagtgcccgggatgggcacagtgttttgaagggaggtgggagctcttgctctcctggtcactgcagaatgacagagaaggtgaagctccatgcatgtgtgcgcgggtgtatgtgcgctcagggtctctgtttaagtatcagctaaagatgtgcttcctccgtgtctgtcatacactgagaccaacaggctacagtgtccctgattcttggaaaagcctggagaagctggggagatgcggttcacaatgcctcggtataggaggctgtgttgagctgacattcaaatggattctttaataataatgaaactggcgagtatttattgtgcaaaatttgg

SEQ ID NO: 328233 - DNA, 3380 bp, Homo sapiens
attggctcttctggctcgccttccatccctgctcctgcaccggtctgcatctcccagcagaaggcgcagccatgaatccgttattcggccccaacctcttcctcctgcagcaggagcagcagggcctggccgggccactgggggactcactgggaggcgaccacttcgccgggggaggagacttgcccccggcgcctctctcgccggccggccctgctgcctactcgccgcccgggccgggcccggccccgcctgccgccatggccctccgcaatgacctgggctccaacatcaacgtgctcaagaccctgaacctccggttccgctgcttcctggccaaggtgcatgagctggagcgccggaaccggctgttggagaagcaactgcagcaagcgctggaggagggtaagcagggccggcggggcctgggtcgtcgcgaccaggcagtgcagaccggcttcgtcagccccatccggcccctggggctgcagctgggcgcccggccggccgctgtctgcagcccttcggcgcgcgtgctgggctcgcccgcgcgctccccggccggccccctcgcgccctccgcggccagcctctcgtcgtcctccacctccacctccaccacctattcctcgtcggcccgcttcatgcccggcaccatctggtcgttctcgcacgcccgccggctcgggccgggactggagcccactctggtgcaagggcctggcttgtcgtgggtgcacccggatggggtgggcgtccagatcgacaccatcacgcccgagatccgcgctctctacaacgtgctggccaaagtgaagcgggagcgggacgagtacaagcggaggtgggaagaggagtacacggtgcggatccagctgcaagaccgtgtaaatgagctccaggaggaagcccaggaggctgatgcctgccaggaggagctggcactgaaggtggaacagttgaaggctgagctggtggtcttcaaggggctcatgagtaacaacctgtcggagctggacaccaagatccaggagaaagccatgaaggtggatatggacatctgccgccgcatcgacatcaccgccaagctctgcgatgtggctcagcagcgcaactgcgaggacatgatccagatgttccagaagaagctggttagtttgatctcacgcaagcttattaatgtcccagtcccagtttctaagctgcctaggcctcctggccctcagtttgggcccgctgggctcttgagcacggatttttttctgccctttcccttttccttgctcttccccctttttctctctatctcttgttctcttgactgcatttctttctctcccttctcccccggctttccagatctggatgtgattcaggttctcttttgtacacattgcacactcatcctccttgcgtcctaaagcttttttttttttagttgagtcatttaatcaaaaagactttttttagaaaaaaatttcctcttgagccatcatgcacatctgactgcagccccagcgagcccttccttccttgtctgactgctcttcttctcgatttcttcttgttctgccttctcggtttgcagccctgacccccgctgtgtgtctggcccttggtgactgtccgtgtttctgttcctgtcattgtaactgtgacttttctctctgtctgcccccccttcctactggttcatgcttctcccccattcccaccctctctgcccggcctcccgctcccgccctttctcctcatgcacccggcctcgtctctgtagtctctgcacttgtctcccattaaagctggtcccatccatgggggggcggaagcgggagcgcaaggctgccgtcgaggaggacacctccctgtcggagagtgaggggccccgccagcccgatggggatgaggaggagagcacagccctcagcatcaacgaggagatgcagcgcatgctcaaccagctgagggagtatgattttgaggacgactgtgacagcctgacttgggaggagactgaggagaccctgctgctttgggaggatttctcaggctatgccatggcagctgcagaggcccagggagagcagcaggaagatagcctggagaaggtgattaaagatacggagtccctgttcaaaacccgggagaaggagtatcaggagaccattgaccagatagagctggagttggccacggccaagaacgacatgaaccggcacctgcacgagtacatggagatgtgcagcatgaagcgcggcctggacgtgcagatggagacctgccgccggctcatcacccagtctggagaccgaaagtctcctgctttcactgcggtcccgcttagcgacccgccgccgccgccaagcgaggctgaggactccgatcgcgatgtctcatctgacagctccatgagatagagacctgcctcccccttgcacccgaggccctcgcagcagggagctcagcgaggcagagggtggggctgcacagaggggaacatcagctgcagctctgcaccaggccggtccctggggactggggcgctcctccctcaggctttctccctcagtcttggcttctccagggctctggggtgtctggagctaggcttggccctaccattctggggccatttccaccacagttggggctctcctgccttcacgcgtgggtgtctgctacttccccatctttaaaatgctgccagagcgattgcggcccctcaccttgtccacgtatcaggaatgtgaatgtgggacctttcctccatccctgttgtccggagccagctcactgtcttccacactggtgctaactggcccaggcactggagtggaatagaatgcagctggaggctacgcatggcctctgcagcacacgcagctggagagggcttctgtccctgtcagcggcagagggcgttggggctggccggggcaccttgtccctgctatggtccacatgctcacgctgtccacctgccaggtggagtgtatgtggctgtggccctccctcgtggaggtgccgtgctttaaagaggccttagtgcccgggatgggcacagtgttttgaagggaggtgggagctcttgctctcctggtcactgcagaatgacagagaaggtgaagctccatgcatgtgtgcgcgggtgtatgtgcgctcagggtctctgtttaagtatcagctaaagatgtgcttcctccgtgtctgtcatacactgagaccaacaggctacagtgtccctgattcttggaaaagcctggagaagctggggagatgcggttcacaatgcctcggtataggaggctgtgttgagctgacattcaaatggattctttaataataatgaaactggcgagtatttattgtgcaaaatttgg

SEQ ID NO: 328234 - DNA, 3492 bp, Homo sapiens
attggctcttctggctcgccttccatccctgctcctgcaccggtctgcatctcccagcagaaggcgcagccatgaatccgttattcggccccaacctcttcctcctgcagcaggagcagcagggcctggccgggccactgggggactcactgggaggcgaccacttcgccgggggaggagacttgcccccggcgcctctctcgccggccggccctgctgcctactcgccgcccgggccgggcccggccccgcctgccgccatggccctccgcaatgacctgggctccaacatcaacgtgctcaagaccctgaacctccggttccgctgcttcctggccaaggtgcatgagctggagcgccggaaccggctgttggagaagcaactgcagcaagcgctggaggagggtaagcagggccggcggggcctgggtcgtcgcgaccaggcagtgcagaccggcttcgtcagccccatccggcccctggggctgcagctgggcgcccggccggccgctgtctgcagcccttcggcgcgcgtgctgggctcgcccgcgcgctccccggccggccccctcgcgccctccgcggccagcctctcgtcgtcctccacctccacctccaccacctattcctcgtcggcccgcttcatgcccggcaccatctggtcgttctcgcacgcccgccggctcgggccgggactggagcccactctggtgcaagggcctggcttgtcgtgggtgcacccggatggggtgggcgtccagatcgacaccatcacgcccgagatccgcgctctctacaacgtgctggccaaagtgaagcgggagcgggacgagtacaagcggagatgcttttacagggttaaatgataccacaagaggcagggcagcgggctcgacgagctctgttctggtgcgggcaggaggcgggagcccggatctgtgcgactgaagcggaacgatggagtacactggtgctggatccatgctgcaagacctgtgtaatatgagctccagcgaggaagcccaggaggctgatgcctgccaggaggagctggcactgaaggtggaacagttgaaggctgagctggtggtcttcaaggggctcatgagtaacaacctgtcggagctggacaccaagatccaggagaaagccatgaaggtggatatggacatctgccgccgcatcgacatcaccgccaagctctgcgatgtggctcagcagcgcaactgcgaggacatgatccagatgttccagaagaagctggttagtttgatctcacgcaagcttattaatgtcccagtcccagtttctaagctgcctaggcctcctggccctcagtttgggcccgctgggctcttgagcacggatttttttctgccctttcccttttccttgctcttccccctttttctctctatctcttgttctcttgactgcatttctttctctcccttctcccccggctttccagatctggatgtgattcaggttctcttttgtacacattgcacactcatcctccttgcgtcctaaagcttttttttttttagttgagtcatttaatcaaaaagactttttttagaaaaaaatttcctcttgagccatcatgcacatctgactgcagccccagcgagcccttccttccttgtctgactgctcttcttctcgatttcttcttgttctgccttctcggtttgcagccctgacccccgctgtgtgtctggcccttggtgactgtccgtgtttctgttcctgtcattgtaactgtgacttttctctctgtctgcccccccttcctactggttcatgcttctcccccattcccaccctctctgcccggcctcccgctcccgccctttctcctcatgcacccggcctcgtctctgtagtctctgcacttgtctcccattaaagctggtcccatccatgggggggcggaagcgggagcgcaaggctgccgtcgaggaggacacctccctgtcggagagtgaggggccccgccagcccgatggggatgaggaggagagcacagccctcagcatcaacgaggagatgcagcgcatgctcaaccagctgagggagtatgattttgaggacgactgtgacagcctgacttgggaggagactgaggagaccctgctgctttgggaggatttctcaggctatgccatggcagctgcagaggcccagggagagcagcaggaagatagcctggagaaggtgattaaagatacggagtccctgttcaaaacccgggagaaggagtatcaggagaccattgaccagatagagctggagttggccacggccaagaacgacatgaaccggcacctgcacgagtacatggagatgtgcagcatgaagcgcggcctggacgtgcagatggagacctgccgccggctcatcacccagtctggagaccgaaagtctcctgctttcactgcggtcccgcttagcgacccgccgccgccgccaagcgaggctgaggactccgatcgcgatgtctcatctgacagctccatgagatagagacctgcctcccccttgcacccgaggccctcgcagcagggagctcagcgaggcagagggtggggctgcacagaggggaacatcagctgcagctctgcaccaggccggtccctggggactggggcgctcctccctcaggctttctccctcagtcttggcttctccagggctctggggtgtctggagctaggcttggccctaccattctggggccatttccaccacagttggggctctcctgccttcacgcgtgggtgtctgctacttccccatctttaaaatgctgccagagcgattgcggcccctcaccttgtccacgtatcaggaatgtgaatgtgggacctttcctccatccctgttgtccggagccagctcactgtcttccacactggtgctaactggcccaggcactggagtggaatagaatgcagctggaggctacgcatggcctctgcagcacacgcagctggagagggcttctgtccctgtcagcggcagagggcgttggggctggccggggcaccttgtccctgctatggtccacatgctcacgctgtccacctgccaggtggagtgtatgtggctgtggccctccctcgtggaggtgccgtgctttaaagaggccttagtgcccgggatgggcacagtgttttgaagggaggtgggagctcttgctctcctggtcactgcagaatgacagagaaggtgaagctccatgcatgtgtgcgcgggtgtatgtgcgctcagggtctctgtttaagtatcagctaaagatgtgcttcctccgtgtctgtcatacactgagaccaacaggctacagtgtccctgattcttggaaaagcctggagaagctggggagatgcggttcacaatgcctcggtataggaggctgtgttgagctgacattcaaatggattctttaataataatgaaactggcgagtatttattgtgcaaaatttgg

SEQ ID NO: 328235 - DNA, 1607 bp, Homo sapiens
  misc_feature (1536)..(1536): n is a, c, g, or t
  misc_feature (1544)..(1545): n is a, c, g, or t
attggctcttctggctcgccttccatccctgctcctgcaccggtctgcatctcccagcagaaggcgcagccatgaatccgttattcggccccaacctcttcctcctgcagcaggagcagcagggcctggccgggccactgggggactcactgggaggcgaccacttcgccgggggaggagacttgcccccggcgcctctctcgccggccggccctgctgcctactcgccgcccgggccgggcccggccccgcctgccgccatggccctccgcaatgacctgggctccaacatcaacgtgctcaagaccctgaacctccggttccgctgcttcctggccaaggtgcatgagctggagcgccggaaccggctgttggagaagcaactgcagcaagcgctggaggagggtaagcagggccggcggggcctgggtcgtcgcgaccaggcagtgcagaccggcttcgtcagccccatccggcccctggggctgcagctgggcgcccggccggccgctgtctgcagcccttcggcgcgcgtgctgggctcgcccgcgcgctccccggccggccccctcgcgccctccgcggccagcctctcgtcgtcctccacctccacctccaccacctattcctcgtcggcccgcttcatgcccggcaccatctggtcgttctcgcacgcccgccggctcgggccgggactggagcccactctggtgcaagggcctggcttgtcgtgggtgcacccggatggggtgggcgtccagatcgacaccatcacgcccgagatccgcgctctctacaacgtgctggccaaagtgaagcgggagcgggacgagtacaagcggaggtgggaagaggagtacacggtgcggatccagctgcaagaccgtgtaaatgagctccaggaggaagcccaggaggctgatgcctgccaggaggagctggcactgaaggtggaacagttgaaggctgagctggtggtcttcaaggggctcatgagtaacaacctgtcggagctggacaccaagatccaggagaaagccatgaaggtggatatggacatctgccgccgcatcgacatcaccgccaagctctgcgatgtggctcagcagcgcaactgcgaggacatgatccagatgttccagaagctggtcccatccatgggggggcggaagcgggagcgcaaggctgccgtcgaggaggacacctccctgtcggagagtgaggggccccgccagcccgatggggatgaggaggagagcacagccctcagcatcaacgaggagatgcagcgcatgctcaaccagctgagggagtatgattttgaggacgactgtgacagcctgacttgggaggagactgaggagaccctgctgctttgggaggatttctcaggctatgccatggcagctgcagaggcccagggagagcagcaggaagatagcctggagaaggtgattaaagatacggagtccctgttcaaaacccgggagaaggagtatcaggagaccattgaccagatagagtggagttggcagngcaagaannaatgaccggcactgccgagtacctgggatgtgccttaaacgcggctggacttcgatgggact

SEQ ID NO: 328236 - DNA, 1684 bp, Homo sapiens
attggctcttctggctcgccttccatccctgctcctgcaccggtctgcatctcccagcagaaggcgcagccatgaatccgttattcggccccaacctcttcctcctgcagcaggagcagcagggcctggccgggccactgggggactcactgggaggcgaccacttcgccgggggaggagacttgcccccggcgcctctctcgccggccggccctgctgcctactcgccgcccgggccgggcccggccccgcctgccgccatggccctccgcaatgacctgggctccaacatcaacgtgctcaagaccctgaacctccggttccgctgcttcctggccaaggtgcatgagctggagcgccggaaccggctgttggagaagcaactgcagcaagcgctggaggagggtaagcagggccggcggggcctgggtcgtcgcgaccaggcagtgcagaccggcttcgtcagccccatccggcccctggggctgcagctgggcgcccggccggccgctgtctgcagcccttcggcgcgcgtgctgggctcgcccgcgcgctccccggccggccccctcgcgccctccgcggccagcctctcgtcgtcctccacctccacctccaccacctattcctcgtcggcccgcttcatgcccggcaccatctggtcgttctcgcacgcccgccggctcgggccgggactggagcccactctggtgcaagggcctggcttgtcgtgggtgcacccggatggggtgggcgtccagatcgacaccatcacgcccgagatccgcgctctctacaacgtgctggccaaagtgaagcgggagcgggacgagtacaagcggaggtgggaagaggagtacacggtgcggatccagctgcaagaccgtgtaaatgagctccaggaggaagcccaggaggctgatgcctgccaggaggagctggcactgaaggtggaacagttgaaggctgagctggtggtcttcaaggggctcatgagtaacaacctgtcggagctggacaccaagatccaggagaaagccatgaaggtggatatggacatctgccgccgcatcgacatcaccgccaagctctgcgatgtggctcagcagcgcaactgcgaggacatgatccagatgttccagaagctggtcccatccatgggggggcggaagcgggagcgcaaggctgccgtcgaggaggacacctccctgtcggagagtgaggggccccgccagcccgatggggatgaggaggagagcacagccctcagcatcaacgaggagatgcagcgcatgctcaaccagctgagggagtatgattttgaggacgactgtgacagcctgacttgggaggagactgaggagaccctgctgctttgggaggatttctcaggctatgccatggcagctgcagaggcccagggagagcagcaggaagatagcctggagaaggtgattaaagatacggagtccctgttcaaaacccgggagaaggagtatcaggagaccattgaccagatagaggcaaagatttccaggaaaagcagaggaaacaatggtgtattcgctgccttctgccttggtctggtttattttaaaatctgagccttcagtaatggctgcctgggcccccggcccagccactgctcttggcgtgttggcctcctggcgggggcaacagaggc

SEQ ID NO: 328237 - DNA, 2829 bp, Homo sapiens
attggctcttctggctcgccttccatccctgctcctgcaccggtctgcatctcccagcagaaggcgcagccatgaatccgttattcggccccaacctcttcctcctgcagcaggagcagcagggcctggccgggccactgggggactcactgggaggcgaccacttcgccgggggaggagacttgcccccggcgcctctctcgccggccggccctgctgcctactcgccgcccgggccgggcccggccccgcctgccgccatggccctccgcaatgacctgggctccaacatcaacgtgctcaagaccctgaacctccggttccgctgcttcctggccaaggtgcatgagctggagcgccggaaccggctgttggagaagcaactgcagcaagcgctggaggagggtaagcagggccggcggggcctgggtcgtcgcgaccaggcagtgcagaccggcttcgtcagccccatccggcccctggggctgcagctgggcgcccggccggccgctgtctgcagcccttcggcgcgcgtgctgggctcgcccgcgcgctccccggccggccccctcgcgccctccgcggccagcctctcgtcgtcctccacctccacctccaccacctattcctcgtcggcccgcttcatgcccggcaccatctggtcgttctcgcacgcccgccggctcgggccgggactggagcccactctggtgcaagggcctggcttgtcgtgggtgcacccggatggggtgggcgtccagatcgacaccatcacgcccgagatccgcgctctctacaacgtgctggccaaagtgaagcgggagcgggacgagtacaagcggagatgcttttacagggttaaatgataccacaagaggcagggcagcgggctcgacgagctctgttctggtgcgggcaggaggcgggagcccggatctgtgcgactgaaggtgggaagaggagtacacggtgcggatccagctgcaagaccgtgtaaatgagctccaggaggaagcccaggaggctgatgcctgccaggaggagctggcactgaaggtggaacagttgaaggctgagctggtggtcttcaaggggctcatgagtaacaacctgtcggagctggacaccaagatccaggagaaagccatgaaggtggatatggacatctgccgccgcatcgacatcaccgccaagctctgcgatgtggctcagcagcgcaactgcgaggacatgatccagatgttccagaagctggtcccatccatgggggggcggaagcgggagcgcaaggctgccgtcgaggaggacacctccctgtcggagagtgaggggccccgccagcccgatggggatgaggaggagagcacagccctcagcatcaacgaggagatgcagcgcatgctcaaccagctgagggagtatgattttgaggacgactgtgacagcctgacttgggaggagactgaggagaccctgctgctttgggaggatttctcaggctatgccatggcagctgcagaggcccagggagagcagcaggaagatagcctggagaaggtgattaaagatacggagtccctgttcaaaacccgggagaaggagtatcaggagaccattgaccagatagagctggagttggccacggccaagaacgacatgaaccggcacctgcacgagtacatggagatgtgcagcatgaagcgcggcctggacgtgcagatggagacctgccgccggctcatcacccagtctggagaccgaaagtctcctgctttcactgcggtcccgcttagcgacccgccgccgccgccaagcgaggctgaggactccgatcgcgatgtctcatctgacagctccatgagatagagacctgcctcccccttgcacccgaggccctcgcagcagggagctcagcgaggcagagggtggggctgcacagaggggaacatcagctgcagctctgcaccaggccggtccctggggactggggcgctcctccctcaggctttctccctcagtcttggcttctccagggctctggggtgtctggagctaggcttggccctaccattctggggccatttccaccacagttggggctctcctgccttcacgcgtgggtgtctgctacttccccatctttaaaatgctgccagagcgattgcggcccctcaccttgtccacgtatcaggaatgtgaatgtgggacctttcctccatccctgttgtccggagccagctcactgtcttccacactggtgctaactggcccaggcactggagtggaatagaatgcagctggaggctacgcatggcctctgcagcacacgcagctggagagggcttctgtccctgtcagcggcagagggcgttggggctggccggggcaccttgtccctgctatggtccacatgctcacgctgtccacctgccaggtggagtgtatgtggctgtggccctccctcgtggaggtgccgtgctttaaagaggccttagtgcccgggatgggcacagtgttttgaagggaggtgggagctcttgctctcctggtcactgcagaatgacagagaaggtgaagctccatgcatgtgtgcgcgggtgtatgtgcgctcagggtctctgtttaagtatcagctaaagatgtgcttcctccgtgtctgtcatacactgagaccaacaggctacagtgtccctgattcttggaaaagcctggagaagctggggagatgcggttcacaatgcctcggtataggaggctgtgttgagctgacattcaaatggattctttaataataatgaaactggcgagtatttattgtgcaaaatttgg

SEQ ID NO: 328238 - DNA, 2720 bp, Homo sapiens
attggctcttctggctcgccttccatccctgctcctgcaccggtctgcatctcccagcagaaggcgcagccatgaatccgttattcggccccaacctcttcctcctgctgcctactcgccgcccgggccgggcccggccccgcctgccgccatggccctccgcaatgacctgggctccaacatcaacgtgctcaagaccctgaacctccggttccgctgcttcctggccaaggtgcatgagctggagcgccggaaccggctgttggagaagcaactgcagcaagcgctggaggagggtaagcagggccggcggggcctgggtcgtcgcgaccaggcagtgcagaccggcttcgtcagccccatccggcccctggggctgcagctgggcgcccggccggccgctgtctgcagcccttcggcgcgcgtgctgggctcgcccgcgcgctccccggccggccccctcgcgccctccgcggccagcctctcgtcgtcctccacctccacctccaccacctattcctcgtcggcccgcttcatgcccggcaccatctggtcgttctcgcacgcccgccggctcgggccgggactggagcccactctggtgcaagggcctggcttgtcgtgggtgcacccggatggggtgggcgtccagatcgacaccatcacgcccgagatccgcgctctctacaacgtgctggccaaagtgaagcgggagcgggacgagtacaagcggagatgcttttacagggttaaatgataccacaagaggcagggcagcgggctcgacgagctctgttctggtgcgggcaggaggcgggagcccggatctgtgcgactgaaggtgggaagaggagtacacggtgcggatccagctgcaagaccgtgtaaatgagctccaggaggaagcccaggaggctgatgcctgccaggaggagctggcactgaaggtggaacagttgaaggctgagctggtggtcttcaaggggctcatgagtaacaacctgtcggagctggacaccaagatccaggagaaagccatgaaggtggatatggacatctgccgccgcatcgacatcaccgccaagctctgcgatgtggctcagcagcgcaactgcgaggacatgatccagatgttccagaagctggtcccatccatgggggggcggaagcgggagcgcaaggctgccgtcgaggaggacacctccctgtcggagagtgaggggccccgccagcccgatggggatgaggaggagagcacagccctcagcatcaacgaggagatgcagcgcatgctcaaccagctgagggagtatgattttgaggacgactgtgacagcctgacttgggaggagactgaggagaccctgctgctttgggaggatttctcaggctatgccatggcagctgcagaggcccagggagagcagcaggaagatagcctggagaaggtgattaaagatacggagtccctgttcaaaacccgggagaaggagtatcaggagaccattgaccagatagagctggagttggccacggccaagaacgacatgaaccggcacctgcacgagtacatggagatgtgcagcatgaagcgcggcctggacgtgcagatggagacctgccgccggctcatcacccagtctggagaccgaaagtctcctgctttcactgcggtcccgcttagcgacccgccgccgccgccaagcgaggctgaggactccgatcgcgatgtctcatctgacagctccatgagatagagacctgcctcccccttgcacccgaggccctcgcagcagggagctcagcgaggcagagggtggggctgcacagaggggaacatcagctgcagctctgcaccaggccggtccctggggactggggcgctcctccctcaggctttctccctcagtcttggcttctccagggctctggggtgtctggagctaggcttggccctaccattctggggccatttccaccacagttggggctctcctgccttcacgcgtgggtgtctgctacttccccatctttaaaatgctgccagagcgattgcggcccctcaccttgtccacgtatcaggaatgtgaatgtgggacctttcctccatccctgttgtccggagccagctcactgtcttccacactggtgctaactggcccaggcactggagtggaatagaatgcagctggaggctacgcatggcctctgcagcacacgcagctggagagggcttctgtccctgtcagcggcagagggcgttggggctggccggggcaccttgtccctgctatggtccacatgctcacgctgtccacctgccaggtggagtgtatgtggctgtggccctccctcgtggaggtgccgtgctttaaagaggccttagtgcccgggatgggcacagtgttttgaagggaggtgggagctcttgctctcctggtcactgcagaatgacagagaaggtgaagctccatgcatgtgtgcgcgggtgtatgtgcgctcagggtctctgtttaagtatcagctaaagatgtgcttcctccgtgtctgtcatacactgagaccaacaggctacagtgtccctgattcttggaaaagcctggagaagctggggagatgcggttcacaatgcctcggtataggaggctgtgttgagctgacattcaaatggattctttaataataatgaaactggcgagtatttattgtgcaaaatttgg

SEQ ID NO: 328239 - DNA, 3163 bp, Homo sapiens
attggctcttctggctcgccttccatccctgctcctgcaccggtctgcatctcccagcagaaggcgcagccatgaatccgttattcggccccaacctcttcctcctgcagcaggagcagcagggcctggccgggccactgggggactcactgggaggcgaccacttcgccgggggaggagacttgcccccggcgcctctctcgccggccggccctgctgcctactcgccgcccgggccgggcccggccccgcctgccgccatggccctccgcaatgacctgggctccaacatcaacgtgctcaagaccctgaacctccggttccgctgcttcctggccaaggtgcatgagctggagcgccggaaccggctgttggagaagcaactgcagcaagcgctggaggagggtaagcagggccggcggggcctgggtcgtcgcgaccaggcagtgcagaccggcttcgtcagccccatccggcccctggggctgcagctgggcgcccggccggccgctgtctgcagcccttcggcgcgcgtgctgggctcgcccgcgcgctccccggccggccccctcgcgccctccgcggccagcctctcgtcgtcctccacctccacctccaccacctattcctcgtcggcccgcttcatgcccggcaccatctggtcgttctcgcacgcccgccggctcgggccgggactggagcccactctggtgcaagggcctggcttgtcgtgggtgcacccggatggggtgggcgtccagatcgacaccatcacgcccgagatccgcgctctctacaacgtgctggccaaagtgaagcgggagcgggacgagtacaagcggaggtgggaagaggagtacacggtgcggatccagctgcaagaccgtgtaaatgagctccaggaggaagcccaggaggctgatgcctgccaggaggagctggcactgaaggtggaacagttgaaggctgagctggtggtcttcaaggggctcatgagtaacaacctgtcggagctggacaccaagatccaggagaaagccatgaaggtggatatggacatctgccgccgcatcgacatcaccgccaagctctgcgatgtggctcagcagcgcaactgcgaggacatgatccagatgttccagatctggatgtgattcaggttctcttttgtacacattgcacactcatcctccttgcgtcctaaagcttttttttttttagttgagtcatttaatcaaaaagactttttttagaaaaaaatttcctcttgagccatcatgcacatctgactgcagccccagcgagcccttccttccttgtctgactgctcttcttctcgatttcttcttgttctgccttctcggtttgcagccctgacccccgctgtgtgtctggcccttggtgactgtccgtgtttctgttcctgtcattgtaactgtgacttttctctctgtctgcccccccttcctactggttcatgcttctcccccattcccaccctctctgcccggcctcccgctcccgccctttctcctcatgcacccggcctcgtctctgtagtctctgcacttgtctcccattaaagctggtcccatccatgggggggcggaagcgggagcgcaaggctgccgtcgaggaggacacctccctgtcggagagtgaggggccccgccagcccgatggggatgaggaggagagcacagccctcagcatcaacgaggagatgcagcgcatgctcaaccagctgagggagtatgattttgaggacgactgtgacagcctgacttgggaggagactgaggagaccctgctgctttgggaggatttctcaggctatgccatggcagctgcagaggcccagggagagcagcaggaagatagcctggagaaggtgattaaagatacggagtccctgttcaaaacccgggagaaggagtatcaggagaccattgaccagatagagctggagttggccacggccaagaacgacatgaaccggcacctgcacgagtacatggagatgtgcagcatgaagcgcggcctggacgtgcagatggagacctgccgccggctcatcacccagtctggagaccgaaagtctcctgctttcactgcggtcccgcttagcgacccgccgccgccgccaagcgaggctgaggactccgatcgcgatgtctcatctgacagctccatgagatagagacctgcctcccccttgcacccgaggccctcgcagcagggagctcagcgaggcagagggtggggctgcacagaggggaacatcagctgcagctctgcaccaggccggtccctggggactggggcgctcctccctcaggctttctccctcagtcttggcttctccagggctctggggtgtctggagctaggcttggccctaccattctggggccatttccaccacagttggggctctcctgccttcacgcgtgggtgtctgctacttccccatctttaaaatgctgccagagcgattgcggcccctcaccttgtccacgtatcaggaatgtgaatgtgggacctttcctccatccctgttgtccggagccagctcactgtcttccacactggtgctaactggcccaggcactggagtggaatagaatgcagctggaggctacgcatggcctctgcagcacacgcagctggagagggcttctgtccctgtcagcggcagagggcgttggggctggccggggcaccttgtccctgctatggtccacatgctcacgctgtccacctgccaggtggagtgtatgtggctgtggccctccctcgtggaggtgccgtgctttaaagaggccttagtgcccgggatgggcacagtgttttgaagggaggtgggagctcttgctctcctggtcactgcagaatgacagagaaggtgaagctccatgcatgtgtgcgcgggtgtatgtgcgctcagggtctctgtttaagtatcagctaaagatgtgcttcctccgtgtctgtcatacactgagaccaacaggctacagtgtccctgattcttggaaaagcctggagaagctggggagatgcggttcacaatgcctcggtataggaggctgtgttgagctgacattcaaatggattctttaataataatgaaactggcgagtatttattgtgcaaaatttgg

SEQ ID NO: 328240 - DNA, 1451 bp, Homo sapiens
cctgcgtctcccctcttcctttatccttttgcttttctttctccagtttctttaaccagacttcctctctctctctctccctgacttggccctttggaatgcgtcccatcccatccctccttggctggcctcccccgcttccctttctactccagcagcaggaagatagcctggagaaggtgattaaagatacggagtccctgttcaaaacccgggagaaggagtatcaggagaccattgaccagatagagctggagttggccacggccaagaacgacatgaaccggcacctgcacgagtacatggagatgtgcagcatgaagcgcggcctggacgtgcagatggagacctgccgccggctcatcacccagtctggagaccgaaagtctcctgctttcactgcggtcccgcttagcgacccgccgccgccgccaagcgaggctgaggactccgatcgcgatgtctcatctgacagctccatgagatagagacctgcctcccccttgcacccgaggccctcgcagcagggagctcagcgaggcagagggtggggctgcacagaggggaacatcagctgcagctctgcaccaggccggtccctggggactggggcgctcctccctcaggctttctccctcagtcttggcttctccagggctctggggtgtctggagctaggcttggccctaccattctggggccatttccaccacagttggggctctcctgccttcacgcgtgggtgtctgctacttccccatctttaaaatgctgccagagcgattgcggcccctcaccttgtccacgtatcaggaatgtgaatgtgggacctttcctccatccctgttgtccggagccagctcactgtcttccacactggtgctaactggcccaggcactggagtggaatagaatgcagctggaggctacgcatggcctctgcagcacacgcagctggagagggcttctgtccctgtcagcggcagagggcgttggggctggccggggcaccttgtccctgctatggtccacatgctcacgctgtccacctgccaggtggagtgtatgtggctgtggccctccctcgtggaggtgccgtgctttaaagaggccttagtgcccgggatgggcacagtgttttgaagggaggtgggagctcttgctctcctggtcactgcagaatgacagagaaggtgaagctccatgcatgtgtgcgcgggtgtatgtgcgctcagggtctctgtttaagtatcagctaaagatgtgcttcctccgtgtctgtcatacactgagaccaacaggctacagtgtccctgattcttggaaaagcctggagaagctggggagatgcggttcacaatgcctcggtataggaggctgtgttgagctgacattcaaatggattctttaataataatgaaactggcgagtatttattgtgcaaaatttgg

SEQ ID NO: 328241 - DNA, 1622 bp, Homo sapiens
tgtgtggccattaatctatgacttagaacagggattgtagataagcttaatcggccacacccagcctgtgattgattcatagtctcttcttggaacactgtgttgagaaggattctgaggccagccatcttggctcagcagggaagagtgctgtggtgagtgagggattttgccatggagaaggagaaggacccatagcagtttgtcaggttcatggaatccgagctggacctaaatgacatcattcaggagatgcacgtggtggccaccatgccagacctgtaccaccttctggtggagctgaatgctgtacagtcgcttctcggcttgctcggacacgataatacagatatcctttcagatctgacctcagtaggagagctgacatggtggatgggcaggtggtagcactgctggtacagaatctggagcgcctggatgagtctgtgaaagaggaggcagatggcgtccacaacactctggctattgtggaaaacatggctgagttccggcctgagatgtgtacagagggtgcccagcagggtcttctacagtggctgttgaagaggctgaaggcaaagatgccttttgatgccaacaaactgtattgcagtgaagtgctggccatattgctccaggacaatgatgaaaacagggaattgcttggggagctggatggaatcgatgtgcttcttcagcagttatccgtgtttaaaagacacaatcccagcacggctgaggagcaggagatgatggagaatctgtttgattccctctgctcctgtctaatgcttagttccaatcgtgagcgcttcctgaagggcgagggtcttcagctgatgaatctcatgctcagggaaaagaagatctcccggagcagtgccctgaaagtgctggaccatgccatgattggccccgaaggcacagacaactgccataagtttgttgacattcttggcttacgaaccatctttcccctctttatgaaatctcccaggaagatcaagaaagtgggaaccactgagaaggaacatgaagagcatgtctgttcgatcctggcttccctcctgcggaacctgagagggcagcagcggacccggcttctgaataaattcactgaaaatgacagtgagaaggttgacagactaatggagttgcattttaaatatctgggtgcaatgcaggtggcggacaagaagattgaaggggaaaaacacgacatggtccggcgaggagagatcatcgacaatgacaccgaggaggagttctacctccggcgcctggatgcggggctctttgttctccagcacatctgctacatcatggccgagatctgcaatgccaatgtcccccagattcgccagagggttcaccagatcctaaacatgcgaggaagctccatcaaaattgtcaggcatatcatcaaggagtatgcagagaacatcggggacggccggagcccggagttccgggagaacgagcaaaagcgcatcctgggcttgctggagaacttctagaggcaccttggccctgcgcatcatggactctctcagcttccctcccaggatcagtttctacacaactctgtgtggcttttggacaaattaaagctagttttggta

SEQ ID NO: 328242 - DNA, 912 bp, Homo sapiens
ctctctgtgtcacccagactggaatacagtggcatgaccttggcttactgcagcctcctgggctcaagtgatcctctcacctcagcctcctgagtagttgggactacagcccaataggggcacaaaacgtccccgggatgatgaagaggaggagcagaagatgcgtcggaaacaaactggtactcgagaacgcggccgctatcgggaagaagaaatgactgtggtggaggaagcggatgatgacaaaaaaaggctgctgcagattattgacagagatggggaagaggaagaggaagaggaggagccattggatgaaagctcagtgaagaaaatgatcctcacatttgaaaagagatcatataaaaaccaagaattgcggattaagtttccagacaatccagagaagttcatggaatccgagctggacctaaatgacatcattcaggagatgcacgtggtggccaccatgccagacctgtaccaccttctggtggagctgaatgctgtacagtcgcttctcggcttgctcggacacgataatacagatgtgtccatagctgtggtcgatttgcttcaggaattaacagatatagacaccctccatgagagtgaagagggagcagaagtgctcatcgatgctctgggatgggccaggtggttagcactggtgggtaacagaatcttggagcggctgggatgagtttgtgaaagacggaggcacgaatgggtctcacaaaattctgctattgggggacacatggttgagtcgggctgagatgtgaccgaaggtggccactagggttttacaggggctgtgaaacaggtcgagcaagatgccttagtgcgacaaatgatgttaggatggtgagcattgcgggaggtgaaaggatgtggatgatgaaaaggataaag

SEQ ID NO: 328243 - DNA, 556 bp, Homo sapiens
  misc_feature (8)..(8): n is a, c, g, or t
  misc_feature (21)..(21): n is a, c, g, or t
  misc_feature (24)..(24): n is a, c, g, or t
  misc_feature (26)..(26): n is a, c, g, or t
  misc_feature (29)..(29): n is a, c, g, or t
  misc_feature (31)..(31): n is a, c, g, or t
  misc_feature (37)..(37): n is a, c, g, or t
  misc_feature (56)..(56): n is a, c, g, or t
cctttttntcccccccccganaanangangnccccgnggttttttttttttttttntttttttttttttttaccaaaactagctttaatttgtccaaaagccacacagagttgtgtagaaactgatcctgggagggaagctgagagagtccatgatgcgcagggccaaggtgcctctagaagttctccagcaagcccaggatgcgcttttgctcgttctcccggaactccgggctccggccgtccccgatgttctctgcatactccttgatgatatgcctgacaattttgatggagcttcctcgcatgtttaggatctggagttctacctccggcgcctggatgcggggctctttgttctccagcacatctgctacatcatggccgagatctgcaatgccaatgtcccccagattcgccagagggttcaccagatcctaaacatgcgaggaagctccatcaaaattgtcaggcatatcatcaaggagtatgcagagaacatcggggacggccgcaaggagaggacagcgattctcgtacgaacggttacgattcga

SEQ ID NO: 328244 - DNA, 631 bp, Homo sapiens
cagtccttttgcaagggtctaatccccctagattagacctaatctagacctaatctaatcttataattagatggtaagaacctaatcaccccataaaggccttcgatgcgttgaggatgaggtttcagcatgagttttggaggggacacaaacattcagaccttagtagcatccacgccatgtgtgttgagtgaataaatacatgagggcggaagtgaagggtgtggctaggaggggaatccaagcatggaaaggtaagttgggacctttccactgaggcctcaaaggcaagaccccaaggaatttggctacagtgggggcattagggcgacttgcacctctgtgggagctggggttctgggaaaggtatgaagcgacgcagccacggtggatgccatgcctgggatccactcctgactctatctttgtccccctagagtatgcagagaacatcggggacggccggagcccggagttccgggagaacgagcaaaagcgcatcctgggcttgctggagaacttctagaggcaccttggccctgcgcatcatggactctctcagcttccctcccaggatcagtttctacacaactctgtgtggcttttggacaaattaaagctagttttggta

SEQ ID NO: 328245 - DNA, 406 bp, Homo sapiens
tgtgtggccattaatctatgacttagaacagggattgtagataagcttaatcggccacacccagcctgtgattgattcatagtctcttcttggaacactgtgttgagaaggattctgaggccagccatcttggctcagcagggaagagtgctgtggtgagtgagggattttgccatggagaaggagaaggacccatagcagtttgtcaggtattggcttctcctattgtagtagaataatgataaggggaattatttagcctatattaacaacaacagcaaaatgaatatagaactatatactatataggcttactttttggggggaaagtctgtgagttgagaagaatgacttaaacatacaggcaaacatacagggtattgaagctcatggtgctagctcttca

SEQ ID NO: 328246 - DNA, 2204 bp, Homo sapiens
  misc_feature (8)..(8): n is a, c, g, or t
  misc_feature (21)..(21): n is a, c, g, or t
  misc_feature (24)..(24): n is a, c, g, or t
  misc_feature (26)..(26): n is a, c, g, or t
  misc_feature (29)..(29): n is a, c, g, or t
  misc_feature (31)..(31): n is a, c, g, or t
  misc_feature (37)..(37): n is a, c, g, or t
  misc_feature (56)..(56): n is a, c, g, or t
cctttttntcccccccccganaanangangnccccgnggttttttttttttttttntttttttttttttttaccaaaactagctttaatttgtccaaaagccacacagagttgtgtagaaactgatcctgggagggaagctgagagagtccatgatgcgcagggccaaggtgcctctagaagttctccagcaagcccaggatgcgcttttgctcgttctcccggaactccgggctccggccgtccccgatgttctctgcatactccttgatgatatgcctgacaattttgatggagcttcctcgcatgtttaggatctggtgaaccctctggcgaatctgggggacattggcattgcaggtctgggcgtgagtgcagggaagtggagtatttgctgggccgggtaccatggacgtgggcgaacttctgagctaccagcccaataggggcacaaaacgtccccgggatgatgaagaggaggagcagaagatgcgtcggaaacaaactggtactcgagaacgcggccgctatcgggaagaagaaatgactgtggtggaggaagcggatgatgacaaaaaaaggctgctgcagattattgacagagatggggaagaggaagaggaagaggaggagccattggatgaaagctcagtgaagaaaatgatcctcacatttgaaaagagatcatataaaaaccaagaattgcggattaagtttccagacaatccagagaagttcatggaatccgagctggacctaaatgacatcattcaggagatgcacgtggtggccaccatgccagacctgtaccaccttctggtggagctgaatgctgtacagtcgcttctcggcttgctcggacacgataatacagatgtgtccatagctgtggtcgatttgcttcaggaattaacagatatagacaccctccatgagagtgaagagggagcagaagtgctcatcgatgctctggtggatgggcaggtggtagcactgctggtacagaatctggagcgcctggatgagtctgtgaaagaggaggcagatggcgtccacaacactctggctattgtggaaaacatggctgagttccggcctgagatgtgtacagagggtgcccagcagggtcttctacagtggctgttgaagaggctgaaggcaaagatgccttttgatgccaacaaactgtattgcagtgaagtgctggccatattgctccaggacaatgatgaaaacagggaattgcttggggagctggatggaatcgatgtgcttcttcagcagttatccgtgtttaaaagacacaatcccagcacggctgaggagcaggagatgatggagaatctgtttgattccctctgctcctgtctaatgcttagttccaatcgtgagcgcttcctgaagggcgagggtcttcagctgatgaatctcatgctcagggaaaagaagatctcccggagcagtgccctgaaagtgctggaccatgccatgattggccccgaaggcacagacaactgccataagtttgttgacattcttggcttacgaaccatctttcccctctttatgaaatctcccaggaagatcaagaaagtgggaaccactgagaaggaacatgaagagcatgtctgttcgatcctggcttccctcctgcggaacctgagagggcagcagcggacccggcttctgaataaattcactgaaaatgacagtgagaaggttgacagactaatggagttgcattttaaatatctgggtgcaatgcaggtggcggacaagaagattgaaggggaaaaacacgacatggtccggcgaggagagatcatcgacaatgacaccgaggaggagttctacctccggcgcctggatgcggggctctttgttctccagcacatctgctacatcatggccgagatctgcaatgccaatgtcccccagattcgccagagggttcaccagatcctaaacatgcgaggaagctccatcaaaattgtcaggcatatcatcaaggagtatgcagagaacatcggggacggccggagcccggagttccgggagaacgagcaaaagcgcatcctgggcttgctggagaacttctagaggcaccttggccctgcgcatcatggactctctcagcttccctcccaggatcagtttctacacaactctgtgtggcttttggacaaattaaagctagttttggta

SEQ ID NO: 328247 - DNA, 1949 bp, Homo sapiens
attggctctgcggctccgctcgccgcactttacggcagtgtggctggagccgcggctgacgggcccgcggtctgggcgtgagtgcagggaagtggagtatttgctgggccgggtaccatggacgtgggcgaacttctgagctaccagcccaataggggcacaaaacgtccccgggatgatgaagaggaggagcagaagatgcgtcggaaacaaactggtactcgagaacgcggccgctatcgggaagaagaaatgactgtggtggaggaagcggatgatgacaaaaaaaggctgctgcagattattgacagagatggggaagaggaagaggaagaggaggagccattggatgaaagctcagtgaagaaaatgatcctcacatttgaaaagagatcatataaaaaccaagaattgcggattaagtttccagacaatccagagaagttcatggaatccgagctggacctaaatgacatcattcaggagatgcacgtggtggccaccatgccagacctgtaccaccttctggtggagctgaatgctgtacagtcgcttctcggcttgctcggacacgataatacagatgtgtccatagctgtggtcgatttgcttcaggaattaacagatatagacaccctccatgagagtgaagagggagcagaagtgctcatcgatgctctggtggatgggcaggtggtagcactgctggtacagaatctggagcgcctggatgagtctgtgaaagaggaggcagatggcgtccacaacactctggctattgtggaaaacatggctgagttccggcctgagatgtgtacagagggtgcccagcagggtcttctacagtggctgttgaagaggctgaaggcaaagatgccttttgatgccaacaaactgtattgcagtgaagtgctggccatattgctccaggacaatgatgaaaacagggaattgcttggggagctggatggaatcgatgtgcttcttcagcagttatccgtgtttaaaagacacaatcccagcacggctgaggagcaggagatgatggagaatctgtttgattccctctgctcctgtctaatgcttagttccaatcgtgagcgcttcctgaagggcgagggtcttcagctgatgaatctcatgctcagggaaaagaagatctcccggagcagtgccctgaaagtgctggaccatgccatgattggccccgaaggcacagacaactgccataagtttgttgacattcttggcttacgaaccatctttcccctctttatgaaatctcccaggaagatcaagaaagtgggaaccactgagaaggaacatgaagagcatgtctgttcgatcctggcttccctcctgcggaacctgagagggcagcagcggacccggcttctgaataaattcactgaaaatgacagtgagaaggttgacagactaatggagttgcattttaaatatctgggtgcaatgcaggtggcggacaagaagattgaaggggaaaaacacgacatggtccggcgaggagagatcatcgacaatgacaccgaggaggagttctacctccggcgcctggatgcggggctctttgttctccagcacatctgctacatcatggccgagatctgcaatgccaatgtcccccagattcgccagagggttcaccagatcctaaacatgcgaggaagctccatcaaaattgtcaggcatatcatcaaggagtatgcagagaacatcggggacggccggagcccggagttccgggagaacgagcaaaagcgcatcctgggcttgctggagaacttctagaggcaccttggccctgcgcatcatggactctctcagcttccctcccaggatcagtttctacacaactctgtgtggcttttggacaaattaaagctagttttggtaaaacaagaaaaagcaaaggcctcggtgggctcaga

SEQ ID NO: 328248 - DNA, 1944 bp, Homo sapiens
attggctctgcggctccgctcgccgcactttacggcagtgtggctggagccgcggctgacgggcccgcggtctgggcgtgagtgcagggaagtggagtatttgctgggccgggtaccatggacgtgggcgaacttctgagctaccagcccaataggggcacaaaacgtccccgggatgatgaagaggaggagcagaagatgcgtcggaaacaaactggtactcgagaacgcggccgctatcgggaagaagaaatgactgtggtggaggaagcggatgatgacaaaaaaaggctgctgcagattattgacagagatggggaagaggaagaggaagaggaggagccattggatgaaagctcagtgaagaaaatgatcctcacatttgaaaagagatcatataaaaaccaagaattgcggattaagtttccagacaatccagagaagttcatggaatccgagctggacctaaatgacatcattcaggagatgcacgtggtggccaccatgccagacctgtaccaccttctggtggagctgaatgctgtacagtcgcttctcggcttgctcggacacgataatacagatgtgtccatagctgtggtcgatttgcttcaggaattaacagatatagacaccctccatgagagtgaagagggagcagaagtgctcatcgatgctctggtggatgggcaggtggtagcactgctggtacagaatctggagcgcctggatgagtctgtgaaagaggaggcagatggcgtccacaacactctggctattgtggaaaacatggctgagttccggcctgagatgtgtacagagggtgcccagcagggtcttctacagtggctgttgaagaggctgaaggcaaagatgccttttgatgccaacaaactgtattgcagtgaagtgctggccatattgctccaggacaatgatgaaaacagggaattgcttggggagctggatggaatcgatgtgcttcttcagcagttatccgtgtttaaaagacacaatcccagcacggctgaggagcaggagatgatggagaatctgtttgattccctctgctcctgtctaatgcttagttccaatcgtgagcgcttcctgaagggcgagggtcttcagctgatgaatctcatgctcagggaaaagaagatctcccggagcagtgccctgaaagtgctggaccatgccatgattggccccgaaggcacagacaactgccataagtttgttgacattcttggcttacgaaccatctttcccctctttatgaaatctcccaggaagatcaagaaagtgggaaccactgagaaggaacatgaagagcatgtctgttcgatcctggcttccctcctgcggaacctgagagggcagcagcggacccggcttctgaataaattcactgaaaatgacagtgagaaggttgacagactaatggagttgcattttaaatatctgggtgcaatgcaggtggcggacaagaagattgaaggggaaaaacacgacatggtccggcgaggagagatcatcgacaatgacaccgaggaggagttctacctccggcgcctggatgcggggctctttgttctccagcacatctgctacatcatggccgagatctgcaatgccaatgtcccccagattcgccagagggttcaccagatcctaaacatgcgaggaagctccatcaaaattgtcaggcatatcatcaaggagtatgcagagaacatcggggacggccggagcccggagttccgggagaacgagcaaaagcgcatcctgggcttgctggagaacttctagaggcaccttggccctgcgcatcatggactctctcagcttccctcccaggatcagtttctacacaactctgtgtggcttttggacaaattaaagctagttttggtaaaaaaaataaaactttaaaaaaaaacctca

SEQ ID NO: 328249 - DNA, 2122 bp, Homo sapiens
tcagcgcgctgatagcctgctactgcattctgggaactacctgatgacctttcagtagcatgcctttgtactcttaagccattaaatgacaggttccatgtttttggagccaggaatcctggctattacaactgacttatattagatggtgcagggcaaacagagatgaagcattagcatggcatctgataggtaagtagtgatgatgggtagtaacactggacgtgggcgaacttctgagctaccaggagggtcattgcgaggagcagtagagctgcactgccgaatgtcgtagccactagccacataggctgttgattgcttgaaatgtgactagtctgaattgagaaatactcccaataggggcacaaaacgtccccgggatgatgaagaggaggagcagaagatgcgtcggaaacaaactggtactcgagaacgcggccgctatcgggaagaagaaatgactgtggtggaggaagcggatgatgacaaaaaaaggctgctgcagattattgacagagatggggaagaggaagaggaagaggaggagccattggatgaaagctcagtgaagaaaatgatcctcacatttgaaaagagatcatataaaaaccaagaattgcggattaagtttccagacaatccagagaagttcatggaatccgagctggacctaaatgacatcattcaggagatgcacgtggtggccaccatgccagacctgtaccaccttctggtggagctgaatgctgtacagtcgcttctcggcttgctcggacacgataatacagatgtgtccatagctgtggtcgatttgcttcaggaattaacagatatagacaccctccatgagagtgaagagggagcagaagtgctcatcgatgctctggtggatgggcaggtggtagcactgctggtacagaatctggagcgcctggatgagtctgtgaaagaggaggcagatggcgtccacaacactctggctattgtggaaaacatggctgagttccggcctgagatgtgtacagagggtgcccagcagggtcttctacagtggctgttgaagaggctgaaggcaaagatgccttttgatgccaacaaactgtattgcagtgaagtgctggccatattgctccaggacaatgatgaaaacagggaattgcttggggagctggatggaatcgatgtgcttcttcagcagttatccgtgtttaaaagacacaatcccagcacggctgaggagcaggagatgatggagaatctgtttgattccctctgctcctgtctaatgcttagttccaatcgtgagcgcttcctgaagggcgagggtcttcagctgatgaatctcatgctcagggaaaagaagatctcccggagcagtgccctgaaagtgctggaccatgccatgattggccccgaaggcacagacaactgccataagtttgttgacattcttggcttacgaaccatctttcccctctttatgaaatctcccaggaagatcaagaaagtgggaaccactgagaaggaacatgaagagcatgtctgttcgatcctggcttccctcctgcggaacctgagagggcagcagcggacccggcttctgaataaattcactgaaaatgacagtgagaaggttgacagactaatggagttgcattttaaatatctgggtgcaatgcaggtggcggacaagaagattgaaggggaaaaacacgacatggtccggcgaggagagatcatcgacaatgacaccgaggaggagttctacctccggcgcctggatgcggggctctttgttctccagcacatctgctacatcatggccgagatctgcaatgccaatgtcccccagattcgccagagggttcaccagatcctaaacatgcgaggaagctccatcaaaattgtcaggcatatcatcaaggagtatgcagagaacatcggggacggccggagcccggagttccgggagaacgagcaaaagcgcatcctgggcttgctggagaacttctagaggcaccttggccctgcgcatcatggactctctcagcttccctcccaggatcagtttctacacaactctgtgtggcttttggacaaattaaagctagttttggta

SEQ ID NO: 328250 - DNA, 1537 bp, Homo sapiens
attggctctgcggctccgctcgccgcactttacggcagtgtggctggagccgcggctgacgggcccgcggtctgggcgtgagtgcagggaagtggagtatttgctgggccgggtaccatggacgtgggcgaacttctgagctaccagcccaataggggcacaaaacgtccccgggatgatgaagaggaggagcagaagatgcgtcggaaacaaactggtactcgagaacgcggccgctatcgggaagaagaaatgactgtggtggaggaagcggatgatgacaaaaaaaggctgctgcagattattgacagagatggggaagaggaagaggaagaggaggagccattggatgaaagctcagtgaagaaaatgatcctcacatttgaaaagagatcatataaaaaccaagaattgcggattaagtttccagacaatccagagaagttcatggaatccgagctggacctaaatgacatcattcaggagatgcacgtggtggccaccatgccagacctgtaccaccttctggtggagctgaatgctgtacagtcgcttctcggcttgctcggacacgataatacagatgtgtccatagctgtggtcgatttgcttcaggaattaacagatatagacaccctccatgagagtgaagagggagcagaagtgctcatcgatgctctggtggatgggcaggtggtagcactgctggtacagaatctggagcgcctggatgagtctgtgaaagaggaggcagatggcgtccacaacactctggctattgtggaaaacatggctgagttccggcctgagatgtgtacagagggtgcccagcagggtcttctacagtggctgttgaagaggctgaaggcaaagatgccttttgatgccaacaaactgtattgcagtgaagtgctggccatattgctccaggacaatgatgaaaacagggaattgcttggggagctggatggaatcgatgtgcttcttcagcagttatccgtgtttaaaagacacaatcccagcacggctgaggagcaggagatgatggagaatctgtttgattccctctgctcctgtctaatgcttagttccaatcgtgagcgcttcctgaagggcgagggtcttcagctgatgaatctcatgctcagggaaaagaagatctcccggagcagtgccctgaaagtgctggaccatgccatgattggccccgaaggcacagacaactgccataagtttgttgacattcttggcttacgaaccatctttcccctctttatgaaatctcccaggaagatcaagaaagtgggaaccactgagaaggaacatgaagagcatgtctgttcgatcctggcttccctcctgcggaacctgagagggcagcagcggacccggcttctgaataaattcactgaaaatgacagtgagaaggttgacagactaatggagttgcattttaaatatctgggtgcaatgcaggtggcggacaagaagattgaaggggaaaaacacgtatgtatccctgcctcacttttgccag

SEQ ID NO: 328251 - DNA, 1419 bp, Homo sapiens
attggctctgcggctccgctcgccgcactttacggcagtgtggctggagccgcggctgacgggcccgcggtctgggcgtgagtgcagggaagtggagtatttgctgggccgggtaccatggacgtgggcgaacttctgagctaccagcccaataggggcacaaaacgtccccgggatgatgaagaggaggagcagaagatgcgtcggaaacaaactggtactcgagaacgcggccgctatcgggaagaagaaatgactgtggtggaggaagcggatgatgacaaaaaaaggctgctgcagattattgacagagatggggaagaggaagaggaagaggaggagccattggatgaaagctcagtgaagaaaatgatcctcacatttgaaaagagatcatataaaaaccaagaattgcggattaagtttccagacaatccagagaagttcatggaatccgagctggacctaaatgacatcattcaggagatgcacgtggtggccaccatgccagacctgtaccaccttctggtggagctgaatgctgtacagtcgcttctcggcttgctcggacacgataatacagatgtgtccatagctgtggtcgatttgcttcaggaattaacagatatagacaccctccatgagagtgaagagggagcagaagtgctcatcgatgctctggtggatgggcaggtggtagcactgctggtacagaatctggagcgcctggatgagtctgtgaaagaggaggcagatggcgtccacaacactctggctattgtggaaaacatggctgagttccggcctgagatgtgtacagagggtgcccagcagggtcttctacagtggctgttgaagaggctgaaggcaaagatgccttttgatgccaacaaactgtattgcagtgaagtgctggccatattgctccaggacaatgatgaaaacagggaattgcttggggagctggatggaatcgatgtgcttcttcagcagttatccgtgtttaaaagacacaatcccagcacggctgaggagcaggagatgatggagaatctgtttgattccctctgctcctgtctaatgcttagttccaatcgtgagcgcttcctgaagggcgagggtcttcagctgatgaatctcatgctcagggaaaagaagatctcccggagcagtgccctgaaagtgctggaccatgccatgattggccccgaaggcacagacaactgccataagtttgttgacattcttggcttacgaaccatctttcccctctttatgaaatctcccaggaagatcaagaaagtgggaaccactgagaaggaacatgaagagcatgtctgttcgatcctgcttccctcccaggatcagtttctacacaactctgtgtggcttttggacaaattaaagctagttttggta

SEQ ID NO: 328252 - DNA, 1541 bp, Homo sapiens
gcgtgaatgcaaagtagttctgttcttagtgcctgggcataggtttgttgaaaggttcaggtatagaaatgttcatggaatccgagctggacctaaatgacatcattcaggagatgcacgtggtggccaccatgccagacctgtaccaccttctggtggagctgaatgctgtacagtcgcttctcggcttgctcggacacgataatacagatgtgtccatagctgtggtcgatttgcttcaggaattaacagatatagacaccctccatgagagtgaagagggagcagaagtgctcatcgatgctctggtggatgggcaggtggtagcactgctggtacagaatctggagcgcctggatgagtctgtgaaagaggaggcagatggcgtccacaacactctggctattgtggaaaacatggctgagttccggcctgagatgtgtacagagggtgcccagcagggtcttctacagtggctgttgaagaggctgaaggcaaagatgccttttgatgccaacaaactgtattgcagtgaagtgctggccatattgctccaggacaatgatgaaaacagggaattgcttggggagctggatggaatcgatgtgcttcttcagcagttatccgtgtttaaaagacacaatcccagcacggctgaggagcaggagatgatggagaatctgtttgattccctctgctcctgtctaatgcttagttccaatcgtgagcgcttcctgaagggcgagggtcttcagctgatgaatctcatgctcagggaaaagaagatctcccggagcagtgccctgaaagtgctggaccatgccatgattggccccgaaggcacagacaactgccataagtttgttgacattcttggcttacgaaccatctttcccctctttatgaaatctcccaggaagatcaagaaagtgggaaccactgagaaggaacatgaagagcatgtctgttcgatcctggcttccctcctgcggaacctgagagggcagcagcggacccggcttctgaataaattcactgaaaatgacagtgagaaggttgacagactaatggagttgcattttaaatatctgggtgcaatgcaggtggcggacaagaagattgaaggggaaaaacacgacatggtccggcgaggagagatcatcgacaatgacaccgaggaggagttctacctccggcgcctggatgcggggctctttgttctccagcacatctgctacatcatggccgagatctgcaatgccaatgtcccccagattcgccagagggttcaccagatcctaaacatgcgaggaagctccatcaaaattgtcaggcatatcatcaaggagtatgcagagaacatcggggacggccggagcccggagttccgggagaacgagcaaaagcgcatcctgggcttgctggagaacttctagaggcaccttggccctgcgcatcatggactctctcagcttccctcccaggatcagtttctacacaactctgtgtggcttttggacaaattaaagctagttttggta

SEQ ID NO: 328253 - DNA, 2018 bp, Homo sapiens
  misc_feature (8)..(8): n is a, c, g, or t
  misc_feature (21)..(21): n is a, c, g, or t
  misc_feature (24)..(24): n is a, c, g, or t
  misc_feature (26)..(26): n is a, c, g, or t
  misc_feature (29)..(29): n is a, c, g, or t
  misc_feature (31)..(31): n is a, c, g, or t
  misc_feature (37)..(37): n is a, c, g, or t
  misc_feature (56)..(56): n is a, c, g, or t
cctttttntcccccccccganaanangangnccccgnggttttttttttttttttntttttttttttttttaccaaaactagctttaatttgtccaaaagccacacagagttgtgtagaaactgatcctgggagggaagctgagagagtccatgatgcgcagggccaaggtgcctctagaagttctccagcaagcccaggatgcgcttttgctcgttctcccggaactccgggctccggccgtccccgatgttctctgcatactccttgatgatatgcctgacaattttgatggagcttcctcgcatgtttaggatctggtgaaccctctggcgaatctgggggacattggcattgcaggtctgggcgtgagtgcagggaagtggagtatttgctgggccgggtaccatggacgtgggcgaacttctgagctaccagcccaataggggcacaaaacgtccccgggatgatgaagaggaggagcagaagatgcgtcggaaacaaactggtactcgagaacgcggccgctatcgggaagaagaaatgactgtggtggaggaagcggatgatgacaaaaaaaggctgctgcagattattgacagagatggggaagaggaagaggaagaggaggagccattggatgaaagctcagtgaagaaaatgatcctcacatttgaaaagagatcatataaaaaccaagaattgcggattaagtttccagacaatccagagaagttcatggaatccgagctggacctaaatgacatcattcaggagatgcacgtggtggccaccatgccagacctgtaccaccttctggtggagctgaatgctgtacagtcgcttctcggcttgctcggacacgataatacagatgtgtccatagctgtggtcgatttgcttcaggaattaacagatatagacaccctccatgagagtgaagagggagcagaagtgctcatcgatgctctggcaaagatgccttttgatgccaacaaactgtattgcagtgaagtgctggccatattgctccaggacaatgatgaaaacagggaattgcttggggagctggatggaatcgatgtgcttcttcagcagttatccgtgtttaaaagacacaatcccagcacggctgaggagcaggagatgatggagaatctgtttgattccctctgctcctgtctaatgcttagttccaatcgtgagcgcttcctgaagggcgagggtcttcagctgatgaatctcatgctcagggaaaagaagatctcccggagcagtgccctgaaagtgctggaccatgccatgattggccccgaaggcacagacaactgccataagtttgttgacattcttggcttacgaaccatctttcccctctttatgaaatctcccaggaagatcaagaaagtgggaaccactgagaaggaacatgaagagcatgtctgttcgatcctggcttccctcctgcggaacctgagagggcagcagcggacccggcttctgaataaattcactgaaaatgacagtgagaaggttgacagactaatggagttgcattttaaatatctgggtgcaatgcaggtggcggacaagaagattgaaggggaaaaacacgacatggtccggcgaggagagatcatcgacaatgacaccgaggaggagttctacctccggcgcctggatgcggggctctttgttctccagcacatctgctacatcatggccgagatctgcaatgccaatgtcccccagattcgccagagggttcaccagatcctaaacatgcgaggaagctccatcaaaattgtcaggcatatcatcaaggagtatgcagagaacatcggggacggccggagcccggagttccgggagaacgagcaaaagcgcatcctgggcttgctggagaacttctagaggcaccttggccctgcgcatcatggactctctcagcttccctcccaggatcagtttctacacaactctgtgtggcttttggacaaattaaagctagttttggta

SEQ ID NO: 328254 - DNA, 659 bp, Homo sapiens
  misc_feature (8)..(8): n is a, c, g, or t
  misc_feature (21)..(21): n is a, c, g, or t
  misc_feature (24)..(24): n is a, c, g, or t
  misc_feature (26)..(26): n is a, c, g, or t
  misc_feature (29)..(29): n is a, c, g, or t
  misc_feature (31)..(31): n is a, c, g, or t
  misc_feature (37)..(37): n is a, c, g, or t
  misc_feature (56)..(56): n is a, c, g, or t
cctttttntcccccccccganaanangangnccccgnggttttttttttttttttntttttttttttttttaccaaaactagctttaatttgtccaaaagccacacagagttgtgtagaaactgatcctgggagggaagctgagagagtccatgatgcgcagggccaaggtgcctctagaagttctccagcaagcccaggatgcgcttttgctcgttctcccggaactccgggctccggccgtccccgatgttctctgcatactccttgatgatatgcctgacaattttgatggagcttcctcgcatgtttaggatctggtgaaccctctggcgaatctgggggacattggcattgcaggtctgggcgtgagtgcagggaagtggagtatttgctgggccgggtaccatggacgtgggcgaacttctgagctaccagcccaataggggcacaaaacgtccccgggatgatgaagaggaggagcagaagatgcgtcggaaacaaactggtactcgagaacgcggccgctatcgggaagaagaaatgactgtggtggaggaagcggatgatgacaaaaaaaggctgctgcagattattgacaggtccagggcagaggacgtcgacgcggccgcgaatttagtagtagtagtaggcggccgc

SEQ ID NO: 328255 - DNA, 679 bp, Homo sapiens
  misc_feature (8)..(8): n is a, c, g, or t
  misc_feature (21)..(21): n is a, c, g, or t
  misc_feature (24)..(24): n is a, c, g, or t
  misc_feature (26)..(26): n is a, c, g, or t
  misc_feature (29)..(29): n is a, c, g, or t
  misc_feature (31)..(31): n is a, c, g, or t
  misc_feature (37)..(37): n is a, c, g, or t
  misc_feature (56)..(56): n is a, c, g, or t
cctttttntcccccccccganaanangangnccccgnggttttttttttttttttntttttttttttttttaccaaaactagctttaatttgtccaaaagccacacagagttgtgtagaaactgatcctgggagggaagctgagagagtccatgatgcgcagggccaaggtgcctctagaagttctccagcaagcccaggatgcgcttttgctcgttctcccggaactccgggctccggccgtccccgatgttctctgcatactccttgatgatatgcctgacaattttgatggagcttcctcgcatgtttaggatctggagttctacctccggcgcctggatgcggggctctttgttctccagcacatctgctacatcatggccgagatctgcaatgccaatgtcccccagattcgccagagggttcaccagatcctaaacatgcgaggaagctccatcaaaattgtcaggcatatcatcaaggagtatgcagagaacatcggggacggccggagcccggagttccgggagaacgagcaaaagcgcatcctgggcttgctggagaacttctagaggcaccttggccctgcgcatcatggactctctcagcttccctcccaggatcagtttctacacaactctgtgtggcttttggacaaattaaagctagttttggta

SEQ ID NO: 328256 - DNA, 829 bp, Homo sapiens
attggctctgcggctccgctcgccgcactttacggcagtgtggctggagccgcggctgacgggcccgcggtctgggcgtgagtgcagggaagtggagtatttgctgggccgggtaccatggacgtgggcgaacttctgagctaccagcccaataggggcacaaaacgtccccgggatgatgaagaggaggagcagaagatgcgtcggaaacaaactggtactcgagaacgcggccgctatcgggaagaagaaatgactgtggtggaggaagcggatgatgacaaaaaaaggctgctgcagattattgacagagatggggaagaggaagaggaagaggaggagccattggatgaaagctcagtgaagaaaatgatcctcacatttgaaaagagatcatataaaaaccaagaattgcggattaagtttccagacaatccagagaagttcatggaatccgagctggacctaaatgacatcattcaggagatgcacgtggtggccaccatgccagacctgtaccaccttctggtggagctgaatgctgtacagtcgcttctcggcttgctcggacacgataatacagatgtgtccatagctgtggtcgatttgcttcaggaattaacagatatagacaccctccatgagagtgaagagggagcagaagtgctcatcgatgctctggtggatgggcaggtggtagcactgctggtacagaatctggagcgcctggatgagtctgtgaaagaggaggcagatggcgtccacaacactctggctattgtgggaaacatggctgagttccggcccgttctagggatcctctaggcag

SEQ ID NO: 328257 - DNA, 571 bp, Homo sapiens
acagtgagatgaataggagtgccactgttctcttgctgtgcgttgtctttccttctcactcaagcctgtgaaatctctctttcaggttgacagactaatggagttgcattttaaatatctgggtgcaatgcaggtggcggacaagaagattgaaggggaaaaacacgacatggtccggcgaggagagatcatcgacaatgacaccgaggaggagttctacctccggcgcctggatgcggggctctttgttctccagcacatctgctacatcatggccgagatctgcaatgccaatgtcccccagattcgccagagggttcaccagatcctaaacatgcgaggaagctccatcaaaattgtcaggcatatcatcaaggagtatgcagagaacatcggggacggccggagcccggagttccgggagaacgagcaaaagcgcatcctgggcttgctggagaacttctagaggcaccttggccctgcgcatcatggactctctcagcttccctcccaggatcagtttctacacaactctgtgtggcttttggacaaattaaagctagttttggta

SEQ ID NO: 328258 - DNA, 1914 bp, Homo sapiens
attggctctgcggctccgctcgccgcactttacggcagtgtggctggagccgcggctgacgggcccgcggtctgggcgtgagtgcagggaagtggagtatttgctgggccgggtaccatggacgtgggcgaacttctgagctaccagcccaataggggcacaaaacgtccccgggatgatgaagaggaggagcagaagatgcgtcggaaacaaactggtactcgagaacgcggccgctatcgggaagaagaaatgactgtggtggaggaagcggatgatgacaaaaaaaggctgctgcagattattgacagagatggggaagaggaagaggaagaggaggagccattggatgaaagctcagtgaagaaaatgatcctcacatttgaaaagagatcatataaaaaccaagaattgcggattaagtttccagacaatccagagaagttcatggaatccgagctggacctaaatgacatcattcaggagatgcacgtggtggccaccatgccagacctgtaccaccttctggtggagctgaatgctgtacagtcgcttctcggcttgctcggacacgataatacagatgtgtccatagctgtggtcgatttgcttcaggaattaacagatatagacaccctccatgagagtgaagagggagcagaagtgctcatcgatgctctggtggatgggcaggtggtagcactgctggtacagaatctggagcgcctggatgagtctgtgaaagaggaggcagatggcgtccacaacactctggctattgtggaaaacatggctgagttccggcctgagatgtgtacagagggtgcccagcagggtcttctacagtggctgttgaagaggctgaaggcaaagatgccttttgatgccaacaaactgtattgcagtgaagtgctggccatattgctccaggacaatgatgaaaacagggaattgcttggggagctggatggaatcgatgtgcttcttcagcagttatccgtgtttaaaagacacaatcccagcacggctgaggagcaggagatgatggagaatctgtttgattccctctgctcctgtctaatgcttagttccaatcgtgagcgcttcctgaagggcgagggtcttcagctgatgaatctcatgctcagggaaaagaagatctcccggagcagtgccctgaaagtgctggaccatgccatgattggccccgaaggcacagacaactgccataagtttgttgacattcttggcttacgaaccatctttcccctctttatgaaatctcccaggaagatcaagaaagtgggaaccactgagaaggaacatgaagagcatgtctgttcgatcctggcttccctcctgcggaacctgagagggcagcagcggacccggcttctgaataaattcactgaaaatgacagtgagaaggttgacagactaatggagttgcattttaaatatctgggtgcaatgcaggtggcggacaagaagattgaaggggaaaaacacgacatggtccggcgaggagagatcatcgacaatgacaccgaggaggagttctacctccggcgcctggatgcggggctctttgttctccagcacatctgctacatcatggccgagatctgcaatgccaatgtcccccagattcgccagagggttcaccagatcctaaacatgcgaggaagctccatcaaaattgtcaggcatatcatcaaggagtatgcagagaacatcggggacggccggagcccggagttccgggagaacgagcaaaagcgcatcctgggcttgctggagaacttctagaggcaccttggccctgcgcatcatggactctctcagcttccctcccaggatcagtttctacacaactctgtgtggcttttggacaaattaaagctagttttggta

SEQ ID NO: 328259 - DNA, 2401 bp, Homo sapiens
attggctctgcggctccgctcgccgcactttacggcagtgtggctggagccgcggctgacgggcccgcggtctgggcgtgagtgcagggaagtggagtatttgctgggccgggtaccatggacgtgggcgaacttctgagctaccagcccaataggggcacaaaacgtccccgggatgatgaagaggaggagcagaagatgcgtcggaaacaaactggtactcgagaacgcggccgctatcgggaagaagaaatgactgtggtggaggaagcggatgatgacaaaaaaaggctgctgcagattattgacagagatggggaagaggaagaggaagaggaggagccattggatgaaagctcagtgaagaaaatgatcctcacatttgaaaagagatcatataaaaaccaagaattgcggattaagtttccagacaatccagagaagttcatggaatccgagctggacctaaatgacatcattcaggagatgcacgtggtggccaccatgccagacctgtaccaccttctggtggagctgaatgctgtacagtcgcttctcggcttgctcggacacgataatacagatgtgtccatagctgtggtcgatttgcttcaggaattaacagatatagacaccctccatgagagtgaagagggagcagaagtgctcatcgatgctctggtggatgggcaggtggtagcactgctggtacagaatctggagcgcctggatgagtctgtgaaagaggaggcagatggcgtccacaacactctggctattgtggaaaacatggctgagttccggcctgagatgtgtacagagggtgcccagcagggtcttctacagtggctgttgaagaggctgaaggcaaagatgccttttgatgccaacaaactgtattgcagtgaagtgctggccatattgctccaggacaatgatgaaaacagggaattgcttggggagctggatggaatcgatgtgcttcttcagcagttatccgtgtttaaaagacacaatcccagcacggctgaggagcaggagatgatggagaatctgtttgattccctctgctcctgtctaatgcttagttccaatcgtgagcgcttcctgaagggcgagggtcttcagctgatgaatctcatgctcagggaaaagaagatctcccggagcagtgccctgaaagtgctggaccatgccatgattggccccgaaggcacagacaactgccataagtttgttgacattcttggcttacgaaccatctttcccctctttatgaaatctcccaggaagatcaagaaagtgggaaccactgagaaggaacatgaagagcatgtctgttcgatcctggcttccctcctgcggaacctgagagggcagcagcggacccggcttctgaataaattcactgaaaatgacagtgagaaggttgacagactaatggagttgcattttaaatatctgggtgcaatgcaggtggcggacaagaagattgaaggggaaaaacacgacatggtccggcgaggagagatcatcgacaatgacaccgaggaggagttctacctccggcgcctggatgcggggctctttgttctccagcacatctgctacatcatggccgagatctgcaatgccaatgtcccccagattcgccagagggttcaccagatcctaaacatgcgaggaagctccatcaaaattgtcaggcatatcatcaaggagtatgcagagaacatcggggacggccggagcccggagttccgggagaacgagcaaaagcgcatcctgggcttgctggagaacttctagaggcaccttggccctgcgcatcatggactctctcagcttccctcccaggatcagtttctacacaactctgtgtggcttttggacaaattaaagctagttttggtaaaaaaaaaacaacaaaacaaaaacaacaaaaactttgtgtgcggcgcgcgcactctgggcccacgagaaaaaagcttttttgtatagaaccacactgtggttgtgggccgccgcgggggcaccccattgtggggttacgtggtagacaccgtgtgggtcaatacagcgtgtgtttccccctgggggagaacacccgtgggcacatagagacataaggcggggattggaggttctttctcccacccaataataaaaaaaaaaagcgcgccgcgggggggggagacccaccaccaaggaccgcttgtttctttgtgagaacacaacatttctccccaaaagagaggggagcagtctctaagagagagggggctacctatcatccgcggagcgatctctatctacacaccacggggagacgctctccaaaagcgcgagacctctcctcgaattatcttaacatattatccgcccccggttaccagttggg

SEQ ID NO: 328260 - DNA, 2311 bp, Homo sapiens
  misc_feature (8)..(8): n is a, c, g, or t
  misc_feature (21)..(21): n is a, c, g, or t
  misc_feature (24)..(24): n is a, c, g, or t
  misc_feature (26)..(26): n is a, c, g, or t
  misc_feature (29)..(29): n is a, c, g, or t
  misc_feature (31)..(31): n is a, c, g, or t
  misc_feature (37)..(37): n is a, c, g, or t
  misc_feature (56)..(56): n is a, c, g, or t
cctttttntcccccccccganaanangangnccccgnggttttttttttttttttntttttttttttttttaccaaaactagctttaatttgtccaaaagccacacagagttgtgtagaaactgatcctgggagggaagctgagagagtccatgatgcgcagggccaaggtgcctctagaagttctccagcaagcccaggatgcgcttttgctcgttctcccggaactccgggctccggccgtccccgatgttctctgcatactccttgatgatatgcctgacaattttgatggagcttcctcgcatgtttaggatctggtgaaccctctggcgaatctgggggacattggcattgcaggtctgggcgtgagtgcagggaagtggagtatttgctgggccgggtaccatggacgtgggcgaacttctgagctaccaggagggtcattgcgaggagcagtagagctgcactgccgaatgtcgtagccactagccacataggctgttgattgcttgaaatgtgactagtctgaattgagaaatactcccaataggggcacaaaacgtccccgggatgatgaagaggaggagcagaagatgcgtcggaaacaaactggtactcgagaacgcggccgctatcgggaagaagaaatgactgtggtggaggaagcggatgatgacaaaaaaaggctgctgcagattattgacagagatggggaagaggaagaggaagaggaggagccattggatgaaagctcagtgaagaaaatgatcctcacatttgaaaagagatcatataaaaaccaagaattgcggattaagtttccagacaatccagagaagttcatggaatccgagctggacctaaatgacatcattcaggagatgcacgtggtggccaccatgccagacctgtaccaccttctggtggagctgaatgctgtacagtcgcttctcggcttgctcggacacgataatacagatgtgtccatagctgtggtcgatttgcttcaggaattaacagatatagacaccctccatgagagtgaagagggagcagaagtgctcatcgatgctctggtggatgggcaggtggtagcactgctggtacagaatctggagcgcctggatgagtctgtgaaagaggaggcagatggcgtccacaacactctggctattgtggaaaacatggctgagttccggcctgagatgtgtacagagggtgcccagcagggtcttctacagtggctgttgaagaggctgaaggcaaagatgccttttgatgccaacaaactgtattgcagtgaagtgctggccatattgctccaggacaatgatgaaaacagggaattgcttggggagctggatggaatcgatgtgcttcttcagcagttatccgtgtttaaaagacacaatcccagcacggctgaggagcaggagatgatggagaatctgtttgattccctctgctcctgtctaatgcttagttccaatcgtgagcgcttcctgaagggcgagggtcttcagctgatgaatctcatgctcagggaaaagaagatctcccggagcagtgccctgaaagtgctggaccatgccatgattggccccgaaggcacagacaactgccataagtttgttgacattcttggcttacgaaccatctttcccctctttatgaaatctcccaggaagatcaagaaagtgggaaccactgagaaggaacatgaagagcatgtctgttcgatcctggcttccctcctgcggaacctgagagggcagcagcggacccggcttctgaataaattcactgaaaatgacagtgagaaggttgacagactaatggagttgcattttaaatatctgggtgcaatgcaggtggcggacaagaagattgaaggggaaaaacacgacatggtccggcgaggagagatcatcgacaatgacaccgaggaggagttctacctccggcgcctggatgcggggctctttgttctccagcacatctgctacatcatggccgagatctgcaatgccaatgtcccccagattcgccagagggttcaccagatcctaaacatgcgaggaagctccatcaaaattgtcaggcatatcatcaaggagtatgcagagaacatcggggacggccggagcccggagttccgggagaacgagcaaaagcgcatcctgggcttgctggagaacttctagaggcaccttggccctgcgcatcatggactctctcagcttccctcccaggatcagtttctacacaactctgtgtggcttttggacaaattaaagctagttttggta

SEQ ID NO: 328261 - DNA, 1791 bp, Homo sapiens
attggctctgcggctccgctcgccgcactttacggcagtgtggctggagccgcggctgacgggcccgcggtctgggcgtgagtgcagggaagtggagtatttgctgggccgggtaccatggacgtgggcgaacttctgagctaccagcccaataggggcacaaaacgtccccgggatgatgaagaggaggagcagaagatgcgtcggaaacaaactggtactcgagaacgcggccgctatcgggaagaagaaatgactgtggtggaggaagcggatgatgacaaaaaaaggctgctgcagattattgacagagatggggaagaggaagaggaagaggaggagccattggatgaaagctcagtgaagaaaatgatcctcacatttgaaaagagatcatataaaaaccaagaattgcggattaagtttccagacaatccagagaagttcatggaatccgagctggacctaaatgacatcattcaggagatgcacgtggtggccaccatgccagacctgtaccaccttctggtggagctgaatgctgtacagtcgcttctcggcttgctcggacacgataatacagatgtgtccatagctgtggtcgatttgcttcaggaattaacagatatagacaccctccatgagagtgaagagggagcagaagtgctcatcgatgctctggtggatgggcaggtggtagcactgctggtacagaatctggagcgcctggatgagtctgtgaaagaggaggcagatggcgtccacaacactctggctattgtggaaaacatggctgagttccggcctgagatgtgtacagagggtgcccagcagggtcttctacagtggctgttgaagaggctgaaggcaaagatgccttttgatgccaacaaactgtattgcagtgaagtgctggccatattgctccaggacaatgatgaaaacagggaattgcttggggagctggatggaatcgatgtgcttcttcagcagttatccgtgtttaaaagacacaatcccagcacggctgaggagcaggagatgatggagaatctgtttgattccctctgctcctgtctaatgcttagttccaatcgtgagcgcttcctgaagggcgagggtcttcagctgatgaatctcatgctcagggaaaagaagatctcccggagcagtgccctgaaagtgctggaccatgccatgattggccccgaaggcacagacaactgccataagtttgttgacattcttggcttacgaaccatctttcccctctttatgaaatctcccaggaagatcaagaaagtgggaaccactgagaaggaacatgaagagcatgtctgttcgatcctggcttccctcctgcggaacctgagagggcagcagcggacccggcttctgaataaattcactgaaaatgacagtgagaaggttgacagactaatggagttgcattttaaatatctgggtgcaatgcaggtggcggacaagaagattgaaggggaaaaacacgacatggtccggcgaggagagatcatcgacaatgacaccgaggaggagttctacctccggcgcctggatgcggggctctttgttctccagcacatctgctacatcatggccgagatctgcaatgccaatgtcccccagattcgccagagggttcaccagatcctaaacatgcgaggaagctccatcaaaattgtcaggcatatcatcaaggagtatgcagagaacatcggggacggccgcaaggagaggacagcgattctcgtacgaacggttacgattcga

SEQ ID NO: 328262 - DNA, 1680 bp, Homo sapiens
tgtgtggccattaatctatgacttagaacagggattgtagataagcttaatcggccacacccagcctgtgattgattcatagtctcttcttggaacactgtgttgagaaggattctgaggccagccatcttggctcagcagggaagagtgctgtggtgagtgagggattttgccatggagaaggagaaggacccatagcagtttgtcaggttcatggaatccgagctggacctaaatgacatcattcaggagatgcacgtggtggccaccatgccagacctgtaccaccttctggtggagctgaatgctgtacagtcgcttctcggcttgctcggacacgataatacagatgtgtccatagctgtggtcgatttgcttcaggaattaacagatatagacaccctccatgagagtgaagagggagcagaagtgctcatcgatgctctggtggatgggcaggtggtagcactgctggtacagaatctggagcgcctggatgagtctgtgaaagaggaggcagatggcgtccacaacactctggctattgtggaaaacatggctgagttccggcctgagatgtgtacagagggtgcccagcagggtcttctacagtggctgttgaagaggctgaaggcaaagatgccttttgatgccaacaaactgtattgcagtgaagtgctggccatattgctccaggacaatgatgaaaacagggaattgcttggggagctggatggaatcgatgtgcttcttcagcagttatccgtgtttaaaagacacaatcccagcacggctgaggagcaggagatgatggagaatctgtttgattccctctgctcctgtctaatgcttagttccaatcgtgagcgcttcctgaagggcgagggtcttcagctgatgaatctcatgctcagggaaaagaagatctcccggagcagtgccctgaaagtgctggaccatgccatgattggccccgaaggcacagacaactgccataagtttgttgacattcttggcttacgaaccatctttcccctctttatgaaatctcccaggaagatcaagaaagtgggaaccactgagaaggaacatgaagagcatgtctgttcgatcctggcttccctcctgcggaacctgagagggcagcagcggacccggcttctgaataaattcactgaaaatgacagtgagaaggttgacagactaatggagttgcattttaaatatctgggtgcaatgcaggtggcggacaagaagattgaaggggaaaaacacgacatggtccggcgaggagagatcatcgacaatgacaccgaggaggagttctacctccggcgcctggatgcggggctctttgttctccagcacatctgctacatcatggccgagatctgcaatgccaatgtcccccagattcgccagagggttcaccagatcctaaacatgcgaggaagctccatcaaaattgtcaggcatatcatcaaggagtatgcagagaacatcggggacggccggagcccggagttccgggagaacgagcaaaagcgcatcctgggcttgctggagaacttctagaggcaccttggccctgcgcatcatggactctctcagcttccctcccaggatcagtttctacacaactctgtgtggcttttggacaaattaaagctagttttggta

SEQ ID NO: 328263 - DNA, 1425 bp, Homo sapiens
  misc_feature (1129)..(1130): n is a, c, g, or t
  misc_feature (1139)..(1139): n is a, c, g, or t
  misc_feature (1141)..(1141): n is a, c, g, or t
  misc_feature (1206)..(1207): n is a, c, g, or t
  misc_feature (1395)..(1395): n is a, c, g, or t
attggctctgcggctccgctcgccgcactttacggcagtgtggctggagccgcggctgacgggcccgcggtctgggcgtgagtgcagggaagtggagtatttgctgggccgggtaccatggacgtgggcgaacttctgagctaccagcccaataggggcacaaaacgtccccgggatgatgaagaggaggagcagaagatgcgtcggaaacaaactggtactcgagaacgcggccgctatcgggaagaagaaatgactgtggtggaggaagcggatgatgacaaaaaaaggctgctgcagattattgacagagatggggaagaggaagaggaagaggaggagccattggatgaaagctcagtgaagaaaatgatcctcacatttgaaaagagatcatataaaaaccaagaattgcggattaagtttccagacaatccagagaagttcatggaatccgagctggacctaaatgacatcattcaggagatgcacgtggtggccaccatgccagacctgtaccaccttctggtggagctgaatgctgtacagtcgcttctcggcttgctcggacacgataatacagatgtgtccatagctgtggtcgatttgcttcaggaattaacagatatagacaccctccatgagagtgaagagggagcagaagtgctcatcgatgctctggtggatgggcaggtggtagcactgctggtacagaatctggagcgcctggatgagtctgtgaaagaggaggcagatggcgtccacaacactctggctattgtggaaaacatggctgagttccggcctgagatgtgtacagagggtgcccagcagggtcttctacagtggctgttgaagaggctgaaggcaaagatgccttttgatgccaacaaactgtattgcagtgaagtgctggccatattgctccaggacaatgatgaaaacagggaattgcttggggagctggatggaatcgatgtgcttcttcagcagttatccgtgtttaaaagacacaatcccagcacggctgaggagcaggagatgatggagaatctgtttgattccctctgctcctgtctaatgcttagttccaatcgtgagcgcttcctgaagggcgagggtcttcagnnctgaattgnanatttctttccaattgggccttttccaaaggggggaaaaaaaaaacgggaaaggatcgttcccggnngagcaacagtgccctgaaagtgctggaccatgccatgattggccccgaaggcacagacaactgccataagtttgttgacattcttggcttacgaaccatctttcccctctttatgaaatctcccaggaagatcaagaaagtgggaaccactgagaaggaacatgaagagcatgtctgttcgatcctgngcttcccttcctggcgggaaaacccccttg

SEQ ID NO: 328264 - DNA, 661 bp, Homo sapiens
ctccataatgtgtgcccactttcttgatcttcctgggagatttcataaagtgggaaccactgagaaggaacatgaagagcatgtctgttcgatcctggcttccctcctgcggaacctgagagggcagcagcggacccggcttctgaataaattcactgaaaatgacagtgagaaggttgacagactaatggagttgcattttaaatatctgggtgcaatgcaggtggcggacaagaagattgaaggggaaaaacacgacatggtccggcgaggagagatcatcgacaatgacaccgaggaggagttctacctccggcgcctggatgcggggctctttgttctccagcacatctgctacatcatggccgagatctgcaatgccaatgtcccccagattcgccagagggttcaccagatcctaaacatgcgaggaagctccatcaaaattgtcaggcatatcatcaaggagtatgcagagaacatcggggacggccggagcccggagttccgggagaacgagcaaaagcgcatcctgggcttgctggagaacttctagaggcaccttggccctgcgcatcatggactctctcagcttccctcccaggatcagtttctacacaactctgtgtggcttttggacaaattaaagctagttttggta

SEQ ID NO: 328265 - DNA, 258 bp, Homo sapiens
catcttacattcccactatccatgtacaaaggttccaattactccacatcctcttcagcacttgttaatttttgtttttgtggagacagagtctaattctgtcacccaggctggagtgcagtggcgagatcttggctcactgcaacctccacctctcgggttcaagcaattctcctgtctcagcctcctgagtagctgggactacaggtgtgcaccaccatacctggctaacttttgtatttttagtagagatggggt

SEQ ID NO: 328266 - DNA, 458 bp, Homo sapiens
ttaatatgtgtgtatatacacacaaacattcataatgaaataaggagaaaatacttagaacaattacagttcttgtttctgtaactggtcacatggttattgctggtatttataacttatctattcaatttttttttcttgtttgccttctgcaagaacctcatgattctttacccagcagggtgacccaaaggtttggcccatttgtagttctgcctggattgcatttttgtagttatccattggccctaatcacaacgtggagtaatactgagaaacaccctaaggtatctcctgtactgtagacatactcttcaattcttccattgtggagtagtagttcagtttctccttgatagtccagatgaatcacctcagccaacaacaccacaactccctctttacctgttgactcagaggcacaaggagcccagagtagctgggtggcagtctttaaa

SEQ ID NO: 328267 - DNA, 1771 bp, Homo sapiens
acacggcgggggcgccctcggaggcaccggacctcagctctctggacttcccgggaacctggctccccgcgcgtggtcccgggatttagtcgggcgctccccacctctggcagctgcggccccggactccgccagcgctgtcttctctccctcaggtccagccgccgcagggaatgacgccggtgctcctacagccacggctccgggcggggaaggcgagccccacagccggccctgcgacgcccgcctgggcagcaccgataaggagctgaaggcaggagccgccgccacgggcagcgcccccacagcgccagggaccccctggcagcgggagccgcgggtcgaggttatggatccagcgggcggcccccggggcgtgctcccgcggccctgccgcgtgctggtgctgctgaacccgcgcggcggcaagggcaaggccttgcagctcttccggagtcacgtgcagccccttttggctgaggctgaaatctccttcacgctgatgctcactgagcggcggaaccacgcgcgggagctggtgcggtcggaggagctgggccgctgggacgctctggtggtcatgtctggagacgggctgatgcacgaggtggtgaacgggctcatggagcggcctgactgggagaccgccatccagaagcccctgtgtagcctcccagcaggctctggcaacgcgctggcagcttccttgaaccattatgctggctatgagcaggtcaccaatgaagacctcctgaccaactgcacgctattgctgtgccgccggctgctgtcacccatgaacctgctgtctctgcacacggcttcggggctgcgcctcttctctgtgctcagcctggcctggggcttcattgctgatgtggacctagagagtgagaagtatcggcgtctgggggagatgcgcttcactctgggcaccttcctgcgtctggcagccctgcgcacctaccgcggccgactggcctacctccctgtaggaagagtgggttccaagacacctgcctcccccgttgtggtccagcagggcccggtagatgcacaccttgtgccactggaggagccagtgccctctcactggacagtggtgcccgacgaggactttgtgctagtcctggcactgctgcactcgcacctgggcagtgagatgtttgctgcacccatgggccgctgtgcagctggcgtcatgcatctgttctacgtgcgggcgggagtgtctcgtgccatgctgctgcgcctcttcctggccatggagaagggcaggcatatggagtatgaatgcccctacttggtatatgtgcccgtggtcgccttccgcttggagcccaaggatgggaaaggtgtgtttgcagtggatggggaattgatggttagcgaggccgtgcagggccaggtgcacccaaactacttctggatggtcagcggttgcgtggagcccccgcccagctggaagccccagcagatgccaccgccagaagagcccttatgacccctgggccgcgctgtgccttagtgtctacttgcaggacccttcctccttccctagggctgcagggcctgtccacagctcctgtgggggtggaggagactcctctggagaagggtgagaaggtggaggctatgctttggggggacaggccagaatgaagtcctgggtcaggagcccagctggctgggcccagctgcctatgtaaggccttctagtttgttctgagacccccaccccacgaaccaaatccaaataaagtgacattcc

SEQ ID NO: 328268 - DNA, 1856 bp, Homo sapiens
agtgccctccccgctccgcggcgccggctgcgaagttgagcgaaaagtttgaggccggagggagcgaggccggggagtccgctccagcggggcgctccagtccctcagacgtgggctgagcttgggacgagctgcgttccgccccaggccactgtagggaacggcggtggcgcctccccagcaaaccggaccgactgggtccagccgccgcagggaatgacgccggtgctcctacagccacggctccgggcggggaaggcgagccccacagccggccctgcgacgcccgcctgggcagcaccgataaggagctgaaggcaggagccgccgccacgggcagcgcccccacagcgccagggaccccctggcagcgggagccgcgggtcgaggttatggatccagtggtcggttgcggacgtggcctctttggttttgttttctcagcgggcggcccccggggcgtgctcccgcggccctgccgcgtgctggtgctgctgaacccgcgcggcggcaagggcaaggccttgcagctcttccggagtcacgtgcagccccttttggctgaggctgaaatctccttcacgctgatgctcactgagcggcggaaccacgcgcgggagctggtgcggtcggaggagctgggccgctgggacgctctggtggtcatgtctggagacgggctgatgcacgaggtggtgaacgggctcatggagcggcctgactgggagaccgccatccagaagcccctgtgtagcctcccagcaggctctggcaacgcgctggcagcttccttgaaccattatgctggctatgagcaggtcaccaatgaagacctcctgaccaactgcacgctattgctgtgccgccggctgctgtcacccatgaacctgctgtctctgcacacggcttcggggctgcgcctcttctctgtgctcagcctggcctggggcttcattgctgatgtggacctagagagtgagaagtatcggcgtctgggggagatgcgcttcactctgggcaccttcctgcgtctggcagccctgcgcacctaccgcggccgactggcctacctccctgtaggaagagtgggttccaagacacctgcctcccccgttgtggtccagcagggcccggtagatgcacaccttgtgccactggaggagccagtgccctctcactggacagtggtgcccgacgaggactttgtgctagtcctggcactgctgcactcgcacctgggcagtgagatgtttgctgcacccatgggccgctgtgcagctggcgtcatgcatctgttctacgtgcgggcgggagtgtctcgtgccatgctgctgcgcctcttcctggccatggagaagggcaggcatatggagtatgaatgcccctacttggtatatgtgcccgtggtcgccttccgcttggagcccaaggatgggaaaggtgtgtttgcagtggatggggaattgatggttagcgaggccgtgcagggccaggtgcacccaaactacttctggatggtcagcggttgcgtggagcccccgcccagctggaagccccagcagatgccaccgccagaagagcccttatgacccctgggccgcgctgtgccttagtgtctacttgcaggacccttcctccttccctagggctgcagggcctgtccacagctcctgtgggggtggaggagactcctctggagaagggtgagaaggtggaggctatgctttggggggacaggccagaatgaagtcctgggtcaggagcccagctggctgggcccagctgcctatgtaaggccttctagtttgttctgagacccccaccccacgaaccaaatccaaataaagtgacattcc

SEQ ID NO: 328269 - DNA, 1826 bp, Homo sapiens
caaagtgctaggattacaggagtgagccactgcgcccggcctgctgcttcctcctcctcagggagacgccacagctctgcggcaagcaatccaccaggcaccagatccccagatacctgcccttcagggagaaatagcctgggatacagagaggcccagaggggagctctggctggacttggcttctcagcgtggggtctgggttcacaggtccagccgccgcagggaatgacgccggtgctcctacagccacggctccgggcggggaaggcgagccccacagccggccctgcgacgcccgcctgggcagcaccgataaggagctgaaggcaggagccgccgccacgggcagcgcccccacagcgccagggaccccctggcagcgggagccgcgggtcgaggttatggatccagcgggcggcccccggggcgtgctcccgcggccctgccgcgtgctggtgctgctgaacccgcgcggcggcaagggcaaggccttgcagctcttccggagtcacgtgcagccccttttggctgaggctgaaatctccttcacgctgatgctcactgagcggcggaaccacgcgcgggagctggtgcggtcggaggagctgggccgctgggacgctctggtggtcatgtctggagacgggctgatgcacgaggtggtgaacgggctcatggagcggcctgactgggagaccgccatccagaagcccctgtgtagcctcccagcaggctctggcaacgcgctggcagcttccttgaaccattatgctggctatgagcaggtcaccaatgaagacctcctgaccaactgcacgctattgctgtgccgccggctgctgtcacccatgaacctgctgtctctgcacacggcttcggggctgcgcctcttctctgtgctcagcctggcctggggcttcattgctgatgtggacctagagagtgagaagtatcggcgtctgggggagatgcgcttcactctgggcaccttcctgcgtctggcagccctgcgcacctaccgcggccgactggcctacctccctgtaggaagagtgggttccaagacacctgcctcccccgttgtggtccagcagggcccggtagatgcacaccttgtgccactggaggagccagtgccctctcactggacagtggtgcccgacgaggactttgtgctagtcctggcactgctgcactcgcacctgggcagtgagatgtttgctgcacccatgggccgctgtgcagctggcgtcatgcatctgttctacgtgcgggcgggagtgtctcgtgccatgctgctgcgcctcttcctggccatggagaagggcaggcatatggagtatgaatgcccctacttggtatatgtgcccgtggtcgccttccgcttggagcccaaggatgggaaaggtgtgtttgcagtggatggggaattgatggttagcgaggccgtgcagggccaggtgcacccaaactacttctggatggtcagcggttgcgtggagcccccgcccagctggaagccccagcagatgccaccgccagaagagcccttatgacccctgggccgcgctgtgccttagtgtctacttgcaggacccttcctccttccctagggctgcagggcctgtccacagctcctgtgggggtggaggagactcctctggagaagggtgagaaggtggaggctatgctttggggggacaggccagaatgaagtcctgggtcaggagcccagctggctgggcccagctgcctatgtaaggccttctagtttgttctgagacccccaccccacgaaccaaatccaaataaagtgacattcc

SEQ ID NO: 328270 - DNA, 1789 bp, Homo sapiens
agtgccctccccgctccgcggcgccggctgcgaagttgagcgaaaagtttgaggccggagggagcgaggccggggagtccgctccagcggggcgctccagtccctcagacgtgggctgagcttgggacgagctgcgttccgccccaggccactgtagggaacggcggtggcgcctccccagcaaaccggaccgactgggtccagccgccgcagggaatgacgccggtgctcctacagccacggctccgggcggggaaggcgagccccacagccggccctgcgacgcccgcctgggcagcaccgataaggagctgaaggcaggagccgccgccacgggcagcgcccccacagcgccagggaccccctggcagcgggagccgcgggtcgaggttatggatccagcgggcggcccccggggcgtgctcccgcggccctgccgcgtgctggtgctgctgaacccgcgcggcggcaagggcaaggccttgcagctcttccggagtcacgtgcagccccttttggctgaggctgaaatctccttcacgctgatgctcactgagcggcggaaccacgcgcgggagctggtgcggtcggaggagctgggccgctgggacgctctggtggtcatgtctggagacgggctgatgcacgaggtggtgaacgggctcatggagcggcctgactgggagaccgccatccagaagcccctgtgtagcctcccagcaggctctggcaacgcgctggcagcttccttgaaccattatgctggctatgagcaggtcaccaatgaagacctcctgaccaactgcacgctattgctgtgccgccggctgctgtcacccatgaacctgctgtctctgcacacggcttcggggctgcgcctcttctctgtgctcagcctggcctggggcttcattgctgatgtggacctagagagtgagaagtatcggcgtctgggggagatgcgcttcactctgggcaccttcctgcgtctggcagccctgcgcacctaccgcggccgactggcctacctccctgtaggaagagtgggttccaagacacctgcctcccccgttgtggtccagcagggcccggtagatgcacaccttgtgccactggaggagccagtgccctctcactggacagtggtgcccgacgaggactttgtgctagtcctggcactgctgcactcgcacctgggcagtgagatgtttgctgcacccatgggccgctgtgcagctggcgtcatgcatctgttctacgtgcgggcgggagtgtctcgtgccatgctgctgcgcctcttcctggccatggagaagggcaggcatatggagtatgaatgcccctacttggtatatgtgcccgtggtcgccttccgcttggagcccaaggatgggaaaggtgtgtttgcagtggatggggaattgatggttagcgaggccgtgcagggccaggtgcacccaaactacttctggatggtcagcggttgcgtggagcccccgcccagctggaagccccagcagatgccaccgccagaagagcccttatgacccctgggccgcgctgtgccttagtgtctacttgcaggacccttcctccttccctagggctgcagggcctgtccacagctcctgtgggggtggaggagactcctctggagaagggtgagaaggtggaggctatgctttggggggacaggccagaatgaagtcctgggtcaggagatccacctgcctgtgatacatctgccacgttagacatctatctctgatttaaccgactcccacataac

SEQ ID NO: 328271 - DNA, 1923 bp, Homo sapiens
agtgccctccccgctccgcggcgccggctgcgaagttgagcgaaaagtttgaggccggagggagcgaggccggggagtccgctccagcggggcgctccagtccctcagacgtgggctgagcttgggacgagctgcgttccgccccaggccactgtagggaacggcggtggcgcctccccagcaaaccggaccgactgggtagggccgcccaccctgccttcgcgccgctcgtggctcctgtgcggcccgccctcgcggggccccgggaactgggccacttgtcgcttgggcgagagcaggcggcagctggtggcccggttcgggcttggctttggcgcgacccgggagcggctcccacgagcgccgcgcgcgtcgcaacggagcggggccctgagaagcgcgcgccgcggctcccaccgctctggagctccgggcaggggacacggcaacctggatggctggggcagggatcctctcccagaacttcgtgcccagcaatgtccgctcaagttctgggatttttacgcagctggactcccctccccctggcagccccgaggggtccagccgccgcagggaatgacgccggtgctcctacagccacggctccgggcggggaaggcgagccccacagccggccctgcgacgcccgcctgggcagcaccgataaggagctgaaggcaggagccgccgccacgggcagcgcccccacagcgccagggaccccctggcagcgggagccgcgggtcgaggttatggatccagcgggcggcccccggggcgtgctcccgcggccctgccgcgtgctggtgctgctgaacccgcgcggcggcaagggcaaggccttgcagctcttccggagtcacgtgcagccccttttggctgaggctgaaatctccttcacgctgatgctcactgagcggcggaaccacgcgcgggagctggtgcggtcggaggagctgggccgctgggacgctctggtggtcatgtctggagacgggctgatgcacgaggggcttcattgctgatgtggacctagagagtgagaagtatcggcgtctgggggagatgcgcttcactctgggcaccttcctgcgtctggcagccctgcgcacctaccgcggccgactggcctacctccctgtaggaagagtgggttccaagacacctgcctcccccgttgtggtccagcagggcccggtagatgcacaccttgtgccactggaggagccagtgccctctcactggacagtggtgcccgacgaggactttgtgctagtcctggcactgctgcactcgcacctgggcagtgagatgtttgctgcacccatgggccgctgtgcagctggcgtcatgcatctgttctacgtgcgggcgggagtgtctcgtgccatgctgctgcgcctcttcctggccatggagaagggcaggcatatggagtatgaatgcccctacttggtatatgtgcccgtggtcgccttccgcttggagcccaaggatgggaaaggtgtgtttgcagtggatggggaattgatggttagcgaggccgtgcagggccaggtgcacccaaactacttctggatggtcagcggttgcgtggagcccccgcccagctggaagccccagcagatgccaccgccagaagagcccttatgacccctgggccgcgctgtgccttagtgtctacttgcaggacccttcctccttccctagggctgcagggcctgtccacagctcctgtgggggtggaggagactcctctggagaagggtgagaaggtggaggctatgctttggggggacaggccagaatgaagtcctgggtcaggagcccagctggctgggcccagctgcctatgtaaggccttctagtttgttctgagacccccaccccacgaaccaaatccaaataaagtgacattcc

SEQ ID NO: 328272 - DNA, 1814 bp, Homo sapiens
agtgccctccccgctccgcggcgccggctgcgaagttgagcgaaaagtttgaggccggagggagcgaggccggggagtccgctccagcggggcgctccagtccctcagacgtgggctgagcttgggacgagctgcgttccgccccaggccactgtagggaacggcggtggcgcctccccagcaaaccggaccgactgggtccagccgccgcagggaatgacgccggtgctcctacagccacggctccgggcggggaaggcgagccccacagccggccctgcgacgcccgcctgggcagcaccgataaggagctgaaggcaggagccgccgccacgggcagcgcccccacagcgccagggaccccctggcagcgggagccgcgggtcgaggttatggatccagcgggcggcccccggggcgtgctcccgcggccctgccgcgtgctggtgctgctgaacccgcgcggcggcaagggcaaggccttgcagctcttccggagtcacgtgcagccccttttggctgaggctgaaatctccttcacgctgatgctcactgagcggcggaaccacgcgcgggagctggtgcggtcggaggagctgggccgctgggacgctctggtggtcatgtctggagacgggctgatgcacgaggtggtgaacgggctcatggagcggcctgactgggagaccgccatccagaagcccctgtgtagcctcccagcaggctctggcaacgcgctggcagcttccttgaaccattatgctggctatgagcaggtcaccaatgaagacctcctgaccaactgcacgctattgctgtgccgccggctgctgtcacccatgaacctgctgtctctgcacacggcttcggggctgcgcctcttctctgtgctcagcctggcctggggcttcattgctgatgtggacctagagagtgagaagtatcggcgtctgggggagatgcgcttcactctgggcaccttcctgcgtctggcagccctgcgcacctaccgcggccgactggcctacctccctgtaggaagagtgggttccaagacacctgcctcccccgttgtggtccagcagggcccggtagatgcacaccttgtgccactggaggagccagtgccctctcactggacagtggtgcccgacgaggactttgtgctagtcctggcactgctgcactcgcacctgggcagtgagatgtttgctgcacccatgggccgctgtgcagctggcgtcatgcatctgttctacgtgcgggcgggagtgtctcgtgccatgctgctgcgcctcttcctggccatggagaagggcaggcatatggagtatgaatgcccctacttggtatatgtgcccgtggtcgccttccgcttggagcccaaggatgggaaaggtgtgtttgcagtggatggggaattgatggttagcgaggccgtgcagggccaggtgcacccaaactacttctggatggtcagcggttgcgtggagcccccgcccagctggaagccccagcagatgccaccgccagaagagcccttatgacccctgggccgcgctgtgccttagtgtctacttgcaggacccttcctccttccctagggctgcagggcctgtccacagctcctgtgggggtggaggagactcctctggagaagggtgagaaggtggaggctatgctttggggggacaggccagaatgaagtcctgggtcaggagcccagctggctgggcccagctgcctatgtaaggccttctagtttgttctgagacccccaccccacgaaccaaatccaaataaagtgacattcc

SEQ ID NO: 328273 - DNA, 2177 bp, Homo sapiens
agtgccctccccgctccgcggcgccggctgcgaagttgagcgaaaagtttgaggccggagggagcgaggccggggagtccgctccagcggggcgctccagtccctcagacgtgggctgagcttgggacgagctgcgttccgccccaggccactgtagggaacggcggtggcgcctccccagcaaaccggaccgactgggtagggccgcccaccctgccttcgcgccgctcgtggctcctgtgcggcccgccctcgcggggccccgggaactgggccacttgtcgcttgggcgagagcaggcggcagctggtggcccggttcgggcttggctttggcgcgacccgggagcggctcccacgagcgccgcgcgcgtcgcaacggagcggggccctgagaagcgcgcgccgcggctcccaccgctctggagctccgggcaggggacacggcaacctggatggctggggcagggatcctctcccagaacttcgtgcccagcaatgtccgctcaagttctgggatttttacgcagctggactcccctccccctggcagccccgaggggtccagccgccgcagggaatgacgccggtgctcctacagccacggctccgggcggggaaggcgagccccacagccggccctgcgacgcccgcctgggcagcaccgataaggagctgaaggcaggagccgccgccacgggcagcgcccccacagcgccagggaccccctggcagcgggagccgcgggtcgaggttatggatccagcgggcggcccccggggcgtgctcccgcggccctgccgcgtgctggtgctgctgaacccgcgcggcggcaagggcaaggccttgcagctcttccggagtcacgtgcagccccttttggctgaggctgaaatctccttcacgctgatgctcactgagcggcggaaccacgcgcgggagctggtgcggtcggaggagctgggccgctgggacgctctggtggtcatgtctggagacgggctgatgcacgaggtggtgaacgggctcatggagcggcctgactgggagaccgccatccagaagcccctgtgtagcctcccagcaggctctggcaacgcgctggcagcttccttgaaccattatgctggctatgagcaggtcaccaatgaagacctcctgaccaactgcacgctattgctgtgccgccggctgctgtcacccatgaacctgctgtctctgcacacggcttcggggctgcgcctcttctctgtgctcagcctggcctggggcttcattgctgatgtggacctagagagtgagaagtatcggcgtctgggggagatgcgcttcactctgggcaccttcctgcgtctggcagccctgcgcacctaccgcggccgactggcctacctccctgtaggaagagtgggttccaagacacctgcctcccccgttgtggtccagcagggcccggtagatgcacaccttgtgccactggaggagccagtgccctctcactggacagtggtgcccgacgaggactttgtgctagtcctggcactgctgcactcgcacctgggcagtgagatgtttgctgcacccatgggccgctgtgcagctggcgtcatgcatctgttctacgtgcgggcgggagtgtctcgtgccatgctgctgcgcctcttcctggccatggagaagggcaggcatatggagtatgaatgcccctacttggtatatgtgcccgtggtcgccttccgcttggagcccaaggatgggaaaggtgtgtttgcagtggatggggaattgatggttagcgaggccgtgcagggccaggtgcacccaaactacttctggatggtcagcggttgcgtggagcccccgcccagctggaagccccagcagatgccaccgccagaagagcccttatgacccctgggccgcgctgtgccttagtgtctacttgcaggacccttcctccttccctagggctgcagggcctgtccacagctcctgtgggggtggaggagactcctctggagaagggtgagaaggtggaggctatgctttggggggacaggccagaatgaagtcctgggtcaggagcccagctggctgggcccagctgcctatgtaaggccttctagtttgttctgagacccccaccccacgaaccaaatccaaataaagtgacattcc

SEQ ID NO: 328274 - DNA, 1878 bp, Homo sapiens
agtgccctccccgctccgcggcgccggctgcgaagttgagcgaaaagtttgaggccggagggagcgaggccggggagtccgctccagcggggcgctccagtccctcagacgtgggctgagcttgggacgagctgcgttccgccccaggccactgtagggaacggcggtggcgcctccccagcaaaccggaccgactgggtccagccgccgcagggaatgacgccggtgctcctacagccacggctccgggcggggaaggcgagccccacagccggccctgcgacgcccgcctgggcagcaccgataaggagctgaaggcaggagccgccgccacgggcagcgcccccacagcgccagggaccccctggcagcgggagccgcgggtcgaggttatggatccagcgggcggcccccggggcgtgctcccgcggccctgccgcgtgctggtgctgctgaacccgcgcggcggcaagggcaaggccttgcagctcttccggagtcacgtgcagccccttttggctgaggctgaaatctccttcacgctgatgctcactgagcggcggaaccacgcgcgggagctggtgcggtcggaggagctgggccgctgggacgctctggtggtcatgtctggagacgggctgatgcacgaggtggtgaacgggctcatggagcggcctgactgggagaccgccatccagaagcccctgtgtagcctcccagcaggctctggcaacgcgctggcagcttccttgaaccattatgctggctatgagcaggtcaccaatgaagacctcctgaccaactgcacgctattgctgtgccgccggctgctgtcacccatgaacctgctgtctctgcacacggcttcggggctgcgcctcttctctgtgctcagcctggcctggggcttcattgctgatgtggacctagagagtgagaagtatcggcgtctgggggagatgcgcttcactctgggcaccttcctgcgtctggcagccctgcgcacctaccgcggccgactggcctacctccctgtaggaagagtgggttccaagacacctgcctcccccgttgtggtccagcagggcccggtagatgcacaccttgtgccactggaggagccagtgccctctcactggacagtggtgcccgacgaggactttgtgctagtcctggcactgctgcactcgcacctgggcagtgagatgtttgctgcacccatgggccgctgtgcagctggcgtcatgcatctgttctacgtgcgggcgggagtgtctcgtgccatgctgctgcgcctcttcctggccatggagaagggcaggcatatggagtatgaatgcccctacttggtatatgtgcccgtggtcgccttccgcttggagcccaaggatgggaaaggtgtgtttgcagtggatggggaattgatggttagcgaggccgtgcagggccaggtgcacccaaactacttctggatggtcagcggttgcgtggagcccccgcccagctggaagccccagcagatgccaccgccagaagagcccttatgacccctgggccgcgctgtgccttagtgtctacttgcaggacccttcctccttccctagggctgcagggcctgtccacagctcctgtgggggtggaggagactcctctggagaagggtgagaaggtggaggctatgctttggggggacaggccagaatgaagtcctgggtcaggagcccagctggctgggcccagctgcctatgtaaggccttctagtttgttctgagacccccaccccacgaaccaaatccaaataaagtgacattccaaaacacaccaacacgcacacaaaaaccgggggacaaaaaagcgggccgacaacaccgcaccca

SEQ ID NO: 328275 - DNA, 2060 bp, Homo sapiens
agtgccctccccgctccgcggcgccggctgcgaagttgagcgaaaagtttgaggccggagggagcgaggccggggagtccgctccagcggggcgctccagtccctcagacgtgggctgagcttgggacgagctgcgttccgccccaggccactgtagggaacggcggtggcgcctccccagcaaaccggaccgactgggtagggccgcccaccctgccttcgcgccgctcgtggctcctgtgcggcccgccctcgcggggccccgggaactgggccacttgtcgcttgggcgagagcaggcggcagctggtggcccggttcgggcttggctttggcgcgacccgggagcggctcccacgagcgccgcgcgcgtcgcaacggagcggggccctgagaagcgcgcgccgcggctcccaccgctctggagctccgggcaggggacacggcaacctggatggctggggcagggatcctctcccagaacttcgtgcccagcaatgtccgctcaagttctgggatttttacgcagctggactcccctccccctggcagccccgaggggtccagccgccgcagggaatgacgccggtgctcctacagccacggctccgggcggggaaggcgagccccacagccggccctgcgacgcccgcctgggcagcaccgataaggagctgaaggcaggagccgccgccacgggcagcgcccccacagcgccagggacccccttgcagctcttccggagtcacgtgcagccccttttggctgaggctgaaatctccttcacgctgatgctcactgagcggcggaaccacgcgcgggagctggtgcggtcggaggagctgggccgctgggacgctctggtggtcatgtctggagacgggctgatgcacgaggtggtgaacgggctcatggagcggcctgactgggagaccgccatccagaagcccctgtgtagcctcccagcaggctctggcaacgcgctggcagcttccttgaaccattatgctggctatgagcaggtcaccaatgaagacctcctgaccaactgcacgctattgctgtgccgccggctgctgtcacccatgaacctgctgtctctgcacacggcttcggggctgcgcctcttctctgtgctcagcctggcctggggcttcattgctgatgtggacctagagagtgagaagtatcggcgtctgggggagatgcgcttcactctgggcaccttcctgcgtctggcagccctgcgcacctaccgcggccgactggcctacctccctgtaggaagagtgggttccaagacacctgcctcccccgttgtggtccagcagggcccggtagatgcacaccttgtgccactggaggagccagtgccctctcactggacagtggtgcccgacgaggactttgtgctagtcctggcactgctgcactcgcacctgggcagtgagatgtttgctgcacccatgggccgctgtgcagctggcgtcatgcatctgttctacgtgcgggcgggagtgtctcgtgccatgctgctgcgcctcttcctggccatggagaagggcaggcatatggagtatgaatgcccctacttggtatatgtgcccgtggtcgccttccgcttggagcccaaggatgggaaaggtgtgtttgcagtggatggggaattgatggttagcgaggccgtgcagggccaggtgcacccaaactacttctggatggtcagcggttgcgtggagcccccgcccagctggaagccccagcagatgccaccgccagaagagcccttatgacccctgggccgcgctgtgccttagtgtctacttgcaggacccttcctccttccctagggctgcagggcctgtccacagctcctgtgggggtggaggagactcctctggagaagggtgagaaggtggaggctatgctttggggggacaggccagaatgaagtcctgggtcaggagcccagctggctgggcccagctgcctatgtaaggccttctagtttgttctgagacccccaccccacgaaccaaatccaaataaagtgacattcc

SEQ ID NO: 328276 - DNA, 830 bp, Homo sapiens
acttgcaagggaagcttctttggatgtgacatgctgcagaacctgctcctgcaatttctgcagtaataattgcttgctctacgtccacggagatttctgcagtaataatcgcttgatctacgtctacggaatggcacagggcgtgtatcttactgtgagcccatgcattgccagatctccatcttgccactgatggcacaatgaacggtacatgccagcactgactggtttggaccaattgctagatctcctttgtaaatacccaacatcctgctctactttgaactgggttaccttggtgactgtacctatggtgtgtcctgaaggcagtgacctttcaccagtgtccacccagggcactcatgagtgccctgtcaatctctagcagtctcctagctgcttaccatgacggggcctgcctctgcctgaccactcccctcacccagagaaaccagcctggtacaggtagttcaaaaatagcaggaaggctgggtatggtggctcatgcctgtaatcccagcactttgggaggttgaggagggtggatcacctgaagtcaggagttcaggaccagcctggccaacatggggaaaccctgtctctacttaaaagataaaatttaaaaacatacaaaaaaaaaaaattagccagcgatgtggcatgagcctgtaatcccagctacttggaagcctgaggcaggagactcacttgaatctggggtacagacgttgcagtgagccaagatcccgccactacactccagcctgggcaacagagtgagactccatctcaaaaaaataaaatttaaaaagaccagactggtcaacata

SEQ ID NO: 328277 - DNA, 536 bp, Homo sapiens
ctgtatcctagtgggtgattagtaaaagttgattgaaccaaagggactgtggagagtttacaacctatttattttacttaaaacagttactcgaaggaggagataggtttgagtgtaggtttaacagggaaaaaatcttaggtgggaatccagtagagaggggagaaaatggtcagttatgaaaattagccgtcagccattttagtactaatgtcaggctgaaatatgaacaatattcattggaaattaacaataggacacaattctactcttgtttcagaggcggaagaggagatgcaagagatctgacagaaaaaactaaatgaaaccccagagggccagagagacttgacagaaatggcagataacaaacttggtttgggcttgaaatgtgatctagcagtcaaaggaaagccagtgctattctgggcagctaacaaagaagaattgtgccacggcatagggagttggcaagagcccaccgggagtattacatttagcacagtgtcagcatgataggatacagtagggagagt

SEQ ID NO: 328278 - DNA, 321 bp, Homo sapiens
tgcctcagtggcctaggttgtgaggatttgtggtggtgatgacacagcttcttcaggggtgggcttgctgaagtgtttctcaggctagggtgtatgcatgaacacagtggatcagccaacttgagggctggttcactaaggtttgtgccaccaggatgttttttggactttgggtgcaggtgctcaggatgagtcagctggcttggggactggctcaccggggtcagggtctctgggttattactccaactggagacatgagtcatgcctgtttggctggcttggagtgggtctgccagggttgggtctactcagctattt

SEQ ID NO: 328279 - DNA, 321 bp, Homo sapiens
acaggttcctcagaacttaaaaaaaaattttttttaaataacagtgtctggctctgtggcccacgctggagtgcagtataaagagcaaaagccttggtcactaggctcggccttctattttctcaccctcaaaaggggggatgataatcgtcggtcctacttacattaggtagataccaaataagagaatgagtatgaaatcacttcactaactataaagtactatccatataaacacggcatcctattacatggcttaaccaccttcaaggggagcttcatgggcatctggccaatgccggtggttaagacgggtaccga

SEQ ID NO: 328280 - DNA, 220 bp, Homo sapiens
aagaactcaaattaacaagctgaagttgtgtctagaggaactagaaaacaagaaccaactccaaagcaagaagaaaagatataactaaaaccagagcagaaatgaatgaaactgaaacccaaaaaaatccataccaaggatcaataaaaaaaggttggttatttgaaaggataaacaagatctataaattgatagctagatcaacaaagaaaaaagagag

SEQ ID NO: 328281 - DNA, 599 bp, Homo sapiens
ccaaactagtcctgaatgaatcattacctcgaaaggacgaatcaacatattaatgtgtgaaaaaccatcaaatttccatattaatagtgctttggaaatgaacacggtgtatgattataaacaaaacctaaaaatctaagacacgcaaatctaacggtctaagttttttaaactttgtgacattaacaacataaaaaactttttttaaatgtgggaaaaaatatcaaagaaaatttatagtgcccatcgccccaccagctagagataattactaataatctgatatatttagaggttattacctgttaattcagaaatactactttagatatgaagtcttttcaaccctgcttgatggctaaacagcacaaagtgatataaaggacagtctaacagcaatcctgaggaggctaaactcctatccacctgctgcctaacactgggcaggcttacatgcctgctccatcattctgatttcaaaaccactactgctccatcaggccagcatcacttcaacaaatacataaacatgcatctttctggtattagagattaagaacttgcctgctaaatactgcaatgcgcaatgccaggatagc

SEQ ID NO: 328282 - DNA, 358 bp, Homo sapiens
ggtgggtaaccaactggaaattatgggatcctagggacttttgagctttggttgagtgcttgcacgataagcaaagttttcttcttgtacagattgttacgctggagccttatctgtgacacccaaacatcagctcattgggtcaaaaatcacttgattacctgcaatagatattttgtctacagaaggccagacatcttgatggagtgagtcttttggctgggcctttctgtgtttgatagataaaagccccaccagctctgtctgaggttctaccaaactgatgtagcattctcttttctggactttgctgtgtctgtccagctactgcacaacgctatagctgcacactctcatg

SEQ ID NO: 328283 - DNA, 934 bp, Homo sapiens
aatgccaactcctcagaagcagctttctatgatcaccccagctggtctgtttgccatatttccttcatatttttaatcactatctgaaattaacatttgtgtttcccttcactctagaatgtaagcatcatgagaacagggctttgtcaagtttccattgccctcagtggtgaatgaatagactccctcaccttctctgtacctggtctggaattttgcctaacagcattaacatctaacttaatgacaaggaggaaggagattcttagaggcagtagaaaatggtcaagtgttcagaagatggcctttcattatatatctttagttctttctggcagatttggttatactgtcttaatctatcaggttgggtaagtagcccagggtgtcttctccattctttctgtatgccttatctcagcattaccatcttcctaggcttcaggataggaactcggtcatctttgacttcttttcttcaaagtcagtaagttatcaagtcctcctgattctacctttctgtgaatggtttcctgaattcatcccctgctgcttcagtcagaccctcacaatcctctgcctttagccatctgtttggtttctactttgtctcttctcaccttctcacctaaaaaaaaaaaaaactatagggctgggctcagtggctcacacctgtaatcccagcactttgggaggccaagacgggtggatcaccagaggtcaggagttcgagaccagcctggctaacgtggtgaaaccccgtctctgctaaaaatataaaattagctgggtgtggtcatgcgcgcctgtaaccccagccacttgggagtctgaggcaggagaatcgcttggaccggggaggcagattttgcagtgagccgagattgcaccattgcacttcagcctgggcaacagagcacgactctgtctcaaa

SEQ ID NO: 328284 - DNA, 171 bp, Homo sapiens
  misc_feature (96)..(96): n is a, c, g, or t
cgtctaagccaatcagatcccagaaaacagtaacaaaacccttcggaggcctttcagacgctgcatctctcggtttccttagccaacgcaccgtgntgggccaacgcaccgtcacccacggaatcgagaaagagctatcaatctgtcaatcctgtccgtacggtgcgttgg

SEQ ID NO: 328285 - DNA, 541 bp, Homo sapiens
cctctcccagcttccttgcctatgaaatgggggtctagaggcaactgaggtttaaccaaggtcatgcatacaaacagcttggctagggacgtagcagagtaagaattccataaaatgttaatatttttccactgaaaatgtctaccaagtgtatgaagttcgatttgcttctcagtacggactgggcttgaacatttccatctttttccccataaacgctctgaggagacaagccctgtgaacgtgcaccagctggaacacaccggtgcccttctggggctctggggatttcatcagattctcaaaagctgctgctgatacagatcatgttcttggccagtcgctgctcttaaacgcccatgaccttgcccccaaacatgagccactccaggcatgaagctgcaacccagagcccatcctgagaggccacgacctgtcagcacttctgagctgtcctagaggcgtaggcacttctggggctgactcggggacacagccatccccaggcacccagcgtgcagccaccacacgtggccaccaa

SEQ ID NO: 328286 - DNA, 541 bp, Homo sapiens
aacaacaacaacaacaaacaaacaaaatgatcactattgtaatcatcaacagcagaggtgtccaaagatggggctttcgtggtaaggtgacaaattcctcatcaggagaggcattgaggcccaggccgaatggtcactgggtgaggatgctgtaaagaggatgtaagcaacagcagggctggagtagatgatctttaaagggcttatccatgcctgaagttctagaactttctgaaaattacgttctgaaagcaagtcacagctccattccagtcttatcaacttaactaccaaaaagaaaatgcccaagaaaagtgggaattaacctctggcaaaaaaatagtctaataagtggggctgtccttcctgtgtctgaaagcaaatacctgggccctgctctccctgatgcttttccactctactttgttttgtgtttcctggagaagccttctggatgccattctatgtgtgggggttgcaagtgctagttttgttctgtaagaaaaatgtgtacagaaaggaggagaaaacagactcactg

SEQ ID NO: 328287 - DNA, 184 bp, Homo sapiens
gagttctgtaaccggaaagaatctggttctcattctgggaaattaagagactactaatagtctcccaatgtctatttgctctcttaccttgggagcaaatccctgcttttttttttttttttttgagatggagtctcgccctgttgccaggctggagcgcaatggcacgaccttcgctcactgc

SEQ ID NO: 328288 - DNA, 262 bp, Homo sapiens
atgaagtagctatttattgtcttaattaagcaccggtattttgcattgagtttgcaattatatgcttttcttatctattcagttttaaaaccaagattttaagcaaaacacaaaagaaaaaacttcaagatgttggcttaatttctttctttgggtgactgtatatgttttaaaggaattaatggtgtttacttaaaagagattaaaattcagttatttattaatttagattgatctcactactgctttttcaaattaatga

SEQ ID NO: 328289 - DNA, 367 bp, Homo sapiens
atctgagtttgggatccctgattcagatgaggttctatcagagcatttaccaaaactttagttctcagaatactttacattttcatgtgccagttgcttcttgaaactttctcacatccccagacagaattaattaatatagcataattcaagtggtgacaaaagcatttaagcaaagtacaaggatgaagaatccaatatatcatcttagaatattaaaaaatgctttttttttttgagacagagcctcactctgttgccaaggctagggtatagtggtgcgacctcggctcactgcaatctccacttcccaggttcaagcgattctcctgcttcagtccctcgagtagctgggattacaggcatg

SEQ ID NO: 328290 - DNA, 81 bp, Homo sapiens
attataacacactactagatcttaatgtttataagcattatgctgtttgttcattcattcattcaacaaatagacattaaa

SEQ ID NO: 328291 - DNA, 2462 bp, Homo sapiens
gcctccttctgttgcttcccgtctcctcggcggctcccctcccccgcccggctctccgcgccccttctgggcggcggggcggcggagccgtcggcgtgcggccctccttgcgttcgtgcgtgcgcccgtggcccggcgcacgtcccgcgacaccgaggccgagcggggcagggggctgaccgccatgaccccccagagcccggcgtgagggggccgagatgcggtgacctgccagcacctgccgcagccttcgtccgggagtcgccccatctctccacgcatcggggccctgtgccccttgctgctgcagccgggcaccatgtcgacctcgtccttgaggcgccagatgaagaacatcgtccacaactactcagaggcggagatcaaggttcgagaggccacgagcaatgacccctggggcccatccagctccctcatgtcagagattgccgacctcacctacaacgttgtcgccttctcggagatcatgagcatgatctggaagcggctcaatgaccatggcaagaactggcgtcacgtttacaaggccatgacgctgatggagtacctcatcaagaccggctcggagcgcgtgtcgcagcagtgcaaggagaacatgtacgccgtgcagacgctgaaggacttccagtacgtggaccgcgacggcaaggaccagggcgtgaacgtgcgtgagaaagctaagcagctggtggccctgctgcgcgacgaggaccggctgcgggaagagcgggcgcacgcgctcaagaccaaggaaaagctggcacagaccgccacggcctcatcagcagctgtgggctcaggcccccctcccgaggcggagcaggcgtggccgcagagcagcggggaggaggagctgcagctccagctggccctggccatgagcaaggaggaggccgaccagcccccgtcctgcggccccgaggacgacgcccagctccagctggcccttagtttgagccgagaagagcatgataaggaggagcggatccgtcgcggggatgacctgcggctgcagatggcaatcgaggagagcaagagggagactgggggcaaggaggagtcgtccctcatggaccttgctgacgtcttcacggccccagctcctgccccgaccacagacccctgggggggcccagcacccatggctgctgccgtccccacggctgcccccacctcggacccctggggcggcccccctgtccctccagctgctgatccctggggaggtccagcccccacgccggcctctggggacccctggaggcctgctgcccctgcaggaccctcagttgacccttggggtgggaccccagcccctgcagctggggaggggcccacgcctgatccatggggaagttccgatggtggggtcccggtcagtgggccctcagcctccgatccctggacaccggccccggccttctcagatccctggggagggtcacctgccaagcccagcaccaatggcacaacagcagccgggggattcgacacggagcccgacgagttctctgactttgaccgactccgcacggcactgccgacctccgggagcagcgcaggagagctggagctgctggcaggagaggtgccggcccgaagccctggggcgtttgacatgagtggggtcaggggatctctggctgaggctgtgggcagccccccacctgcagccacaccaactcccacgccccccacccggaagacgccggagtcattcctggggcccaatgcagccctcgtcgacctggactcgctggtgagccggccgggccccacgccgcctggagccaaggcctccaaccccttcctgccaggcggaggcccagccactggcccttccgtcaccaaccccttccagcccgcgcctcccgcgacgctcaccctgaaccagctccgtctcagtcctgtgcctcccgtccctggagcgccacccacgtacatctctccccttggcgggggccctggcctgccccccatgatgcccccgggccccccggcccccaacactaatcccttcctcctataatccagggcggaagggggcctggctccatccggctgccccattccggctccctgggagatcagtgttgtgagtgcatgtgaaatgggggatccccacccccagtgcccttccccttcctggggcccactcacactacaccctcttcctttcccaccccacctccccggagagaaactggacatggggcctggggaggggagctggccagaggaggacccctttcccgtggcattagaagggggaggggtggctggggcccccacccattccccctccctccaaactcccaacccccagtcagtgtttgagcctcctcgttcccctcacgcacccgctcacgcaccctcggtgaatccttggtgatgattttggcaactttgggaataaatggcaattcccacgggcttggcac

SEQ ID NO: 328292 - DNA, 2635 bp, Homo sapiens
gcctccttctgttgcttcccgtctcctcggcggctcccctcccccgcccggctctccgcgccccttctgggcggcggggcggcggagccgtcggcgtgcggccctccttgcgttcgtgcgtgcgcccgtggcccggcgcacgtcccgcgacaccgaggccgagcggggcagggggctgaccgccatgaccccccagagcccggcgtgagggggccgaggtgcctggctttctggcctgaggtggaagcagaggccagcctctctccgtcatccctatctcccctgggcttacatcatggcggggctttgaaaatctccctctgtggcttcttggagccgcatagatgggtgatcagagctggctctggaaccaggctgctccaggagtaagatgcggtgacctgccagcacctgccgcagccttcgtccgggagtcgccccatctctccacgcatcggggccctgtgccccttgctgctgcagccgggcaccatgtcgacctcgtccttgaggcgccagatgaagaacatcgtccacaactactcagaggcggagatcaaggttcgagaggccacgagcaatgacccctggggcccatccagctccctcatgtcagagattgccgacctcacctacaacgttgtcgccttctcggagatcatgagcatgatctggaagcggctcaatgaccatggcaagaactggcgtcacgtttacaaggccatgacgctgatggagtacctcatcaagaccggctcggagcgcgtgtcgcagcagtgcaaggagaacatgtacgccgtgcagacgctgaaggacttccagtacgtggaccgcgacggcaaggaccagggcgtgaacgtgcgtgagaaagctaagcagctggtggccctgctgcgcgacgaggaccggctgcgggaagagcgggcgcacgcgctcaagaccaaggaaaagctggcacagaccgccacggcctcatcagcagctgtgggctcaggcccccctcccgaggcggagcaggcgtggccgcagagcagcggggaggaggagctgcagctccagctggccctggccatgagcaaggaggaggccgaccagcccccgtcctgcggccccgaggacgacgcccagctccagctggcccttagtttgagccgagaagagcatgataaggaggagcggatccgtcgcggggatgacctgcggctgcagatggcaatcgaggagagcaagagggagactgggggcaaggaggagtcgtccctcatggaccttgctgacgtcttcacggccccagctcctgccccgaccacagacccctgggggggcccagcacccatggctgctgccgtccccacggctgcccccacctcggacccctggggcggcccccctgtccctccagctgctgatccctggggaggtccagcccccacgccggcctctggggacccctggaggcctgctgcccctgcaggaccctcagttgacccttggggtgggaccccagcccctgcagctggggaggggcccacgcctgatccatggggaagttccgatggtggggtcccggtcagtgggccctcagcctccgatccctggacaccggccccggccttctcagatccctggggagggtcacctgccaagcccagcaccaatggcacaacagcagccgggggattcgacacggagcccgacgagttctctgactttgaccgactccgcacggcactgccgacctccgggagcagcgcaggagagctggagctgctggcaggagaggtgccggcccgaagccctggggcgtttgacatgagtggggtcaggggatctctggctgaggctgtgggcagccccccacctgcagccacaccaactcccacgccccccacccggaagacgccggagtcattcctggggcccaatgcagccctcgtcgacctggactcgctggtgagccggccgggccccacgccgcctggagccaaggcctccaaccccttcctgccaggcggaggcccagccactggcccttccgtcaccaaccccttccagcccgcgcctcccgcgacgctcaccctgaaccagctccgtctcagtcctgtgcctcccgtccctggagcgccacccacgtacatctctccccttggcgggggccctggcctgccccccatgatgcccccgggccccccggcccccaacactaatcccttcctcctataatccagggcggaagggggcctggctccatccggctgccccattccggctccctgggagatcagtgttgtgagtgcatgtgaaatgggggatccccacccccagtgcccttccccttcctggggcccactcacactacaccctcttcctttcccaccccacctccccggagagaaactggacatggggcctggggaggggagctggccagaggaggacccctttcccgtggcattagaagggggaggggtggctggggcccccacccattccccctccctccaaactcccaacccccagtcagtgtttgagcctcctcgttcccctcacgcacccgctcacgcaccctcggtgaatccttggtgatgattttggcaactttgggaataaatggcaattcccacgggcttggcac

SEQ ID NO: 328293 - DNA, 2327 bp, Homo sapiens
tccgctcggaccaggctgctccaggagtaaggagcccagtctttgcatgcagtgttgaaaaagaggtcctcttcccctcgcagatgcggtgacctgccagcacctgccgcagccttcgtccgggagtcgccccatctctccacgcatcggggccctgtgccccttgctgctgcagccgggcaccatgtcgacctcgtccttgaggcgccagatgaagaacatcgtccacaactactcagaggcggagatcaaggttcgagaggccacgagcaatgacccctggggcccatccagctccctcatgtcagagattgccgacctcacctacaacgttgtcgccttctcggagatcatgagcatgatctggaagcggctcaatgaccatggcaagaactggcgtcacgtttacaaggccatgacgctgatggagtacctcatcaagaccggctcggagcgcgtgtcgcagcagtgcaaggagaacatgtacgccgtgcagacgctgaaggacttccagtacgtggaccgcgacggcaaggaccagggcgtgaacgtgcgtgagaaagctaagcagctggtggccctgctgcgcgacgaggaccggctgcgggaagagcgggcgcacgcgctcaagaccaaggaaaagctggcacagaccgccacggcctcatcagcagctgtgggctcaggcccccctcccgaggcggagcaggcgtggccgcagagcagcggggaggaggagctgcagctccagctggccctggccatgagcaaggaggaggccgaccagcccccgtcctgcggccccgaggacgacgcccagctccagctggcccttagtttgagccgagaagagcatgataaggaggagcggatccgtcgcggggatgacctgcggctgcagatggcaatcgaggagagcaagagggagactgggggcaaggaggagtcgtccctcatggaccttgctgacgtcttcacggccccagctcctgccccgaccacagacccctgggggggcccagcacccatggctgctgccgtccccacggctgcccccacctcggacccctggggcggcccccctgtccctccagctgctgatccctggggaggtccagcccccacgccggcctctggggacccctggaggcctgctgcccctgcaggaccctcagttgacccttggggtgggaccccagcccctgcagctggggaggggcccacgcctgatccatggggaagttccgatggtggggtcccggtcagtgggccctcagcctccgatccctggacaccggccccggccttctcagatccctggggagggtcacctgccaagcccagcaccaatggcacaacagcagccgggggattcgacacggagcccgacgagttctctgactttgaccgactccgcacggcactgccgacctccgggagcagcgcaggagagctggagctgctggcaggagaggtgccggcccgaagccctggggcgtttgacatgagtggggtcaggggatctctggctgaggctgtgggcagccccccacctgcagccacaccaactcccacgccccccacccggaagacgccggagtcattcctggggcccaatgcagccctcgtcgacctggactcgctggtgagccggccgggccccacgccgcctggagccaaggcctccaaccccttcctgccaggcggaggcccagccactggcccttccgtcaccaaccccttccagcccgcgcctcccgcgacgctcaccctgaaccagctccgtctcagtcctgtgcctcccgtccctggagcgccacccacgtacatctctccccttggcgggggccctggcctgccccccatgatgcccccgggccccccggcccccaacactaatcccttcctcctataatccagggcggaagggggcctggctccatccggctgccccattccggctccctgggagatcagtgttgtgagtgcatgtgaaatgggggatccccacccccagtgcccttccccttcctggggcccactcacactacaccctcttcctttcccaccccacctccccggagagaaactggacatggggcctggggaggggagctggccagaggaggacccctttcccgtggcattagaagggggaggggtggctggggcccccacccattccccctccctccaaactcccaacccccagtcagtgtttgagcctcctcgttcccctcacgcacccgctcacgcaccctcggtgaatccttggtgatgattttggcaactttgggaataaatggcaattcccacgggcttggcac

SEQ ID NO: 328294 - DNA, 1719 bp, Homo sapiens
gcctccttctgttgcttcccgtctcctcggcggctcccctcccccgcccggctctccgcgccccttctgggcggcggggcggcggagccgtcggcgtgcggccctccttgcgttcgtgcgtgcgcccgtggcccggcgcacgtcccgcgacaccgaggccgagcggggcagggggctgaccgccatgaccccccagagcccggcgtgagggggccgagatgcggtgacctgccagcacctgccgcagccttcgtccgggagtcgccccatctctccacgcatcggggccctgtgccccttgctgctgcagccgggcaccatgtcgacctcgtccttgaggcgccagatgaagaacatcgtccacaactactcagaggcggagatcaaggttcgagaggccacgagcaatgacccctggggcccatccagctccctcatgtcagagattgccgacctcacctacaacgttgtcgccttctcggagatcatgagcatgatctggaagcggctcaatgaccatggcaagaactggcgtcacgtttacaaggccatgacgctgatggagtacctcatcaagaccggctcggagcgcgtgtcgcagcagtgcaaggagaacatgtacgccgtgcagacgctgaaggacttccagtacgtggaccgcgacggcaaggaccagggcgtgaacgtgcgtgagaaagctaagcagctggtggccctgctgcgcgacgaggaccggctgcgggaagagcgggcgcacgcgctcaagaccaaggaaaagctggcacagaccgccacggcctcatcagcagctgtgggctcaggcccccctcccgaggcggagcaggcgtggccgcagagcagcggggaggaggagctgcagctccagctggccctggccatgagcaaggaggaggccgaccagcccccgtcctgcggccccgaggacgacgcccagctccagctggcccttagtttgagccgagaagagcatgataaggaggagcggatccgtcgcggggatgacctgcggctgcagatggcaatcgaggagagcaagagggagactgggggcaaggaggagtcgtccctcatggaccttgctgacgtcttcacggccccagctcctgccccgaccacagacccctgggggggcccagcacccatggctgctgccgtccccacggctgcccccacctcggacccctggggcggcccccctgtccctccagctgctgatccctggggaggtccagcccccacgccggcctctggggacccctggaggcctgctgcccctgcaggaccctcagttgacccttggggtgggaccccagcccctgcagctggggaggggcccacgcctgatccatggggaagttccgatggtggggtcccggtcagtgggccctcagcctccgatccctggacaccggccccggccttctcagatccctggggagggtcacctgccaagcccagcaccaatggcacaacagcagccgggggattcgacacggagcccgacgagttctctgactttgaccgactccgcacggcactgccgacctccgggagcagcgcagcttactggacacgacttcctcctggcttctactccctcaacagctatcgttcttgctttatacgttgaatctctgtctctttataacttctaaatgttctcagcatcaggaaaatataaaaaataagttcacaaat

SEQ ID NO: 328295 - DNA, 988 bp, Homo sapiens
gcctccttctgttgcttcccgtctcctcggcggctcccctcccccgcccggctctccgcgccccttctgggcggcggggcggcggagccgtcggcgtgcggccctccttgcgttcgtgcgtgcgcccgtggcccggcgcacgtcccgcgacaccgaggccgagcggggcagggggctgaccgccatgaccccccagagcccggcgtgagggggccgagatgcggtgacctgccagcacctgccgcagccttcgtccgggagtcgccccatctctccacgcatcggggccctgtgccccttgctgctgcagccgggcaccatgtcgacctcgtccttgaggcgccagatgaagaacatcgtccacaactactcagaggcggagatcaaggttcgagaggccacgagcaatgacccctggggcccatccagctccctcatgtcagagattgccgacctcacctacaacgttgtcgccttctcggagatcatgagcatgatctggaagcggctcaatgaccatggcaagaactggcgtcacgtttacaaggccatgacgctgatggagtacctcatcaagaccggctcggagcgcgtgtcgcagcagtgcaaggagaacatgtacgccgtgcagacgctgaaggacttccagtacgtggaccgcgacggcaaggaccagggcgtgaacgtgcgtgagaaagctaagcagctggtggccctgctgcgcgacgaggaccggctgcgggaagagcgggcgcacgcgctcaagaccaaggaaaagctggcacagaccgccacggctcatcagcagttgtgggctcatggccccatccgaggcggacaaggttggccgagagcacgggaggaagaccagagtccagttggcctggcatgacaggaggagcgacaacccgtctgtggccgagaaagcaagtcaaggcctatgccgaaaataagagagaagcacaagaaccgcggaaggaacgcacag

SEQ ID NO: 328296 - DNA, 445 bp, Homo sapiens
tttttctcattgtgtctctgcctagctccctctgcccaggtttctatgtgtctctttctgtcagaactgtcttctatttcttctcagtccccttctctgcatttgttacatcatctcttcatcttaatgtattaggctggggctgttttgggactccagagagttactttttaactagctacatctgtcttcaggtgcctggctttctggcctgaggtggaagcagaggccagcctctctccgtcatccctatctcccctgggcttacatcatggcggggctttgaaaatctccctctgtggcttcttggagccgcatagatgggtgatcagagctggctctggaaccaggctgctccaggagtaaggtgtgtgtccctgggcaaggggctgaacctctgtgtctcagtttccaccctgtgaggtggctatgaatcatggggttg

SEQ ID NO: 328297 - DNA, 2948 bp, Homo sapiens
aattctttcatttcagagttgagcaaactgtgtctcaaggaggtgtgcgctgcaggtagctgatgtggccaggatttgaacccacattttatattctttgccattagattccatttttcttatctcttatttctcagcgccaggtctctttttgtttctgggcctctttcttccttggcctcctgcctccctgtcttcccatgttcttgtatctgctgctgcctgtgtttttctcattgtgtctctgcctagctccctctgcccaggtttctatgtgtctctttctgtcagaactgtcttctatttcttctcagtccccttctctgcatttgttacatcatctcttcatcttaatgtattaggctggggctgttttgggactccagagagttactttttaactagctacatctgtcttcaggtgcctggctttctggcctgaggtggaagcagaggccagcctctctccgtcatccctatctcccctgggcttacatcatggcggggctttgaaaatctccctctgtggcttcttggagccgcatagatgggtgatcagagctggctctggaaccaggctgctccaggagtaaggagcccagtctttgcatgcagtgttgaaaaaggtaatgtccctcttgtgctgagcgagcacctggcacacagcagggacccaggcagtggggctgttaggttccttatctctcctgagccttgggcttccgctatccttgggacgtctggtcttctggcttccccggttcttcctgccgccctggatgcggtgacctgccagcacctgccgcagccttcgtccgggagtcgccccatctctccacgcatcggggccctgtgccccttgctgctgcagccgggcaccatgtcgacctcgtccttgaggcgccagatgaagaacatcgtccacaactactcagaggcggagatcaaggttcgagaggccacgagcaatgacccctggggcccatccagctccctcatgtcagagattgccgacctcacctacaacgttgtcgccttctcggagatcatgagcatgatctggaagcggctcaatgaccatggcaagaactggcgtcacgtttacaaggccatgacgctgatggagtacctcatcaagaccggctcggagcgcgtgtcgcagcagtgcaaggagaacatgtacgccgtgcagacgctgaaggacttccagtacgtggaccgcgacggcaaggaccagggcgtgaacgtgcgtgagaaagctaagcagctggtggccctgctgcgcgacgaggaccggctgcgggaagagcgggcgcacgcgctcaagaccaaggaaaagctggcacagaccgccacggcctcatcagcagctgtgggctcaggcccccctcccgaggcggagcaggcgtggccgcagagcagcggggaggaggagctgcagctccagctggccctggccatgagcaaggaggaggccgaccaggaggagcggatccgtcgcggggatgacctgcggctgcagatggcaatcgaggagagcaagagggagactgggggcaaggaggagtcgtccctcatggaccttgctgacgtcttcacggccccagctcctgccccgaccacagacccctgggggggcccagcacccatggctgctgccgtccccacggctgcccccacctcggacccctggggcggcccccctgtccctccagctgctgatccctggggaggtccagcccccacgccggcctctggggacccctggaggcctgctgcccctgcaggaccctcagttgacccttggggtgggaccccagcccctgcagctggggaggggcccacgcctgatccatggggaagttccgatggtggggtcccggtcagtgggccctcagcctccgatccctggacaccggccccggccttctcagatccctggggagggtcacctgccaagcccagcaccaatggcacaacagcagccgggggattcgacacggagcccgacgagttctctgactttgaccgactccgcacggcactgccgacctccgggagcagcgcaggagagctggagctgctggcaggagaggtgccggcccgaagccctggggcgtttgacatgagtggggtcaggggatctctggctgaggctgtgggcagccccccacctgcagccacaccaactcccacgccccccacccggaagacgccggagtcattcctggggcccaatgcagccctcgtcgacctggactcgctggtgagccggccgggccccacgccgcctggagccaaggcctccaaccccttcctgccaggcggaggcccagccactggcccttccgtcaccaaccccttccagcccgcgcctcccgcgacgctcaccctgaaccagctccgtctcagtcctgtgcctcccgtccctggagcgccacccacgtacatctctccccttggcgggggccctggcctgccccccatgatgcccccgggccccccggcccccaacactaatcccttcctcctataatccagggcggaagggggcctggctccatccggctgccccattccggctccctgggagatcagtgttgtgagtgcatgtgaaatgggggatccccacccccagtgcccttccccttcctggggcccactcacactacaccctcttcctttcccaccccacctccccggagagaaactggacatggggcctggggaggggagctggccagaggaggacccctttcccgtggcattagaagggggaggggtggctggggcccccacccattccccctccctccaaactcccaacccccagtcagtgtttgagcctcctcgttcccctcacgcacccgctcacgcaccctcggtgaatccttggtgatgattttggcaactttgggaataaatggcaattcccacgggcttggcac

SEQ ID NO: 328298 - DNA, 2366 bp, Homo sapiens
gcctccttctgttgcttcccgtctcctcggcggctcccctcccccgcccggctctccgcgccccttctgggcggcggggcggcggagccgtcggcgtgcggccctccttgcgttcgtgcgtgcgcccgtggcccggcgcacgtcccgcgacaccgaggccgagcggggcagggggctgaccgccatgaccccccagagcccggcgtgagggggccgagatgcggtgacctgccagcacctgccgcagccttcgtccgggagtcgccccatctctccacgcatcggggccctgtgccccttgctgctgcagccgggcaccatgtcgacctcgtccttgaggcgccagatgaagaacatcgtccacaactactcagaggcggagatcaaggttcgagaggccacgagcaatgacccctggggcccatccagctccctcatgtcagagattgccgacctcacctacaacgttgtcgccttctcggagatcatgagcatgatctggaagcggctcaatgaccatggcaagaactggcgtcacgtttacaaggccatgacgctgatggagtacctcatcaagaccggctcggagcgcgtgtcgcagcagtgcaaggagaacatgtacgccgtgcagacgctgaaggacttccagtacgtggaccgcgacggcaaggaccagggcgtgaacgtgcgtgagaaagctaagcagctggtggccctgctgcgcgacgaggaccggctgcgggaagagcgggcgcacgcgctcaagaccaaggaaaagctggcacagaccgccacggcctcatcagcagctgtgggctcaggcccccctcccgaggcggagcaggcgtggccgcagagcagcggggaggaggagctgcagctccagctggccctggccatgagcaaggaggaggccgaccagcccccgtcctgcggccccgaggacgacgcccagctccagctggcccttagtttgagccgagaagagcatgataaggaggagcggatccgtcgcggggatgacctgcggctgcagatggcaatcgaggagagcaagagggagactgggggcaaggaggagtcgtccctcatggaccttgctgacgtcttcacggccccagctcctgccccgaccacagacccctgggggggcccagcacccatggctgctgccgtccccacggctgcccccacctcggacccctggggcggcccccctgtccctccagctgctgatccctggggaggtccagcccccacgccggcctctggggacccctggaggcctgctgcccctgcaggaccctcagttgacccttggggtgggaccccagcccctgcagctggggaggggcccacgcctgatccatggggaagttccgatggtggggtcccggtcagtgggccctcagcctccgatccctggacaccggccccggccttctcagatccctggggagggtcacctgccaagcccagcaccaatggcacaacagcagccgggggattcgacacggagcccgacgagttctctgactttgaccgactccgcacggcactgccgacctccgggagcagcgcaggagagctggagctgctggcaggagaggtgccggcccgaagccctggggcgtttgacatgagtggggtcaggggatctctggctgaggctgtgggcagccccccacctgcagccacaccaactcccacgccccccacccggaagacgccggagtcattcctggggcccaatgcagccctcgtcgacctggactcgctggtgagccggccgggccccacgccgcctggagccaaggcctccaaccccttcctgccaggcggaggcccagccactggcccttccgtcaccaaccccttccagcccgcgcctcccgcgacgctcaccctgaaccagctccgtctcagtcctgtgcctcccgtccctggagcgccacccacggcggaagggggcctggctccatccggctgccccattccggctccctgggagatcagtgttgtgagtgcatgtgaaatgggggatccccacccccagtgcccttccccttcctggggcccactcacactacaccctcttcctttcccaccccacctccccggagagaaactggacatggggcctggggaggggagctggccagaggaggacccctttcccgtggcattagaagggggaggggtggctggggcccccacccattccccctccctccaaactcccaacccccagtcagtgtttgagcctcctcgttcccctcacgcacccgctcacgcaccctcggtgaatccttggtgatgattttggcaactttgggaataaatggcaattcccacgggcttggcac

SEQ ID NO: 328299 - DNA, 2482 bp, Homo sapiens
gcctccttctgttgcttcccgtctcctcggcggctcccctcccccgcccggctctccgcgccccttctgggcggcggggcggcggagccgtcggcgtgcggccctccttgcgttcgtgcgtgcgcccgtggcccggcgcacgtcccgcgacaccgaggccgagcggggcagggggctgaccgccatgaccccccagagcccggcgtgagggggccgagaggtcctcttcccctcgcagatgcggtgacctgccagcacctgccgcagccttcgtccgggagtcgccccatctctccacgcatcggggccctgtgccccttgctgctgcagccgggcaccatgtcgacctcgtccttgaggcgccagatgaagaacatcgtccacaactactcagaggcggagatcaaggttcgagaggccacgagcaatgacccctggggcccatccagctccctcatgtcagagattgccgacctcacctacaacgttgtcgccttctcggagatcatgagcatgatctggaagcggctcaatgaccatggcaagaactggcgtcacgtttacaaggccatgacgctgatggagtacctcatcaagaccggctcggagcgcgtgtcgcagcagtgcaaggagaacatgtacgccgtgcagacgctgaaggacttccagtacgtggaccgcgacggcaaggaccagggcgtgaacgtgcgtgagaaagctaagcagctggtggccctgctgcgcgacgaggaccggctgcgggaagagcgggcgcacgcgctcaagaccaaggaaaagctggcacagaccgccacggcctcatcagcagctgtgggctcaggcccccctcccgaggcggagcaggcgtggccgcagagcagcggggaggaggagctgcagctccagctggccctggccatgagcaaggaggaggccgaccagcccccgtcctgcggccccgaggacgacgcccagctccagctggcccttagtttgagccgagaagagcatgataaggaggagcggatccgtcgcggggatgacctgcggctgcagatggcaatcgaggagagcaagagggagactgggggcaaggaggagtcgtccctcatggaccttgctgacgtcttcacggccccagctcctgccccgaccacagacccctgggggggcccagcacccatggctgctgccgtccccacggctgcccccacctcggacccctggggcggcccccctgtccctccagctgctgatccctggggaggtccagcccccacgccggcctctggggacccctggaggcctgctgcccctgcaggaccctcagttgacccttggggtgggaccccagcccctgcagctggggaggggcccacgcctgatccatggggaagttccgatggtggggtcccggtcagtgggccctcagcctccgatccctggacaccggccccggccttctcagatccctggggagggtcacctgccaagcccagcaccaatggcacaacagcagccgggggattcgacacggagcccgacgagttctctgactttgaccgactccgcacggcactgccgacctccgggagcagcgcaggagagctggagctgctggcaggagaggtgccggcccgaagccctggggcgtttgacatgagtggggtcaggggatctctggctgaggctgtgggcagccccccacctgcagccacaccaactcccacgccccccacccggaagacgccggagtcattcctggggcccaatgcagccctcgtcgacctggactcgctggtgagccggccgggccccacgccgcctggagccaaggcctccaaccccttcctgccaggcggaggcccagccactggcccttccgtcaccaaccccttccagcccgcgcctcccgcgacgctcaccctgaaccagctccgtctcagtcctgtgcctcccgtccctggagcgccacccacgtacatctctccccttggcgggggccctggcctgccccccatgatgcccccgggccccccggcccccaacactaatcccttcctcctataatccagggcggaagggggcctggctccatccggctgccccattccggctccctgggagatcagtgttgtgagtgcatgtgaaatgggggatccccacccccagtgcccttccccttcctggggcccactcacactacaccctcttcctttcccaccccacctccccggagagaaactggacatggggcctggggaggggagctggccagaggaggacccctttcccgtggcattagaagggggaggggtggctggggcccccacccattccccctccctccaaactcccaacccccagtcagtgtttgagcctcctcgttcccctcacgcacccgctcacgcaccctcggtgaatccttggtgatgattttggcaactttgggaataaatggcaattcccacgggcttggcac

SEQ ID NO: 328300 - DNA, 1173 bp, Homo sapiens
gcctccttctgttgcttcccgtctcctcggcggctcccctcccccgcccggctctccgcgccccttctgggcggcggggcggcggagccgtcggcgtgcggccctccttgcgttcgtgcgtgcgcccgtggcccggcgcacgtcccgcgacaccgaggccgagcggggcagggggctgaccgccatgaccccccagagcccggcgtgagggggccgagatgcggtgacctgccagcacctgccgcagccttcgtccgggagtcgccccatctctccacgcatcggggccctgtgccccttgctgctgcagccgggcaccatgtcgacctcgtccttgaggcgccagatgaagaacatcgtccacaactactcagaggcggagatcaaggttcgagaggccacgagcaatgacccctggggcccatccagctccctcatgtcagagattgccgacctcacctacaacgttgtcgccttctcggagatcatgagcatgatctggaagcggctcaatgaccatggcaagaactggcgtcacgtttacaaggccatgacgctgatggagtacctcatcaagaccggctcggagcgcgtgtcgcagcagtgcaaggagaacatgtacgccgtgcagacgctgaaggacttccagtacgtggaccgcgacggcaaggaccagggcgtgaacgtgcgtgagaaagctaagcagctggtggccctgctgcgcgacgaggaccggctgcgggaagagcgggcgcacgcgctcaagaccaaggaaaagctggcacagaccgccacggcctcatcagcagctgtgggctcaggcccccctcccgaggcggagcaggcgtggccgcagagcagcggggaggaggagctgcagctccagctggccctggccatgagcaaggaggaggccgaccagcccccgtcctgcggccccgaggacgacgcccagctccagctggcccttagtttgagccgagaagagcatgataagggatccgtcccggggattgactgcgggcttgcagatggaactcgaaggaaaccaacagggacactgggtgacaagaaagagtcgatcctcatggaccttgactgagtactcaagagccgcagatctggacacaacccgaaccctgaggggacctaaccaagacgatgccaaagcat

SEQ ID NO: 328301 - DNA, 852 bp, Homo sapiens
gactcttgcaccatgagaggattctattttatagcacctagaaagatggttttccaacctctatttatcctagtgccagggaatttcttctcataaatgatccattgatagctctcatgtttgaaaaggttatgccttttaaatcaaagtctataaccctttgatttctaccattttgtcttggttttgtcttctgaaacaaagtcctgtttaaaattgagaagtgttgtatgtgaagacactaatacaaggaacaccaatatttaaatgtttctccttacccttttttttttttggttagtgtttgaactttatggcttttctttctggaggacaagattgagaaaagtctttttattatttacattttagtaaacagtaaccatctagagttcgtcgagtggcaagaattttgaagtttggctgcccttgtgtactactggtagattttgtggaagttgctatttactgtttgtttcttatttatcagaaaatattgaggagatagcagccaatatgagctaattcagatttgtaaagtccttagtgtcctgaaatagttaacatatttcttaatctaaagcaagtctcccaatatacttaaagaagggtcctgaaatagttaacatatttcttaatctaaagcaagtcccccaggacacttaaagaagtgtagattaactttttaaatatgtttgaggacatgatgaagcatactaaatacatatttaaccaatgcctcccattttcactttctaataattttatgatagtttgtaattgttttgtttggaattagtgatgaatggaaatcacttaaaaaaacgttaacttgagaagtcatatctgctt

SEQ ID NO: 328302 - DNA, 400 bp, Homo sapiens
ttctcaggatgtgactactctactgccagaacacagatcaacccagaacatcctctcccaccaattttcactcctatccacttcccccaaaccagacacactttccttcttgtaatttctatattctttcttaatggtttctccagttttcaaggtaaggcttacttttttccttctttcaactttttttctaagtataacattaatgctaggggccaggcacggtggctcacatctgtaacaccagcactttgggaggccaaggcagttggatcacctgaggtcacgagttccagaccagcctggccaacgtggtgaaaccccgtctctactagaaatacaaaaattagctgggcatgatggtgggcaccagctattcgggaggctgaggcaggagaat

SEQ ID NO: 328303 - DNA, 281 bp, Homo sapiens
tatattggccaggctggtctcgaactgctgacctcgtaatccacctgccttggcctcccaaagtgctgggattacaggtataagccaccgcgcccagcctgtggtgcgtgtttcacagcaaccaggaggctgtcaagaaaattaatattaccttattgggtgccaaggcaacactgtttggtgttcagagctgattaaaaacaacaacaaaaaagatattataggaacaatatttagtgtgataaaatatacagtctaaaccaatagtcccttccttaatg

SEQ ID NO: 328304 - DNA, 614 bp, Homo sapiens
ggtattgctttgtttttcttcaaaaaaaaaatactaagccataattgtttttctcaaatattctggaaagtactcccaagaatctactgctttttcaaagccaactgaaaggtgttgacattgaatgtgcaatttttaaaaaatcaaaacttcaaatattacttcataactccactgattccttaaataccgattccttaaataccttaaataccgaccactgtgtttaactgcaaagccaaaaaattattttaactcctcaactagaaaagcatgtactgtcagtagtatcatgttaacaatgacttctgtacaggtacatgcaggaaatcaagacaatggtgactgcttacacatgccatcaaatcaactggtgaatgaaaaatgaaattaataaatagattttggcaattcaatactaaactactagcctcagggtttggctttttcctccatacttgagcatgtaaggaagtacaacctggttctttaaaaaaatgtgttgattaaattctcaataccccaacttcccaacctgtacaagaaaagaggcagctgcttccaacagtgttatcttacggccattaaataagttaataatattgggcaaaggg

SEQ ID NO: 328305 - DNA, 1004 bp, Homo sapiens
  misc_feature (901)..(901): n is a, c, g, or t
aacattagggctaggtacgaggcctgggtggtggaagatgtagttttctctgcgcgtgtgcgttttccctcctccccgccctcagggtccacggccaccatggcgtattaggggcagcagtgcctgcggcagcattggcctttgcagcggcggcagcagcaccaggctctgcagcggcaacccccagcggcttaagccatggcgcttctcacggcattcagcagcagcgttgctgtaaccgacaaagacaccttcgaattaagcacattcctcgattccagcaaagcaccgcaacatgaccgaaatgagcttcctgagcagcgaggtgttggtgggggacttgatgtcccccttcgaccagtcgggtttgggggctgaagaaagcctaggtctcttagatgattacctggaggtggccaagcacttcaaacctcatgggttctccagcgacaaggctaaggcgggctcctccgaatggctggctgtggatgggttggtcagtccctccaacaacagcaaggaggatgccttctccgggacagattggatgttggagaaaatggatttgaaggagttcgacttggatgccctgttgggtatagatgacctggaaaccatgccagatgaccttctgaccacgttggatgacacttgtgatctctttgcccccctagtccaggagactaataagcagcccccccagacggtgaacccaattggccatctcccagaaagtttaacaaaacccgaccaggttgcccccttcaccttcttacaacctcttcccctttccccaggggtcctgtcctccactccagatcattcctttagtttagagctggggagtggttcccggagggatagaaccgacaaccggtagtggcggacctcgggtaggggnacctcatagtgtggtctttcccgtcgttgtctcgaccccaggtcaagaccccggtttgtgccccaccgaggggaaggattaaaacaccccgcgtggtttttct

SEQ ID NO: 328306 - DNA, 957 bp, Homo sapiens
  misc_feature (20)..(20): n is a, c, g, or t
cggacgcgtgggtcgacccncgcgacaagatgtagttttctctgcgcgtgtgcgttttccctcctccccgccctcagggtccacggccaccatggcgtattaggggcagcagtgcctgcggcagcattggcctttgcagcggcggcagcagcaccaggctctgcagcggcaacccccagcggcttaagccatggcgcttctcacggcattcagcagcagcgttgctgtaaccgacaaagacaccttcgaattaagcacattcctcgattccagcaaagcaccgcaacatgaccgaaatgagcttcctgagcagcgaggtgttggtgggggacttgatgtcccccttcgaccagtcgggtttgggggctgaagaaagcctaggtctcttagatgattacctggaggtggccaagcacttcaaacctcatgggttctccagcgacaaggctaaggcgggctcctccgaatggctggctgtggatgggttggtcagtccctccaacaacagcaaggaggatgccttctccgggacagattggatgttggagaaaatggatttgaaggagttcgacttggatgccctgttgggtatagatgacctggaaaccatgccagatgaccttctgaccacgttggatgacacttgtgatctctttgcccccctagtccaggagactaataagcagcccccccagacggtgaacccaattggccatctcccagaaagtttaacaattaccttttaaccttccttcgctttcccagggtcggtctccctcccaatcatactttagtagaatggcgggaatggatttacggagggaagaggcgaaaacgtgtcgtgctgacacttggtaggggaaaccctctatgtgtgctttatcgactttggtctcgcctcagggctcaagaccctcgtttgggcgccactcaagaaaggggatagaaaaaacgtgg

SEQ ID NO: 328307 - DNA, 1157 bp, Homo sapiens
  misc_feature (1104)..(1106): n is a, c, g, or t
  misc_feature (1113)..(1113): n is a, c, g, or t
  misc_feature (1116)..(1117): n is a, c, g, or t
aacgacctttccccgcccactgcgctgacaccggaagcgaggcgtgtctgggagatcactccgcgctccggcggcgaaggaaagaacggactctgatcatagaagcctagtaaagtagtacacctctctcctttcgtgaggccataagaacaaactccttttctcgtcacagctacgccctgggcataaacggttggggcgtcaaagggagggagggaagggagcgggcgggaggagacggtcacgtggtcgcggcggaaggatgcgtctgtgctgcgtccccatagagacgaagtctataaagggccggcgggcggcacggcagccatttctactttgcccgcccacagatgtaaagatgtagttttctctgcgcgtgtgcgttttccctcctccccgccctcagggtccacggccaccatggcgtattaggggcagcagtgcctgcggcagcattggcctttgcagcggcggcagcagcaccaggctctgcagcggcaacccccagcggcttaagccatggcgcttctcacggcattcagcagcagcgttgctgtaaccgacaaagacaccttcgaattaagcacattcctcgattccagcaaagcaccgcaacatgaccgaaatgagcttcctgagcagcgaggtgttggtgggggacttgatgtcccccttcgaccagtcgggtttgggggctgaagaaagcctaggtctcttagatgattacctggaggtggccaagcacttcaaacctcatgggttctccagcgacaaggctaaggcgggctcctccgaatggctggctgtggatgggttggtcagtccctccaacaacagcaaggaggatgccttctccgggacagattggatgttggagaaaatggatttgaaggagttcgacttggatgccctgttgggtatagatgacctggaaaccatgccagatgaccttctgaccacgttggatgacacttgtgatctctttgcccccctagtccaggagactaataagcagcccccccagacggtgaacccaattggccatctcccagaaagtttaacaattcactcttacactctccttcccagggtctgtctcatcannnatcttantannctggcggaagggatacggaggatgagcagcaagtagtgcg

SEQ ID NO: 328308 - DNA, 1001 bp, Homo sapiens
gatataagaggctctcgtagtgtagatatgagattcagcacacgccacggcctatgtagacggtgttcggttgacgagtcagacgtttgtagagttcctaatgtattgtgtgtggctttgactgttatctgacttatgcaatcggagtgtcctctgggctctctatggtggtagttttcttatactgggtcgtgcagggctcgcgttatttgggatgtgcggtctttgttaattgtaaccctggtgtcaattgcttgttctctgtgtctacgaccgacgttggctctgcgtgatgtaatgtaagcccccttttagcttgtccatcgtagtcatggcctctgatgcgtgggtgggctctcccgagctcgtagttaacggctttgttgcggcgcatggcgcccagtagccgcagtacgaagtcgtcatgttgaagtcagccctagtgccatcattctacgattctgcattggctaatatagtggctcgctttaacctctccacccttatcacgacaccatagacacctcttgattactcctgccatcatgacccttggccataatatgatggtgatctccacactagcagagaccataccggacccccttcgaccttgccgaaggggatccgactatctcagcttcacatcgataccccaggcccctcgccctattcttcataccgaatacacaacattattatataacaccctcaccactacaatcttcctaggaacaacatatgacgcactctcccctgaactctacacaacatattttgtcaccaagaccctacttctaacctccctgttcttatgaattcgaacagggaggatagtcaggagcgtcaatgtgcttgtacatagagtgctgtagctgtgtgttccaataaattattttgtagggaaacacatatgacgcactctccccctgaactctacacacatattttggtcaccagaccctacttctaacctccctgttcgaattcataagaacagc

SEQ ID NO: 328309 - DNA, 1451 bp, Homo sapiens
  misc_feature (10)..(10): n is a, c, g, or t
  misc_feature (14)..(14): n is a, c, g, or t
aaaaagaganaaantaaggctaggtacgaggctgggtgttgaatcggccgaggaagatgtagttttctctgcgcgtgtgcgttttccctcctccccgccctcagggtccacggccaccatggcgtattaggggcagcagtgcctgcggcagcattggcctttgcagcggcggcagcagcaccaggctctgcagcggcaacccccagcggcttaagccatggcgcttctcacggcattcagcagcagcgttgctgtaaccgacaaagacaccttcgaattaagcacattcctcgattccagcaaagcaccgcaacatgaccgaaatgagcttcctgagcagcgaggtgttggtgggggacttgatgtcccccttcgaccagtcgggtttgggggctgaagaaagcctaggtctcttagatgattacctggaggtggccaagcacttcaaacctcatgggttctccagcgacaaggctaaggcgggctcctccgaatggctggctgtggatgggttggtcagtccctccaacaacagcaaggaggatgccttctccgggacagattggatgttggagaaaatggatttgaaggagttcgacttggatgccctgttgggtatagatgacctggaaaccatgccagatgaccttctgaccacgttggatgacacttgtgatctctttgcccccctagtccaggagactaataagcagcccccccagacggtgaacccaattggccatctcccagaaagtttaacaaaacccgaccaggttgcccccttcaccttcttacaacctcttcccctttccccaggggtcctgtcctccactccagatcattcctttagtttagagctgggcagtgaagtggatatcactgaaggagataggaagccagactacactgcttacgttgccatgatccctcagtgcataaaggaggaagacaccccttcagataatgatagtggcatctgtatgagcccagagtcctatctggggtctcctcagcacagcccctctaccaggggctctccaaataggagcctcccatctccaggtgttctctgtgggtctgcccgtcccaaaccttacgatcctcctggagagaagatggtagcagcaaaagtaaagggtgagaaactggataagaagctgaaaaaaatggagcaaaacaagacagcagccactaggtaccgccagaagaagagggcggagcaggaggctcttactggtgagtgcaaagagctggaaaagaagaacgaggctctaaaagagagggcggattccctggccaaggagatccagtacctgaaagatttgatagaagaggtccgcaaggcaagggggaagaaaagggtcccctagttgaggatagtcaggagcgtcaatgtgcttgtacatagagtgctgtagctgtgtgttccaataaattattttgtagggaaa

SEQ ID NO: 328310 - DNA, 1481 bp, Homo sapiens
  misc_feature (10)..(10): n is a, c, g, or t
  misc_feature (14)..(14): n is a, c, g, or t
aaaaagaganaaantaaggctaggtacgaggctgggtgttgaatcggccgaggaagatgtagttttctctgcgcgtgtgcgttttccctcctccccgccctcagggtccacggccaccatggcgtattaggggcagcagtgcctgcggcagcattggcctttgcagcggcggcagcagcaccaggctctgcagcggcaacccccagcggcttaagccatggcgcttctcacggcattcagcagcagcgttgctgtaaccgacaaagacaccttcgaattaagcacattcctcgattccagcaaagcaccgcaacatgaccgaaatgagcttcctgagcagcgaggtgttggtgggggacttgatgtcccccttcgaccagtcgggtttgggggctgaagaaagcctaggtctcttagatgattacctggaggtggccaagcacttcaaacctcatgggttctccagcgacaaggctaaggcgggctcctccgaatggctggctgtggatgggttggtcagtccctccaacaacagcaaggaggatgccttctccgggacagattggatgttggagaaaatggatttgaaggagttcgacttggatgccctgttgggtatagatgacctggaaaccatgccagatgaccttctgaccacgttggatgacacttgtgatctctttgcccccctagtccaggagactaataagcagcccccccagacggtgaacccaattggccatctcccagaaagtttaacaaaacccgaccaggttgcccccttcaccttcttacaacctcttcccctttccccaggggtcctgtcctccactccagatcattcctttagtttagagctgggcagtgaagtggatatcactgaaggagataggaagccagactacactgcttacgttgccatgatccctcagtgcataaaggaggaagacaccccttcagataatgatagtggcatctgtatgagcccagagtcctatctggggtctcctcagcacagcccctctaccaggggctctccaaataggagcctcccatctccaggtgttctctgtgggtctgcccgtcccaaaccttacgatcctcctggagagaagatggtagcagcaaaagtaaagggtgagaaactggataagaagctgaaaaaaatggagcaaaacaagacagcagccactaggtaccgccagaagaagagggcggagcaggaggctcttactggtgagtgcaaagagctggaaaagaagaacgaggctctaaaagagagggcggattccctggccaaggagatccagtacctgaaagatttgatagaagaggtccgcaaggcaagggggaagaaaagggtcccctagttgaggatagtcaggagcgtcaatgtgcttgtacatagagtgctgtagctgtgtgttccaataaattattttgtagggaaaaaaaaccacacacaccacccacacacaaga

SEQ ID NO: 328311 - DNA, 1489 bp, Homo sapiens
  misc_feature (10)..(10): n is a, c, g, or t
  misc_feature (14)..(14): n is a, c, g, or t
  misc_feature (1471)..(1471): n is a, c, g, or t
aaaaagaganaaantaaggctaggtacgaggctgggtgttgaatcggccgaggaagatgtagttttctctgcgcgtgtgcgttttccctcctccccgccctcagggtccacggccaccatggcgtattaggggcagcagtgcctgcggcagcattggcctttgcagcggcggcagcagcaccaggctctgcagcggcaacccccagcggcttaagccatggcgcttctcacggcattcagcagcagcgttgctgtaaccgacaaagacaccttcgaattaagcacattcctcgattccagcaaagcaccgcaacatgaccgaaatgagcttcctgagcagcgaggtgttggtgggggacttgatgtcccccttcgaccagtcgggtttgggggctgaagaaagcctaggtctcttagatgattacctggaggtggccaagcacttcaaacctcatgggttctccagcgacaaggctaaggcgggctcctccgaatggctggctgtggatgggttggtcagtccctccaacaacagcaaggaggatgccttctccgggacagattggatgttggagaaaatggatttgaaggagttcgacttggatgccctgttgggtatagatgacctggaaaccatgccagatgaccttctgaccacgttggatgacacttgtgatctctttgcccccctagtccaggagactaataagcagcccccccagacggtgaacccaattggccatctcccagaaagtttaacaaaacccgaccaggttgcccccttcaccttcttacaacctcttcccctttccccaggggtcctgtcctccactccagatcattcctttagtttagagctgggcagtgaagtggatatcactgaaggagataggaagccagactacactgcttacgttgccatgatccctcagtgcataaaggaggaagacaccccttcagataatgatagtggcatctgtatgagcccagagtcctatctggggtctcctcagcacagcccctctaccaggggctctccaaataggagcctcccatctccaggtgttctctgtgggtctgcccgtcccaaaccttacgatcctcctggagagaagatggtagcagcaaaagtaaagggtgagaaactggataagaagctgaaaaaaatggagcaaaacaagacagcagccactaggtaccgccagaagaagagggcggagcaggaggctcttactggtgagtgcaaagagctggaaaagaagaacgaggctctaaaagagagggcggattccctggccaaggagatccagtacctgaaagatttgatagaagaggtccgcaaggcaagggggaagaaaagggtcccctagttgaggatagtcaggagcgtcaatgtgcttgtacatagagtgctgtagctgtgtgttccaataaattattttgtagggaaattccatctgccctccgggancctcagaacagctatgca

SEQ ID NO: 328312 - DNA, 1593 bp, Homo sapiens
  misc_feature (10)..(10): n is a, c, g, or t
  misc_feature (14)..(14): n is a, c, g, or t
  misc_feature (1457)..(1457): n is a, c, g, or t
  misc_feature (1459)..(1460): n is a, c, g, or t
aaaaagaganaaantaaggctaggtacgaggctgggtgttgaatcggccgaggaagatgtagttttctctgcgcgtgtgcgttttccctcctccccgccctcagggtccacggccaccatggcgtattaggggcagcagtgcctgcggcagcattggcctttgcagcggcggcagcagcaccaggctctgcagcggcaacccccagcggcttaagccatggcgcttctcacggcattcagcagcagcgttgctgtaaccgacaaagacaccttcgaattaagcacattcctcgattccagcaaagcaccgcaacatgaccgaaatgagcttcctgagcagcgaggtgttggtgggggacttgatgtcccccttcgaccagtcgggtttgggggctgaagaaagcctaggtctcttagatgattacctggaggtggccaagcacttcaaacctcatgggttctccagcgacaaggctaaggcgggctcctccgaatggctggctgtggatgggttggtcagtccctccaacaacagcaaggaggatgccttctccgggacagattggatgttggagaaaatggatttgaaggagttcgacttggatgccctgttgggtatagatgacctggaaaccatgccagatgaccttctgaccacgttggatgacacttgtgatctctttgcccccctagtccaggagactaataagcagcccccccagacggtgaacccaattggccatctcccagaaagtttaacaaaacccgaccaggttgcccccttcaccttcttacaacctcttcccctttccccaggggtcctgtcctccactccagatcattcctttagtttagagctgggcagtgaagtggatatcactgaaggagataggaagccagactacactgcttacgttgccatgatccctcagtgcataaaggaggaagacaccccttcagataatgatagtggcatctgtatgagcccagagtcctatctggggtctcctcagcacagcccctctaccaggggctctccaaataggagcctcccatctccaggtgttctctgtgggtctgcccgtcccaaaccttacgatcctcctggagagaagatggtagcagcaaaagtaaagggtgagaaactggataagaagctgaaaaaaatggagcaaaacaagacagcagccactaggtaccgccagaagaagagggcggagcaggaggctcttactggtgagtgcaaagagctggaaaagaagaacgaggctctaaaagagagggcggattccctggccaaggagatccagtacctgaaagatttgatagaagaggtccgcaaggcaagggggaagaaaagggtcccctagttgaggatagtcaggagcgtcaatgtgcttgtacatagagtgctgtagctgtgtgttccaataaattattttgtagggaaacaaccnannaacaacaaaagggggggctaaaataccagggccaatcccaccctttttaaagggccagaggctaaaaaaggcgggaaaacgggaaacctcggtcggaccccgtggtgcaccccacccgcaattggcgccgtcg

SEQ ID NO: 328313 - DNA, 1990 bp, Homo sapiens
  misc_feature (10)..(10): n is a, c, g, or t
  misc_feature (14)..(14): n is a, c, g, or t
  misc_feature (1558)..(1558): n is a, c, g, or t
aaaaagaganaaantaaggctaggtacgaggctgggtgttgaatcggccgaggaagatgtagttttctctgcgcgtgtgcgttttccctcctccccgccctcagggtccacggccaccatggcgtattaggggcagcagtgcctgcggcagcattggcctttgcagcggcggcagcagcaccaggctctgcagcggcaacccccagcggcttaagccatggcgcttctcacggcattcagcagcagcgttgctgtaaccgacaaagacaccttcgaattaagcacattcctcgattccagcaaagcaccgcaacatgaccgaaatgagcttcctgagcagcgaggtgttggtgggggacttgatgtcccccttcgaccagtcgggtttgggggctgaagaaagcctaggtctcttagatgattacctggaggtggccaagcacttcaaacctcatgggttctccagcgacaaggctaaggcgggctcctccgaatggctggctgtggatgggttggtcagtccctccaacaacagcaaggaggatgccttctccgggacagattggatgttggagaaaatggatttgaaggagttcgacttggatgccctgttgggtatagatgacctggaaaccatgccagatgaccttctgaccacgttggatgacacttgtgatctctttgcccccctagtccaggagactaataagcagcccccccagacggtgaacccaattggccatctcccagaaagtttaacaaaacccgaccaggttgcccccttcaccttcttacaacctcttcccctttccccaggggtcctgtcctccactccagatcattcctttagtttagagctgggcagtgaagtggatatcactgaaggagataggaagccagactacactgcttacgttgccatgatccctcagtgcataaaggaggaagacaccccttcagataatgatagtggcatctgtatgagcccagagtcctatctggggtctcctcagcacagcccctctaccaggggctctccaaataggagcctcccatctccaggtgttctctgtgggtctgcccgtcccaaaccttacgatcctcctggagagaagatggtagcagcaaaagtaaagggtgagaaactggataagaagctgaaaaaaatggagcaaaacaagacagcagccactaggtaccgccagaagaagagggcggagcaggaggctcttactggtgagtgcaaagagctggaaaagaagaacgaggctctaaaagagagggcggattccctggccaaggagatccagtacctgaaagatttgatagaagaggtccgcaaggcaagggggaagaaaagggtcccctagttgaggatagtcaggagcgtcaatgtgcttgtacatagagtgctgtagctgtgtgttccaataaattattttgtagggaaaaaaaaaaaaaaaaaaaaaaaaaaaaaaaaaaaaaaaaaaaaaaaaaaaaaaaaaaaaaaaaaaaaaaaaaaaaaaaaaaaaaaaaaaaaaaaaaaaaaaaagaaaanaaaaaaaaaaaaaaaagaaaggagggggggcgcgggcgcagacaaattatctcgctcctacgcggcggcggccaaccacaatccccacgccccccccctctttttatctaaaggggaggcggcgccccacatgagtggggtcgctgtattatactagagaacggagcgcgggagggcggctgctaattaaatataaatcaacaatctattatcgagtgagagagagacacacaacccacgatccccgatgaggattgtaactcttatgtagaaagaaaacacccccctcctatctcttattgcgggggtgagagaacacacagcattgattgtgtaggatcattcacttcttttcactgtaagatatatattattatctggcggcaggctgagataaaacataaacactatcgagcaagacgcggcgaggtg

SEQ ID NO: 328314 - DNA, 1307 bp, Homo sapiens
  misc_feature (10)..(10): n is a, c, g, or t
  misc_feature (14)..(14): n is a, c, g, or t
aaaaagaganaaantaaggctaggtacgaggctgggtgttgaatcggccgaggaagatgtagttttctctgcgcgtgtgcgttttccctcctccccgccctcagggtccacggccaccatggcgtattaggggcagcagtgcctgcggcagcattggcctttgcagcggcggcagcagcaccaggctctgcagcggcaacccccagcggcttaagccatggcgcttctcacggcattcagcagcagcgttgctgtaaccgacaaagacaccttcgaattaagcacattcctcgattccagcaaagcaccgcaacatgaccgaaatgagcttcctgagcagcgaggtgttggtgggggacttgatgtcccccttcgaccagtcgggtttgggggctgaagaaagcctaggtctcttagatgattacctggaggtggccaagcacttcaaacctcatgggttctccagcgacaaggctaaggcgggctcctccgaatggctggctgtggatgggttggtcagtccctccaacaacagcaaggaggatgccttctccgggacagattggatgttggagaaaatggatttgaaggagttcgacttggatgccctgttgggtatagatgacctggaaaccatgccagatgaccttctgaccacgttggatgacacttgtgatctctttgcccccctagtccaggagactaataagcagcccccccagacggtgaacccaattggccatctcccagaaagtttaacaaaacccgaccaggttgcccccttcaccttcttacaacctcttcccctttccccaggggtcctgtcctccactccagatcattcctttagtttagagctgggcagtgaagtggatatcactgaaggagataggaagccagactacactgcttacgttgccatgatccctcagtgcataaaggaggaagacaccccttcagataatgatagtggcatctgtatgagcccagagtcctatctggggtctcctcagcacagcccctctaccaggggctctccaaataggagcctcccatctccaggtgttctctgtgggtctgcccgtcccaaaccttacgatcctcctggagagaagatggtagcagcaaaagtaaagggtgagaaactggataagaagctgaaaaaaatggagcaaaacaagacagcagccactaggtaccgccagaagaagagggcggagcaggaggctcttactggtgagtgcaaagagctggagtcaaggaagccagcatacctggaccttacactggggtcagatgagcccagc

SEQ ID NO: 328315 - DNA, 1307 bp, Homo sapiens
  misc_feature (10)..(10): n is a, c, g, or t
  misc_feature (14)..(14): n is a, c, g, or t
  misc_feature (1136)..(1136): n is a, c, g, or t
aaaaagaganaaantaaggctaggtacgaggctgggtgttgaatcggccgaggaagatgtagttttctctgcgcgtgtgcgttttccctcctccccgccctcagggtccacggccaccatggcgtattaggggcagcagtgcctgcggcagcattggcctttgcagcggcggcagcagcaccaggctctgcagcggcaacccccagcggcttaagccatggcgcttctcacggcattcagcagcagcgttgctgtaaccgacaaagacaccttcgaattaagcacattcctcgattccagcaaagcaccgcaacatgaccgaaatgagcttcctgagcagcgaggtgttggtgggggacttgatgtcccccttcgaccagtcgggtttgggggctgaagaaagcctaggtctcttagatgattacctggaggtggccaagcacttcaaacctcatgggttctccagcgacaaggctaaggcgggctcctccgaatggctggctgtggatgggttggtcagtccctccaacaacagcaaggaggatgccttctccgggacagattggatgttggagaaaatggatttgaaggagttcgacttggatgccctgttgggtatagatgacctggaaaccatgccagatgaccttctgaccacgttggatgacacttgtgatctctttgcccccctagtccaggagactaataagcagcccccccagacggtgaacccaattggccatctcccagaaagtttaacaaaacccgaccaggttgcccccttcaccttcttacaacctcttcccctttccccaggggtcctgtcctccactccagatcattcctttagtttagagctgggcagtgaagtggatatcactgaaggagataggaagccagactacactgcttacgttgccatgatccctcagtgcataaaggaggaagacaccccttcagataatgatagtggcatctgtatgagcccagagtcctatctggggtctcctcagcacagcccctctaccaggggctctccaaataggagcctcccatctccaggtgttctctgtgggtctgcccgtcccaaaccttacgatcctcctgggcgcacagtaggggggaacgggttggangtgcaaatgggcacagaagggcagggtgctgaaaaaggggggaggcttgggggcaacggaaaacaggctaaagggcgtcggagaaaaaagaaagaggggaagacaagatagaaggttaggagggcatgaaagagacacgcttgctatagtggtattgtttatttattgtag

SEQ ID NO: 328316 - DNA, 1201 bp, Homo sapiens
  misc_feature (10)..(10): n is a, c, g, or t
  misc_feature (14)..(14): n is a, c, g, or t
aaaaagaganaaantaaggctaggtacgaggctgggtgttgaatcggccgaggaagatgtagttttctctgcgcgtgtgcgttttccctcctccccgccctcagggtccacggccaccatggcgtattaggggcagcagtgcctgcggcagcattggcctttgcagcggcggcagcagcaccaggctctgcagcggcaacccccagcggcttaagccatggcgcttctcacggcattcagcagcagcgttgctgtaaccgacaaagacaccttcgaattaagcacattcctcgattccagcaaagcaccgcaacatgaccgaaatgagcttcctgagcagcgaggtgttggtgggggacttgatgtcccccttcgaccagtcgggtttgggggctgaagaaagcctaggtctcttagatgattacctggaggtggccaagcacttcaaacctcatgggttctccagcgacaaggctaaggcgggctcctccgaatggctggctgtggatgggttggtcagtccctccaacaacagcaaggaggatgccttctccgggacagattggatgttggagaaaatggatttgaaggagttcgacttggatgccctgttgggtatagatgacctggaaaccatgccagatgaccttctgaccacgttggatgacacttgtgatctctttgcccccctagtccaggagactaataagcagcccccccagacggtgaacccaattggccatctcccagaaagtttaacaaaacccgaccaggttgcccccttcaccttcttacaacctcttcccctttccccaggggtcctgtcctccactccagatcattcctttagtttagagctgggcagtgaagtggatatcactgaaggagataggaagccagactacactgcttacgttgccatgatccctcagtgcataaaggaggaagacaccccttcagataatgatagtggcatctgtatgagcccagagtcctatctggggtctcctcagcacagcccctctaccaggggctctccaaataggagcctcccatctccaggtgttctctgtgggtctgcccgtcccaaaccttacgatcctcctgcagaagggggacgggttaaccggaaagtggaaaaaaggccatgtcggggaaaagggggagccacggggggaagggaaaaagggaaaagggcgca

SEQ ID NO: 328317 - DNA, 1263 bp, Homo sapiens
aacattagggctaggtacgaggcctgggtggtgggcttctcacggcattcagcagcagcgttgctgtaaccgacaaagacaccttcgaattaagcacattcctcgattccagcaaagcaccgcaacatgaccgaaatgagcttcctgagcagcgaggtgttggtgggggacttgatgtcccccttcgaccagtcgggtttgggggctgaagaaagcctaggtctcttagatgattacctggaggtggccaagcacttcaaacctcatgggttctccagcgacaaggctaaggcgggctcctccgaatggctggctgtggatgggttggtcagtccctccaacaacagcaaggaggatgccttctccgggacagattggatgttggagaaaatggatttgaaggagttcgacttggatgccctgttgggtatagatgacctggaaaccatgccagatgaccttctgaccacgttggatgacacttgtgatctctttgcccccctagtccaggagactaataagcagcccccccagacggtgaacccaattggccatctcccagaaagtttaacaaaacccgaccaggttgcccccttcaccttcttacaacctcttcccctttccccaggggtcctgtcctccactccagatcattcctttagtttagagctgggcagtgaagtggatatcactgaaggagataggaagccagactacactgcttacgttgccatgatccctcagtgcataaaggaggaagacaccccttcagataatgatagtggcatctgtatgagcccagagtcctatctggggtctcctcagcacagcccctctaccaggggctctccaaataggagcctcccatctccaggtgttctctgtgggtctgcccgtcccaaaccttacgatcctcctggagagaagatggtagcagcaaaagtaaagggtgagaaactggataagaagctgaaaaaaatggagcaaaacaagacagcagccactaggtaccgccagaagaagagggcggagcaggaggctcttactggtgagtgcaaagagctggaaaagaagaacgaggctctaaaagagagggcggattccctggccaaggagatccagtacctgaaagatttgatagaagaggtccgcaaggcaagggggaagaaaagggtcccctagttgaggatagtcaggagcgtcaatgtgcttgtacatagagtgctgtagctgtgtgttccaataaattattttgtagggaaa

SEQ ID NO: 328318 - DNA, 1172 bp, Homo sapiens
  misc_feature (10)..(10): n is a, c, g, or t
  misc_feature (14)..(14): n is a, c, g, or t
aaaaagaganaaantaaggctaggtacgaggctgggtgttgaatcggccgaggaagatgtagttttctctgcgcgtgtgcgttttccctcctccccgccctcagggtccacggccaccatggcgtattaggggcagcagtgcctgcggcagcattggcctttgcagcggcggcagcagcaccaggctctgcagcggcaacccccagcggcttaagccatggcgcttctcacggcattcagcagcagcgttgctgtaaccgacaaagacaccttcgaattaagcacattcctcgattccagcaaagcaccgcaacatgaccgaaatgagcttcctgagcagcgaggtgttggtgggggacttgatgtcccccttcgaccagtcgggtttgggggctgaagaaagcctaggtctcttagatgattacctggaggtggccaagcacttcaaacctcatgggttctccagcgacaaggctaaggcgggctcctccgaatggctggctgtggatgggttggtcagtccctccaacaacagcaaggaggatgccttctccgggacagattggatgttggagaaaatggatttgaaggagttcgacttggatgccctgttgggtatagatgacctggaaaccatgccagatgaccttctgaccacgttggatgacacttgtgatctctttgcccccctagtccaggagactaataagcagcccccccagacggtgaacccaattggccatctcccagaaagtttaacaaaacccgaccaggttgcccccttcaccttcttacaacctcttcccctttccccaggggtcctgtcctccactccagatcattcctttagtttagagctgggcagtgaagtggatatcactgaaggagataggaagccagactacactgcttacgttgccatgatccctcagtgcataaaggaggaagacaccccttcagataatgacagggtatcagaacagagacacagcatcgatactatgagtttctcattagcgctcggatcacccggaaattcctaatatgaacagttccttcgtacaggtgtagtctgagcgatggggccatcccaagcaggtacgcacttgcgatgagaaagacaaatagtgtagccactaaattgaaggcagagatgttacagaataagagcc

SEQ ID NO: 328319 - DNA, 1035 bp, Homo sapiens
  misc_feature (10)..(10): n is a, c, g, or t
  misc_feature (14)..(14): n is a, c, g, or t
  misc_feature (970)..(971): n is a, c, g, or t
  misc_feature (973)..(973): n is a, c, g, or t
  misc_feature (978)..(980): n is a, c, g, or t
  misc_feature (992)..(992): n is a, c, g, or t
  misc_feature (995)..(995): n is a, c, g, or t
  misc_feature (998)..(998): n is a, c, g, or t
  misc_feature (1003)..(1003): n is a, c, g, or t
  misc_feature (1006)..(1006): n is a, c, g, or t
aaaaagaganaaantaaggctaggtacgaggctgggtgttgaatcggccgaggaagatgtagttttctctgcgcgtgtgcgttttccctcctccccgccctcagggtccacggccaccatggcgtattaggggcagcagtgcctgcggcagcattggcctttgcagcggcggcagcagcaccaggctctgcagcggcaacccccagcggcttaagccatggcgcttctcacggcattcagcagcagcgttgctgtaaccgacaaagacaccttcgaattaagcacattcctcgattccagcaaagcaccgcaacatgaccgaaatgagcttcctgagcagcgaggtgttggtgggggacttgatgtcccccttcgaccagtcgggtttgggggctgaagaaagcctaggtctcttagatgattacctggaggtggccaagcacttcaaacctcatgggttctccagcgacaaggctaaggcgggctcctccgaatggctggctgtggatgggttggtcagtccctccaacaacagcaaggaggatgccttctccgggacagattggatgttggagaaaatggatttgaaggagttcgacttggatgccctgttgggtatagatgacctggaaaccatgccagatgaccttctgaccacgttggatgacacttgtgatctctttgcccccctagtccaggagactaataagcagcccccccagacggtgaacccaattggccatctcccagaaagtttaacaaaacccgaccaggttgcccccttcaccttcttacaacctcttcccctttccccaggggtcctgtcctccactccagatcattcctttagtttagagctgggcagtgaagtggatatcactgaaggagataggaagccagactacactgcttacgttgccatgtcgtgtaagggggaaaacccttgatatagttgggttgttacccaagnntntgggnnncgaagccctacnggntcnaaggnccnccggtcctggtgcggccactagctcgggg

SEQ ID NO: 328320 - DNA, 1330 bp, Homo sapiens
aacattagggctaggtacgaggcctgggtggtggaagatgtagttttctctgcgcgtgtgcgttttccctcctccccgccctcagggtccacggccaccatggcgtattaggggcagcagtgcctgcggcagcattggcctttgcagcggcggcagcagcaccaggctctgcagcggcaacccccagcggcttaagccatggctgagcttcctgagcagcgaggtgttggtgggggacttgatgtcccccttcgaccagtcgggtttgggggctgaagaaagcctaggtctcttagatgattacctggaggtggccaagcacttcaaacctcatgggttctccagcgacaaggctaaggcgggctcctccgaatggctggctgtggatgggttggtcagtccctccaacaacagcaaggaggatgccttctccgggacagattggatgttggagaaaatggatttgaaggagttcgacttggatgccctgttgggtatagatgacctggaaaccatgccagatgaccttctgaccacgttggatgacacttgtgatctctttgcccccctagtccaggagactaataagcagcccccccagacggtgaacccaattggccatctcccagaaagtttaacaaaacccgaccaggttgcccccttcaccttcttacaacctcttcccctttccccaggggtcctgtcctccactccagatcattcctttagtttagagctgggcagtgaagtggatatcactgaaggagataggaagccagactacactgcttacgttgccatgatccctcagtgcataaaggaggaagacaccccttcagataatgatagtggcatctgtatgagcccagagtcctatctggggtctcctcagcacagcccctctaccaggggctctccaaataggagcctcccatctccaggtgttctctgtgggtctgcccgtcccaaaccttacgatcctcctggagagaagatggtagcagcaaaagtaaagggtgagaaactggataagaagctgaaaaaaatggagcaaaacaagacagcagccactaggtaccgccagaagaagagggcggagcaggaggctcttactggtgagtgcaaagagctggaaaagaagaacgaggctctaaaagagagggcggattccctggccaaggagatccagtacctgaaagatttgatagaagaggtccgcaaggcaagggggaagaaaagggtcccctagttgaggatagtcaggagcgtcaatgtgcttgtacatagagtgctgtagctgtgtgttccaataaattattttgtagggaaa

SEQ ID NO: 328321 - DNA, 1533 bp, Homo sapiens
aacattagggctaggtacgaggcctgggtggtggaagatgtagttttctctgcgcgtgtgcgttttccctcctccccgccctcagggtccacggccaccatggcgtattaggggcagcagtgcctgcggcagcattggcctttgcagcggcggcagcagcaccaggctctgcagcggcaacccccagcggcttaagccatggcgcttctcacggcattcagcagcagcgttgctgtaaccgacaaagacaccttcgaattaagcacattcctcgattccagcaaagcaccgcaacatgaccgaaatgagcttcctgagcagcgaggtgttggtgggggacttgatgtcccccttcgaccagtcgggtttgggggctgaagaaagcctaggtctcttagatgattacctggaggtggccaagcacttcaaacctcatgggttctccagcgacaaggctaaggcgggctcctccgaatggctggctgtggatgggttggtcagtccctccaacaacagcaagggtgagtgggccaccaccacatcgtcctggtgggatctagggttaggggcctcctacctttgtatctgactcacttggccccatcactcaaatgttttgcagaggatgccttctccgggacagattggatgttggagaaaatggatttgaaggagttcgacttggatgccctgttgggtatagatgacctggaaaccatgccagatgaccttctgaccacgttggatgacacttgtgatctctttgcccccctagtccaggagactaataagcagcccccccagacggtgaacccaattggccatctcccagaaagtttaacaaaacccgaccaggttgcccccttcaccttcttacaacctcttcccctttccccaggggtcctgtcctccactccagatcattcctttagtttagagctgggcagtgaagtggatatcactgaaggagataggaagccagactacactgcttacgttgccatgatccctcagtgcataaaggaggaagacaccccttcagataatgatagtggcatctgtatgagcccagagtcctatctggggtctcctcagcacagcccctctaccaggggctctccaaataggagcctcccatctccaggtgttctctgtgggtctgcccgtcccaaaccttacgatcctcctggagagaagatggtagcagcaaaagtaaagggtgagaaactggataagaagctgaaaaaaatggagcaaaacaagacagcagccactaggtaccgccagaagaagagggcggagcaggaggctcttactggtgagtgcaaagagctggaaaagaagaacgaggctctaaaagagagggcggattccctggccaaggagatccagtacctgaaagatttgatagaagaggtccgcaaggcaagggggaagaaaagggtcccctagttgaggatagtcaggagcgtcaatgtgcttgtacatagagtgctgtagctgtgtgttccaataaattattttgtagggaaa

SEQ ID NO: 328322 - DNA, 1114 bp, Homo sapiens
aacattagggctaggtacgaggcctgggtggtggaagatgtagttttctctgcgcgtgtgcgttttccctcctccccgccctcagggtccacggccaccatggcgtattaggggcagcagtgcctgcggcagcattggcctttgcagcggcggcagcagcaccaggctctgcagcggcaacccccagcggcttaagccatggcaggatgccttctccgggacagattggatgttggagaaaatggatttgaaggagttcgacttggatgccctgttgggtatagatgacctggaaaccatgccagatgaccttctgaccacgttggatgacacttgtgatctctttgcccccctagtccaggagactaataagcagcccccccagacggtgaacccaattggccatctcccagaaagtttaacaaaacccgaccaggttgcccccttcaccttcttacaacctcttcccctttccccaggggtcctgtcctccactccagatcattcctttagtttagagctgggcagtgaagtggatatcactgaaggagataggaagccagactacactgcttacgttgccatgatccctcagtgcataaaggaggaagacaccccttcagataatgatagtggcatctgtatgagcccagagtcctatctggggtctcctcagcacagcccctctaccaggggctctccaaataggagcctcccatctccaggtgttctctgtgggtctgcccgtcccaaaccttacgatcctcctggagagaagatggtagcagcaaaagtaaagggtgagaaactggataagaagctgaaaaaaatggagcaaaacaagacagcagccactaggtaccgccagaagaagagggcggagcaggaggctcttactggtgagtgcaaagagctggaaaagaagaacgaggctctaaaagagagggcggattccctggccaaggagatccagtacctgaaagatttgatagaagaggtccgcaaggcaagggggaagaaaagggtcccctagttgaggatagtcaggagcgtcaatgtgcttgtacatagagtgctgtagctgtgtgttccaataaattattttgtagggaaa

SEQ ID NO: 328323 - DNA, 1357 bp, Homo sapiens
  misc_feature (20)..(20): n is a, c, g, or t
cggacgcgtgggtcgacccncgcgacaagatgtagttttctctgcgcgtgtgcgttttccctcctccccgccctcagggtccacggccaccatggcgtattaggggcagcagtgcctgcggcagcattggcctttgcagcggcggcagcagcaccaggctctgcagcggcaacccccagcggcttaagccatggcgcttctcacggcattcagcagcagcgttgctgtaaccgacaaagacaccttcgaattaagcacattcctcgattccagcaaagcaccgcaacatgaccgaaatgagcttcctgagcagcgaggtgttggtgggggacttgatgtcccccttcgaccagtcgggtttgggggctgaagaaagcctaggtctcttagatgattacctggaggtggccaagcacttcaaacctcatgggttctccagcgacaaggctaaggcgggctcctccgaatggctggctgtggatgggttggtcagtccctccaacaacagcaaggaggatgccttctccgggacagattggatgttggagatgaccttctgaccacgttggatgacacttgtgatctctttgcccccctagtccaggagactaataagcagcccccccagacggtgaacccaattggccatctcccagaaagtttaacaaaacccgaccaggttgcccccttcaccttcttacaacctcttcccctttccccaggggtcctgtcctccactccagatcattcctttagtttagagctgggcagtgaagtggatatcactgaaggagataggaagccagactacactgcttacgttgccatgatccctcagtgcataaaggaggaagacaccccttcagataatgatagtggcatctgtatgagcccagagtcctatctggggtctcctcagcacagcccctctaccaggggctctccaaataggagcctcccatctccaggtgttctctgtgggtctgcccgtcccaaaccttacgatcctcctggagagaagatggtagcagcaaaagtaaagggtgagaaactggataagaagctgaaaaaaatggagcaaaacaagacagcagccactaggtaccgccagaagaagagggcggagcaggaggctcttactggtgagtgcaaagagctggaaaagaagaacgaggctctaaaagagagggcggattccctggccaaggagatccagtacctgaaagatttgatagaagaggtccgcaaggcaagggggaagaaaagggtcccctagttgaggatagtcaggagcgtcaatgtgcttgtacatagagtgctgtagctgtgtgttccaataaattattttgtagggaaa

SEQ ID NO: 328324 - DNA, 1058 bp, Homo sapiens
  misc_feature (10)..(10): n is a, c, g, or t
  misc_feature (14)..(14): n is a, c, g, or t
aaaaagaganaaantaaggctaggtacgaggctgggtgttgaatcggccgaggaagatgtagttttctctgcgcgtgtgcgttttccctcctccccgccctcagggtccacggccaccatggcgtattaggggcagcagtgcctgcggcagcattggcctttgcagcggcggcagcagcaccaggctctgcagcggcaacccccagcggcttaagccatggcgcttctcacggcattcagcagcagcgttgctgtaaccgacaaagacaccttcgaattaagcacattcctcgattccagcaaagcaccgcaacatgaccgaaatgagcttcctgagcagcgaggtgttggtgggggacttgatgtcccccttcgaccagtcgggtttgggggctgaagaaagcctaggtctcttagatgattacctggaggtggccaagcacttcaaacctcatgggttctccagcgacaaggctaaggcgggctcctccgaatggctggctgtggatgggttggtcagtccctccaacaacagcaaggaggatgccttctccgggacagattggatgttggagaaaatggatttgaaggagttcgacttggatgccctgttgggtatagatgacctggaaaccatgccagatgaccttctgaccacgttggatgacacttgtgatctctttgcccccctagtccaggagactaataagcagcccccccagacggtgaacccaattggccatctcccagaaagtttaacaaaacccgaccaggttgcccccttcaccttcttacaacctcttccccttaaatctgcagacctcaccgactgcagcctgccagctctctcagggctcctcatctcggggtgaggtggggtgaggagacatgggtggacagggggagaagggccgctctgcctcttccaggcggaaccgcccttcctgtagatgaatgcatggcccactgacacatcctaggctgacacttgcctcttttccagcttttcctcagtcctccttttacctgggaatctttcctgggtgctcaaaaggggc

SEQ ID NO: 328325 - DNA, 794 bp, Homo sapiens
  misc_feature (20)..(20): n is a, c, g, or t
cggacgcgtgggtcgacccncgcgacaagatgtagttttctctgcgcgtgtgcgttttccctcctccccgccctcagggtccacggccaccatggcgtattaggggcagcagtgcctgcggcagcattggcctttgcagcggcggcagcagcaccaggctctgcagcggcaacccccagcggcttaagccatggcgcttctcacggcattcagcagcagcgttgctgtaaccgacaaagacaccttcgaattaagcacattcctcgattccagcaaagcaccgcaacatgaccgaaatgagcttcctgagcagcgaggtgttggtgggggacttgatgtcccccttcgaccagtcgggtttgggggctgaagaaagcctaggtctcttagatgattacctggaggtggccaagcacttcaaacctcatgggttctccagcgacaaggctaaggcgggctcctccgaatggctggctgtggatgggttggtcagtccctccaacaacagcaaggaggatgccttctccgggacagattggatgttggagaaaatggatttgaaggagttcgacttggatgccctgttgggtatagatgacctggaaaccatgccagatgaccttctgaccacgttggatgacacttgtgatctctttgcccccctagtccaggagactaataagcagcccccccagacggtgaacccaattggccatctcccagaaagtttaacaaggttaacaggggtcctgtgctccattcacaacattttttttatttaggtgggggggggg

SEQ ID NO: 328326 - DNA, 828 bp, Homo sapiens
  misc_feature (20)..(20): n is a, c, g, or t
  misc_feature (775)..(777): n is a, c, g, or t
  misc_feature (784)..(784): n is a, c, g, or t
  misc_feature (787)..(788): n is a, c, g, or t
cggacgcgtgggtcgacccncgcgacaagatgtagttttctctgcgcgtgtgcgttttccctcctccccgccctcagggtccacggccaccatggcgtattaggggcagcagtgcctgcggcagcattggcctttgcagcggcggcagcagcaccaggctctgcagcggcaacccccagcggcttaagccatggcgcttctcacggcattcagcagcagcgttgctgtaaccgacaaagacaccttcgaattaagcacattcctcgattccagcaaagcaccgcaacatgaccgaaatgagcttcctgagcagcgaggtgttggtgggggacttgatgtcccccttcgaccagtcgggtttgggggctgaagaaagcctaggtctcttagatgattacctggaggtggccaagcacttcaaacctcatgggttctccagcgacaaggctaaggcgggctcctccgaatggctggctgtggatgggttggtcagtccctccaacaacagcaaggaggatgccttctccgggacagattggatgttggagaaaatggatttgaaggagttcgacttggatgccctgttgggtatagatgacctggaaaccatgccagatgaccttctgaccacgttggatgacacttgtgatctctttgcccccctagtccaggagactaataagcagcccccccagacggtgaacccaattggccatctcccagaaagtttaacaattcactcttacactctccttcccagggtctgtctcatcannnatcttantannctggcggaagggatacggaggatgagcagcaagtagtgcg

SEQ ID NO: 328327 - DNA, 1119 bp, Homo sapiens
  misc_feature (20)..(20): n is a, c, g, or t
cggacgcgtgggtcgacccncgcgacaagatgtagttttctctgcgcgtgtgcgttttccctcctccccgccctcagggtccacggccaccatggcgtattaggggcagcagtgcctgcggcagcattggcctttgcagcggcggcagcagcaccaggctctgcagcggcaacccccagcggcttaagccatggcgcttctcacggcattcagcagcagcgttgctgtaaccgacaaagacaccttcgaattaagcacattcctcgattccagcaaagcaccgcaacatgaccgaaatgagcttcctgagcagcgaggtgttggtgggggacttgatgtcccccttcgaccagtcgggtttgggggctgaagaaagcctaggtctcttagatgattacctggaggtggccaagcacttcaaacctcatgggttctccagcgacaaggctaaggcgggctcctccgaatggctggctgtggatgggttggtcagtccctccaacaacagcaaggaggatgccttctccgggacagattggatgttggagaaaatggatttgaaggagttcgacttggatgccctgttgggtatagatgacctggaaaccatgccagatgaccttctgaccacgttggatgacacttgtgatctctttgcccccctagtccaggtctcctcagcacagcccctctaccaggggctctccaaataggagcctcccatctccaggtgttctctgtgggtctgcccgtcccaaaccttacgatcctcctggagagaagatggtagcagcaaaagtaaagggtgagaaactggataagaagctgaaaaaaatggagcaaaacaagacagcagccactaggtaccgccagaagaagagggcggagcaggaggctcttactggtgagtgcaaagagctggaaaagaagaacgaggctctaaaagagagggcggattccctggccaaggagatccagtacctgaaagatttgatagaagaggtccgcaaggcaagggggaagaaaagggtcccctagttgaggatagtcaggagcgtcaatgtgcttgtacatagagtgctgtagctgtgtgttccaataaattattttgtagggaaa

SEQ ID NO: 328328 - DNA, 909 bp, Homo sapiens
  misc_feature (20)..(20): n is a, c, g, or t
cggacgcgtgggtcgacccncgcgacaagatgtagttttctctgcgcgtgtgcgttttccctcctccccgccctcagggtccacggccaccatggcgtattaggggcagcagtgcctgcggcagcattggcctttgcagcggcggcagcagcaccaggctctgcagcggcaacccccagcggcttaagccatggcgcttctcacggcattcagcagcagcgttgctgtaaccgacaaagacaccttcgaattaagcacattcctcgattccagcaaagcaccgcaacatgaccgaaatgagcttcctgagcagcgaggtgttggtgggggacttgatgtcccccttcgaccagtcgggtttgggggctgaagaaagcctaggtctcttagatgattacctggaggtggccaagcacttcaaacctcatgggttctccagcgacaaggctaaggcgggctcctccgaatggctggctgtggatgggttggtcagtccctccaacaacagcaaggaggatgccttctccgggacagattggatgttggagaaaatggatttgaaggagttcgacttggatgccctgttgggtatagatgacctggaaaccatgccagaacccgaccaggttgcccccttcaccttcttacaacctcttcccctttccccaggggtcctgtcctccactccagatcattcctttagtttagagctgaaagaagaacgaggctctaaaagagagggcggattccctggccaaggagatccagtacctgaaagatttgatagaagaggtccgcaaggcaagggggaagaaaagggtcccctagttgaggatagtcaggagcgtcaatgtgcttgtacatagagtgctgtagctgtgtgttccaataaattattttgtagggaaa

SEQ ID NO: 328329 - DNA, 811 bp, Homo sapiens
  misc_feature (20)..(20): n is a, c, g, or t
cggacgcgtgggtcgacccncgcgacaagatgtagttttctctgcgcgtgtgcgttttccctcctccccgccctcagggtccacggccaccatggcgtattaggggcagcagtgcctgcggcagcattggcctttgcagcggcggcagcagcaccaggctctgcagcggcaacccccagcggcttaagccatggcgcttctcacggcattcagcagcagcgttgctgtaaccgacaaagacaccttcgaattaagcacattcctcgattccagcaaagcaccgcaacatgaccgaaatgagcttcctgagcagcgaggtgttggtgggggacttgatgtcccccttcgaccagtcgggtttgggggctgaagaaagcctaggtctcttagatgattacctggaggtggccaagcacttcaaacctcatgggttctccagcgacaaggctaaggcgggctcctccgaatggctggctgtggatgggttggtcagtccctccaacaacagcaaggaggatgccttctccgggacagattggatgttggagaaaatggatttgaaggagttcgacttggatgccctgttgggtatagatgacctggaaaccatgccagaaagaagaacgaggctctaaaagagagggcggattccctggccaaggagatccagtacctgaaagatttgatagaagaggtccgcaaggcaagggggaagaaaagggtcccctagttgaggatagtcaggagcgtcaatgtgcttgtacatagagtgctgtagctgtgtgttccaataaattattttgtagggaaa

SEQ ID NO: 328330 - DNA, 751 bp, Homo sapiens
  misc_feature (20)..(20): n is a, c, g, or t
cggacgcgtgggtcgacccncgcgacaagatgtagttttctctgcgcgtgtgcgttttccctcctccccgccctcagggtccacggccaccatggcgtattaggggcagcagtgcctgcggcagcattggcctttgcagcggcggcagcagcaccaggctctgcagcggcaacccccagcggcttaagccatggcgcttctcacggcattcagcagcagcgttgctgtaaccgacaaagacaccttcgaattaagcacattcctcgattccagcaaagcaccgcaacatgaccgaaatgagcttcctgagcagcgaggtgttggtgggggacttgatgtcccccttcgaccagtcgggtttgggggctgaagaaagcctaggtctcttagatgattacctggaggtggccaagcacttcaaacctcatgggttctccagcgacaaggctaaggcgggctcctccgaatggctggctgtggatgggttggtcagtccctccaacaacagcaaggaggatgccttctccgggacagattggatgttggagaaaatggatttgaaggagttctatccgacccctcgtcggtttatctacctcgctacccctcactagcccctgctctccactcatcgctcccctaacttcttcattgttctccctactccgtcacgtacctaactgccttttcattcgcgccctcacttccctctcctcccccagcacatctaactcttccgctctccttccct

SEQ ID NO: 328331 - DNA, 484 bp, Homo sapiens
aacattagggctaggtacgaggcctgggtggtggaagatgtagttttctctgcgcgtgtgcgttttccctcctccccgccctcagggtccacggccaccatggcgtattaggggcagcagtgcctgcggcagcattggcctttgcagcggcggcagcagcaccaggctctgcagcggcaacccccagcggcttaagccatggcgcttctcacggcattcagcagcagcgttgctgtaaccgacaaagacaccttcgaattaagcacattcctcgattccagcaaagcaccgcaacatgaccgaaatgagcttcctgagcagcgaggtgttggtgggggactcgacgtatgcatttttgaataagctggggtatcacaagacggttaaaggcaggctaagggttcagcaccgaggaccttagtgagatctcggacaggtggttggccactggtgtattcactgatcaccatctgacgctatggac

SEQ ID NO: 328332 - DNA, 2353 bp, Homo sapiens
aacgacctttccccgcccactgcgctgacaccggaagcgaggcgtgtctgggagatcactccgcgctccggcggcgaaggaaagaacggactctgatcatagaagcctagtaaagtagtacacctctctcctttcgtgaggccataagaacaaactccttttctcgtcacagctacgccctgggcataaacggttggggcgtcaaagggagggagggaagggagcgggcgggaggagacggtcacgtggtcgcggcggaaggatgcgtctgtgctgcgtccccatagagacgaagtctataaagggccggcgggcggcacggcagccatttctactttgcccgcccacagatgtaaagatgtagttttctctgcgcgtgtgcgttttccctcctccccgccctcagggtccacggccaccatggcgtattaggggcagcagtgcctgcggcagcattggcctttgcagcggcggcagcagcaccaggctctgcagcggcaacccccagcggcttaagccatggcgtgagtaccggggcgggtcgtccagctgtgctcctggggccggcgcgggttttggattggtggggtgcggcctggggccagggcggtgccgccaagggggaagcgatttaacgagcgcccgggacgcgtggtctttgcttgggtgtccccgagacgctcgcgtgcctgggatcgggaaagcgtagtcgggtgcccggactgcttccccaggagccctacagccctcggaccccgagccccgcaagggtcccaggggtcttggctgttgccccacgaaacgtggcaggaaccaagatggcggcggcagggcggcggcgcgggcgtgagtcaagggcgggcggtgggcggggcgcggccgctggccgtatttggacgtggggacggagcgctttcctcttggcggccggtggaagaatcccctggtctccgtgagcgtccattttgtggaacctgagttgcaagcagggaggggcaaatacaactgccctgttcccgattctctagatggccgatctagagaagtcccgcctcataagtggaaggatgaaattctcagaacagctaacctctaatgggagttggcttctgattctcattcaggcttctcacggcattcagcagcagcgttgctgtaaccgacaaagacaccttcgaattaagcacattcctcgattccagcaaagcaccgcaacatgaccgaaatgagcttcctgagcagcgaggtgttggtgggggacttgatgtcccccttcgaccagtcgggtttgggggctgaagaaagcctaggtctcttagatgattacctggaggtggccaagcacttcaaacctcatgggttctccagcgacaaggctaaggcgggctcctccgaatggctggctgtggatgggttggtcagtccctccaacaacagcaaggaggatgccttctccgggacagattggatgttggagaaaatggatttgaaggagttcgacttggatgccctgttgggtatagatgacctggaaaccatgccagatgaccttctgaccacgttggatgacacttgtgatctctttgcccccctagtccaggagactaataagcagcccccccagacggtgaacccaattggccatctcccagaaagtttaacaaaacccgaccaggttgcccccttcaccttcttacaacctcttcccctttccccaggggtcctgtcctccactccagatcattcctttagtttagagctgggcagtgaagtggatatcactgaaggagataggaagccagactacactgcttacgttgccatgatccctcagtgcataaaggaggaagacaccccttcagataatgatagtggcatctgtatgagcccagagtcctatctggggtctcctcagcacagcccctctaccaggggctctccaaataggagcctcccatctccaggtgttctctgtgggtctgcccgtcccaaaccttacgatcctcctggagagaagatggtagcagcaaaagtaaagggtgagaaactggataagaagctgaaaaaaatggagcaaaacaagacagcagccactaggtaccgccagaagaagagggcggagcaggaggctcttactggtgagtgcaaagagctggaaaagaagaacgaggctctaaaagagagggcggattccctggccaaggagatccagtacctgaaagatttgatagaagaggtccgcaaggcaagggggaagaaaagggtcccctagttgaggatagtcaggagcgtcaatgtgcttgtacatagagtgctgtagctgtgtgttccaataaattattttgtagggaaa

SEQ ID NO: 328333 - DNA, 554 bp, Homo sapiens
gctgtcccctccagtccatccttagttaaaaggcagtaattggtatccctaaggagataggagccaggtccctgcttcggttgccatgacccccagggcaaaaggtgtctcctcagcacagcccctctaccaggggctctccaaataggagcctcccatctccaggtgttctctgtgggtctgcccgtcccaaaccttacgatcctcctggagagaagatggtagcagcaaaagtaaagggtgagaaactggataagaagctgaaaaaaatggagcaaaacaagacagcagccactaggtaccgccagaagaagagggcggagcaggaggctcttactggtgagtgcaaagagctggaaaagaagaacgaggctctaaaagagagggcggattccctggccaaggagatccagtacctgaaagatttgatagaagaggtccgcaaggcaagggggaagaaaagggtcccctagttgaggatagtcaggagcgtcaatgtgcttgtacatagagtgctgtagctgtgtgttccaataaattattttgtagggaaa

SEQ ID NO: 328334 - DNA, 1432 bp, Homo sapiens
aacattagggctaggtacgaggcctgggtggtggaagatgtagttttctctgcgcgtgtgcgttttccctcctccccgccctcagggtccacggccaccatggcgtattaggggcagcagtgcctgcggcagcattggcctttgcagcggcggcagcagcaccaggctctgcagcggcaacccccagcggcttaagccatggcgcttctcacggcattcagcagcagcgttgctgtaaccgacaaagacaccttcgaattaagcacattcctcgattccagcaaagcaccgcaacatgaccgaaatgagcttcctgagcagcgaggtgttggtgggggacttgatgtcccccttcgaccagtcgggtttgggggctgaagaaagcctaggtctcttagatgattacctggaggtggccaagcacttcaaacctcatgggttctccagcgacaaggctaaggcgggctcctccgaatggctggctgtggatgggttggtcagtccctccaacaacagcaaggaggatgccttctccgggacagattggatgttggagaaaatggatttgaaggagttcgacttggatgccctgttgggtatagatgacctggaaaccatgccagatgaccttctgaccacgttggatgacacttgtgatctctttgcccccctagtccaggagactaataagcagcccccccagacggtgaacccaattggccatctcccagaaagtttaacaaaacccgaccaggttgcccccttcaccttcttacaacctcttcccctttccccaggggtcctgtcctccactccagatcattcctttagtttagagctgggcagtgaagtggatatcactgaaggagataggaagccagactacactgcttacgttgccatgatccctcagtgcataaaggaggaagacaccccttcagataatgatagtggcatctgtatgagcccagagtcctatctggggtctcctcagcacagcccctctaccaggggctctccaaataggagcctcccatctccaggtgttctctgtgggtctgcccgtcccaaaccttacgatcctcctggagagaagatggtagcagcaaaagtaaagggtgagaaactggataagaagctgaaaaaaatggagcaaaacaagacagcagccactaggtaccgccagaagaagagggcggagcaggaggctcttactggtgagtgcaaagagctggaaaagaagaacgaggctctaaaagagagggcggattccctggccaaggagatccagtacctgaaagatttgatagaagaggtccgcaaggcaagggggaagaaaagggtcccctagttgaggatagtcaggagcgtcaatgtgcttgtacatagagtgctgtagctgtgtgttccaataaattattttgtagggaaa

SEQ ID NO: 328335 - DNA, 1445 bp, Homo sapiens
ccccgcggacgccaactaaggctaggtagcgaggcctgggtgtacacaagatgtagttttctctgcgcgtgtgcgttttccctcctccccgccctcagggtccacggccaccatggcgtattaggggcagcagtgcctgcggcagcattggcctttgcagcggcggcagcagcaccaggctctgcagcggcaacccccagcggcttaagccatggcgcttctcacggcattcagcagcagcgttgctgtaaccgacaaagacaccttcgaattaagcacattcctcgattccagcaaagcaccgcaacatgaccgaaatgagcttcctgagcagcgaggtgttggtgggggacttgatgtcccccttcgaccagtcgggtttgggggctgaagaaagcctaggtctcttagatgattacctggaggtggccaagcacttcaaacctcatgggttctccagcgacaaggctaaggcgggctcctccgaatggctggctgtggatgggttggtcagtccctccaacaacagcaaggaggatgccttctccgggacagattggatgttggagaaaatggatttgaaggagttcgacttggatgccctgttgggtatagatgacctggaaaccatgccagatgaccttctgaccacgttggatgacacttgtgatctctttgcccccctagtccaggagactaataagcagcccccccagacggtgaacccaattggccatctcccagaaagtttaacaaaacccgaccaggttgcccccttcaccttcttacaacctcttcccctttccccaggggtcctgtcctccactccagatcattcctttagtttagagctgggcagtgaagtggatatcactgaaggagataggaagccagactacactgcttacgttgccatgatccctcagtgcataaaggaggaagacaccccttcagataatgatagtggcatctgtatgagcccagagtcctatctggggtctcctcagcacagcccctctaccaggggctctccaaataggagcctcccatctccaggtgttctctgtgggtctgcccgtcccaaaccttacgatcctcctggagagaagatggtagcagcaaaagtaaagggtgagaaactggataagaagctgaaaaaaatggagcaaaacaagacagcagccactaggtaccgccagaagaagagggcggagcaggaggctcttactggtgagtgcaaagagctggaaaagaagaacgaggctctaaaagagagggcggattccctggccaaggagatccagtacctgaaagatttgatagaagaggtccgcaaggcaagggggaagaaaagggtcccctagttgaggatagtcaggagcgtcaatgtgcttgtacatagagtgctgtagctgtgtgttccaataaattattttgtagggaaa

SEQ ID NO: 328336 - DNA, 1424 bp, Homo sapiens
  misc_feature (20)..(20): n is a, c, g, or t
cggacgcgtgggtcgacccncgcgacaagatgtagttttctctgcgcgtgtgcgttttccctcctccccgccctcagggtccacggccaccatggcgtattaggggcagcagtgcctgcggcagcattggcctttgcagcggcggcagcagcaccaggctctgcagcggcaacccccagcggcttaagccatggcgcttctcacggcattcagcagcagcgttgctgtaaccgacaaagacaccttcgaattaagcacattcctcgattccagcaaagcaccgcaacatgaccgaaatgagcttcctgagcagcgaggtgttggtgggggacttgatgtcccccttcgaccagtcgggtttgggggctgaagaaagcctaggtctcttagatgattacctggaggtggccaagcacttcaaacctcatgggttctccagcgacaaggctaaggcgggctcctccgaatggctggctgtggatgggttggtcagtccctccaacaacagcaaggaggatgccttctccgggacagattggatgttggagaaaatggatttgaaggagttcgacttggatgccctgttgggtatagatgacctggaaaccatgccagatgaccttctgaccacgttggatgacacttgtgatctctttgcccccctagtccaggagactaataagcagcccccccagacggtgaacccaattggccatctcccagaaagtttaacaaaacccgaccaggttgcccccttcaccttcttacaacctcttcccctttccccaggggtcctgtcctccactccagatcattcctttagtttagagctgggcagtgaagtggatatcactgaaggagataggaagccagactacactgcttacgttgccatgatccctcagtgcataaaggaggaagacaccccttcagataatgatagtggcatctgtatgagcccagagtcctatctggggtctcctcagcacagcccctctaccaggggctctccaaataggagcctcccatctccaggtgttctctgtgggtctgcccgtcccaaaccttacgatcctcctggagagaagatggtagcagcaaaagtaaagggtgagaaactggataagaagctgaaaaaaatggagcaaaacaagacagcagccactaggtaccgccagaagaagagggcggagcaggaggctcttactggtgagtgcaaagagctggaaaagaagaacgaggctctaaaagagagggcggattccctggccaaggagatccagtacctgaaagatttgatagaagaggtccgcaaggcaagggggaagaaaagggtcccctagttgaggatagtcaggagcgtcaatgtgcttgtacatagagtgctgtagctgtgtgttccaataaattattttgtagggaaa

SEQ ID NO: 328337 - DNA, 1902 bp, Homo sapiens
  misc_feature (10)..(10): n is a, c, g, or t
  misc_feature (14)..(14): n is a, c, g, or t
  misc_feature (1470)..(1470): n is a, c, g, or t
aaaaagaganaaantaaggctaggtacgaggctgggtgttgaatcggccgaggaagatgtagttttctctgcgcgtgtgcgttttccctcctccccgccctcagggtccacggccaccatggcgtattaggggcagcagtgcctgcggcagcattggcctttgcagcggcggcagcagcaccaggctctgcagcggcaacccccagcggcttaagccatggcgcttctcacggcattcagcagcagcgttgctgtaaccgacaaagacaccttcgaattaagcacattcctcgattccagcaaagcaccgcaacatgaccgaaatgagcttcctgagcagcgaggtgttggtgggggacttgatgtcccccttcgaccagtcgggtttgggggctgaagaaagcctaggtctcttagatgattacctggaggtggccaagcacttcaaacctcatgggttctccagcgacaaggctaaggcgggctcctccgaatggctggctgtggatgggttggtcagtccctccaacaacagcaaggaggatgccttctccgggacagattggatgttggagaaaatggatttgaaggagttcgacttggatgccctgttgggtatagatgacctggaaaccatgccagatgaccttctgaccacgttggatgacacttgtgatctctttgcccccctagtccaggagactaataagcagcccccccagacggtgaacccaattggccatctcccagaaagtttaacaaaacccgaccaggttgcccccttcaccttcttacaacctcttcccctttccccaggggtcctgtcctccactccagatcattcctttagtttagagctgggcagtgaagtggatatcactgaaggagataggaagccagactacactgcttacgttgccatgatccctcagtgcataaaggaggaagacaccccttcagataatgatagtggcatctgtatgagcccagagtcctatctggggtctcctcagcacagcccctctaccaggggctctccaaataggagcctcccatctccaggtgttctctgtgggtctgcccgtcccaaaccttacgatcctcctggagagaagatggtagcagcaaaagtaaagggtgagaaactggataagaagctgaaaaaaatggagcaaaacaagacagcagccactaggtaccgccagaagaagagggcggagcaggaggctcttactggtgagtgcaaagagctggaaaagaagaacgaggctctaaaagagagggcggattccctggccaaggagatccagtacctgaaagatttgatagaagaggtccgcaaggcaagggggaagaaaagggtcccctagttgaggatagtcaggagcgtcaatgtgcttgtacatagagtgctgtagctgtgtgttccaataaattattttgtagggaaaaaaaaaaaaaaaagaaaanaaaaaaaaaaaaaaaagaaaggagggggggcgcgggcgcagacaaattatctcgctcctacgcggcggcggccaaccacaatccccacgccccccccctctttttatctaaaggggaggcggcgccccacatgagtggggtcgctgtattatactagagaacggagcgcgggagggcggctgctaattaaatataaatcaacaatctattatcgagtgagagagagacacacaacccacgatccccgatgaggattgtaactcttatgtagaaagaaaacacccccctcctatctcttattgcgggggtgagagaacacacagcattgattgtgtaggatcattcacttcttttcactgtaagatatatattattatctggcggcaggctgagataaaacataaacactatcgagcaagacgcggcgaggtg

SEQ ID NO: 328338 - DNA, 1545 bp, Homo sapiens
  misc_feature (10)..(10): n is a, c, g, or t
  misc_feature (14)..(14): n is a, c, g, or t
aaaaagaganaaantaaggctaggtacgaggctgggtgttgaatcggccgaggaagatgtagttttctctgcgcgtgtgcgttttccctcctccccgccctcagggtccacggccaccatggcgtattaggggcagcagtgcctgcggcagcattggcctttgcagcggcggcagcagcaccaggctctgcagcggcaacccccagcggcttaagccatggcgcttctcacggcattcagcagcagcgttgctgtaaccgacaaagacaccttcgaattaagcacattcctcgattccagcaaagcaccgcaacatgaccgaaatgagcttcctgagcagcgaggtgttggtgggggacttgatgtcccccttcgaccagtcgggtttgggggctgaagaaagcctaggtctcttagatgattacctggaggtggccaagcacttcaaacctcatgggttctccagcgacaaggctaaggcgggctcctccgaatggctggctgtggatgggttggtcagtccctccaacaacagcaaggaggatgccttctccgggacagattggatgttggagaaaatggatttgaaggagttcgacttggatgccctgttgggtatagatgacctggaaaccatgccagatgaccttctgaccacgttggatgacacttgtgatctctttgcccccctagtccaggagactaataagcagcccccccagacggtgaacccaattggccatctcccagaaagtttaacaaaacccgaccaggttgcccccttcaccttcttacaacctcttcccctttccccaggggtcctgtcctccactccagatcattcctttagtttagagctgggcagtgaagtggatatcactgaaggagataggaagccagactacactgcttacgttgccatgatccctcagtgcataaaggaggaagacaccccttcagataatgatagtggcatctgtatgagcccagagtcctatctggggtctcctcagcacagcccctctaccaggggctctccaaataggagcctcccatctccaggtgttctctgtgggtctgcccgtcccaaaccttacgatcctcctggagagaagatggtagcagcaaaagtaaagggtgagaaactggataagaagctgaaaaaaatggagcaaaacaagacagcagccactaggtaccgccagaagaagagggcggagcaggaggctcttactggtgagtgcaaagagctggaaaagaagaacgaggctctaaaagagagggcggattccctggccaaggagatccagtacctgaaagatttgatagaagaggtccgcaaggcaagggggaagaaaagggtcccctagttgaggatagtcaggagcgtcaatgtgcttgtacatagagtgctgtagctgtgtgttccaataaattattttgtagggaaacgacgccgggggtccaataaatcaccctgccgggacacacaaacaacaacaaaacaaacaatgggggggccgcccgaagaattaacacacctgg

SEQ ID NO: 328339 - DNA, 1350 bp, Homo sapiens
  misc_feature (10)..(10): n is a, c, g, or t
  misc_feature (14)..(14): n is a, c, g, or t
aaaaagaganaaantaaggctaggtacgaggctgggtgttgaatcggccgaggaagatgtagttttctctgcgcgtgtgcgttttccctcctccccgccctcagggtccacggccaccatggcgtattaggggcagcagtgcctgcggcagcattggcctttgcagcggcggcagcagcaccaggctctgcagcggcaacccccagcggcttaagccatggcgcttctcacggcattcagcagcagcgttgctgtaaccgacaaagacaccttcgaattaagcacattcctcgattccagcaaagcaccgcaacatgaccgaaatgagcttcctgagcagcgaggtgttggtgggggacttgatgtcccccttcgaccagtcgggtttgggggctgaagaaagcctaggtctcttagatgattacctggaggtggccaagcacttcaaacctcatgggttctccagcgacaaggctaaggcgggctcctccgaatggctggctgtggatgggttggtcagtccctccaacaacagcaaggaggatgccttctccgggacagattggatgttggagaaaatggatttgaaggagttcgacttggatgccctgttgggtatagatgacctggaaaccatgccagatgaccttctgaccacgttggatgacacttgtgatctctttgcccccctagtccaggagactaataagcagcccccccagacggtgaacccaattggccatctcccagaaagtttaacaaaacccgaccaggttgcccccttcaccttcttacaacctcttcccctttccccaggggtcctgtcctccactccagatcattcctttagtttagagctgggcagtgaagtggatatcactgaaggagataggaagccagactacactgcttacgttgccatgatccctcagtgcataaaggaggaagacaccccttcagataatgatagtggcatctgtatgagcccagagtcctatctggggtctcctcagcacagcccctctaccaggggctctccaaataggagcctcccatctccaggtgttctctgtgggtctgcccgtcccaaaccttacgatcctcctggagagaagatggtagcagcaaaagtaaagggtgagaaactggataagaagctgaaaaaaatggagcaaaacaagacagcagccactaggtaccgccagaagaagagggcggagcaggaggctcttactggtgagtgcaaagagctggaaaagaagaacgaggctctaaaagagagggcggattccctggccaaggagatccagtttctcaccctttacttttgctgctaccatcttctctcca

SEQ ID NO: 328340 - DNA, 1192 bp, Homo sapiens
  misc_feature (10)..(10): n is a, c, g, or t
  misc_feature (14)..(14): n is a, c, g, or t
  misc_feature (1162)..(1162): n is a, c, g, or t
aaaaagaganaaantaaggctaggtacgaggctgggtgttgaatcggccgaggaagatgtagttttctctgcgcgtgtgcgttttccctcctccccgccctcagggtccacggccaccatggcgtattaggggcagcagtgcctgcggcagcattggcctttgcagcggcggcagcagcaccaggctctgcagcggcaacccccagcggcttaagccatggcgcttctcacggcattcagcagcagcgttgctgtaaccgacaaagacaccttcgaattaagcacattcctcgattccagcaaagcaccgcaacatgaccgaaatgagcttcctgagcagcgaggtgttggtgggggacttgatgtcccccttcgaccagtcgggtttgggggctgaagaaagcctaggtctcttagatgattacctggaggtggccaagcacttcaaacctcatgggttctccagcgacaaggctaaggcgggctcctccgaatggctggctgtggatgggttggtcagtccctccaacaacagcaaggaggatgccttctccgggacagattggatgttggagaaaatggatttgaaggagttcgacttggatgccctgttgggtatagatgacctggaaaccatgccagatgaccttctgaccacgttggatgacacttgtgatctctttgcccccctagtccaggagactaataagcagcccccccagacggtgaacccaattggccatctcccagaaagtttaacaaaacccgaccaggttgcccccttcaccttcttacaacctcttcccctttccccaggggtcctgtcctccactccagatcattcctttagtttagagctgggcagtgaagtggatatcactgaaggagataggaagccagactacactgcttacgttgccatgatccctcagtgcataaaggaggaagacaccccttcagataatgatagtggcatctgtatgagcccagagtcctatctggggtctcctcagcacagcccctctaccaggggctctccaaataggagcctcccatctccaggtgttctctgtgggtctgcccgtcccaaaccttacgatcctcctggagagaagatggtagcagcaaaagtaaagggtgagaaactggataagaagctacnttcgcgaggggatcctcatagagtcagccg

SEQ ID NO: 328341 - DNA, 1279 bp, Homo sapiens
  misc_feature (10)..(10): n is a, c, g, or t
  misc_feature (14)..(14): n is a, c, g, or t
aaaaagaganaaantaaggctaggtacgaggctgggtgttgaatcggccgaggaagatgtagttttctctgcgcgtgtgcgttttccctcctccccgccctcagggtccacggccaccatggcgtattaggggcagcagtgcctgcggcagcattggcctttgcagcggcggcagcagcaccaggctctgcagcggcaacccccagcggcttaagccatggcgcttctcacggcattcagcagcagcgttgctgtaaccgacaaagacaccttcgaattaagcacattcctcgattccagcaaagcaccgcaacatgaccgaaatgagcttcctgagcagcgaggtgttggtgggggacttgatgtcccccttcgaccagtcgggtttgggggctgaagaaagcctaggtctcttagatgattacctggaggtggccaagcacttcaaacctcatgggttctccagcgacaaggctaaggcgggctcctccgaatggctggctgtggatgggttggtcagtccctccaacaacagcaaggaggatgccttctccgggacagattggatgttggagaaaatggatttgaaggagttcgacttggatgccctgttgggtatagatgacctggaaaccatgccagatgaccttctgaccacgttggatgacacttgtgatctctttgcccccctagtccaggagactaataagcagcccccccagacggtgaacccaattggccatctcccagaaagtttaacaaaacccgaccaggttgcccccttcaccttcttacaacctcttcccctttccccaggggtcctgtcctccactccagatcattcctttagtttagagctgggcagtgaagtggatatcactgaaggagataggaagccagactacactgcttacgttgccatgatccctcagtgcataaaggaggaagacaccccttcagataatgatagtggcatctgtatgagcccagagtcctatctggggtctcctcagcacagcccctctaccaggggctctccaaataggagcctcccatctccaggtgttctctgtgggtctgcccgtcccaaaccttacgatcctcctgagacccgggaaaaagggccgcacgagggcgaggctaaccggaaagggaacgagggcaagaccaaaagggaaaggtcgcgggacacgcgagaaaggaaaggggcgcgagacacacaaaaggagaggcacggcaggggggccgcgtaaagagcgccgcgggcgcggatagggga

SEQ ID NO: 328342 - DNA, 2032 bp, Homo sapiens
aacattagggctaggtacgaggcctgggtggtggaagatgtagttttctctgcgcgtgtgcgttttccctcctccccgccctcagggtccacggccaccatggcgtattaggggcagcagtgcctgcggcagcattggcctttgcagcggcggcagcagcaccaggctctgcagcggcaacccccagcggcttaagccatggcgtgagtaccggggcgggtcgtccagctgtgctcctggggccggcgcgggttttggattggtggggtgcggcctggggccagggcggtgccgccaagggggaagcgatttaacgagcgcccgggacgcgtggtctttgcttgggtgtccccgagacgctcgcgtgcctgggatcgggaaagcgtagtcgggtgcccggactgcttccccaggagccctacagccctcggaccccgagccccgcaagggtcccaggggtcttggctgttgccccacgaaacgtggcaggaaccaagatggcggcggcagggcggcggcgcgggcgtgagtcaagggcgggcggtgggcggggcgcggccgctggccgtatttggacgtggggacggagcgctttcctcttggcggccggtggaagaatcccctggtctccgtgagcgtccattttgtggaacctgagttgcaagcagggaggggcaaatacaactgccctgttcccgattctctagatggccgatctagagaagtcccgcctcataagtggaaggatgaaattctcagaacagctaacctctaatgggagttggcttctgattctcattcaggcttctcacggcattcagcagcagcgttgctgtaaccgacaaagacaccttcgaattaagcacattcctcgattccagcaaagcaccgcaacatgaccgaaatgagcttcctgagcagcgaggtgttggtgggggacttgatgtcccccttcgaccagtcgggtttgggggctgaagaaagcctaggtctcttagatgattacctggaggtggccaagcacttcaaacctcatgggttctccagcgacaaggctaaggcgggctcctccgaatggctggctgtggatgggttggtcagtccctccaacaacagcaaggaggatgccttctccgggacagattggatgttggagaaaatggatttgaaggagttcgacttggatgccctgttgggtatagatgacctggaaaccatgccagatgaccttctgaccacgttggatgacacttgtgatctctttgcccccctagtccaggagactaataagcagcccccccagacggtgaacccaattggccatctcccagaaagtttaacaaaacccgaccaggttgcccccttcaccttcttacaacctcttcccctttccccaggggtcctgtcctccactccagatcattcctttagtttagagctgggcagtgaagtggatatcactgaaggagataggaagccagactacactgcttacgttgccatgatccctcagtgcataaaggaggaagacaccccttcagataatgatagtggcatctgtatgagcccagagtcctatctggggtctcctcagcacagcccctctaccaggggctctccaaataggagcctcccatctccaggtgttctctgtgggtctgcccgtcccaaaccttacgatcctcctggagagaagatggtagcagcaaaagtaaagggtgagaaactggataagaagctgaaaaaaatggagcaaaacaagacagcagccactaggtaccgccagaagaagagggcggagcaggaggctcttactggtgagtgcaaagagctggaaaagaagaacgaggctctaaaagagagggcggattccctggccaaggagatccagtacctgaaagatttgatagaagaggtccgcaaggcaagggggaagaaaagggtcccctagttgaggatagtcaggagcgtcaatgtgcttgtacatagagtgctgtagctgtgtgttccaataaattattttgtagggaaa

SEQ ID NO: 328343 - DNA, 1413 bp, Homo sapiens
aacattagggctaggtacgaggcctgggtggtggaagatgtagttttctctgcgcgtgtgcgttttccctcctccccgccctcagggtccacggccaccatggcgtattaggggcagcagtgcctgcggcagcattggcctttgcagcggcggcagcagcaccaggctctgcagcggcaacccccagcggcttaagccatggcagcagcgttgctgtaaccgacaaagacaccttcgaattaagcacattcctcgattccagcaaagcaccgcaacatgaccgaaatgagcttcctgagcagcgaggtgttggtgggggacttgatgtcccccttcgaccagtcgggtttgggggctgaagaaagcctaggtctcttagatgattacctggaggtggccaagcacttcaaacctcatgggttctccagcgacaaggctaaggcgggctcctccgaatggctggctgtggatgggttggtcagtccctccaacaacagcaaggaggatgccttctccgggacagattggatgttggagaaaatggatttgaaggagttcgacttggatgccctgttgggtatagatgacctggaaaccatgccagatgaccttctgaccacgttggatgacacttgtgatctctttgcccccctagtccaggagactaataagcagcccccccagacggtgaacccaattggccatctcccagaaagtttaacaaaacccgaccaggttgcccccttcaccttcttacaacctcttcccctttccccaggggtcctgtcctccactccagatcattcctttagtttagagctgggcagtgaagtggatatcactgaaggagataggaagccagactacactgcttacgttgccatgatccctcagtgcataaaggaggaagacaccccttcagataatgatagtggcatctgtatgagcccagagtcctatctggggtctcctcagcacagcccctctaccaggggctctccaaataggagcctcccatctccaggtgttctctgtgggtctgcccgtcccaaaccttacgatcctcctggagagaagatggtagcagcaaaagtaaagggtgagaaactggataagaagctgaaaaaaatggagcaaaacaagacagcagccactaggtaccgccagaagaagagggcggagcaggaggctcttactggtgagtgcaaagagctggaaaagaagaacgaggctctaaaagagagggcggattccctggccaaggagatccagtacctgaaagatttgatagaagaggtccgcaaggcaagggggaagaaaagggtcccctagttgaggatagtcaggagcgtcaatgtgcttgtacatagagtgctgtagctgtgtgttccaataaattattttgtagggaaa

SEQ ID NO: 328344 - DNA, 1161 bp, Homo sapiens
aacattagggctaggtacgaggcctgggtggtggtgagcttcctgagcagcgaggtgttggtgggggacttgatgtcccccttcgaccagtcgggtttgggggctgaagaaagcctaggtctcttagatgattacctggaggtggccaagcacttcaaacctcatgggttctccagcgacaaggctaaggcgggctcctccgaatggctggctgtggatgggttggtcagtccctccaacaacagcaaggaggatgccttctccgggacagattggatgttggagaaaatggatttgaaggagttcgacttggatgccctgttgggtatagatgacctggaaaccatgccagatgaccttctgaccacgttggatgacacttgtgatctctttgcccccctagtccaggagactaataagcagcccccccagacggtgaacccaattggccatctcccagaaagtttaacaaaacccgaccaggttgcccccttcaccttcttacaacctcttcccctttccccaggggtcctgtcctccactccagatcattcctttagtttagagctgggcagtgaagtggatatcactgaaggagataggaagccagactacactgcttacgttgccatgatccctcagtgcataaaggaggaagacaccccttcagataatgatagtggcatctgtatgagcccagagtcctatctggggtctcctcagcacagcccctctaccaggggctctccaaataggagcctcccatctccaggtgttctctgtgggtctgcccgtcccaaaccttacgatcctcctggagagaagatggtagcagcaaaagtaaagggtgagaaactggataagaagctgaaaaaaatggagcaaaacaagacagcagccactaggtaccgccagaagaagagggcggagcaggaggctcttactggtgagtgcaaagagctggaaaagaagaacgaggctctaaaagagagggcggattccctggccaaggagatccagtacctgaaagatttgatagaagaggtccgcaaggcaagggggaagaaaagggtcccctagttgaggatagtcaggagcgtcaatgtgcttgtacatagagtgctgtagctgtgtgttccaataaattattttgtagggaaa

SEQ ID NO: 328345 - DNA, 1377 bp, Homo sapiens
  misc_feature (20)..(20): n is a, c, g, or t
cggacgcgtgggtcgacccncgcgacaagatgtagttttctctgcgcgtgtgcgttttccctcctccccgccctcagggtccacggccaccatggcgtattaggggcagcagtgcctgcggcagcattggcctttgcagcggcggcagcagcaccaggctctgcagcggcaacccccagcggcttaagccatggcgcttctcacggcattcagcagcagcgttgctgtaaccgacaaagacaccttcgaattaagcacattcctcgattccagcaaagcaccgcaacatgaccgaaatgagcttcctgagcagcgaggtgttggtgggggacttgatgtcccccttcgaccagtcgggtttgggggctgaagaaagcctaggtctcttagatgattacctggaggtggccaagcacttcaaacctcatgggttctccagcgacaaggctaaggcgggctcctccgaatggctggctgtggatgggttggtcagtccctccaacaacagcaaggaggatgccttctccgggacagattggatgttggagaaaatggatttgaaggagttcgacttggatgccctgttgggtatagatgacctggaaaccatgccagatgaccttctgaccacgttggatgacacttgtgatctctttgcccccctagtccaggagactaataagcagcccccccagacggtgaacccaattggccatctcccagaaagtttaacaatccccaggggtcctgtcctccactccagatcattcctttagtttagagctgggcagtgaagtggatatcactgaaggagataggaagccagactacactgcttacgttgccatgatccctcagtgcataaaggaggaagacaccccttcagataatgatagtggcatctgtatgagcccagagtcctatctggggtctcctcagcacagcccctctaccaggggctctccaaataggagcctcccatctccaggtgttctctgtgggtctgcccgtcccaaaccttacgatcctcctggagagaagatggtagcagcaaaagtaaagggtgagaaactggataagaagctgaaaaaaatggagcaaaacaagacagcagccactaggtaccgccagaagaagagggcggagcaggaggctcttactggtgagtgcaaagagctggaaaagaagaacgaggctctaaaagagagggcggattccctggccaaggagatccagtacctgaaagatttgatagaagaggtccgcaaggcaagggggaagaaaagggtcccctagttgaggatagtcaggagcgtcaatgtgcttgtacatagagtgctgtagctgtgtgttccaataaattattttgtagggaaa

SEQ ID NO: 328346 - DNA, 1056 bp, Homo sapiens
  misc_feature (10)..(10): n is a, c, g, or t
  misc_feature (14)..(14): n is a, c, g, or t
aaaaagaganaaantaaggctaggtacgaggctgggtgttgaatcggccgaggaagatgtagttttctctgcgcgtgtgcgttttccctcctccccgccctcagggtccacggccaccatggcgtattaggggcagcagtgcctgcggcagcattggcctttgcagcggcggcagcagcaccaggctctgcagcggcaacccccagcggcttaagccatggcgcttctcacggcattcagcagcagcgttgctgtaaccgacaaagacaccttcgaattaagcacattcctcgattccagcaaagcaccgcaacatgaccgaaatgagcttcctgagcagcgaggtgttggtgggggacttgatgtcccccttcgaccagtcgggtttgggggctgaagaaagcctaggtctcttagatgattacctggaggtggccaagcacttcaaacctcatgggttctccagcgacaaggctaaggcgggctcctccgaatggctggctgtggatgggttggtcagtccctccaacaacagcaaggaggatgccttctccgggacagattggatgttggagaaaatggatttgaaggagttcgacttggatgccctgttgggtatagatgacctggaaaccatgccagatgaccttctgaccacgttggatgacacttgtgatctctttgcccccctagtccaggagactaataagcagcccccccagacggtgaacccaattggccatctcccagaaagtttaacaaaacccgaccaggttgcccccttcaccttcttacaacctcttcccctttccccaggggtcctgtcctccactccagatcattcctttagtttagagctgaaagaagaacgaggctctaaaagagagggcggattccctggccaaggagatccagtacctgaaagatttgatagaagaggtccgcaaggcaagggggaagaaaagggtcccctagttgaggatagtcaggagcgtcaatgtgcttgtacatagagtgctgtagctgtgtgttccaataaattattttgtagggaaa

SEQ ID NO: 328347 - DNA, 967 bp, Homo sapiens
  misc_feature (10)..(10): n is a, c, g, or t
  misc_feature (14)..(14): n is a, c, g, or t
aaaaagaganaaantaaggctaggtacgaggctgggtgttgaatcggccgaggaagatgtagttttctctgcgcgtgtgcgttttccctcctccccgccctcagggtccacggccaccatggcgtattaggggcagcagtgcctgcggcagcattggcctttgcagcggcggcagcagcaccaggctctgcagcggcaacccccagcggcttaagccatggcgcttctcacggcattcagcagcagcgttgctgtaaccgacaaagacaccttcgaattaagcacattcctcgattccagcaaagcaccgcaacatgaccgaaatgagcttcctgagcagcgaggtgttggtgggggacttgatgtcccccttcgaccagtcgggtttgggggctgaagaaagcctaggtctcttagatgattacctggaggtggccaagcacttcaaacctcatgggttctccagcgacaaggctaaggcgggctcctccgaatggctggctgtggatgggttggtcagtccctccaacaacagcaaggaggatgccttctccgggacagattggatgttggagaaaatggatttgaaggagttcgacttggatgccctgttgggtatagatgacctggaaaccatgccagatgaccttctgaccacgttggatgacacttgtgatctctttgcccccctagtccaggagactaataagcagcccccccagacggtgaacccaattggccatctcccagaaagtttaacaaaacccgaccaggttgcccccttcaccttcttacaacctcttcccctttggccaaggagatccagtacctgaaagatttgatagaagaggtccgcaaggcaagggggaagaaaagggtcccctagttgaggatagtcaggagcgtcaatgtgcttgtacatagagtgctgtagctgtgtgttccaataaattattttgtagggaaa

SEQ ID NO: 328348 - DNA, 1137 bp, Homo sapiens
  misc_feature (20)..(20): n is a, c, g, or t
cggacgcgtgggtcgacccncgcgacaagatgtagttttctctgcgcgtgtgcgttttccctcctccccgccctcagggtccacggccaccatggcgtattaggggcagcagtgcctgcggcagcattggcctttgcagcggcggcagcagcaccaggctctgcagcggcaacccccagcggcttaagccatggcgcttctcacggcattcagcagcagcgttgctgtaaccgacaaagacaccttcgaattaagcacattcctcgattccagcaaagcaccgcaacatgaccgaaatgagcttcctgagcagcgaggtgttggtgggggacttgatgtcccccttcgaccagtcgggtttgggggctgaagaaagcctaggtctcttagatgattacctggaggtggccaagcacttcaaacctcatgggttctccagcgacaaggctaaggcgggctcctccgaatggctggctgtggatgggttggtcagtccctccaacaacagcaaggaggatgccttctccgggacagattggatgttggagaaaatggatttgaaggagttcgacttggatgccctgttgggtatagatgacctggaaaccatgccagatgaccttctgaccacgttggatgacacttgtgatctctttgcccccctagtccaggagactaataagcagcccccccagacggtgaacccaattggccatctcccagaaagtttaacaactcccatctccaggtgttctctgtgggtctgcccgtcccaaaccttacgatcctcctggagagaagatggtagcagcaaaagtaaagggtgagaaactggataagaagctgaaaaaaatggagcaaaacaagacagcagccactaggtaccgccagaagaagagggcggagcaggaggctcttactggtgagtgcaaagagctggaaaagaagaacgaggctctaaaagagagggcggattccctggccaaggagatccagtacctgaaagatttgatagaagaggtccgcaaggcaagggggaagaaaagggtcccctagttgaggatagtcaggagcgtcaatgtgcttgtacatagagtgctgtagctgtgtgttccaataaattattttgtagggaaa

SEQ ID NO: 328349 - DNA, 794 bp, Homo sapiens
  misc_feature (20)..(20): n is a, c, g, or t
cggacgcgtgggtcgacccncgcgacaagatgtagttttctctgcgcgtgtgcgttttccctcctccccgccctcagggtccacggccaccatggcgtattaggggcagcagtgcctgcggcagcattggcctttgcagcggcggcagcagcaccaggctctgcagcggcaacccccagcggcttaagccatggcgcttctcacggcattcagcagcagcgttgctgtaaccgacaaagacaccttcgaattaagcacattcctcgattccagcaaagcaccgcaacatgaccgaaatgagcttcctgagcagcgaggtgttggtgggggacttgatgtcccccttcgaccagtcgggtttgggggctgaagaaagcctaggtctcttagatgattacctggaggtggccaagcacttcaaacctcatgggttctccagcgacaaggctaaggcgggctcctccgaatggctggctgtggatgggttggtcagtccctccaacaacagcaaggaggatgccttctccgggacagattggatgttggagaaaatggatttgaaggagttcgacttggatgccctgttgggtatagatgacctggaaaccatgccagatgaccttctgaccacgttggatgacacttgtgatctctttgcccccctagtccaggagactaataagcagcccccccagacggtgaacccaattggccatctcccagaaagtttaacaacgcgtgaacgaaggcccgagccagcttgccacagagtccttgccggggaacctctagag

SEQ ID NO: 328350 - DNA, 668 bp, Homo sapiens
  misc_feature (20)..(20): n is a, c, g, or t
cggacgcgtgggtcgacccncgcgacaagatgtagttttctctgcgcgtgtgcgttttccctcctccccgccctcagggtccacggccaccatggcgtattaggggcagcagtgcctgcggcagcattggcctttgcagcggcggcagcagcaccaggctctgcagcggcaacccccagcggcttaagccatggcgcttctcacggcattcagcagcagcgttgctgtaaccgacaaagacaccttcgaattaagcacattcctcgattccagcaaagcaccgcaacatgaccgaaatgagcttcctgagcagcgaggtgttggtgggggacttgatgtcccccttcgaccagtcgggtttgggggctgaagaaagcctaggtctcttagatgattacctggaggtggccaagcacttcaaacctcatgggttctccagcgacaaggctaaggcgggctcctccgaatggctggctgtggatgggttggtcagtccctccaacaacagcaaggaggatgccttctccgggacagattggatgttggagaaaatggatttgaaggagttcgacttggatgccctgttgggtatagatgacctggaaaccatgccagctatgctttcctctccatgaatgccttcttcatctgcccagtttctccttcct

SEQ ID NO: 328351 - DNA, 752 bp, Homo sapiens
agataaagtctgactatgttgcccaggctgatatctcactcctgggctcaagctatctgcaaaccagagcctcccaaagtgctaggattacagggcatgaaaacaaaaagtaaaatgatggttggaaaaaaatgaagagtttgactataaaatacattattagaacatgaaaaacatctgtgaaatgtttagtagagtacattgttacttaaagattacttacatgtgtctcctgtctgaccaactgtaaataggtgtaaacttttcttctaaagagaagataatataaatctagtttatttgaagaatgatgtataatgaaacattattaaatttgagtggtacttaagatacaaatccaagttgagaaaaacactggtaagaatgctattgaataaactactgacaaaaagagtccctggaaaattcattatattcttgttcctatctttaagagaacagggcacttccttaagagcacaggaatcagttcttcagacaaatatattcagatactccttgtgttattctccactagttccttccagaaggttttacctgaaatctctagtcgacaatctttgctgaaaatataattaatctatctcccatatttctgaactctaaagatttttgttctgatccttttaatcatgccagaaattgtaaagttatttttccaccatcatgcaatgaacatggcatcagaaaattagttcctagtctcctgagcagtcactcttctgctttgc

SEQ ID NO: 328352 - DNA, 125 bp, Homo sapiens
ccatgaggtagaattctaatataaaacgttcttggtaaatgatatcctatatgactctgaagttgtgatgatgatgatgatggtgatttctttataaggaaaggacaactttgttaaaaagcccc

SEQ ID NO: 328353 - DNA, 1374 bp, Homo sapiens
tatttcatgaagagggcggccttcgttttatttactggaccctccggccgtcatcctcgccaaggactttgcaatatatttttccgccttttctggaaggatttcgctgcttcccgaaggtcttggacgagcgctctagctctgtgggaaggttttgggctctctggctcggattttgcaatttctccctggggactgccgtggagccgcatccactgtggattataattgcaacatgacgctggaagagctcgtggcgtgcgacaacgcggcgcagaagatgcagacggtgaccgccgcggtggaggagcttttggtggccgctcagcgccaggatcgcctcacagtgggggtgtacgagtcggccaagttgatgaatgtggacccagacagcgtggtcctctgcctcttggccattgacgaggaggaggaggatgacatcgccctgcaaatccacttcacgctcatccagtccttctgctgtgacaacgacatcaacatcgtgcgggtgtcgggcatgcagcgcctggcgcagctcctgggagagccggccgagacccagggcaccaccgaggcccgagacctgcattgtctcctggtcacgaaccctcacacggacgcctggaagagccacggcttggtggaggtggccagctactgcgaagaaagccggggcaacaaccagtgggtcccctacatctctcttcaggaacgctgaggcccttcccagcagcagaatctgttgagttgctgccacaaacaaaaaatacaataaatatttgaaccccctcccccccagcacaacccccccaaaacaacccaacccacgaggaccatcgggggcagagtcgttggagactgaagaggaagaggaggaggagaaggggagtgagcggccgcccccagggcggagatccaggagctggcggccgccgatccgatggagaaggggggacccaggccagcaggagacaggacccccgaagctgaggccttgggatggagcagaagccggagtggcggggcacgctgccgccttccccatcacggagggtccagactgtccactcgggggtggagtgagactgactgcaagccccaccctccttgagactggagctggcgtctgcatacgagagacttggttgaacttggttggtccttgtctgcaccctcgacaagaccacactttgggacttgggagctggggctgaagttgctctgtacccatgaactcccagtttgcgaattatagagacaatctattttgttacttgcacttgttattcgaaccactgagagcgagatgggaagcatagatatctatatttttatttctactatgagggccttgtaataaatttctaaagcctc

SEQ ID NO: 328354 - DNA, 1244 bp, Homo sapiens
ctcagatcgccgaagcgtcggactaccgttggtttccgcaacttcctggattatcctcgccaaggactttgcaatatatttttccgccttttctggaaggatttcgctgcttcccgaaggtcttggacgagcgctctagctctgtgggaaggttttgggctctctggctcggattttgcaatttctccctggggactgccgtggagccgcatccactgtggattataattgcaacatgacgctggaagagctcgtggcgtgcgacaacgcggcgcagaagatgcagacggtgaccgccgcggtggaggagcttttggtggccgctcagcgccaggatcgcctcacagtgggggtgtacgagtcggccaagttgatgaatgtggacccagacagcgtggtcctctgcctcttggccattgacgaggaggaggaggatgacatcgccctgcaaatccacttcacgctcatccagtccttctgctgtgacaacgacatcaacatcgtgcgggtgtcgggcatgcagcgcctggcgcagctcctgggagagccggccgagacccagggcaccaccgaggcccgagacctgcattgtctcctggtcacgaaccctcacacggacgcctggaagagccacggcttggtggaggtggccagctactgcgaagaaagccggggcaacaaccagtgggtcccctacatctctcttcaggaacgctgaggcccttcccagcagcagaatctgttgagttgctgccacaaacaaaaaatacaataaatatttgaaccccctcccccccagcacaacccccccaaaacaacccaacccacgaggaccatcgggggcagagtcgttggagactgaagaggaagaggaggaggagaaggggagtgagcggccgctgccgccttccccatcacggagggtccagactgtccactcgggggtggagtgagactgactgcaagccccaccctccttgagactggagctggcgtctgcatacgagagacttggttgaacttggttggtccttgtctgcaccctcgacaagaccacactttgggacttgggagctggggctgaagttgctctgtacccatgaactcccagtttgcgaattatagagacaatctattttgttacttgcacttgttattcgaaccactgagagcgagatgggaagcatagatatctatatttttatttctactatgagggccttgtaataaatttctaaagcctc

SEQ ID NO: 328355 - DNA, 1607 bp, Homo sapiens
ctcagatcgccgaagcgtcggactaccgttggtttccgcaacttcctggattatcctcgccaaggactttgcaatatatttttccgccttttctggaaggatttcgctgcttcccgaaggtcttggacgagcgctctagctctgtgggaaggttttgggctctctggctcggattttgcaatttctccctggggactgccgtggagccgcatccactgtggattataattgcaacatgacgctggaagagctcgtggcgtgcgacaacgcggcgcagaagatgcagacggtgaccgccgcggtggaggagcttttggtggccgctcagcgccaggatcgcctcacagtgggggtgtacgagtcggccaagttgatgaatgtggacccagacagcgtggtcctctgcctcttggccattgacgaggaggaggaggatgacatcgccctgcaaatccacttcacgctcatccagtccttctgctgtgacaacgacatcaacatcgtgcgggtgtcgggcatgcagcgcctggcgcagctcctgggagagccggccgagacccagggcaccaccgaggcccgagacctgcattgtctcctggtcacgacggtgagtcgggcctctgccctgccccgccacgcccgggcacctgggccggtgtttgtcaacaaagtcgggctgactggtcctgcacagctcagcgctcagccacgtttggcatgtcccgtgggcagccgggctggggcctcctcacccaggaagctattttgagcctgactgttttccccacacaggggccccgggagagggaggctccactaaaccccttcttttccctcaaccctcacacggacgcctggaagagccacggcttggtggaggtggccagctactgcgaagaaagccggggcaacaaccagtgggtcccctacatctctcttcaggaacgctgaggcccttcccagcagcagaatctgttgagttgctgccacaaacaaaaaatacaataaatatttgaaccccctcccccccagcacaacccccccaaaacaacccaacccacgaggaccatcgggggcagagtcgttggagactgaagaggaagaggaggaggagaaggggagtgagcggccgcccccagggcggagatccaggagctggcggccgccgatccgatggagaaggggggacccaggccagcaggagacaggacccccgaagctgaggccttgggatggagcagaagccggagtggcggggcacgctgccgccttccccatcacggagggtccagactgtccactcgggggtggagtgagactgactgcaagccccaccctccttgagactggagctggcgtctgcatacgagagacttggttgaacttggttggtccttgtctgcaccctcgacaagaccacactttgggacttgggagctggggctgaagttgctctgtacccatgaactcccagtttgcgaattatagagacaatctattttgttacttgcacttgttattcgaaccactgagagcgagatgggaagcatagatatctatatttttatttctactatgagggccttgtaataaatttctaaagcctc

SEQ ID NO: 328356 - DNA, 1772 bp, Homo sapiens
ctcagatcgccgaagcgtcggactaccgttggtttccgcaacttcctggattatcctcgccaaggactttgcaatatatttttccgccttttctggaaggatttcgctgcttcccgaaggtcttggacgagcgctctagctctgtgggaaggttttgggctctctggctcggattttgcaatttctccctggggactgccgtggagccgcatccactgtggattataattgcaacatgacgctggaagagctcgtggcgtgcgacaacgcggcgcagaagatgcagacggtgaccgccgcggtggaggagcttttggtggccgctcagcgccaggatcgcctcacagtgggggtgtacgagtcggccaagttgatgaatgtgtgagtcagacccccttcccgggctgggcgcgggtgggacgggacctcccctccgctctggacgctttccgcacgcttgtcttgcatggagctgggacttccccaagtgccccccgctgtggatgcagagcttctctgccgttttgtggatcgggggctgccgtatcctgatgtatcgtctgcaaacacccctcccgccgtgggcctgtctccccctaccccatactttgaaccgtgtgccctcccctccccccaccgtcaccagcttgcagaggcaatcccctgcacccttgcagtttctcttttgctcttgcacgctccttttttgcaaactccccctgcacggtggcccctcccctgtccccggctgacccatccctaccctttggccccctcagggacccagacagcgtggtcctctgcctcttggccattgacgaggaggaggaggatgacatcgccctgcaaatccacttcacgctcatccagtccttctgctgtgacaacgacatcaacatcgtgcgggtgtcgggcatgcagcgcctggcgcagctcctgggagagccggccgagacccagggcaccaccgaggcccgagacctgcattgtctcctggtcacgaaccctcacacggacgcctggaagagccacggcttggtggaggtggccagctactgcgaagaaagccggggcaacaaccagtgggtcccctacatctctcttcaggaacgctgaggcccttcccagcagcagaatctgttgagttgctgccacaaacaaaaaatacaataaatatttgaaccccctcccccccagcacaacccccccaaaacaacccaacccacgaggaccatcgggggcagagtcgttggagactgaagaggaagaggaggaggagaaggggagtgagcggccgcccccagggcggagatccaggagctggcggccgccgatccgatggagaaggggggacccaggccagcaggagacaggacccccgaagctgaggccttgggatggagcagaagccggagtggcggggcacgctgccgccttccccatcacggagggtccagactgtccactcgggggtggagtgagactgactgcaagccccaccctccttgagactggagctggcgtctgcatacgagagacttggttgaacttggttggtccttgtctgcaccctcgacaagaccacactttgggacttgggagctggggctgaagttgctctgtacccatgaactcccagtttgcgaattatagagacaatctattttgttacttgcacttgttattcgaaccactgagagcgagatgggaagcatagatatctatatttttatttctactatgagggccttgtaataaatttctaaagcctc

SEQ ID NO: 328357 - DNA, 1450 bp, Homo sapiens
ctcagatcgccgaagcgtcggactaccgttggtttccgcaacttcctggattatcctcgccaaggactttgcaatatatttttccgccttttctggaaggatttcgctgcttcccgaaggtcttggacgagcgctctagctctgtgggaaggttttgggctctctggctcggattttgcaatttctccctggggactgccgtggagccgcatccactgtggattataattgcaacatgacgctggaagagctcgtggcgtgcgacaacgcggcgcagaagatgcagacggtgaccgccgcggtggaggagcttttggtggccgctcagcgccaggatcgcctcacagtgggggtgtacgagtcggccaagttgatgaatgtgtgagtcagacccccttcccgggctgggcgcgggtgggacgggacctcccctccgctctggacgctttccgcacgcttgtcttgcatggagctgggacttccccaagtgccccccgctgtggatgcagagcttctctgccgttttgtggatcgggggctgccgtatcctgatgtatcgtctgcaaacacccctcccgccgtgggcctgtctccccctaccccatactttgaaccgtgtgccctcccctccccccaccgtcaccagcttgcagaggcaatcccctgcacccttgcagtttaaccctcacacggacgcctggaagagccacggcttggtggaggtggccagctactgcgaagaaagccggggcaacaaccagtgggtcccctacatctctcttcaggaacgctgaggcccttcccagcagcagaatctgttgagttgctgccacaaacaaaaaatacaataaatatttgaaccccctcccccccagcacaacccccccaaaacaacccaacccacgaggaccatcgggggcagagtcgttggagactgaagaggaagaggaggaggagaaggggagtgagcggccgcccccagggcggagatccaggagctggcggccgccgatccgatggagaaggggggacccaggccagcaggagacaggacccccgaagctgaggccttgggatggagcagaagccggagtggcggggcacgctgccgccttccccatcacggagggtccagactgtccactcgggggtggagtgagactgactgcaagccccaccctccttgagactggagctggcgtctgcatacgagagacttggttgaacttggttggtccttgtctgcaccctcgacaagaccacactttgggacttgggagctggggctgaagttgctctgtacccatgaactcccagtttgcgaattatagagacaatctattttgttacttgcacttgttattcgaaccactgagagcgagatgggaagcatagatatctatatttttatttctactatgagggccttgtaataaatttctaaagcctc

SEQ ID NO: 328358 - DNA, 108 bp, Homo sapiens
atctatatttttatttctactatgagggccttgtaataaatttctaaagcctctggttgcttgtatgttttcggcttctagaacaactaggacccctgccccctcccc

SEQ ID NO: 328359 - DNA, 1374 bp, Homo sapiens
ctcagatcgccgaagcgtcggactaccgttggtttccgcaacttcctggattatcctcgccaaggactttgcaatatatttttccgccttttctggaaggatttcgctgcttcccgaaggtcttggacgagcgctctagctctgtgggaaggttttgggctctctggctcggattttgcaatttctccctggggactgccgtggagccgcatccactgtggattataattgcaacatgacgctggaagagctcgtggcgtgcgacaacgcggcgcagaagatgcagacggtgaccgccgcggtggaggagcttttggtggccgctcagcgccaggatcgcctcacagtgggggtgtacgagtcggccaagttgatgaatgtggacccagacagcgtggtcctctgcctcttggccattgacgaggaggaggaggatgacatcgccctgcaaatccacttcacgctcatccagtccttctgctgtgacaacgacatcaacatcgtgcgggtgtcgggcatgcagcgcctggcgcagctcctgggagagccggccgagacccagggcaccaccgaggcccgagacctgcattgtctcctggtcacgaaccctcacacggacgcctggaagagccacggcttggtggaggtggccagctactgcgaagaaagccggggcaacaaccagtgggtcccctacatctctcttcaggaacgctgaggcccttcccagcagcagaatctgttgagttgctgccacaaacaaaaaatacaataaatatttgaaccccctcccccccagcacaacccccccaaaacaacccaacccacgaggaccatcgggggcagagtcgttggagactgaagaggaagaggaggaggagaaggggagtgagcggccgcccccagggcggagatccaggagctggcggccgccgatccgatggagaaggggggacccaggccagcaggagacaggacccccgaagctgaggccttgggatggagcagaagccggagtggcggggcacgctgccgccttccccatcacggagggtccagactgtccactcgggggtggagtgagactgactgcaagccccaccctccttgagactggagctggcgtctgcatacgagagacttggttgaacttggttggtccttgtctgcaccctcgacaagaccacactttgggacttgggagctggggctgaagttgctctgtacccatgaactcccagtttgcgaattatagagacaatctattttgttacttgcacttgttattcgaaccactgagagcgagatgggaagcatagatatctatatttttatttctactatgagggccttgtaataaatttctaaagcctc

SEQ ID NO: 328360 - DNA, 1320 bp, Homo sapiens
ctcagatcgccgaagcgtcggactaccgttggtttccgcaacttcctggattatcctcgccaaggactttgcaatatatttttccgccttttctggaaggatttcgctgcttcccgaaggtcttggacgagcgctctagctctgtgggaaggttttgggctctctggctcggattttgcaatttctccctggggactgccgtggagccgcatccactgtggattataattgcaacatgacgctggaagagctcgtggcgtgcgacaacgcggcgcagaagatgcagacggtgaccgccgcggtggaggagcttttggtggccgctcagcgccaggatcgcctcacagtgggggtgtacgagtcggccaagttgatgaatgtggacccagacagcgtggtcctctgcctcttggccattgacgaggaggaggaggatgacatcgccctgcaaatccacttcacgctcatccagtccttctgctgtgacaacgacatcaacatcgtgcgggtgtcgggcatgcagcgcctggcgcagctcctgggagagccggccgagacccagggcaccaccgaggcccgagacctgcattgtctcctggtcacgaaccctcacacggacgcctggaagagccacggcttggtggaggtggccagctactgcgaagaaagccggggcaacaaccagtgggtcccctacatctctcttcaggaacgctgaggcccttcccagcagcagaatctgttgagttgctgccacaaacaaaaaatacaataaatatttgaaccccctcccccccagcacaacccccccggaagaggaggaggagaaggggagtgagcggccgcccccagggcggagatccaggagctggcggccgccgatccgatggagaaggggggacccaggccagcaggagacaggacccccgaagctgaggccttgggatggagcagaagccggagtggcggggcacgctgccgccttccccatcacggagggtccagactgtccactcgggggtggagtgagactgactgcaagccccaccctccttgagactggagctggcgtctgcatacgagagacttggttgaacttggttggtccttgtctgcaccctcgacaagaccacactttgggacttgggagctggggctgaagttgctctgtacccatgaactcccagtttgcgaattatagagacaatctattttgttacttgcacttgttattcgaaccactgagagcgagatgggaagcatagatatctatatttttatttctactatgagggccttgtaataaatttctaaagcctc

SEQ ID NO: 328361 - DNA, 1500 bp, Homo sapiens
ctcagatcgccgaagcgtcggactaccgttggtttccgcaacttcctggattatcctcgccaaggactttgcaatatatttttccgccttttctggaaggatttcgctgcttcccgaaggtcttggacgagcgctctagctctgtgggaaggttttgggctctctggctcggattttgcaatttctccctggggactgccgtggagccgcatccactgtggattataattgcaacatgacgctggaagagctcgtggcgtgcgacaacgcggcgcagaagtaagtagccggggctgccgccgcctgaggtcagccgggacgggatgggtcgggttgggccgggccgggagcggaacgtagcacccggtggtccgcccgtcactgatccctctttcctggtctcaggatgcagacggtgaccgccgcggtggaggagcttttggtggccgctcagcgccaggatcgcctcacagtgggggtgtacgagtcggccaagttgatgaatgtggacccagacagcgtggtcctctgcctcttggccattgacgaggaggaggaggatgacatcgccctgcaaatccacttcacgctcatccagtccttctgctgtgacaacgacatcaacatcgtgcgggtgtcgggcatgcagcgcctggcgcagctcctgggagagccggccgagacccagggcaccaccgaggcccgagacctgcattgtctcctggtcacgaaccctcacacggacgcctggaagagccacggcttggtggaggtggccagctactgcgaagaaagccggggcaacaaccagtgggtcccctacatctctcttcaggaacgctgaggcccttcccagcagcagaatctgttgagttgctgccacaaacaaaaaatacaataaatatttgaaccccctcccccccagcacaacccccccaaaacaacccaacccacgaggaccatcgggggcagagtcgttggagactgaagaggaagaggaggaggagaaggggagtgagcggccgcccccagggcggagatccaggagctggcggccgccgatccgatggagaaggggggacccaggccagcaggagacaggacccccgaagctgaggccttgggatggagcagaagccggagtggcggggcacgctgccgccttccccatcacggagggtccagactgtccactcgggggtggagtgagactgactgcaagccccaccctccttgagactggagctggcgtctgcatacgagagacttggttgaacttggttggtccttgtctgcaccctcgacaagaccacactttgggacttgggagctggggctgaagttgctctgtacccatgaactcccagtttgcgaattatagagacaatctattttgttacttgcacttgttattcgaaccactgagagcgagatgggaagcatagatatctatatttttatttctactatgagggccttgtaataaatttctaaagcctc

SEQ ID NO: 328362 - DNA, 2005 bp, Homo sapiens
ctcagatcgccgaagcgtcggactaccgttggtttccgcaacttcctggattatcctcgccaaggactttgcaatatatttttccgccttttctggaaggatttcgctgcttcccgaaggtcttggacgagcgctctagctctgtgggaaggttttgggctctctggctcggattttgcaatttctccctggggactgccgtggagccgcatccactgtggattataattgcaacatgacgctggaagagctcgtggcgtgcgacaacgcggcgcagaagatgcagacggtgaccgccgcggtggaggagcttttggtggccgctcagcgccaggatcgcctcacagtgggggtgtacgagtcggccaagttgatgaatgtgtgagtcagacccccttcccgggctgggcgcgggtgggacgggacctcccctccgctctggacgctttccgcacgcttgtcttgcatggagctgggacttccccaagtgccccccgctgtggatgcagagcttctctgccgttttgtggatcgggggctgccgtatcctgatgtatcgtctgcaaacacccctcccgccgtgggcctgtctccccctaccccatactttgaaccgtgtgccctcccctccccccaccgtcaccagcttgcagaggcaatcccctgcacccttgcagtttctcttttgctcttgcacgctccttttttgcaaactccccctgcacggtggcccctcccctgtccccggctgacccatccctaccctttggccccctcagggacccagacagcgtggtcctctgcctcttggccattgacgaggaggaggaggatgacatcgccctgcaaatccacttcacgctcatccagtccttctgctgtgacaacgacatcaacatcgtgcgggtgtcgggcatgcagcgcctggcgcagctcctgggagagccggccgagacccagggcaccaccgaggcccgagacctgcattgtctcctggtcacgacggtgagtcgggcctctgccctgccccgccacgcccgggcacctgggccggtgtttgtcaacaaagtcgggctgactggtcctgcacagctcagcgctcagccacgtttggcatgtcccgtgggcagccgggctggggcctcctcacccaggaagctattttgagcctgactgttttccccacacaggggccccgggagagggaggctccactaaaccccttcttttccctcaaccctcacacggacgcctggaagagccacggcttggtggaggtggccagctactgcgaagaaagccggggcaacaaccagtgggtcccctacatctctcttcaggaacgctgaggcccttcccagcagcagaatctgttgagttgctgccacaaacaaaaaatacaataaatatttgaaccccctcccccccagcacaacccccccaaaacaacccaacccacgaggaccatcgggggcagagtcgttggagactgaagaggaagaggaggaggagaaggggagtgagcggccgcccccagggcggagatccaggagctggcggccgccgatccgatggagaaggggggacccaggccagcaggagacaggacccccgaagctgaggccttgggatggagcagaagccggagtggcggggcacgctgccgccttccccatcacggagggtccagactgtccactcgggggtggagtgagactgactgcaagccccaccctccttgagactggagctggcgtctgcatacgagagacttggttgaacttggttggtccttgtctgcaccctcgacaagaccacactttgggacttgggagctggggctgaagttgctctgtacccatgaactcccagtttgcgaattatagagacaatctattttgttacttgcacttgttattcgaaccactgagagcgagatgggaagcatagatatctatatttttatttctactatgagggccttgtaataaatttctaaagcctc

SEQ ID NO: 328363 - DNA, 1002 bp, Homo sapiens
gaaatttttccgagggcctcggtacctcggacgccgggattcctgggccggtgtttgtcaacaaagtcgggctgactggtcctgcacagctcagcgctcagccacgtttggcatgtcccgtgggcagccgggctggggcctcctcacccaggaagctattttgagcctgactgttttccccacacaggggccccgggagagggaggctccactaaaccccttcttttccctcaaccctcacacggacgcctggaagagccacggcttggtggaggtggccagctactgcgaagaaagccggggcaacaaccagtgggtcccctacatctctcttcaggaacgctgaggcccttcccagcagcagaatctgttgagttgctgccacaaacaaaaaatacaataaatatttgaaccccctcccccccagcacaacccccccaaaacaacccaacccacgaggaccatcgggggcagagtcgttggagactgaagaggaagaggaggaggagaaggggagtgagcggccgcccccagggcggagatccaggagctggcggccgccgatccgatggagaaggggggacccaggccagcaggagacaggacccccgaagctgaggccttgggatggagcagaagccggagtggcggggcacgctgccgccttccccatcacggagggtccagactgtccactcgggggtggagtgagactgactgcaagccccaccctccttgagactggagctggcgtctgcatacgagagacttggttgaacttggttggtccttgtctgcaccctcgacaagaccacactttgggacttgggagctggggctgaagttgctctgtacccatgaactcccagtttgcgaattatagagacaatctattttgttacttgcacttgttattcgaaccactgagagcgagatgggaagcatagatatctatatttttatttctactatgagggccttgtaataaatttctaaagcctc

SEQ ID NO: 328364 - DNA, 674 bp, Homo sapiens
ggatggaaaggtgcaaaaatctatcaccagcaacagaaggtcagaatggcggcagcggagcatcgtcattcttcaggattgccctgctggccctacctcacagctgaaactttaaaaaacaggatgggccgccagccacctcctccaactcaacaacattctataactgataactccctgagcctcaagacacctcccgaatgtctccttcatccccttccaccctcagtggatgataatatcaaggagtgtcctcttgctcctcttccaccctcagtggatgataatctgaaggagtgtctcctggtccctcttccaccctctcctcttccaccctcagtggatgataatctgaaggactgtctctttgtccctcttccaccctctcctcttccaccctcagtggatgataatctcaagactcctcccttagctactcaggaggccgaggcggaaaaaccacccaaacccaagaggtggagggtggatgaggtggaacaatcaccgaaacccaagaggcggagggcggatgaggtggaacaatcgcccaagcccaagaggcagagggaggccgaggcacaacaattacccaaacccaagaggcggaggttgagtaagctgagaacacgccattgcactcaagcctgggcaataagaataaatccgtgggtcga

SEQ ID NO: 328365 - DNA, 908 bp, Homo sapiens
ctaaaatccgtaagaggaaggtgacaacgaaaatcaaccgtcatgacaaaatcaatggaaagaggaagaccgccagaaaacagaaaatgtttcaacgtgcgcaagagttgcggcggcgggcagaggactaccacaaatgcaaaatccccccttctgcaagaaagcctctttgcaactgggtcagaatggcggcagcggagcatcgtcattcttcaggattgccctgctggccctacctcacagctgaaactttaaaaaacaggatgggccgccagccacctcctccaactcaacaacattctataactgataactccctgagcctcaagacacctcccgaatgtctccttcatccccttccaccctcagtggatgataatatcaaggagtgtcctcttgctcctcttccaccctcagtggatgataatctgaaggagtgtctcctggtccctcttccaccctctcctcttccaccctcagtggatgataatctgaaggactgtctctttgtccctcttccaccctctcctcttccaccctcagtggatgataatctcaagactcctcccttagctactcaggaggccgaggcggaaaaaccacccaaacccaagaggtggagggtggatgaggtggaacaatcaccgaaacccaagaggcggagggcggatgaggtggaacaatcgcccaagcccaagaggcagagggaggccgaggcacaacaattacccaaacccaagaggcggaggttgagtaagctgagaacacgccattgcactcaagcctgggcaataagaataaatccgtgggtcgaaaaaaagaaaaaaatcaaaaaacaaaacaaaacccacgctccaaaaacaaactaacgaagaataaataaataatataaaaataaaataaatact

SEQ ID NO: 328366 - DNA, 778 bp, Homo sapiens
  misc_feature (613)..(613): n is a, c, g, or t
  misc_feature (621)..(621): n is a, c, g, or t
  misc_feature (679)..(679): n is a, c, g, or t
ctaaaatccgtaagaggaaggtgacaacgaaaatcaaccgtcatgacaaaatcaatggaaagaggaagaccgccagaaaacagaaaatgtttcaacgtgcgcaagagttgcggcggcgggcagaggactaccacaaatgcaaaatccccccttctgcaagaaagcctctttgcaactgggtcagaatggcggcagcggagcatcgtcattcttcaggattgccctgctggccctacctcacagctgaaactttaaaaaacaggatgggccgccagccacctcctccaactcaacaacattctataactgataactccctgagcctcaagacacctcccgaatgtctccttcatccccttccaccctcagtggatgataatatcaaggagtgtcctcttgctcctcttccaccctcagtggatgataatctgaaggagtgtctcctggtccctcttccaccctctcctcttccaccctcagtggatgataatctgaaggactgtctctttgtccctcttccaccctctcctcttccaccctcagtggatgataatctcaagactcctgagtagctgggattacaggtgtgtgccagcatgtctggctaattttngtattttnagtagagacagggtttcaccatgttggtcaggctggtcttgaattcctgacctcgtgntctgcccgcctcagcctcccagagtgctgggattacaggtgtgagccaccgtgcccggctcacctcttctttttttttttggaaccggggtttggccct

SEQ ID NO: 328367 - DNA, 814 bp, Homo sapiens
ctaaaatccgtaagaggaaggtgacaacgaaaatcaaccgtcatgacaaaatcaatggaaagaggaagaccgccagaaaacagaaaatgtttcaacgtgcgcaagagttgcggcggcgggcagaggactaccacaaatgcaaaatccccccttctgcaagaaagcctctttgcaactgggtcagaatggcggcagcggagcatcgtcattcttcaggattgccctgctggccctacctcacagctgaaactttaaaaaacaggatgggccgccagccacctcctccaactcaacaacattctataactgataactccctgagcctcaagacacctcccgaatgtctccttcatccccttccaccctcagtggatgataatatcaaggagtgtcctcttgctcctcttccaccctcagtggatgataatctgaaggagtgtctcctggtccctcttccaccctctcctcttccaccctcagtggatgataatctgaaggactgtctctttgtccctcttccaccctctcctcttccaccctcagtggatgataatctcaagactcctcccttagctactcaggaggccgaggcggaaaaaccacccaaacccaagaggtggagggtggatgaggtggaacaatcaccgaaacccaagaggcggagggcggatgaggtggaacaatcgcccaagcccaagaggcagagggaggccgaggcacaacaattacccaaacccaagaggcggaggttgagtaagctgagaacacgccattgcactcaagcctgggcaataagaataaatccgtgggtcga

SEQ ID NO: 328368 - DNA, 767 bp, Homo sapiens
ctaaaatccgtaagaggaaggtgacaacgaaaatcaaccgtcatgacaaaatcaatggaaagaggaagaccgccagaaaacagaaaatgtttcaacgtgcgcaagagttgcggcggcgggcagaggactaccacaaatgcaaaatccccccttctgcaagaaagcctctttgcaactgggtcagaatggcggcagcggagcatcgtcattcttcaggattgccctgctggccctacctcacagctgaaactttaaaaaacaggatgggccgccagccacctcctccaactcaacaacattctataactgataactccctgagcctcaagacacctcccgaatgtctccttcatccccttccaccctcagtggatgataatatcaaggagtgtcctcttgctcctcttccacccctctcctcttccaccctcagtggatgataatctgaaggactgtctctttgtccctcttccaccctctcctcttccaccctcagtggatgataatctcaagactcctcccttagctactcaggaggccgaggcggaaaaaccacccaaacccaagaggtggagggtggatgaggtggaacaatcaccgaaacccaagaggcggagggcggatgaggtggaacaatcgcccaagcccaagaggcagagggaggccgaggcacaacaattacccaaacccaagaggcggaggttgagtaagctgagaacacgccattgcactcaagcctgggcaataagaataaatccgtgggtcga

SEQ ID NO: 328369 - DNA, 1407 bp, Homo sapiens
aaccctctcccagttcccctgcagctcttcaggaacccacatctctccagagctctttgttctcatgggtggcacctccagagtgaagaagatcctttgtcaagaagggaaacagaggggaaatgagagggtcctgcaggcagagctggaatcaacttccactctgcctcttgcaagctgtgtgaccctgggcacaatttctccttcctctggaaacctctgttttcttagatttggagcagggtggtcacactgaccttgcagagtcctgagaatcagagacagaacataaaaggcctggaaaacattctccaaaaagaagctgcaacatgtgtggacaatgggcttttcatgcctctcttactgtctcttactgtctgttgacctggtgcaagaaacatgctctggtgatggctgtgagggaggaatgaggatagacatagacactcctgtgtctcaaacatgcctctttattactctgttatgactctgtcttccctggggcaggaccccagcctgcctacatttgcagacagacacagtggcatgtggagacaacagtgtgtcccaatgacttttctttactccccagctgtcggcagtactcagtggaagggtgatatcatgacactgatactgctattttgaaacctggaggatggaaaggtgcaaaaatctatcaccagcaacagaaggtgcagactgtgttggtggcggtaattttgtccatcaaatgaatatgtgtgaaaacattccctcctttggccctacaggtcagaatggcggcagcggagcatcgtcattcttcaggattgccctgctggccctacctcacagctgaaactttaaaaaacaggatgggccgccagccacctcctccaactcaacaacattctataactgataactccctgagcctcaagacacctcccgaatgtctccttcatccccttccaccctcagtggatgataatatcaaggagtgtcctcttgctcctcttccaccctcagtggatgataatctgaaggagtgtctcctggtccctcttccaccctctcctcttccaccctcagtggatgataatctgaaggactgtctctttgtccctcttccaccctctcctcttccaccctcagtggatgataatctcaagactcctcccttagctactcaggaggccgaggcggaaaaaccacccaaacccaagaggtggagggtggatgaggtggaacaatcaccgaaacccaagaggcggagggcggatgaggtggaacaatcgcccaagcccaagaggcagagggaggccgaggcacaacaattacccaaacccaagaggcggaggttgagtaagctgagaacacgccattgcactcaagcctgggcaataagaataaatccgtgggtcg

SEQ ID NO: 328370 - DNA, 1885 bp, Homo sapiens
gggcaatttgttagttatccgccgccaccaagacgcggcacggcgcctggaccggaggggccccgcgcgggcgcgaactttgggctcgggcgagtgggtggtgctccgcccagcccgagacgggcgggcgcgcgggccaatgggtgccgcctcttggccgcggggggccccgacccgtgggtcccggccaccagcgccccagccccgaggctcagaagcggcaggcggaggcgcggtccgggcgctatggccatgcccggcgggtctcacgcggctgcccctcgcccggcgcgccttcggtagggggcgcccggggcccagctggcccggccatgctgctggagacacaggacgcgctgtacgtggcgctggagctggtcatcgccgcgctttcggtggcgggcaacgtgctggtgtgcgccgcggtgggcacggcgaacactctgcagacgcccaccaactacttcctggtgtccctggctgcggccgacgtggccgtggggctcttcgccatcccctttgccatcaccatcagcctgggcttctgcactgacttctacggctgcctcttcctcgcctgcttcgtgctggtgctcacgcagagctccatcttcagccttctggccgtggcagtcgacagatacctggccatctgtgtcccgctcaggtataaaagtttggtcacggggacccgagcaagaggggtcattgctgtcctctgggtccttgcctttggcatcggattgactccattcctggggtggaacagtaaagacagtgccaccaacaactgcacagaaccctgggatggaaccacgaatgaaagctgctgccttgtgaagtgtctctttgagaatgtggtccccatgagctacatggtatatttcaatttctttgggtgtgttctgcccccactgcttataatgctggtgatctacattaagatcttcctggtggcctgcaggcagcttcagcgcactgagctgatggaccactcgaggaccaccctccagcgggagatccatgcagccaagtcactggccatgattgtggggatttttgccctgtgctggttacctgtgcatgctgttaactgtgtcactcttttccagccagctcagggtaaaaataagcccaagtgggcaatgaatatggccattcttctgtcacatgccaattcagttgtcaatcccattgtctatgcttaccggaaccgagacttccgctacacttttcacaaaattatctccaggtatcttctctgccaagcagatgtcaagagtgggaatggtcaggctggggtacagcctgctctcggtgtgggcctatgatctaggctctcgcctcttccaggagaagatacaaatccacaagaaacaaagaggacacggctggttttcattgtgaaagatagctacacctcacaaggaaatggactgcctctcttgagcacttccctggagctaccacgtatctagctaatatgtatgtgtcagtagtaggctccaaggattgacaaatatatttatgatctattcagctgcttttactgtgtggattatgccaacagcttgaatggattctaacagactcttttgtttttaaaagtctgccttgtttatggtggaaaattactgaaactattttactgtgaaacagtgtgaactattataatgcaaatactttttaacttagaggcaatggaaaaataaaagttgactgtactaaaaatgtatacttgttgccaggaaggtgacctcaaaaattaaaagtataattattcggccgggcatggtggctcacacctgtaattccagcactttgggaggccaaggcaggcggatcacgaggtcaggagttcaaaaccagcctgtccaatatagtg

SEQ ID NO: 328371 - DNA, 1727 bp, Homo sapiens
gggcaatttgttagttatccgccgccaccaagacgcggcacggcgcctggaccggaggggccccgcgcgggcgcgaactttgggctcgggcgagtgggtggtgctccgcccagcccgagacgggcgggcgcgcgggccaatgggtgccgcctcttggccgcggggggccccgacccgtgggtcccggccaccagcgccccagccccgaggctcagaagcggcaggcggaggcgcggtccgggcgctatggccatgcccggcgggtctcacgcggctgcccctcgcccggcgcgccttcggtagggggcgcccggggcccagctggcccggccatgctgctggagacacaggacgcgctgtacgtggcgctggagctggtcatcgccgcgctttcggtggcgggcaacgtgctggtgtgcgccgcggtgggcacggcgaacactctgcagacgcccaccaactacttcctggtgtccctggctgcggccgacgtggccgtggggctcttcgccatcccctttgccatcaccatcagcctgggcttctgcactgacttctacggctgcctcttcctcgcctgcttcgtgctggtgctcacgcagagctccatcttcagccttctggccgtggcagtcgacagatacctggccatctgtgtcccgctcaggtataaaagtttggtcacggggacccgagcaagaggggtcattgctgtcctctgggtccttgcctttggcatcggattgactccattcctggggtggaacagtaaagacagtgccaccaacaactgcacagaaccctgggatggaaccacgaatgaaagctgctgccttgtgaagtgtctctttgagaatgtggtccccatgagctacatggtatatttcaatttctttgggtgtgttctgcccccactgcttataatgctggtgatctacattaagatcttcctggtggcctgcaggcagcttcagcgcactgagctgatggaccactcgaggaccaccctccagcgggagatccatgcagccaagtcactggccatgattgtggggatttttgccctgtgctggttacctgtgcatgctgttaactgtgtcactcttttccagccagctcagggtaaaaataagcccaagtgggcaatgaatatggccattcttctgtcacatgccaattcagttgtcaatcccattgtctatgcttaccggaaccgagacttccgctacacttttcacaaaattatctccaggtatcttctctgccaagcagatgtcaagagtgggaatggtcaggctggggtacagcctgctctcggtgtgggcctatgatctaggctctcgcctcttccaggagaagatacaaatccacaagaaacaaagaggacacggctggttttcattgtgaaagatagctacacctcacaaggaaatggactgcctctcttgagcacttccctggagctaccacgtatctagctaatatgtatgtgtcagtagtaggctccaaggattgacaaatatatttatgatctattcagctgcttttactgtgtggattatgccaacagcttgaatggattctaacagactcttttgtttttaaaagtctgccttgtttatggtggaaaattactgaaactattttactgtgaaacagtgtgaactattataatgcaaatactttttaacttagaggcaatggaaaaataaaagttgactgtacta

SEQ ID NO: 328372 - DNA, 605 bp, Homo sapiens
tcttcctcctctgccgtctccttccttctgctcctctccttcttccttctccttttcttcttccttctccttctttcttcctccttcgtcttagtgcttcggctgccttctccagacaaagggtctccaggtatcttctctgccaagcagatgtcaagagtgggaatggtcaggctggggtacagcctgctctcggtgtgggcctatgatctaggctctcgcctcttccaggagaagatacaaatccacaagaaacaaagaggacacggctggttttcattgtgaaagatagctacacctcacaaggaaatggactgcctctcttgagcacttccctggagctaccacgtatctagctaatatgtatgtgtcagtagtaggctccaaggattgacaaatatatttatgatctattcagctgcttttactgtgtggattatgccaacagcttgaatggattctaacagactcttttgtttttaaaagtctgccttgtttatggtggaaaattactgaaactattttactgtgaaacagtgtgaactattataatgcaaatactttttaacttagaggcaatggaaaaataaaagttgactgtacta

SEQ ID NO: 328373 - DNA, 1256 bp, Homo sapiens
tcttactgagttttctagagcaaagctgctcatccctgcttgcatgtctttagtattgagggtaaaggccttagtgccctggaaggtgaactttagaggttgttaaagggtcatggaaaaaagaggaggtggggtcttggattgtggttgcagagcgctataaactgaccgtaacagatggtattcttttaaacaggtataaaagtttggtcacggggacccgagcaagaggggtcattgctgtcctctgggtccttgcctttggcatcggattgactccattcctggggtggaacagtaaagacagtgccaccaacaactgcacagaaccctgggatggaaccacgaatgaaagctgctgccttgtgaagtgtctctttgagaatgtggtccccatgagctacatggtatatttcaatttctttgggtgtgttctgcccccactgcttataatgctggtgatctacattaagatcttcctggtggcctgcaggcagcttcagcgcactgagctgatggaccactcgaggaccaccctccagcgggagatccatgcagccaagtcactggccatgattgtggggatttttgccctgtgctggttacctgtgcatgctgttaactgtgtcactcttttccagccagctcagggtaaaaataagcccaagtgggcaatgaatatggccattcttctgtcacatgccaattcagttgtcaatcccattgtctatgcttaccggaaccgagacttccgctacacttttcacaaaattatctccaggtatcttctctgccaagcagatgtcaagagtgggaatggtcaggctggggtacagcctgctctcggtgtgggcctatgatctaggctctcgcctcttccaggagaagatacaaatccacaagaaacaaagaggacacggctggttttcattgtgaaagatagctacacctcacaaggaaatggactgcctctcttgagcacttccctggagctaccacgtatctagctaatatgtatgtgtcagtagtaggctccaaggattgacaaatatatttatgatctattcagctgcttttactgtgtggattatgccaacagcttgaatggattctaacagactcttttgtttttaaaagtctgccttgtttatggtggaaaattactgaaactattttactgtgaaacagtgtgaactattataatgcaaatactttttaacttagaggcaatggaaaaataaaagttgactgtacta

SEQ ID NO: 328374 - DNA, 181 bp, Homo sapiens
gggcctggcagaggtcttccaggtaggggtgtggcctctctgggcacccgtctatttgcctgtgtcccagcggagggttcttttggcaggatggggaaagggtcaggaacccattaacaggtggggaaacaatgtcatcactctggggccaacctagggattagaatcaaggtctcccagg

SEQ ID NO: 328375 - DNA, 91 bp, Homo sapiens
cagcagctcttgccgtaggatctgttcattgagctcatcctgttcttcattctcttcttccccggattccgtcgatggatccctggggaat

SEQ ID NO: 328376 - DNA, 514 bp, Homo sapiens
tgcccagaggagtgattatgtcatggtcgtggtcttcagacaggagcgggtaaaaaaggggtcttaggggttgacaggtaggcagcatctggacatcttcctaaggaaaacagcagggaaatggacacagtcctctcagaataaatgtgaacttctaaccatttcacacccgttaaaatggctattaacaaaacacagaaagtaacaagtgtcagtgaggatgtggagaaagtggagaccttgtggactgtcggtgaaaatgtaaaatgggtgcagctgcggtggaaatggtaaggtggttcctaaaaaaatgatgggaattaccatctggcctagtaattgtactgggtatatgcaaacaaacaaacaaacaaacaaaaactgaaagcagaatcttgaagagctatctgcacacccatgttcacagcagcataattcacaacagccaaaaggtggagacgagccaagtgcccattgatggatgaaggcacaaacaaaatgtggtccacccaca

SEQ ID NO: 328377 - DNA, 197 bp, Homo sapiens
ttgtgcatccagcataactatctaattccagaacaatgtcatcatccccaaaagaaaccccatacccattagtaggcacttaccattctcctgtcctcccattctctaaaaactattaatccacttcttgtctctgtggatttacttattcttgatatttcataaaagtggaatcatacaatatatgttcttttgtt

SEQ ID NO: 328378 - DNA, 571 bp, Homo sapiens
ccattatttagaatgggatttgtttagggtcagaaacactttcccaggtgataaataactgacttttccatcagttcttatttaatagatgccttaatgggatatatttggggtgggagaaggcataattgtaacctttttgagggaaaggtagccgacgcatctgacctcataaatacttgtttaattgaatgggaaagatgatcaaaggattctaaagtatggtaaagacggccctagcaatatactaatgtatacattgtactgaagcgtatgtattaaagccataatacgatgtgatgtttgaattagcagaacattggaagatgaaagttgtaattgaggaaggaataagccataaagttactttttttttttcttttttttttttttgagatggaattttgctcttgttgcccaggctggagcgcagtggcgtgatcttggctcactgcaacctccacctcccaagttcaagtgagtctcctgcctcagcctcccaagtagctgggattacaggcaccctccaccatgcccagctaattttttgtatttttagtagagatgaggt

SEQ ID NO: 328379 - DNA, 3097 bp, Homo sapiens
agcggcttttctcccacggcccatctgcccctcctttcctccacccccttctcctctctgctcccctttatttccactccccacccgcgtggctttgctctccctctcccccctcagctcgtctgtatttggagctccggaagctgccggcgactctcccctggagcagcgtgactgacaccggctcctattcagctgggaggagggagaggggaggagaaggggagggccgcgggaggagggtacgagtggccgaccacggatttgcattgccgaggacgggaccccagggcagcgaagcagaatggccaacatgcagggactggtggaaagactggaacgagctgtcagccgcctggagtcgctgtctgcagagtcccacaggccccctgggaactgcggggaagtcaatggtgtcattgcaggtgtggcaccctccgtggaagcctttgacaagctgatggacagtatggtggccgagtttttaaagaacagtaggatccttgctggggacgtggagacccatgcagaaatggtgcacagtgctttccaggcccagcgggctttccttctgatggcctctcagtaccaacaaccccacgagaatgacgtggccgcacttctgaaacccatatcggaaaagattcaggaaatccaaactttcagagagagaaaccgggggagtaacatgtttaatcatctttcggccgtcagcgaaagcatccctgcccttggatggatagctgtgtctcccaaacctggtccttatgtcaaggagatgaatgacgctgccaccttttacactaacagggtcttaaaggactacaaacacagtgatttgcgtcatgtggattgggtgaagtcatatttgaacatttggagtgaacttcaagcatacatcaaggaacaccacaccacgggcctcacatggagcaaaacaggtcctgtagcatccacagtatcagcgttttctgtcctctcctctgggcctggccttcctccaccccctcctcctctgcctcctccagggccacctccacttttcgagaatgaaggcaaaaaagaggaatcttctccttcacgctcagctttatttgcccaacttaaccagggagaagcaattacaaaagggctccgccatgtcacagatgaccagaagacatacaaaaatcccagcctgcgggctcaaggagggcaaactcaatctcccaccaaaagtcacactccaagtcccacatctcctaaatcttatccttctcaaaaacatgccccagtgttggagttggaaggaaagaaatggagagtggagtaccaagaggacaggaatgaccttgtgatttcagagactgagctgaaacaagtggcttacattttcaaatgcgaaaaatcaactattcagataaaagggaaagtaaactccattataattgacaactgtaagaaactcggcctggtgtttgacaatgtggtgggcattgtggaagtgatcaactcccaggacattcaaatccaggtaatggggagagtgccaacaatttccattaataagacagaaggttgccacatatacctcagtgaagatgcattagactgtgagatcgtgagcgccaagtcatctgaaatgaacatacttatccctcaggatggtgattatagagaatttcccattcctgaacagttcaagacagcatgggatggatccaagttaatcactgaacctgcagaaattatggcctaacttcctgagagaccgaaccccctcacctgaatccccctctatcaaacaaacaaaaaagcagcagtaaagagctagaagttgcagtagcccctactgctttagctttggcctccaacgattctgtgctatagatacagcactgtttctggcacgcctcgtgggcattttgaaatatttaacgtttcctcatgatttgcctttgtgtgtgattttagttccacatgatgacttgtgaacattagggatttaaaggaaaaaaaaaaagaattctgttcccctcatatcatgaacacagtaactgataggtaaaaagactgcatgattcacttttacacttatatttcattgctagttaaaaaataaaacctttgagaatctaagatgtacatttttaccttttaggcaatttcaatataatgtagaagtagtagtgtgccctgaaaaatgtacacgttttttcttattgttaccacatgttcacctttatcagcgtggatactgtcagcatgagtacatatttcaacccacgcttgtaaaagacataagagtttatattaaggaccaaattcagttccttggtccttggaagacctatattctctgtagttactgaaaaccgaaagtcaattctaattattcatcttacatatttttccaccatgtcatttgaaaacttgcttttcttctgcataagagattcttatgccaaaaacattaaacagaagaaatcatttttttgctatgtaatacctcgcaactttgctctaaaatcaagctcagttattattttccaagtttgaacatgttaaatatcagatgccttgtaaattatgtctttaacgttttcttatagactaatttcctcttttccacctgccagacttgctaaccaagctcgaaaatgaacatgaaaaagccatacatgtattatttctcctaaaacctaaggcattatctgttggtttggcttgctgctcctattttgtagtcttgatagtagatgcttcttcagcgtaagagtagctatgatattcctttttatcttttcagtacatagtgctgaaaaatctgcaacttcttggatcatatttaatgaattatagtataatgcttgcaggcccagtacaagcatatatattgtgcctcttacagcctttggaatacattgtttccattttttaaatatcttctatatccatatagtattcaaattattaatgctcatgtaccaaggttttgctataaaagttttgtctgtatgaataatgtggctttagtaaataatcatttttcaactgtaaacttattctgaaataaagtaaaattctaattgtttaaatactgtgatgaaaaaaaaaa

SEQ ID NO: 328380 - DNA, 2876 bp, Homo sapiens
attctttggggaggcaactaggatggtgtggccgaccacggatttgcattgccgaggacgggaccccagggcagcgaagcagaatggccaacatgcagggactggtggaaagactggaacgagctgtcagccgcctggagtcgctgtctgcagagtcccacaggccccctgggaactgcggggaagtcaatggtgtcattgcaggtgtggcaccctccgtggaagcctttgacaagctgatggacagtatggtggccgagtttttaaagaacagtaggatccttgctggggacgtggagacccatgcagaaatggtgcacagtgctttccaggcccagcgggctttccttctgatggcctctcagtaccaacaaccccacgagaatgacgtggccgcacttctgaaacccatatcggaaaagattcaggaaatccaaactttcagagagagaaaccgggggagtaacatgtttaatcatctttcggccgtcagcgaaagcatccctgcccttggatggatagctgtgtctcccaaacctggtccttatgtcaaggagatgaatgacgctgccaccttttacactaacagggtcttaaaggactacaaacacagtgatttgcgtcatgtggattgggtgaagtcatatttgaacatttggagtgaacttcaagcatacatcaaggaacaccacaccacgggcctcacatggagcaaaacaggtcctgtagcatccacagtatcagcgttttctgtcctctcctctgggcctggccttcctccaccccctcctcctctgcctcctccagggccacctccacttttcgagaatgaaggcaaaaaagaggaatcttctccttcacgctcagctttatttgcccaacttaaccagggagaagcaattacaaaagggctccgccatgtcacagatgaccagaagacatacaaaaatcccagcctgcgggctcaaggagggcaaactcaatctcccaccaaaagtcacactccaagtcccacatctcctaaatcttatccttctcaaaaacatgccccagtgttggagttggaaggaaagaaatggagagtggagtaccaagaggacaggaatgaccttgtgatttcagagactgagctgaaacaagtggcttacattttcaaatgcgaaaaatcaactattcagataaaagggaaagtaaactccattataattgacaactgtaagaaactcggcctggtgtttgacaatgtggtgggcattgtggaagtgatcaactcccaggacattcaaatccaggtaatggggagagtgccaacaatttccattaataagacagaaggttgccacatatacctcagtgaagatgcattagactgtgagatcgtgagcgccaagtcatctgaaatgaacatacttatccctcaggatggtgattatagagaatttcccattcctgaacagttcaagacagcatgggatggatccaagttaatcactgaacctgcagaaattatggcctaacttcctgagagaccgaaccccctcacctgaatccccctctatcaaacaaacaaaaaagcagcagtaaagagctagaagttgcagtagcccctactgctttagctttggcctccaacgattctgtgctatagatacagcactgtttctggcacgcctcgtgggcattttgaaatatttaacgtttcctcatgatttgcctttgtgtgtgattttagttccacatgatgacttgtgaacattagggatttaaaggaaaaaaaaaaagaattctgttcccctcatatcatgaacacagtaactgataggtaaaaagactgcatgattcacttttacacttatatttcattgctagttaaaaaataaaacctttgagaatctaagatgtacatttttaccttttaggcaatttcaatataatgtagaagtagtagtgtgccctgaaaaatgtacacgttttttcttattgttaccacatgttcacctttatcagcgtggatactgtcagcatgagtacatatttcaacccacgcttgtaaaagacataagagtttatattaaggaccaaattcagttccttggtccttggaagacctatattctctgtagttactgaaaaccgaaagtcaattctaattattcatcttacatatttttccaccatgtcatttgaaaacttgcttttcttctgcataagagattcttatgccaaaaacattaaacagaagaaatcatttttttgctatgtaatacctcgcaactttgctctaaaatcaagctcagttattattttccaagtttgaacatgttaaatatcagatgccttgtaaattatgtctttaacgttttcttatagactaatttcctcttttccacctgccagacttgctaaccaagctcgaaaatgaacatgaaaaagccatacatgtattatttctcctaaaacctaaggcattatctgttggtttggcttgctgctcctattttgtagtcttgatagtagatgcttcttcagcgtaagagtagctatgatattcctttttatcttttcagtacatagtgctgaaaaatctgcaacttcttggatcatatttaatgaattatagtataatgcttgcaggcccagtacaagcatatatattgtgcctcttacagcctttggaatacattgtttccattttttaaatatcttctatatccatatagtattcaaattattaatgctcatgtaccaaggttttgctataaaagttttgtctgtatgaataatgtggctttagtaaataatcatttttcaactgtaaacttattctgaaataaagtaaaattctaattgtttaaatactgtgatgaaaaaaaaaa

SEQ ID NO: 328381 - DNA, 2905 bp, Homo sapiens
agcggcttttctcccacggcccatctgcccctcctttcctccacccccttctcctctctgctcccctttatttccactccccacccgcgtggctttgctctccctctcccccctcagctcgtctgtatttggagctccggaagctgccggcgactctcccctggagcagcgtgactgacaccggctcctattcagctgggaggagggagaggggaggagaaggggagggccgcgggaggagggtacgagtggccgaccacggatttgcattgccgaggacgggaccccagggcagcgaagcagaatggccaacatgcagggactggtggaaagactggaacgagctgtcagccgcctggagtcgctgtctgcagagtcccacaggccccctgggaactgcggggaagtcaatggtgtcattgcaggtgtggcaccctccgtggaagcctttgacaagctgatggacagtatggtggccgagtttttaaagaacagtaggatccttgctggggacgtggagacccatgcagaaatggtgcacagtgctttccaggcccagcgggctttccttctgatggcctctcagtaccaacaaccccacgagaatgacgtggccgcacttctgaaacccatatcggaaaagattcaggaaatccaaactttcagagagagaaaccgggggagtaacatgtttaatcatctttcggccgtcagcgaaagcatccctgcccttggatggatagctgtgggtcctgtagcatccacagtatcagcgttttctgtcctctcctctgggcctggccttcctccaccccctcctcctctgcctcctccagggccacctccacttttcgagaatgaaggcaaaaaagaggaatcttctccttcacgctcagctttatttgcccaacttaaccagggagaagcaattacaaaagggctccgccatgtcacagatgaccagaagacatacaaaaatcccagcctgcgggctcaaggagggcaaactcaatctcccaccaaaagtcacactccaagtcccacatctcctaaatcttatccttctcaaaaacatgccccagtgttggagttggaaggaaagaaatggagagtggagtaccaagaggacaggaatgaccttgtgatttcagagactgagctgaaacaagtggcttacattttcaaatgcgaaaaatcaactattcagataaaagggaaagtaaactccattataattgacaactgtaagaaactcggcctggtgtttgacaatgtggtgggcattgtggaagtgatcaactcccaggacattcaaatccaggtaatggggagagtgccaacaatttccattaataagacagaaggttgccacatatacctcagtgaagatgcattagactgtgagatcgtgagcgccaagtcatctgaaatgaacatacttatccctcaggatggtgattatagagaatttcccattcctgaacagttcaagacagcatgggatggatccaagttaatcactgaacctgcagaaattatggcctaacttcctgagagaccgaaccccctcacctgaatccccctctatcaaacaaacaaaaaagcagcagtaaagagctagaagttgcagtagcccctactgctttagctttggcctccaacgattctgtgctatagatacagcactgtttctggcacgcctcgtgggcattttgaaatatttaacgtttcctcatgatttgcctttgtgtgtgattttagttccacatgatgacttgtgaacattagggatttaaaggaaaaaaaaaaagaattctgttcccctcatatcatgaacacagtaactgataggtaaaaagactgcatgattcacttttacacttatatttcattgctagttaaaaaataaaacctttgagaatctaagatgtacatttttaccttttaggcaatttcaatataatgtagaagtagtagtgtgccctgaaaaatgtacacgttttttcttattgttaccacatgttcacctttatcagcgtggatactgtcagcatgagtacatatttcaacccacgcttgtaaaagacataagagtttatattaaggaccaaattcagttccttggtccttggaagacctatattctctgtagttactgaaaaccgaaagtcaattctaattattcatcttacatatttttccaccatgtcatttgaaaacttgcttttcttctgcataagagattcttatgccaaaaacattaaacagaagaaatcatttttttgctatgtaatacctcgcaactttgctctaaaatcaagctcagttattattttccaagtttgaacatgttaaatatcagatgccttgtaaattatgtctttaacgttttcttatagactaatttcctcttttccacctgccagacttgctaaccaagctcgaaaatgaacatgaaaaagccatacatgtattatttctcctaaaacctaaggcattatctgttggtttggcttgctgctcctattttgtagtcttgatagtagatgcttcttcagcgtaagagtagctatgatattcctttttatcttttcagtacatagtgctgaaaaatctgcaacttcttggatcatatttaatgaattatagtataatgcttgcaggcccagtacaagcatatatattgtgcctcttacagcctttggaatacattgtttccattttttaaatatcttctatatccatatagtattcaaattattaatgctcatgtaccaaggttttgctataaaagttttgtctgtatgaataatgtggctttagtaaataatcatttttcaactgtaaacttattctgaaataaagtaaaattctaattgtttaaatactgtgatgaaaaaaaaaa

SEQ ID NO: 328382 - DNA, 1825 bp, Homo sapiens
agcggcttttctcccacggcccatctgcccctcctttcctccacccccttctcctctctgctcccctttatttccactccccacccgcgtggctttgctctccctctcccccctcagctcgtctgtatttggagctccggaagctgccggcgactctcccctggagcagcgtgactgacaccggctcctattcagctgggaggagggagaggggaggagaaggggagggccgcgggaggagggtacgagtggccgaccacggatttgcattgccgaggacgggaccccagggcagcgaagcagaatggccaacatgcagggactggtggaaagactggaacgagctgtcagccgcctggagtcgctgtctgcagagtcccacaggccccctgggaactgcggggaagtcaatggtgtcattgcaggtgtggcaccctccgtggaagcctttgacaagctgatggacagtatggtggccgagtttttaaagaacagtaggatccttgctggggacgtggagacccatgcagaaatggtgcacagtgctttccaggcccagcgggctttccttctgatggcctctcagtaccaacaaccccacgagaatgacgtggccgcacttctgaaacccatatcggaaaagattcaggaaatccaaactttcagagagagaaaccgggggagtaacatgtttaatcatctttcggccgtcagcgaaagcatccctgcccttggatggatagctgtgtctcccaaacctggtccttatgtcaaggagatgaatgacgctgccaccttttacactaacagggtcttaaaggactacaaacacagtgatttgcgtcatgtggattgggtgaagtcatatttgaacatttggagtgaacttcaagcatacatcaaggaacaccacaccacgggcctcacatggagcaaaacaggtcctgtagcatccacagtatcagcgttttctgtcctctcctctgggcctggccttcctccaccccctcctcctctgcctcctccagggccacctccacttttcgagaatgaaggcaaaaaagaggaatcttctccttcacgctcagctttatttgcccaacttaaccagggagaagcaattacaaaagggctccgccatgtcacagatgaccagaagacatacaaaaatcccagcctgcgggctcaaggagggcaaactcaatctcccaccaaaagtcacactccaagtcccacatctcctaaatcttatccttctcaaaaacatgccccagtgttggagttggaaggaaagaaatggagagtggagtaccaagaggacaggaatgaccttgtgatttcagagactgagctgaaacaagtggcttacattttcaaatgcgaaaaatcaactattcagataaaagggaaagtaaactccattataattgacaactgtaagaaactcggcctggtgtttgacaatgtggtgggcattgtggaagtgatcaactcccaggacattcaaatccaggtaatggggagagtgccaacaatttccattaataagacagaaggttgccacatatacctcagtgaagatgcattagactgtgagatcgtgagcgccaagtcatctgaaatgaacatacttatccctcaggatggtgattatagagaatttcccattcctgaacagttcaagacagcatgggatggatccaagttaatcactgaacctgcagaaattatggcctaacttcctgagagaccgaaccccctcacctgaatcccctggtatctagccaggcccatgattaccaacatcgagacatccggtacactt

SEQ ID NO: 328383 - DNA, 1587 bp, Homo sapiens
ccatgacgcagcttgcaattcgatcgaatttctttgcctatcatgtggcacaaatcagcctcaccatctgtttgcaaaaggaagccttagtttaaataactttgttgtagtttaaataactttgttgttcttgcctttttccagagagaatttcccattcctgaacagttcaagacagcatgggatggatccaagttaatcactgaacctgcagaaattatggcctaacttcctgagagaccgaaccccctcacctgaatccccctctatcaaacaaacaaaaaagcagcagtaaagagctagaagttgcagtagcccctactgctttagctttggcctccaacgattctgtgctatagatacagcactgtttctggcacgcctcgtgggcattttgaaatatttaacgtttcctcatgatttgcctttgtgtgtgattttagttccacatgatgacttgtgaacattagggatttaaaggaaaaaaaaaaagaattctgttcccctcatatcatgaacacagtaactgataggtaaaaagactgcatgattcacttttacacttatatttcattgctagttaaaaaataaaacctttgagaatctaagatgtacatttttaccttttaggcaatttcaatataatgtagaagtagtagtgtgccctgaaaaatgtacacgttttttcttattgttaccacatgttcacctttatcagcgtggatactgtcagcatgagtacatatttcaacccacgcttgtaaaagacataagagtttatattaaggaccaaattcagttccttggtccttggaagacctatattctctgtagttactgaaaaccgaaagtcaattctaattattcatcttacatatttttccaccatgtcatttgaaaacttgcttttcttctgcataagagattcttatgccaaaaacattaaacagaagaaatcatttttttgctatgtaatacctcgcaactttgctctaaaatcaagctcagttattattttccaagtttgaacatgttaaatatcagatgccttgtaaattatgtctttaacgttttcttatagactaatttcctcttttccacctgccagacttgctaaccaagctcgaaaatgaacatgaaaaagccatacatgtattatttctcctaaaacctaaggcattatctgttggtttggcttgctgctcctattttgtagtcttgatagtagatgcttcttcagcgtaagagtagctatgatattcctttttatcttttcagtacatagtgctgaaaaatctgcaacttcttggatcatatttaatgaattatagtataatgcttgcaggcccagtacaagcatatatattgtgcctcttacagcctttggaatacattgtttccattttttaaatatcttctatatccatatagtattcaaattattaatgctcatgtaccaaggttttgctataaaagttttgtctgtatgaataatgtggctttagtaaataatcatttttcaactgtaaacttattctgaaataaagtaaaattctaattgtttaaatactgtgatgaaaaaaaaaa

SEQ ID NO: 328384 - DNA, 396 bp, Homo sapiens
taaactcctgacctcaggtgatctgcctgcctcggactcccaaagtgctaggattacaggtgtgagccaccgtgcccggctagtcccaggttttcattcaacggccagggaataacaaactgctcctttccccaaggtgtggcaccctccgtggaagcctttgacaagctgatggacagtatggtggccgagtttttaaagaacagtaggatccttgctggggacgtggagacccatgtaagtactttcctcccctgttctcagtagagagtttaaacttaccagcccagcctctgacaacgctaacagcctgaggagatctttatttatttatttagtttttactctggctaggcagatggtggctaaaacattcatttacccatttattcattt

SEQ ID NO: 328385 - DNA, 3019 bp, Homo sapiens
agcggcttttctcccacggcccatctgcccctcctttcctccacccccttctcctctctgctcccctttatttccactccccacccgcgtggctttgctctccctctcccccctcagctcgtctgtatttggagctccggaagctgccggcgactctcccctggagcagcgtgactgacaccggctcctattcagctgggaggagggagaggggaggagaaggggagggccgcgggaggagggtacgagtggccgaccacggatttgcattgccgaggacgggaccccagggcagcgaagcagaatggccaacatgcagggactggtggaaagactggaacgagctgtcagccgcctggagtcgctgtctgcagagtcccacaggccccctgggaactgcggggaagtcaatggtgtcattgcaggtgtggcaccctccgtggaagcctttgacaagctgatggacagtatggtggccgagtttttaaagaacagtaggatccttgctggggacgtggagacccataatgacgtggccgcacttctgaaacccatatcggaaaagattcaggaaatccaaactttcagagagagaaaccgggggagtaacatgtttaatcatctttcggccgtcagcgaaagcatccctgcccttggatggatagctgtgtctcccaaacctggtccttatgtcaaggagatgaatgacgctgccaccttttacactaacagggtcttaaaggactacaaacacagtgatttgcgtcatgtggattgggtgaagtcatatttgaacatttggagtgaacttcaagcatacatcaaggaacaccacaccacgggcctcacatggagcaaaacaggtcctgtagcatccacagtatcagcgttttctgtcctctcctctgggcctggccttcctccaccccctcctcctctgcctcctccagggccacctccacttttcgagaatgaaggcaaaaaagaggaatcttctccttcacgctcagctttatttgcccaacttaaccagggagaagcaattacaaaagggctccgccatgtcacagatgaccagaagacatacaaaaatcccagcctgcgggctcaaggagggcaaactcaatctcccaccaaaagtcacactccaagtcccacatctcctaaatcttatccttctcaaaaacatgccccagtgttggagttggaaggaaagaaatggagagtggagtaccaagaggacaggaatgaccttgtgatttcagagactgagctgaaacaagtggcttacattttcaaatgcgaaaaatcaactattcagataaaagggaaagtaaactccattataattgacaactgtaagaaactcggcctggtgtttgacaatgtggtgggcattgtggaagtgatcaactcccaggacattcaaatccaggtaatggggagagtgccaacaatttccattaataagacagaaggttgccacatatacctcagtgaagatgcattagactgtgagatcgtgagcgccaagtcatctgaaatgaacatacttatccctcaggatggtgattatagagaatttcccattcctgaacagttcaagacagcatgggatggatccaagttaatcactgaacctgcagaaattatggcctaacttcctgagagaccgaaccccctcacctgaatccccctctatcaaacaaacaaaaaagcagcagtaaagagctagaagttgcagtagcccctactgctttagctttggcctccaacgattctgtgctatagatacagcactgtttctggcacgcctcgtgggcattttgaaatatttaacgtttcctcatgatttgcctttgtgtgtgattttagttccacatgatgacttgtgaacattagggatttaaaggaaaaaaaaaaagaattctgttcccctcatatcatgaacacagtaactgataggtaaaaagactgcatgattcacttttacacttatatttcattgctagttaaaaaataaaacctttgagaatctaagatgtacatttttaccttttaggcaatttcaatataatgtagaagtagtagtgtgccctgaaaaatgtacacgttttttcttattgttaccacatgttcacctttatcagcgtggatactgtcagcatgagtacatatttcaacccacgcttgtaaaagacataagagtttatattaaggaccaaattcagttccttggtccttggaagacctatattctctgtagttactgaaaaccgaaagtcaattctaattattcatcttacatatttttccaccatgtcatttgaaaacttgcttttcttctgcataagagattcttatgccaaaaacattaaacagaagaaatcatttttttgctatgtaatacctcgcaactttgctctaaaatcaagctcagttattattttccaagtttgaacatgttaaatatcagatgccttgtaaattatgtctttaacgttttcttatagactaatttcctcttttccacctgccagacttgctaaccaagctcgaaaatgaacatgaaaaagccatacatgtattatttctcctaaaacctaaggcattatctgttggtttggcttgctgctcctattttgtagtcttgatagtagatgcttcttcagcgtaagagtagctatgatattcctttttatcttttcagtacatagtgctgaaaaatctgcaacttcttggatcatatttaatgaattatagtataatgcttgcaggcccagtacaagcatatatattgtgcctcttacagcctttggaatacattgtttccattttttaaatatcttctatatccatatagtattcaaattattaatgctcatgtaccaaggttttgctataaaagttttgtctgtatgaataatgtggctttagtaaataatcatttttcaactgtaaacttattctgaaataaagtaaaattctaattgtttaaatactgtgatgaaaaaaaaaa

SEQ ID NO: 328386 - DNA, 2559 bp, Homo sapiens
agcggcttttctcccacggcccatctgcccctcctttcctccacccccttctcctctctgctcccctttatttccactccccacccgcgtggctttgctctccctctcccccctcagctcgtctgtatttggagctccggaagctgccggcgactctcccctggagcagcgtgactgacaccggctcctattcagctgggaggagggagaggggaggagaaggggagggccgcgggaggagggtacgagtggccgaccacggatttgcattgccgaggacgggaccccagggcagcgaagcagaatggccaacatgcagggactggtggaaagactggaacgagctgtcagccgcctggagtcgctgtctgcagagtcccacaggccccctgggaactgcggggaagtcaatggtgtcattgcaggtgtggcaccctccgtggaagcctttgacaagctgatggacagtatggtggccgagtttttaaagaacagtaggatccttgctggggacgtggagacccatgcagaaatggtgcacagtgctttccaggcccagcgggctttccttctgatggcctctcagtaccaacaaccccacgagaatgacgtggccgcacttctgaaacccatatcggaaaagattcaggaaatccaaactttcagagagagaaaccgggggagtaacatgtttaatcatctttcggccgtcagcgaaagcatccctgcccttggatggatagctgtgtctcccaaacctggtccttatgtcaaggagatgaatgacgctgccaccttttacactaacagggtcttaaaggactacaaacacagtgatttgcgtcatgtggattgggtgaagtcatatttgaacatttggagtgaacttcaagcatacatcaaggaacaccacaccacgggcctcacatggagcaaaacaggtcctgtagcatccacagtatcagcgttttctgtcctctcctctgggcctggccttcctccaccccctcctcctctgcctcctccagggccacctccacttttcgagaatgaaggcaaaaaagaggaatcttctccttcacgctcagctttatttgcccaacttaaccagggagaagcaattacaaaagggctccgccatgtcacagatgaccagaagacatacaaaaatcccagcctgcgggctcaaggagggcaaactcaatctcccaccaaaagtcacactccaagtcccacatctcctaaatcttatccttctcaaaaacatgccccagtgttggagttggaaggaaagaaatggagagtggagtaccaagaggacaggaatgaccttgtgatttcagagactgagctgaaacaagtggcttacattttcaaatgcgaaaaatcaactattcagataaaagggaaagtaaactccattataattgacaactgtaagaaactcggcctggtgtttgacaatgtggtgggcattgtggaagtgatcaactcccaggacattcaaatccaggtaatggggagagtgccaacaatttccattaataagacagaaggttgccacatatacctcagtgaagatgcattagactgtgagatcgtgagcgccaagtcatctgaaatgaacatacttatccctcaggatggtgattatagagaatttcccattcctgaacagttcaagacagcatgggatggatccaagttaatcactgaacctgcagaaattatggcctaacttcctgagagaccgaaccccctcacctgaatccccctctatcaaacaaacaaaaaagcagcagtaaagagctagaagttgcagtagcccctactgctttagctttggcctccaacgattctgtgctatagatacagcactgtttctggcacgcctcgtgggcattttgaaatatttaacgtttcctcatgatttgcctttgtgtgtgattttagttccacatgatgacttgtgaacattagggatttaaaggaaaaaaaaaaagaattctgttcccctcatatcatgaacacagtaactgataggtaaaaagactgcatgattcacttttacacttatatttcattgctagttaaaaaataaaacctttgagaatctaagatgtacatttttaccttttaggcaatttcaatataatgtagaagtgtatcattcagtctttttaccgatcagttactgtgttcatgacatgaggggcacagaattcttttttttttccctttaaatccctaatgttcacaagtcatcatgtggaactaaaatcacacacaaaggcaaatcatgaggaaacgttaaatatttcaaaatgcccacgaggcgtgccagattacagtgctgtatctatagcacagaatcgttggagcccttaagctaaagcagtaggggctactgcaacttctagttcgtgaactgctgctttttttctttgtttgatagtagggggattcagtgtagtggggttcggtctctcaggaagttagccataatttctccaggttcagtgattaacttggatccatcccatcctgtcatgaacgtca

SEQ ID NO: 328387 - DNA, 1387 bp, Homo sapiens
agcggcttttctcccacggcccatctgcccctcctttcctccacccccttctcctctctgctcccctttatttccactccccacccgcgtggctttgctctccctctcccccctcagctcgtctgtatttggagctccggaagctgccggcgactctcccctggagcagcgtgactgacaccggctcctattcagctgggaggagggagaggggaggagaaggggagggccgcgggaggagggtacgagtggccgaccacggatttgcattgccgaggacgggaccccagggcagcgaagcagaatggccaacatgcagggactggtggaaagactggaacgagctgtcagccgcctggagtcgctgtctgcagagtcccacaggccccctgggaactgcggggaagtcaatggtgtcattgcaggtgtggcaccctccgtggaagcctttgacaagctgatggacagtatggtggccgagtttttaaagaacagtaggatccttgctggggacgtggagacccatgcagaaatggtgcacagtgctttccaggcccagcgggctttccttctgatggcctctcagtaccaacaaccccacgagaatgacgtggccgcacttctgaaacccatatcggaaaagattcaggaaatccaaactttcagagagagaaaccgggggagtaacatgtttaatcatctttcggccgtcagcgaaagcatccctgcccttggatggatagctgtgtctcccaaacctggtccttatgtcaaggagatgaatgacgctgccaccttttacactaacagggtcttaaaggactacaaacacagtgatttgcgtcatgtggattgggtgaagtcatatttgaacatttggagtgaacttcaagcatacatcaaggaacaccacaccacgggcctcacatggagcaaaacaggtcctgtagcatccacagtatcagcgttttctgtcctctcctctgggcctggccttcctccaccccctcctcctctgcctcctccagggccacctccacttttcgagaatgaaggcaaaaaagaggaatcttctccttcacgctcagctttatttgcccaacttaaccagggagaagcaattacaaaagggctccgccatgtcacagatgaccagaagacatacaaaaatcccagcctgcgggctcaaggagggcaaactcaatctcccaccaaaagtcacactccaagtcccacatctcctaaatcttatccttctcaaaaacatgccccagtgttggagttggaaggaaagaaatggagagtggagtaccagaggacaggattaccttgtgattcagagacttgctgaacagtgcttcatttcaatcgaaatcactttcagtta

SEQ ID NO: 328388 - DNA, 310 bp, Homo sapiens
tggctcatacctgtaatcccagcattttgggaggctgaggtgggaggatcgctggatcccaggagtttaaggtcacagtgagctatgattgcaccactgcactgcagcctgggcgacagtctaagaccctgtctcaaaaattaaaaggacgaggcagtagcccgattggcgtgaggatgtccaggttctgtttggaggagaagaggttggcagccagagaacaggaggcagtggggacaggccacgcgggagaggacaaagccatggctgtggggacaaagggggtgaggacagcacccaagggtctgac

SEQ ID NO: 328389 - DNA, 552 bp, Homo sapiens
tggctcatacctgtaatcccagcattttgggaggctgaggtgggaggatcgctggatcccaggagtttaaggtcacagtgagctatgattgcaccactgcactgcagcctgggcgacagtctaagaccctgtctcaaaaattaaaaggacgaggcagtagcccgattggcgtgaggatgtccaggttctgtttggaggagaagagggaacggtagaacctgtcaagggagggatgaagtctggggtgagtggaacagggacaggagaagcagagagggcagccgagagcatccagtcggattgtgctctgaagggggtgctgtagggcattgaggagcatggaggaagcagagacctggcctgcaggatcaggggaggctttctgtgcttattccacaagcaggtcctgtcagaggtgtaggaatgtcccagacaaattggggagaggttggcagccagagaacaggaggcagtggggacaggccacgcgggagaggacaaagccatggctgtggggacaaagggggtgaggacagcacccaagggtctgac

SEQ ID NO: 328390 - DNA, 412 bp, Homo sapiens
  misc_feature (9)..(9): n is a, c, g, or t
  misc_feature (27)..(27): n is a, c, g, or t
  misc_feature (51)..(51): n is a, c, g, or t
  misc_feature (79)..(79): n is a, c, g, or t
tcccggccncgtatgttgtgtggaaantgtgaaacggataacaatttccanacaggaaacagcctatgacccatgattnacgcccaagcttggcacgaggtatggctctctcggcatgatgaccagcgtgctggtttgtccagatggcaagacagtagaagcagaggctgcccacgggactgtaacccgtcactaccgcatgtaccagaaaggacaggagacgtccaccaatcccattgctcctcctggcctggcctgaatattatactactctaaatagcatatttcatccaagtgcaataatgtaagctgaatcttttttggacttctgctggcctgttttatttcttttatataaatgtgatttctcagaaattgatattaaacactatcttatcttctcctgaactgt

SEQ ID NO: 328391 - DNA, 2370 bp, Homo sapiens
cggccataaggacgggtgcaggccaagagcaaggacatgcaaaccccaagacctgctaacgggcggcgaagcgggggcacgccctcgcacacgcagagataaattgtgctcccatgacctttatttggaaagtgcctgcgggcctaaaattggcctttgtcccaccgagtacactcagcactgtactttaaaccggataaactgggctgtctggcaggcgataaactacattcagttgagtctgcaagactgggaggaactggggtgataagaaatctattcactgtcaaggtttattgaagtcaaaatgtccaaaaaaatcagtggcggttctgtggtagagatgcaaggagatgaaatgacacgaatcatttgggaattgattaaagagaaactcatttttccctacgtggaattggatctacatagctatgatttaggcatagagaatcgtgatgccaccaacgaccaagtcaccaaggatgctgcagaagctataaagaagcataatgttggcgtcaaatgtgccactatcactcctgatgagaagagggttgaggagttcaagttgaaacaaatgtggaaatcaccaaatggcaccatacgaaatattctgggtggcacggtcttcagagaagccattatctgcaaaaatatcccccggcttgtgagtggatgggtaaaacctatcatcataggtcgtcatgcttatggggatcaatacagagcaactgattttgttgttcctgggcctggaaaagtagagataacctacacaccaagtgacggaacccaaaaggtgacatacctggtacataactttgaagaaggtggtggtgttgccatggggatgtataatcaagataagtcaattgaagattttgcacacagttccttccaaatggctctgtctaagggttggcctttgtatctgagcaccaaaaacactattctgaagaaatatgatgggcgttttaaagacatctttcaggagatatatgacaagcagtacaagtcccagtttgaagctcaaaagatctggtatgagcataggctcatcgacgacatggtggcccaagctatgaaatcagagggaggcttcatctgggcctgtaaaaactatgatggtgacgtgcagtcggactctgtggcccaagggtatggctctctcggcatgatgaccagcgtgctggtttgtccagatggcaagacagtagaagcagaggctgcccacgggactgtaacccgtcactaccgcatgtaccagaaaggacaggagacgtccaccaatcccattgcttccatttttgcctggaccagagggttagcccacagagcaaagcttgataacaataaagagcttgccttctttgcaaatgctttggaagaagtctctattgagacaattgaggctggcttcatgaccaaggacttggctgcttgcattaaaggtttacccaatgtgcaacgttctgactacttgaatacatttgagttcatggataaacttggagaaaacttgaagatcaaactagctcaggccaaactttaagttcatacctgagctaagaaggataattgtcttttggtaactaggtctacaggtttacatttttctgtgttacactcaaggataaaggcaaaatcaattttgtaatttgtttagaagccagagtttatcttttctataagtttacagcctttttcttatatatacagttattgccacctttgtgaacatggcaagggacttttttacaatttttattttattttctagtaccagcctaggaattcggttagtactcatttgtattcactgtcactttttctcatgttctaattataaatgaccaaaatcaagattgctcaaaagggtaaatgatagccacagtattgctccctaaaatatgcataaagtagaaattcactgccttcccctcctgtccatgaccttgggcacagggaagttctggtgtcatagatatcccgttttgtgaggtagagctgtgcattaaacttgcacatgactggaacgaagtatgagtgcaactcaaatgtgttgaagatactgcagtcatttttgtaaagaccttgctgaatgtttccaatagactaaatactgtttaggccgcaggagagtttggaatccggaataaatactacctggaggtttgtcctctccatttttctctttctcctcctggcctggcctgaatattatactactctaaatagcatatttcatccaagtgcaataatgtaagctgaatcttttttggacttctgctggcctgttttatttcttttatataaatgtgatttctcagaaattgatattaaacactatcttatcttctcctgaactgt

SEQ ID NO: 328392 - DNA, 899 bp, Homo sapiens
cctgggaggggacaaagcgggggaagaggaaaagctcggacctaccctgtggtcccgggtttctgcagagtctacttcagaagcggaggcactgggagtccggtttgggattgccaggctgtggttgtgagtctgagcttgtgagcggctgtggcgccccaactcttcgccagcatatcatcccggcaggcgataaactacattcagttgagtctgcaagactgggaggaactggggtgataagaaatctattcactgtcaaggtttattgaagtcaaaatgtccaaaaaaatcagtggcggttctgtggtagagatgcaaggagatgaaatgacacgaatcatttgggaattgattaaagagaaactcatttttccctacgtggaattggatctacatagctatgatttaggcatagagaatcgtgatgccaccaacgaccaagtcaccaaggatgctgcagaagctataaagaagcataatgttggcgtcaaatgtgccactatcactcctgatgagaagagggttgaggagttcaagttgaaacaaatgtggaaatcaccaaatggcaccatacgaaatattctgggtggcacggtcttcagagaagccattatctgcaaaaatatcccccggcttgtgagtggatgggtaaaacctatcatcataggtcgtcatgcttatggggatcaagtaagtcatgttggcaataatgtgattttgcatgttttttttcatggcccagaaatttccaacttgtatgtgttccattcttatctttggtatctacacccattaagcaaggtatgaaattgcagaaatgcatatatgtataactgtatatttacacacatttagctaaaggcaaatacaataaacttacaataggcgtcatctca

SEQ ID NO: 328393 - DNA, 508 bp, Homo sapiens
gtccatgaccttgggcacaggggaaggcagtgaatttctactttatgcatattttagggagaaattcactgccttcccctcctgtccatgaccttgggcacagggaagttctggtgtcatagatatcccgttttgtgaggtagagctgtgcattaaacttgcacatgactggaacgaagtatgagtgcaactcaaatgtgttgaagatactgcagtcatttttgtaaagaccttgctgaatgtttccaatagactaaatactgtttaggccgcaggagagtttggaatccggaataaatactacctggaggtttgtcctctccatttttctctttctcctcctggcctggcctgaatattatactactctaaatagcatatttcatccaagtgcaataatgtaagctgaatcttttttggacttctgctggcctgttttatttcttttatataaatgtgatttctcagaaattgatattaaacactatcttatcttctcctgaactgt

SEQ ID NO: 328394 - DNA, 487 bp, Homo sapiens
cctgggaggggacaaagcgggggaagaggaaaagctcggacctaccctgtggtcccgggtttctgcagagtctacttcagaagcggaggcactgggagtccggtttgggattgccaggctgtggttgtgagtctgagcttgtgagcggctgtggcgccccaactcttcgccagcatatcatcccggcaggcgataaactacattcagttgagtctgcaagactgggaggaactggggtgataagaaatctattcactgtcaaggtttattgaagtcaaaatgtccaaaaaaatcagtggcggttctgtggtagagatgcaaggagatgaaatgacacgaatcatttgggaattgattaaagagaaactcatttttccctacgtggaattggatctacatagcaatttaaggggggcccctttttttaaaatttttgtggggccaaaaaattttttttttttttttaaatgcagaagctataaagaag

SEQ ID NO: 328395 - DNA, 372 bp, Homo sapiens
cctgggaggggacaaagcgggggaagaggaaaagctcggacctaccctgtggtcccgggtttctgcagagtctacttcagaagcggaggcactgggagtccggtttgggattgccaggctgtggttgtgagtctgagcttgtgagcggctgtggcgccccaactcttcgccagcatatcatcccggcaggcgataaactacattcagttgagtctgcaagactgggaggaactggggtgataagaaatctattcactgtcaagttattgtagtctgatatgtcctgatcacatctgtggcggtactgtggcgccccaatgttatcgcctagcatatcatctccggcatggcgatttactacattcagttgat

SEQ ID NO: 328396 - DNA, 241 bp, Homo sapiens
  misc_feature (5)..(5): n is a, c, g, or t
  misc_feature (73)..(73): n is a, c, g, or t
aaagntttatcccatggaactcaaatgtattcaagtagtcagaacgttgcacatttgggaacctttaatgaanagcaagtccttggtcatgaagccagcctcaattgtcacaataaagagcttgccttctttgcaaatgctttggaagaagtctctattgagacaattgaggctggcttcatgaccaaggacttggctgcttgcattaaaggtttacccaagtaagtataagatgccctag

SEQ ID NO: 328397 - DNA, 2428 bp, Homo sapiens
cgttgaccttctgctctgcctccttcagcaaaccctaccaacatgcactaccacaaccggcagaatgactcctgtctaaaggaaatatggggacaaagagtagatcagagactgaaggaaaggccacctagaaaacgatctaccactgggagtccggtttgggattgccaggctgtggttgtgagtctgagcttgtgagcggctgtggcgccccaactcttcgccagcatatcatcccggcaggcgataaactacattcagttgagtctgcaagactgggaggaactggggtgataagaaatctattcactgtcaaggtttattgaagtcaaaatgtccaaaaaaatcagtggcggttctgtggtagagatgcaaggagatgaaatgacacgaatcatttgggaattgattaaagagaaactcatttttccctacgtggaattggatctacatagctatgatttaggcatagagaatcgtgatgccaccaacgaccaagtcaccaaggatgctgcagaagctataaagaagcataatgttggcgtcaaatgtgccactatcactcctgatgagaagagggttgaggagttcaagttgaaacaaatgtggaaatcaccaaatggcaccatacgaaatattctgggtggcacggtcttcagagaagccattatctgcaaaaatatcccccggcttgtgagtggatgggtaaaacctatcatcataggtcgtcatgcttatggggatcaatacagagcaactgattttgttgttcctgggcctggaaaagtagagataacctacacaccaagtgacggaacccaaaaggtgacatacctggtacataactttgaagaaggtggtggtgttgccatggggatgtataatcaagataagtcaattgaagattttgcacacagttccttccaaatggctctgtctaagggttggcctttgtatctgagcaccaaaaacactattctgaagaaatatgatgggcgttttaaagacatctttcaggagatatatgacaagcagtacaagtcccagtttgaagctcaaaagatctggtatgagcataggctcatcgacgacatggtggcccaagctatgaaatcagagggaggcttcatctgggcctgtaaaaactatgatggtgacgtgcagtcggactctgtggcccaagggtatggctctctcggcatgatgaccagcgtgctggtttgtccagatggcaagacagtagaagcagaggctgcccacgggactgtaacccgtcactaccgcatgtaccagaaaggacaggagacgtccaccaatcccattgcttccatttttgcctggaccagagggttagcccacagagcaaagcttgataacaataaagagcttgccttctttgcaaatgctttggaagaagtctctattgagacaattgaggctggcttcatgaccaaggacttggctgcttgcattaaaggtttacccaatgtgcaacgttctgactacttgaatacatttgagttcatggataaacttggagaaaacttgaagatcaaactagctcaggccaaactttaagttcatacctgagctaagaaggataattgtcttttggtaactaggtctacaggtttacatttttctgtgttacactcaaggataaaggcaaaatcaattttgtaatttgtttagaagccagagtttatcttttctataagtttacagcctttttcttatatatacagttattgccacctttgtgaacatggcaagggacttttttacaatttttattttattttctagtaccagcctaggaattcggttagtactcatttgtattcactgtcactttttctcatgttctaattataaatgaccaaaatcaagattgctcaaaagggtaaatgatagccacagtattgctccctaaaatatgcataaagtagaaattcactgccttcccctcctgtccatgaccttgggcacagggaagttctggtgtcatagatatcccgttttgtgaggtagagctgtgcattaaacttgcacatgactggaacgaagtatgagtgcaactcaaatgtgttgaagatactgcagtcatttttgtaaagaccttgctgaatgtttccaatagactaaatactgtttaggccgcaggagagtttggaatccggaataaatactacctggaggtttgtcctctccatttttctctttctcctcctggcctggcctgaatattatactactctaaatagcatatttcatccaagtgcaataatgtaagctgaatcttttttggacttctgctggcctgttttatttcttttatataaatgtgatttctcagaaattgatattaaacactatcttatcttctcctgaactgttgattttaattaaaattaagtgctaattacca

SEQ ID NO: 328398 - DNA, 2320 bp, Homo sapiens
cctgggaggggacaaagcgggggaagaggaaaagctcggacctaccctgtggtcccgggtttctgcagagtctacttcagaagcggaggcactgggagtccggtttgggattgccaggctgtggttgtgagtctgagcttgtgagcggctgtggcgccccaactcttcgccagcatatcatcccggcaggcgataaactacattcagttgagtctgcaagactgggaggaactggggtgataagaaatctattcactgtcaaggtttattgaagtcaaaatgtccaaaaaaatcagtggcggttctgtggtagagatgcaaggagatgaaatgacacgaatcatttgggaattgattaaagagaaactcatttttccctacgtggaattggatctacatagctatgatttaggcatagagaatcgtgatgccaccaacgaccaagtcaccaaggatgctgcagaagctataaagaagcataatgttggcgtcaaatgtgccactatcactcctgatgagaagagggttgaggagttcaagttgaaacaaatgtggaaatcaccaaatggcaccatacgaaatattctgggtggcacggtcttcagagaagccattatctgcaaaaatatcccccggcttgtgagtggatgggtaaaacctatcatcataggtcgtcatgcttatggggatcaatacagagcaactgattttgttgttcctgggcctggaaaagtagagataacctacacaccaagtgacggaacccaaaaggtgacatacctggtacataactttgaagaaggtggtggtgttgccatggggatgtataatcaagataagtcaattgaagattttgcacacagttccttccaaatggctctgtctaagggttggcctttgtatctgagcaccaaaaacactattctgaagaaatatgatgggcgttttaaagacatctttcaggagatatatgacaagcagtacaagtcccagtttgaagctcaaaagatctggtatgagcataggctcatcgacgacatggtggcccaagctatgaaatcagagggaggcttcatctgggcctgtaaaaactatgatggtgacgtgcagtcggactctgtggcccaagggtatggctctctcggcatgatgaccagcgtgctggtttgtccagatggcaagacagtagaagcagaggctgcccacgggactgtaacccgtcactaccgcatgtaccagaaaggacaggagacgtccaccaatcccattgcttccatttttgcctggaccagagggttagcccacagagcaaagcttgataacaataaagagcttgccttctttgcaaatgctttggaagaagtctctattgagacaattgaggctggcttcatgaccaaggacttggctgcttgcattaaaggtttacccaatgtgcaacgttctgactacttgaatacatttgagttcatggataaacttggagaaaacttgaagatcaaactagctcaggccaaactttaagttcatacctgagctaagaaggataattgtcttttggtaactaggtctacaggtttacatttttctgtgttacactcaaggataaaggcaaagcctttttcttatatatacagttattgccacctttgtgaacatggcaagggacttttttacaatttttattttattttctagtaccagcctaggaattcggttagtactcatttgtattcactgtcactttttctcatgttctaattataaatgaccaaaatcaagattgctcaaaagggtaaatgatagccacagtattgctccctaaaatatgcataaagtagaaattcactgccttcccctcctgtccatgaccttgggcacagggaagttctggtgtcatagatatcccgttttgtgaggtagagctgtgcattaaacttgcacatgactggaacgaagtatgagtgcaactcaaatgtgttgaagatactgcagtcatttttgtaaagaccttgctgaatgtttccaatagactaaatactgtttaggccgcaggagagtttggaatccggaataaatactacctggaggtttgtcctctccatttttctctttctcctcctggcctggcctgaatattatactactctaaatagcatatttcatccaagtgcaataatgtaagctgaatcttttttggacttctgctggcctgttttatttcttttatataaatgtgatttctcagaaattgatattaaacactatcttatcttctcctgaactgttgattttaattaaaattaagtgctaattacca

SEQ ID NO: 328399 - DNA, 2316 bp, Homo sapiens
cctgggaggggacaaagcgggggaagaggaaaagctcggacctaccctgtggtcccgggtttctgcagagtctacttcagaagcggaggcactgggagtccggtttgggattgccaggctgtggttgtgagtctgagcttgtgagcggctgtggcgccccaactcttcgccagcatatcatcccggcaggcgataaactacattcagttgagtctgcaagactgggaggaactggggtgataagaaatctattcactgtcaaggtttattgaagtcaaaatgtccaaaaaaatcagtggcggttctgtggtagagatgcaaggagatgaaatgacacgaatcatttgggaattgattaaagagaaactcatttttccctacgtggaattggatctacatagctatgatttaggcatagagaatcgtgatgccaccaacgaccaagtcaccaaggatgctgcagaagctataaagaagcataatgttggcgtcaaatgtgccactatcactcctgatgagaagagggttgaggagttcaagttgaaacaaatgtggaaatcaccaaatggcaccatacgaaatattctgggtggcacggtcttcagagaagccattatctgcaaaaatatcccccggcttgtgagtggatgggtaaaacctatcatcataggtcgtcatgcttatggggatcaatacagagcaactgattttgttgttcctgggcctggaaaagtagagataacctacacaccaagtgacggaacccaaaaggtgacatacctggtacataactttgaagaaggtggtggtgttgccatggggatgtataatcaagataagtcaattgaagattttgcacacagttccttccaaatggctctgtctaagggttggcctttgtatctgagcaccaaaaacagcagtacaagtcccagtttgaagctcaaaagatctggtatgagcataggctcatcgacgacatggtggcccaagctatgaaatcagagggaggcttcatctgggcctgtaaaaactatgatggtgacgtgcagtcggactctgtggcccaagggtatggctctctcggcatgatgaccagcgtgctggtttgtccagatggcaagacagtagaagcagaggctgcccacgggactgtaacccgtcactaccgcatgtaccagaaaggacaggagacgtccaccaatcccattgcttccatttttgcctggaccagagggttagcccacagagcaaagcttgataacaataaagagcttgccttctttgcaaatgctttggaagaagtctctattgagacaattgaggctggcttcatgaccaaggacttggctgcttgcattaaaggtttacccaatgtgcaacgttctgactacttgaatacatttgagttcatggataaacttggagaaaacttgaagatcaaactagctcaggccaaactttaagttcatacctgagctaagaaggataattgtcttttggtaactaggtctacaggtttacatttttctgtgttacactcaaggataaaggcaaaatcaattttgtaatttgtttagaagccagagtttatcttttctataagtttacagcctttttcttatatatacagttattgccacctttgtgaacatggcaagggacttttttacaatttttattttattttctagtaccagcctaggaattcggttagtactcatttgtattcactgtcactttttctcatgttctaattataaatgaccaaaatcaagattgctcaaaagggtaaatgatagccacagtattgctccctaaaatatgcataaagtagaaattcactgccttcccctcctgtccatgaccttgggcacagggaagttctggtgtcatagatatcccgttttgtgaggtagagctgtgcattaaacttgcacatgactggaacgaagtatgagtgcaactcaaatgtgttgaagatactgcagtcatttttgtaaagaccttgctgaatgtttccaatagactaaatactgtttaggccgcaggagagtttggaatccggaataaatactacctggaggtttgtcctctccatttttctctttctcctcctggcctggcctgaatattatactactctaaatagcatatttcatccaagtgcaataatgtaagctgaatcttttttggacttctgctggcctgttttatttcttttatataaatgtgatttctcagaaattgatattaaacactatcttatcttctcctgaactgttgattttaattaaaattaagtgctaattacca

SEQ ID NO: 328400 - DNA, 2319 bp, Homo sapiens
cctgggaggggacaaagcgggggaagaggaaaagctcggacctaccctgtggtcccgggtttctgcagagtctacttcagaagcggaggcactgggagtccggtttgggattgccaggctgtggttgtgagtctgagcttgtgagcggctgtggcgccccaactcttcgccagcatatcatcccggcaggcgataaactacattcagttgagtctgcaagactgggaggaactggggtgataagaaatctattcactgtcaaggtttattgaagtcaaaatgtccaaaaaaatcagtggcggttctgtggtagagatgcaaggagatgaaatgacacgaatcatttgggaattgattaaagagaaactcatttttccctacgtggaattggatctacatagctatgatttaggcatagagaatcgtgatgccaccaacgaccaagtcaccaaggatgctgcagaagctataaagaagcataatgttggcgtcaaatgtgccactatcactcctgatgagaagagggttgaggagttcaagttgaaacaaatgtggaaatcaccaaatggcaccatacgaaatattctgggtggcacggtcttcagagaagccattatctgcaaaaatatcccccggcttgtgagtggatgggtaaaacctatcatcataggtcgtcatgcttatggggatcaatacagagcaactgattttgttgttcctgggcctggaaaagtagagataacctacacaccaagtgacggaacccaaaaggtgacatacctggtacataactttgaagaaggtggtggtgttgccatggggatgtataatcaagataagtcaattgaagattttgcacacagttccttccaaatggctctgtctaagggttggcctttgtatctgagcaccaaaaacactattctgaagaaatatgatgggcgttttaaagacatctttcaggagatatatgacaagcagtacaagtcccagtttgaagctcaaaagatctggtatgagcataggctcatcgacgacatggtggcccaagctatgaaatcagagggaggcttcatctgggcctgtaaaaactatgatggtgacgtgcagtcggactctgtggcccaagggtatggctctctcggcatgatgaccagcgtgctggtttgtccagatggcaagacagtagaagcagaggctgcccacgggactgtaacccgtcactaccgcatgtaccagaaaggacaggagacgtccaccaatcccattgcttccatttttgcctggaccagagggttagcccacagagcaaagcttgataacaataaagagcttgccttctttgcaaatgctttggaagaagtctctattgagacaattgaggctggcttcatgaccaaggacttggctgcttgcattaaaggtttacccaatgtgcaacgttctgactacttgaatacatttgagttcatggataaacttggagaaaagataattgtcttttggtaactaggtctacaggtttacatttttctgtgttacactcaaggataaaggcaaaatcaattttgtaatttgtttagaagccagagtttatcttttctataagtttacagcctttttcttatatatacagttattgccacctttgtgaacatggcaagggacttttttacaatttttattttattttctagtaccagcctaggaattcggttagtactcatttgtattcactgtcactttttctcatgttctaattataaatgaccaaaatcaagattgctcaaaagggtaaatgatagccacagtattgctccctaaaatatgcataaagtagaaattcactgccttcccctcctgtccatgaccttgggcacagggaagttctggtgtcatagatatcccgttttgtgaggtagagctgtgcattaaacttgcacatgactggaacgaagtatgagtgcaactcaaatgtgttgaagatactgcagtcatttttgtaaagaccttgctgaatgtttccaatagactaaatactgtttaggccgcaggagagtttggaatccggaataaatactacctggaggtttgtcctctccatttttctctttctcctcctggcctggcctgaatattatactactctaaatagcatatttcatccaagtgcaataatgtaagctgaatcttttttggacttctgctggcctgttttatttcttttatataaatgtgatttctcagaaattgatattaaacactatcttatcttctcctgaactgttgattttaattaaaattaagtgctaattacca

SEQ ID NO: 328401 - DNA, 2402 bp, Homo sapiens
cggccataaggacgggtgcaggccaagagcaaggacatgcaaaccccaagacctgctaacgggcggcgaagcgggggcacgccctcgcacacgcagagataaattgtgctcccatgacctttatttggaaagtgcctgcgggcctaaaattggcctttgtcccaccgagtacactcagcactgtactttaaaccggataaactgggctgtctggcaggcgataaactacattcagttgagtctgcaagactgggaggaactggggtgataagaaatctattcactgtcaaggtttattgaagtcaaaatgtccaaaaaaatcagtggcggttctgtggtagagatgcaaggagatgaaatgacacgaatcatttgggaattgattaaagagaaactcatttttccctacgtggaattggatctacatagctatgatttaggcatagagaatcgtgatgccaccaacgaccaagtcaccaaggatgctgcagaagctataaagaagcataatgttggcgtcaaatgtgccactatcactcctgatgagaagagggttgaggagttcaagttgaaacaaatgtggaaatcaccaaatggcaccatacgaaatattctgggtggcacggtcttcagagaagccattatctgcaaaaatatcccccggcttgtgagtggatgggtaaaacctatcatcataggtcgtcatgcttatggggatcaatacagagcaactgattttgttgttcctgggcctggaaaagtagagataacctacacaccaagtgacggaacccaaaaggtgacatacctggtacataactttgaagaaggtggtggtgttgccatggggatgtataatcaagataagtcaattgaagattttgcacacagttccttccaaatggctctgtctaagggttggcctttgtatctgagcaccaaaaacactattctgaagaaatatgatgggcgttttaaagacatctttcaggagatatatgacaagcagtacaagtcccagtttgaagctcaaaagatctggtatgagcataggctcatcgacgacatggtggcccaagctatgaaatcagagggaggcttcatctgggcctgtaaaaactatgatggtgacgtgcagtcggactctgtggcccaagggtatggctctctcggcatgatgaccagcgtgctggtttgtccagatggcaagacagtagaagcagaggctgcccacgggactgtaacccgtcactaccgcatgtaccagaaaggacaggagacgtccaccaatcccattgcttccatttttgcctggaccagagggttagcccacagagcaaagcttgataacaataaagagcttgccttctttgcaaatgctttggaagaagtctctattgagacaattgaggctggcttcatgaccaaggacttggctgcttgcattaaaggtttacccaatgtgcaacgttctgactacttgaatacatttgagttcatggataaacttggagaaaacttgaagatcaaactagctcaggccaaactttaagttcatacctgagctaagaaggataattgtcttttggtaactaggtctacaggtttacatttttctgtgttacactcaaggataaaggcaaaatcaattttgtaatttgtttagaagccagagtttatcttttctataagtttacagcctttttcttatatatacagttattgccacctttgtgaacatggcaagggacttttttacaatttttattttattttctagtaccagcctaggaattcggttagtactcatttgtattcactgtcactttttctcatgttctaattataaatgaccaaaatcaagattgctcaaaagggtaaatgatagccacagtattgctccctaaaatatgcataaagtagaaattcactgccttcccctcctgtccatgaccttgggcacagggaagttctggtgtcatagatatcccgttttgtgaggtagagctgtgcattaaacttgcacatgactggaacgaagtatgagtgcaactcaaatgtgttgaagatactgcagtcatttttgtaaagaccttgctgaatgtttccaatagactaaatactgtttaggccgcaggagagtttggaatccggaataaatactacctggaggtttgtcctctccatttttctctttctcctcctggcctggcctgaatattatactactctaaatagcatatttcatccaagtgcaataatgtaagctgaatcttttttggacttctgctggcctgttttatttcttttatataaatgtgatttctcagaaattgatattaaacactatcttatcttctcctgaactgttgattttaattaaaattaagtgctaattacca

SEQ ID NO: 328402 - DNA, 2473 bp, Homo sapiens
cggccataaggacgggtgcaggccaagagcaaggacatgcaaaccccaagacctgctaacgggcggcgaagcgggggcacgccctcgcacacgcagagataaattgtgctcccatgacctttatttggaaagtgcctgcgggcctaaaattggcctttgtcccaccgagtacactcagcactgtactttaaaccggataaactgggctgtctggcaggtactaaaaacagctaaattctcctgtgagtgttctgtatgttaacacttttattccttgttttgttttaggcgataaactacattcagttgagtctgcaagactgggaggaactggggtgataagaaatctattcactgtcaaggtttattgaagtcaaaatgtccaaaaaaatcagtggcggttctgtggtagagatgcaaggagatgaaatgacacgaatcatttgggaattgattaaagagaaactcatttttccctacgtggaattggatctacatagctatgatttaggcatagagaatcgtgatgccaccaacgaccaagtcaccaaggatgctgcagaagctataaagaagcataatgttggcgtcaaatgtgccactatcactcctgatgagaagagggttgaggagttcaagttgaaacaaatgtggaaatcaccaaatggcaccatacgaaatattctgggtggcacggtcttcagagaagccattatctgcaaaaatatcccccggcttgtgagtggatgggtaaaacctatcatcataggtcgtcatgcttatggggatcaatacagagcaactgattttgttgttcctgggcctggaaaagtagagataacctacacaccaagtgacggaacccaaaaggtgacatacctggtacataactttgaagaaggtggtggtgttgccatggggatgtataatcaagataagtcaattgaagattttgcacacagttccttccaaatggctctgtctaagggttggcctttgtatctgagcaccaaaaacactattctgaagaaatatgatgggcgttttaaagacatctttcaggagatatatgacaagcagtacaagtcccagtttgaagctcaaaagatctggtatgagcataggctcatcgacgacatggtggcccaagctatgaaatcagagggaggcttcatctgggcctgtaaaaactatgatggtgacgtgcagtcggactctgtggcccaagggtatggctctctcggcatgatgaccagcgtgctggtttgtccagatggcaagacagtagaagcagaggctgcccacgggactgtaacccgtcactaccgcatgtaccagaaaggacaggagacgtccaccaatcccattgcttccatttttgcctggaccagagggttagcccacagagcaaagcttgataacaataaagagcttgccttctttgcaaatgctttggaagaagtctctattgagacaattgaggctggcttcatgaccaaggacttggctgcttgcattaaaggtttacccaatgtgcaacgttctgactacttgaatacatttgagttcatggataaacttggagaaaacttgaagatcaaactagctcaggccaaactttaagttcatacctgagctaagaaggataattgtcttttggtaactaggtctacaggtttacatttttctgtgttacactcaaggataaaggcaaaatcaattttgtaatttgtttagaagccagagtttatcttttctataagtttacagcctttttcttatatatacagttattgccacctttgtgaacatggcaagggacttttttacaatttttattttattttctagtaccagcctaggaattcggttagtactcatttgtattcactgtcactttttctcatgttctaattataaatgaccaaaatcaagattgctcaaaagggtaaatgatagccacagtattgctccctaaaatatgcataaagtagaaattcactgccttcccctcctgtccatgaccttgggcacagggaagttctggtgtcatagatatcccgttttgtgaggtagagctgtgcattaaacttgcacatgactggaacgaagtatgagtgcaactcaaatgtgttgaagatactgcagtcatttttgtaaagaccttgctgaatgtttccaatagactaaatactgtttaggccgcaggagagtttggaatccggaataaatactacctggaggtttgtcctctccatttttctctttctcctcctggcctggcctgaatattatactactctaaatagcatatttcatccaagtgcaataatgtaagctgaatcttttttggacttctgctggcctgttttatttcttttatataaatgtgatttctcagaaattgatattaaacactatcttatcttctcctgaactgttgattttaattaaaattaagtgctaattacca

SEQ ID NO: 328403 - DNA, 2614 bp, Homo sapiens
cctatagtccctggcactcaggaggctaaagcatgagaatttcttgagcctgggaagcggaggttgcagtgagctgagatcacgccactatactccagcctgggcaacagagcaagactcttgtctcaacaacaacaaagaaaaagtgtttttgtttactgcttagcttacacacaaatcaattgagcaaagaaccctaggggctgtttacagaaattccaggagaagtttcatgcatggggtaagggccaaatcaacagaaacacagcgcctggtttcctcagcaccaagttgcccttcagtttcagttgcccttggtagctgtatgaacttgaatctccccagatgaatgtttgttaactttaattatgtttgtttttcccaagaagtactactttttctgtctcttatcagtgttaaacatctcctctcagtttgaaaatcagtagatcaacctggttaaagataactttttgccagataaatgagttacacaactctccttaccatccttctgtttctctacatcctcacaatcatttgtactgaatgcaacagaggaaggagtgttattgctttgtgatgactccgtggttgattattaacttcacaggtgatgttgggaggtagcaaaaatggagaaaagaagaaaatcaattatatagatataagagttgtaatgtggttctttcaataagaaaccacagaagagaactgttgtactgagggtatgaaagagagcgaggaagggcaactgggatgttcttagatccaaccgatcctgtgtttacctgccttctcttcccagtcccagcaagtgtatgagcagcttgagggttcttaagagacagctctcgtccatctttatttccccagaacagcagagcattgcacataagaataacaataatagattgagctctgtgtccagtactattctaaggaatataaatatatattcatatatatttatgaatatatgtatatttatctaatcccacagcaacctagtgaagtaggtgctgttattactcccattttacagataagaaaactgagccgcagtagctatgaagtcatagaactagagtggaatgtaggcagttggaccctgaaccctccatcaaggagtaggtatccctgaaataagtgaggggaaaatgcagcctttccagacccattggctctgatatctggagcggggatcctgccttctgaaaggcagaattattggtgattccatgtgctcttgtttactttgcttaccaagacctatcaagattgagtcatttatgctctcatctctgagagactcagtgctcttcatgcagttggacccaacgcttcatgctccactacttacagggtaggtatggctctctcggcatgatgaccagcgtgctggtttgtccagatggcaagacagtagaagcagaggctgcccacgggactgtaacccgtcactaccgcatgtaccagaaaggacaggagacgtccaccaatcccattgcttccatttttgcctggaccagagggttagcccacagagcaaagcttgataacaataaagagcttgccttctttgcaaatgctttggaagaagtctctattgagacaattgaggctggcttcatgaccaaggacttggctgcttgcattaaaggtttacccaatgtgcaacgttctgactacttgaatacatttgagttcatggataaacttggagaaaacttgaagatcaaactagctcaggccaaactttaagttcatacctgagctaagaaggataattgtcttttggtaactaggtctacaggtttacatttttctgtgttacactcaaggataaaggcaaaatcaattttgtaatttgtttagaagccagagtttatcttttctataagtttacagcctttttcttatatatacagttattgccacctttgtgaacatggcaagggacttttttacaatttttattttattttctagtaccagcctaggaattcggttagtactcatttgtattcactgtcactttttctcatgttctaattataaatgaccaaaatcaagattgctcaaaagggtaaatgatagccacagtattgctccctaaaatatgcataaagtagaaattcactgccttcccctcctgtccatgaccttgggcacagggaagttctggtgtcatagatatcccgttttgtgaggtagagctgtgcattaaacttgcacatgactggaacgaagtatgagtgcaactcaaatgtgttgaagatactgcagtcatttttgtaaagaccttgctgaatgtttccaatagactaaatactgtttaggccgcaggagagtttggaatccggaataaatactacctggaggtttgtcctctccatttttctctttctcctcctggcctggcctgaatattatactactctaaatagcatatttcatccaagtgcaataatgtaagctgaatcttttttggacttctgctggcctgttttatttcttttatataaatgtgatttctcagaaattgatattaaacactatcttatcttctcctgaactgttgattttaattaaaattaagtgctaattacca

SEQ ID NO: 328404 - DNA, 1443 bp, Homo sapiens
cctgggaggggacaaagcgggggaagaggaaaagctcggacctaccctgtggtcccgggtttctgcagagtctacttcagaagcggaggcactgggagtccggtttgggattgccaggctgtggttgtgagtctgagcttgtgagcggctgtggcgccccaactcttcgccagcatatcatcccggcaggcgataaactacattcagttgagtctgcaagactgggaggaactggggtgataagaaatctattcactgtcaaggtttattgaagtcaaaatgtccaaaaaaatcagtggcggttctgtggtagagatgcaaggagatgaaatgacacgaatcatttgggaattgattaaagagaaactcatttttccctacgtggaattggatctacatagctatgatttaggcatagagaatcgtgatgccaccaacgaccaagtcaccaaggatgctgcagaagctataaagaagcataatgttggcgtcaaatgtgccactatcactcctgatgagaagagggttgaggagttcaagttgaaacaaatgtggaaatcaccaaatggcaccatacgaaatattctgggtggcacggtcttcagagaagccattatctgcaaaaatatcccccggcttgtgagtggatgggtaaaacctatcatcataggtcgtcatgcttatggggatcaatacagagcaactgattttgttgttcctgggcctggaaaagtagagataacctacacaccaagtgacggaacccaaaaggtgacatacctggtacataactttgaagaaggtggtggtgttgccatggggatgtataatcaagataagtcaattgaagattttgcacacagttccttccaaatggctctgtctaagggttggcctttgtatctgagcaccaaaaacactattctgaagaaatatgatgggcgttttaaagacatctttcaggagatatatgacaagcagtacaagtcccagtttgaagctcaaaagatctggtatgagcataggctcatcgacgacatggtggcccaagctatgaaatcagagggaggcttcatctgggcctgtaaaaactatgatggtgacgtgcagtcggactctgtggcccaagggtatggctctctcggcatgatgaccagcgtgctggtttgtccagatggcaagacagtagaagcagaggctgcccacgggactgtaacccgtcactaccgcatgtaccagaaaggacaggagacgtccaccaatcccattgctcctcctggcctggcctgaatattatactactctaaatagcatatttcatccaagtgcaataatgtaagctgaatcttttttggacttctgctggcctgttttatttcttttatataaatgtgatttctcagaaattgatattaaacactatcttatcttctcctgaactgt

SEQ ID NO: 328405 - DNA, 740 bp, Homo sapiens
  misc_feature (26)..(26): n is a, c, g, or t
  misc_feature (34)..(34): n is a, c, g, or t
  misc_feature (54)..(54): n is a, c, g, or t
gcctataaaatatcttttcctaatanacgtatcnattcctggataaatgttccntatcaacaacagttatataaattttcagaaagtacccactttgtcagagagtccacttaaaaggaacctgtcggaagtatgtagtcgactacatacttccgcactgtcactttttctcatgttctaattataaatgaccaaaatcaagattgctcaaaagggtaaatgatagccacagtattgctccctaaaatatgcataaagtagaaattcactgccttcccctcctgtccatgaccttgggcacagggaagttctggtgtcatagatatcccgttttgtgaggtagagctgtgcattaaacttgcacatgactggaacgaagtatgagtgcaactcaaatgtgttgaagatactgcagtcatttttgtaaagaccttgctgaatgtttccaatagactaaatactgtttaggccgcaggagagtttggaatccggaataaatactacctggaggtttgtcctctccatttttctctttctcctcctggcctggcctgaatattatactactctaaatagcatatttcatccaagtgcaataatgtaagctgaatcttttttggacttctgctggcctgttttatttcttttatataaatgtgatttctcagaaattgatattaaacactatcttatcttctcctgaactgttgattttaattaaaattaagtgctaattacca

SEQ ID NO: 328406 - DNA, 475 bp, Homo sapiens
gtactgggttggtaactccacctcaacgcctgctatgatggataagatagagagagtgaggagaaggcttacgtatagagctgtgcattaaacttgcacatgactggaacgaagtatgagtgcaactcaaatgtgttgaagatactgcagtcatttttgtaaagaccttgctgaatgtttccaatagactaaatactgtttaggccgcaggagagtttggaatccggaataaatactacctggaggtttgtcctctccatttttctctttctcctcctggcctggcctgaatattatactactctaaatagcatatttcatccaagtgcaataatgtaagctgaatcttttttggacttctgctggcctgttttatttcttttatataaatgtgatttctcagaaattgatattaaacactatcttatcttctcctgaactgttgattttaattaaaattaagtgctaattacca

SEQ ID NO: 328407 - DNA, 706 bp, Homo sapiens
cctgggaggggacaaagcgggggaagaggaaaagctcggacctaccctgtggtcccgggtttctgcagagtctacttcagaagcggaggcactgggagtccggtttgggattgccaggctgtggttgtgagtctgagcttgtgagcggctgtggcgccccaactcttcgccagcatatcatcccggcaggcgataaactacattcagttgagtctgcaagactgggaggaactggggtgataagaaatctattcactgtcaaggtttattgaagtcaaaatgtccaaaaaaatcagtggcggttctgtggtagagatgcaaggagatgaaatgacacgaatcatttgggaattgattaaagagaaactcatttttccctacgtggaattggatctacatagggtaaatgagttacccctccgtgtagcaaactcagaaaggataatctggctgggcatggtggtgcacacgtgaagtcccagctacttaggaggcagaggcaggaggatccctcaagaccaggctggagtgcagtggtgtgatcttggctcactgcaacctctgcctcccgggttcaagcaattctcctgcctcagctacttggaaggctgaggcctgaggatcccttaagcctaggagttcaaggttacagctatgagctatgatcacaccactgcctacgcaacagagcaagaccctgtctcga

SEQ ID NO: 328408 - DNA, 379 bp, Homo sapiens
cctgggaggggacaaagcgggggaagaggaaaagctcggacctaccctgtggtcccgggtttctgcagagtctacttcagaagcggaggcactgggagtccggtttgggattgccaggctgtggttgtgagtctgagcttgtgagcggctgtggcgccccaactcttcgccagcatatcatcccggcaggcgataaactacattcagttgagtctgcaagactgggaggaactggggtgataagaaatctattcactgtcaaggtttattgaagtcaaaatgtccaaaaaaatcagtggcggttctgtggtagagcaggcgttatgagctaccgttataggtgtgcttgatacctgctcctttgatctttgatctaggg

SEQ ID NO: 328409 - DNA, 433 bp, Homo sapiens
ctgtccttccaaaacaagttagaatgtccttatctagaactggcttttctctcattatgtgcctcagaaatttgttggaaacctgtctgggacttctgaaatctagtctcagatgtgagagctgagaagtaggtcatttggttgtggtgggtgattttagccttattacaactacattacatttattcttctcccttttttcctctcactggcttctcctctacagaaggtggtggtgttgccatggggatgtataatcaagataagtcaattgaagattttgcacacagttccttccaaatggctctgtctaagggttggcctttgtatctgagcaccaaaaacactattctgaagaaatatgatgggcgttttaaagacatctttcaggagatatatgacaaagtaactatagttcttttttaactttttc

SEQ ID NO: 328410 - DNA, 2374 bp, Homo sapiens
cctgggaggggacaaagcgggggaagaggaaaagctcggacctaccctgtggtcccgggtttctgcagagtctacttcagaagcggaggcactgggagtccggtttgggattgccaggctgtggttgtgagtctgagcttgtgagcggctgtggcgccccaactcttcgccagcatatcatcccggcaggcgataaactacattcagttgagtctgcaagactgggaggaactggggtgataagaaatctattcactgtcaaggtttattgaagtcaaaatgtccaaaaaaatcagtggcggttctgtggtagagatgcaaggagatgaaatgacacgaatcatttgggaattgattaaagagaaactcatttttccctacgtggaattggatctacatagctatgatttaggcatagagaatcgtgatgccaccaacgaccaagtcaccaaggatgctgcagaagctataaagaagcataatgttggcgtcaaatgtgccactatcactcctgatgagaagagggttgaggagttcaagttgaaacaaatgtggaaatcaccaaatggcaccatacgaaatattctgggtggcacggtcttcagagaagccattatctgcaaaaatatcccccggcttgtgagtggatgggtaaaacctatcatcataggtcgtcatgcttatggggatcaatacagagcaactgattttgttgttcctgggcctggaaaagtagagataacctacacaccaagtgacggaacccaaaaggtgacatacctggtacataactttgaagaaggtggtggtgttgccatggggatgtataatcaagataagtcaattgaagattttgcacacagttccttccaaatggctctgtctaagggttggcctttgtatctgagcaccaaaaacactattctgaagaaatatgatgggcgttttaaagacatctttcaggagatatatgacaagcagtacaagtcccagtttgaagctcaaaagatctggtatgagcataggctcatcgacgacatggtggcccaagctatgaaatcagagggaggcttcatctgggcctgtaaaaactatgatggtgacgtgcagtcggactctgtggcccaagggtatggctctctcggcatgatgaccagcgtgctggtttgtccagatggcaagacagtagaagcagaggctgcccacgggactgtaacccgtcactaccgcatgtaccagaaaggacaggagacgtccaccaatcccattgcttccatttttgcctggaccagagggttagcccacagagcaaagcttgataacaataaagagcttgccttctttgcaaatgctttggaagaagtctctattgagacaattgaggctggcttcatgaccaaggacttggctgcttgcattaaaggtttacccaatgtgcaacgttctgactacttgaatacatttgagttcatggataaacttggagaaaacttgaagatcaaactagctcaggccaaactttaagttcatacctgagctaagaaggataattgtcttttggtaactaggtctacaggtttacatttttctgtgttacactcaaggataaaggcaaaatcaattttgtaatttgtttagaagccagagtttatcttttctataagtttacagcctttttcttatatatacagttattgccacctttgtgaacatggcaagggacttttttacaatttttattttattttctagtaccagcctaggaattcggttagtactcatttgtattcactgtcactttttctcatgttctaattataaatgaccaaaatcaagattgctcaaaagggtaaatgatagccacagtattgctccctaaaatatgcataaagtagaaattcactgccttcccctcctgtccatgaccttgggcacagggaagttctggtgtcatagatatcccgttttgtgaggtagagctgtgcattaaacttgcacatgactggaacgaagtatgagtgcaactcaaatgtgttgaagatactgcagtcatttttgtaaagaccttgctgaatgtttccaatagactaaatactgtttaggccgcaggagagtttggaatccggaataaatactacctggaggtttgtcctctccatttttctctttctcctcctggcctggcctgaatattatactactctaaatagcatatttcatccaagtgcaataatgtaagctgaatcttttttggacttctgctggcctgttttatttcttttatataaatgtgatttctcagaaattgatattaaacactatcttatcttctcctgaactgttgattttaattaaaattaagtgctaattacca

SEQ ID NO: 328411 - DNA, 2731 bp, Homo sapiens
cctgggaggggacaaagcgggggaagaggaaaagctcggacctaccctgtggtcccgggtttctgcagagtctacttcagaagcggaggcactgggagtccggtttgggattgccaggctgtggttgtgagtctgagcttgtgagcggctgtggcgccccaactcttcgccagcatatcatcccggcaggcgataaactacattcagttgagtctgcaagactgggaggaactggggtgataagaaatctattcactgtcaaggtttattgaagtcaaaatgtccaaaaaaatcagtggcggttctgtggtagagatgcaaggagatgaaatgacacgaatcatttgggaattgattaaagagaaactcatttttccctacgtggaattggatctacatagctatgatttaggcatagagaatcgtgatgccaccaacgaccaagtcaccaaggatgctgcagaagctataaagaagcataatgttggcgtcaaatgtgccactatcactcctgatgagaagagggttgaggagttcaagttgaaacaaatgtggaaatcaccaaatggcaccatacgaaatattctgggtggcacggtcttcagagaagccattatctgcaaaaatatcccccggcttgtgagtggatgggtaaaacctatcatcataggtcgtcatgcttatggggatcaatacagagcaactgattttgttgttcctgggcctggaaaagtagagataacctacacaccaagtgacggaacccaaaaggtgacatacctggtacataactttgaagaaggtggtggtgttgccatggggatgtataatcaagataagtcaattgaagattttgcacacagttccttccaaatggctctgtctaagggttggcctttgtatctgagcaccaaaaacactattctgaagaaatatgatgggcgttttaaagacatctttcaggagatatatgacaagcagtacaagtcccagtttgaagctcaaaagatctggtatgagcataggctcatcgacgacatggtggcccaagctatgaaatcagagggaggcttcatctgggcctgtaaaaactatgatggtgacgtgcagtcggactctgtggcccaagggtatggctctctcggcatgatgaccagcgtgctggtttgtccagatggcaagacagtagaagcagaggctgcccacgggactgtaacccgtcactaccgcatgtaccagaaaggacaggagacgtccaccaatcccattgcttccatttttgcctggaccagagggttagcccacagagcaaagcttgataacaataaagagcttgccttctttgcaaatgctttggaagaagtctctattgagacaattgaggctggcttcatgaccaaggacttggctgcttgcattaaaggtttacccaatgtgcaacgttctgactacttgaatacatttgagttcatggataaacttggagaaaacttgaagatcaaactagctcaggccaaactttaagttcatacctgagctaagaaggataattgtcttttggtaactaggtctacaggtttacatttttctgtgttacactcaaggataaaggcaaaatcaattttgtaatttgtttagaagccagagtttatcttttctataagtttacagcctttttcttatatatacagttattgccacctttgtgaacatggcaagggacttttttacaatttttattttattttctagtaccagcctaggaattcggttagtactcatttgtattcactgtcactttttctcatgttctaattataaatgaccaaaatcaagattgctcaaaagggtaaatgatagccacagtattgctccctaaaatatgcataaagtagaaattcactgccttcccctcctgtccatgaccttgggcacagggaagttctggtgtcatagatatcccgttttgtgaggtagagctgtgcattaaacttgcacatgactggaacgaagtatgagtgcaactcaaatgtgttgaagatactgcagtcatttttgtaaagaccttgctgaatgtttccaatagactaaatactgtttaggccgcaggagagtttggaatccggaataaatactacctggaggtttgtcctctccatttttctctttctcctcctggcctggcctgaatattatactactctaaatagcatatttcatccaagtgcaataatgtaagctgaatcttttttggacttctgctggcctgttttatttcttttatataaatgtgatttctcagaaattgatattaaacactatcttatcttctcctgaactgttgattttaattaaaattaagtgctaattaccaaaaaaaaaaaaaaaaaaaaaaaaaaatttggggggggctgggcggggaaagggtttttaaaaccctttggtggggggggggggccatgggttagtgcacacattgcccaaagcgcggctccagaggaaacctgtgggcctgaactaaggtggtgggttttttccacccaaataaaaaaacggcgtgggaacacggggtgtttttggaacaactcacgagtggggtgtcgggggcatgacccggtcttatcaaaggggtccaaggagtgccagttctacgcgcccccgcgtggtggggggcacgtacagaagaaacgcaaccccaggaaacagaaaatacaacagaaagagggaccag

SEQ ID NO: 328412 - DNA, 687 bp, Homo sapiens
cctgggaggggacaaagcgggggaagaggaaaagctcggacctaccctgtggtcccgggtttctgcagagtctacttcagaagcggaggcactgggagtccggtttgggattgccaggctgtggttgtgagtctgagcttgtgagcggctgtggcgccccaactcttcgccagcatatcatcccggcaggcgataaactacattcagttgagtctgcaagactgggaggaactggggtgataagaaatctattcactgtcaaggtttattgaagtcaaaatgtccaaaaaaatcagtggcggttctgtggtagagatgcaaggagatgaaatgacacgaatcatttgggaattgattaaagagaaactcatttttccctacgtggaattggatctacatagctatgatttaggcatagagaatcgtgatgccaccaacgaccaagtcaccaaggatgctgcagaagctataaagaagcataatgttggcgtcaaatgtgccactatcactcctgatgagaagagggttgaggagttcaagttgaaacaaatgtggaaatcaccaaatggcaccatacgaaatattctgggtggcacggtcttcagagaagccattatctgcaaaaatatcccccggcttgtgagtggatgggtttttgttgttcctgggccttgggtagagatcctc

SEQ ID NO: 328413 - DNA, 2332 bp, Homo sapiens
cctgggaggggacaaagcgggggaagaggaaaagctcggacctaccctgtggtcccgggtttctgcagagtctacttcagaagcggaggcactgggagtccggtttgggattgccaggctgtggttgtgagtctgagcttgtgagcggctgtggcgccccaactcttcgccagcatatcatcccggcaggcgataaactacattcagttgagtctgcaagactgggaggaactggggtgataagaaatctattcactgtcaaggtttattgaagtcaaaatgtccaaaaaaatcagtggcggttctgtggtagagatgcaaggagatgaaatgacacgaatcatttgggaattgattaaagagaaactcatttttccctacgtggaattggatctacatagctatgatttaggcatagagaatcgtgatgccaccaacgaccaagtcaccaaggatgctgcagaagctataaagaagcataatgttggcgtcaaatgtgccactatcactcctgatgagaagagggttgaggagttcaagttgaaacaaatgtggaaatcaccaaatggcaccatacgaaatattctgggtggcacggtcttcagagaagccattatctgcaaaaatatcccccggcttgtgagtggatgggtaaaacctatcatcataggtcgtcatgcttatggggatcaatacagagcaactgattttgttgttcctgggcctggaaaagtagagataacctacacaccaagtgacggaacccaaaaggtgacatacctggtacataactttgaagaaggtggtggtgttgccatggggatgtataatcaagataagtcaattgaagattttgcacacagttccttccaaatggctctgtctaagggttggcctttgtatctgagcaccaaaaacactattctgaagaaatatgatgggcgttttaaagacatctttcaggagatatatgacaagcagtacaagtcccagtttgaagctcaaaagatctggtatgagcataggctcatcgacgacatggtggcccaagctatgaaatcagagggaggcttcatctgggcctgtaggtatggctctctcggcatgatgaccagcgtgctggtttgtccagatggcaagacagtagaagcagaggctgcccacgggactgtaacccgtcactaccgcatgtaccagaaaggacaggagacgtccaccaatcccattgcttccatttttgcctggaccagagggttagcccacagagcaaagcttgataacaataaagagcttgccttctttgcaaatgctttggaagaagtctctattgagacaattgaggctggcttcatgaccaaggacttggctgcttgcattaaaggtttacccaatgtgcaacgttctgactacttgaatacatttgagttcatggataaacttggagaaaacttgaagatcaaactagctcaggccaaactttaagttcatacctgagctaagaaggataattgtcttttggtaactaggtctacaggtttacatttttctgtgttacactcaaggataaaggcaaaatcaattttgtaatttgtttagaagccagagtttatcttttctataagtttacagcctttttcttatatatacagttattgccacctttgtgaacatggcaagggacttttttacaatttttattttattttctagtaccagcctaggaattcggttagtactcatttgtattcactgtcactttttctcatgttctaattataaatgaccaaaatcaagattgctcaaaagggtaaatgatagccacagtattgctccctaaaatatgcataaagtagaaattcactgccttcccctcctgtccatgaccttgggcacagggaagttctggtgtcatagatatcccgttttgtgaggtagagctgtgcattaaacttgcacatgactggaacgaagtatgagtgcaactcaaatgtgttgaagatactgcagtcatttttgtaaagaccttgctgaatgtttccaatagactaaatactgtttaggccgcaggagagtttggaatccggaataaatactacctggaggtttgtcctctccatttttctctttctcctcctggcctggcctgaatattatactactctaaatagcatatttcatccaagtgcaataatgtaagctgaatcttttttggacttctgctggcctgttttatttcttttatataaatgtgatttctcagaaattgatattaaacactatcttatcttctcctgaactgttgattttaattaaaattaagtgctaattacca

SEQ ID NO: 328414 - DNA, 2342 bp, Homo sapiens
cctgggaggggacaaagcgggggaagaggaaaagctcggacctaccctgtggtcccgggtttctgcagagtctacttcagaagcggaggcactgggagtccggtttgggattgccaggctgtggttgtgagtctgagcttgtgagcggctgtggcgccccaactcttcgccagcatatcatcccggcaggcgataaactacattcagttgagtctgcaagactgggaggaactggggtgataagaaatctattcactgtcaaggtttattgaagtcaaaatgtccaaaaaaatcagtggcggttctgtggtagagatgcaaggagatgaaatgacacgaatcatttgggaattgattaaagagaaactcatttttccctacgtggaattggatctacatagctatgatttaggcatagagaatcgtgatgccaccaacgaccaagtcaccaaggatgctgcagaagctataaagaagcataatgttggcgtcaaatgtgccactatcactcctgatgagaagagggttgaggagttcaagttgaaacaaatgtggaaatcaccaaatggcaccatacgaaatattctgggtggcacggtcttcagagaagccattatctgcaaaaatatcccccggcttgtgagtggatgggtaaaacctatcatcataggtcgtcatgcttatggggatcaatacagagcaactgattttgttgttcctgggcctggaaaagtagagataacctacacaccaagtgacggaacccaaaaggtgacatacctggtacataactttgaagaaggtggtggtgttgccatggggatgtataatcaagataagtcaattgaagattttgcacacagttccttccaaatggctctgtctaagggttggcctttgtatctgagcaccaaaaacactattctgaagaaatatgatgggcgttttaaagacatctttcaggagatatatgacaagcagtacaagtcccagtttgaagctcaaaagatctggtatgagcataggctcatcgacgacatggtggcccaagctatgaaatcagagggaggcttcatctgggcctgtaaaaactatgatggtgacgtgcagtcggactctgtggcccaagggtatggctctctcggcatgatgaccagcgtgctggtttgtccagatggcaagacagtagaagcagaggctgcccacgggactgtaacccgtcactaccgcatgtaccagaaaggacaggagacgtccaccaatcccattgcttccatttttgcctggaccagagggttagcccacagagcaaagcttgataacaataaagagcttgccttctttgcaaatgctttggaagaagtctctattgagacaattgaggctggcttcatgaccaaggacttggctgcttgcattaaaggtttacccaatgtgcaacgttctgactacttgaatacatttgagttcatggataaacttggagaaaacttgaagatcaaactagctcaggccaaactttaagttcatacctgagctaagaaggataattgtcttttggtaactaggtctacaggtttacatttttctgtgttacactcaaggataaaggcaaaatcaattttgtaatttgtttagaagccagagtttatcttttctataagtttacagcctttttcttatatatacagttattgccacctttgtgaacatggcaagggacttttttacaatttttattttattttctagtaccagcctaggaattcggttagtactcatttgtattcactgtcactttttctcatgttctaattataaatgaccaaaatcaagattgctcaaaagggtaaatgatagccacagtattgctccctaaaatatgcataaagtagaaattcactgccttcccctcctgtccatgaccttgggcacagggaagttctggtgtcatagatatcccgttttgtgaggtagagctgtgcattaaacttgcacatgactggaacgaagtatgagtgcaactcaaatgtgttgaagatactgcagtcatttttgtaaagaccttgctgaatgtttccaatagactaaatactgtttaggccgcaggagagtttggaatccggaataaatactacctggaggtttgtcctctccatttttctctttctcctcctggcctggcctgaatattatactactctaaatagcatatttcatccaagtgcaataatgtaagctgaatcttttttggacttctgctggcctgttttatttcttttatataaatgtgatttctcagaaattgatattaaacactatcttatcttctcctgaactgt

SEQ ID NO: 328415 - DNA, 2222 bp, Homo sapiens
cctgggaggggacaaagcgggggaagaggaaaagctcggacctaccctgtggtcccgggtttctgcagagtctacttcagaagcggaggcactgggagtccggtttgggattgccaggctgtggttgtgagtctgagcttgtgagcggctgtggcgccccaactcttcgccagcatatcatcccggcaggcgataaactacattcagttgagtctgcaagactgggaggaactggggtgataagaaatctattcactgtcaaggtttattgaagtcaaaatgtccaaaaaaatcagtggcggttctgtggtagagatgcaaggagatgaaatgacacgaatcatttgggaattgattaaagagaaactcatttttccctacgtggaattggatctacatagctatgatttaggcatagagaatcgtgatgccaccaacgaccaagtcaccaaggatgctgcagaagctataaagaagcataatgttggcgtcaaatgtgccactatcactcctgatgagaagagggttgaggagttcaagttgaaacaaatgtggaaatcaccaaatggcaccatacgaaatattctgggtggcacggtcttcagagaagccattatctgcaaaaatatcccccggcttgtgagtggatgggtaaaacctatcatcataggtcgtcatgcttatggggatcaatacagagcaactgattttgttgttcctgggcctggaaaagtagagataacctacacaccaagtgacggaacccaaaaggtgacatacctggtacataactttgaagaaggtggtggtgttgccatggggatgtataatcaagataagtcaattgaagattttgcacacagttccttccaaatggctctgtctaagggttggcctttgtatctgagcaccaaaaacactattctgaagaaatatgatgggcgttttaaagacatctttcaggagatatatgacaaggtatggctctctcggcatgatgaccagcgtgctggtttgtccagatggcaagacagtagaagcagaggctgcccacgggactgtaacccgtcactaccgcatgtaccagaaaggacaggagacgtccaccaatcccattgcttccatttttgcctggaccagagggttagcccacagagcaaagcttgataacaataaagagcttgccttctttgcaaatgctttggaagaagtctctattgagacaattgaggctggcttcatgaccaaggacttggctgcttgcattaaaggtttacccaatgtgcaacgttctgactacttgaatacatttgagttcatggataaacttggagaaaacttgaagatcaaactagctcaggccaaactttaagttcatacctgagctaagaaggataattgtcttttggtaactaggtctacaggtttacatttttctgtgttacactcaaggataaaggcaaaatcaattttgtaatttgtttagaagccagagtttatcttttctataagtttacagcctttttcttatatatacagttattgccacctttgtgaacatggcaagggacttttttacaatttttattttattttctagtaccagcctaggaattcggttagtactcatttgtattcactgtcactttttctcatgttctaattataaatgaccaaaatcaagattgctcaaaagggtaaatgatagccacagtattgctccctaaaatatgcataaagtagaaattcactgccttcccctcctgtccatgaccttgggcacagggaagttctggtgtcatagatatcccgttttgtgaggtagagctgtgcattaaacttgcacatgactggaacgaagtatgagtgcaactcaaatgtgttgaagatactgcagtcatttttgtaaagaccttgctgaatgtttccaatagactaaatactgtttaggccgcaggagagtttggaatccggaataaatactacctggaggtttgtcctctccatttttctctttctcctcctggcctggcctgaatattatactactctaaatagcatatttcatccaagtgcaataatgtaagctgaatcttttttggacttctgctggcctgttttatttcttttatataaatgtgatttctcagaaattgatattaaacactatcttatcttctcctgaactgttgattttaattaaaattaagtgctaattacca

SEQ ID NO: 328416 - DNA, 2320 bp, Homo sapiens
cctgggaggggacaaagcgggggaagaggaaaagctcggacctaccctgtggtcccgggtttctgcagagtctacttcagaagcggaggcactgggagtccggtttgggattgccaggctgtggttgtgagtctgagcttgtgagcggctgtggcgccccaactcttcgccagcatatcatcccggcaggcgataaactacattcagttgagtctgcaagactgggaggaactggggtgataagaaatctattcactgtcaaggtttattgaagtcaaaatgtccaaaaaaatcagtggcggttctgtggtagagatgcaaggagatgaaatgacacgaatcatttgggaattgattaaagagaaactcatttttccctacgtggaattggatctacatagctatgatttaggcatagagaatcgtgatgccaccaacgaccaagtcaccaaggatgctgcagaagctataaagaagcataatgttggcgtcaaatgtgccactatcactcctgatgagaagagggttgaggagttcaagttgaaacaaatgtggaaatcaccaaatggcaccatacgaaatattctgggtggcacggtcttcagagaagccattatctgcaaaaatatcccccggcttgtgagtggatgggtaaaacctatcatcataggtcgtcatgcttatggggatcaatacagagcaactgattttgttgttcctgggcctggaaaagtagagataacctacacaccaagtgacggaacccggatgtataatcaagataagtcaattgaagattttgcacacagttccttccaaatggctctgtctaagggttggcctttgtatctgagcaccaaaaacactattctgaagaaatatgatgggcgttttaaagacatctttcaggagatatatgacaagcagtacaagtcccagtttgaagctcaaaagatctggtatgagcataggctcatcgacgacatggtggcccaagctatgaaatcagagggaggcttcatctgggcctgtaaaaactatgatggtgacgtgcagtcggactctgtggcccaagggtatggctctctcggcatgatgaccagcgtgctggtttgtccagatggcaagacagtagaagcagaggctgcccacgggactgtaacccgtcactaccgcatgtaccagaaaggacaggagacgtccaccaatcccattgcttccatttttgcctggaccagagggttagcccacagagcaaagcttgataacaataaagagcttgccttctttgcaaatgctttggaagaagtctctattgagacaattgaggctggcttcatgaccaaggacttggctgcttgcattaaaggtttacccaatgtgcaacgttctgactacttgaatacatttgagttcatggataaacttggagaaaacttgaagatcaaactagctcaggccaaactttaagttcatacctgagctaagaaggataattgtcttttggtaactaggtctacaggtttacatttttctgtgttacactcaaggataaaggcaaaatcaattttgtaatttgtttagaagccagagtttatcttttctataagtttacagcctttttcttatatatacagttattgccacctttgtgaacatggcaagggacttttttacaatttttattttattttctagtaccagcctaggaattcggttagtactcatttgtattcactgtcactttttctcatgttctaattataaatgaccaaaatcaagattgctcaaaagggtaaatgatagccacagtattgctccctaaaatatgcataaagtagaaattcactgccttcccctcctgtccatgaccttgggcacagggaagttctggtgtcatagatatcccgttttgtgaggtagagctgtgcattaaacttgcacatgactggaacgaagtatgagtgcaactcaaatgtgttgaagatactgcagtcatttttgtaaagaccttgctgaatgtttccaatagactaaatactgtttaggccgcaggagagtttggaatccggaataaatactacctggaggtttgtcctctccatttttctctttctcctcctggcctggcctgaatattatactactctaaatagcatatttcatccaagtgcaataatgtaagctgaatcttttttggacttctgctggcctgttttatttcttttatataaatgtgatttctcagaaattgatattaaacactatcttatcttctcctgaactgttgattttaattaaaattaagtgctaattacca

SEQ ID NO: 328417 - DNA, 2320 bp, Homo sapiens
cctgggaggggacaaagcgggggaagaggaaaagctcggacctaccctgtggtcccgggtttctgcagagtctacttcagaagcggaggcactgggagtccggtttgggattgccaggctgtggttgtgagtctgagcttgtgagcggctgtggcgccccaactcttcgccagcatatcatcccggcaggcgataaactacattcagttgagtctgcaagactgggaggaactggggtgataagaaatctattcactgtcaaggtttattgaagtcaaaatgtccaaaaaaatcagtggcggttctgtggtagagatgcaaggagatgaaatgacacgaatcatttgggaattgattaaagagaaactcatttttccctacgtggaattggatctacatagctatgatttaggcatagagaatcgtgatgccaccaacgaccaagtcaccaaggatgctgcagaagctataaagaagcataatgttggcgtcaaatgtgccactatcactcctgatgagaagagggttgaggagttcaagttgaaacaaatgtggaaatcaccaaatggcaccatacgaaatattctgggtggcacggtcttcagagaagccattatctgcaaaaatatcccccggcttgtgagtggatgggtaaaacctatcatcataggtcgtcatgcttatggggatcaatacagagcaactgattttgttgttcctgggcctggaaaagtagagataacctacacaccaagtgacggaacccaaaaggtgacatacctggtacataactttgaagaaggtggtggtgttgccatggggatgtataatcaagataagtcaattgaagattttgcacacagttccttccaaatggctctgtctaagggttggcctttgtatctgagcaccaaaaacactattctgaagaaatatgatgggcgttttaaagacatctttcaggagatatatgacaagcagtacaagtcccagtttgaagctcaaaagatctggtatgagcataggctcatcgacgacatggtggcccaagctatgaaatcagagggaggcttcatctgggcctgtaaaaactatgatggtgacgtgcagtcggactctgtggcccaagggtatggctctctcggcatgatgaccagcgtgctggtttgtccagatggcaagacagtagaagcagaggctgcccacgggactgtaacccgtcactaccgcatgtaccagaaaggacaggagacgtccaccaatcccattgcttccatttttgcctggaccagagggttagcccacagagcaaagcttgataacaataaagagcttgccttctttgcaaatgctttggaagaagtctctattgagacaattgaggctggcttcatgaccaaggacttggctgcttgcattaaaggtttacccaatgtgcaacgttctgactacttgaatacatttgagttcatggataaacttggagaaaacttgaagatcaaactagctcaggccaaactttaagttcatacctgagctaagaaggataattgtcttttggtaactaggtctacaggtttacatttttctgtgttacactcaaggataaaggcaaaatcaattttgtaatttgtttagaagccagagtttatcttttctataagtttacagcctttttcttatatatacagttattgccacctttgtgaacatggcaagggacttttttacaatttttattttattttctagtaccagcctaggaattcggttagtactcatttgtattcactgtcactttttctcatgttctaattataaatgaccaaaatcaagattgctcaaaagggtaaatgatagccacagtattgctccctgcacagggaagttctggtgtcatagatatcccgttttgtgaggtagagctgtgcattaaacttgcacatgactggaacgaagtatgagtgcaactcaaatgtgttgaagatactgcagtcatttttgtaaagaccttgctgaatgtttccaatagactaaatactgtttaggccgcaggagagtttggaatccggaataaatactacctggaggtttgtcctctccatttttctctttctcctcctggcctggcctgaatattatactactctaaatagcatatttcatccaagtgcaataatgtaagctgaatcttttttggacttctgctggcctgttttatttcttttatataaatgtgatttctcagaaattgatattaaacactatcttatcttctcctgaactgttgattttaattaaaattaagtgctaattacca

SEQ ID NO: 328418 - DNA, 2320 bp, Homo sapiens
cctgggaggggacaaagcgggggaagaggaaaagctcggacctaccctgtggtcccgggtttctgcagagtctacttcagaagcggaggcactgggagtccggtttgggattgccaggctgtggttgtgagtctgagcttgtgagcggctgtggcgccccaactcttcgccagcatatcatcccggcaggcgataaactacattcagttgagtctgcaagactgggaggaactggggtgataagaaatctattcactgtcaaggtttattgaagtcaaaatgtccaaaatttgggaattgattaaagagaaactcatttttccctacgtggaattggatctacatagctatgatttaggcatagagaatcgtgatgccaccaacgaccaagtcaccaaggatgctgcagaagctataaagaagcataatgttggcgtcaaatgtgccactatcactcctgatgagaagagggttgaggagttcaagttgaaacaaatgtggaaatcaccaaatggcaccatacgaaatattctgggtggcacggtcttcagagaagccattatctgcaaaaatatcccccggcttgtgagtggatgggtaaaacctatcatcataggtcgtcatgcttatggggatcaatacagagcaactgattttgttgttcctgggcctggaaaagtagagataacctacacaccaagtgacggaacccaaaaggtgacatacctggtacataactttgaagaaggtggtggtgttgccatggggatgtataatcaagataagtcaattgaagattttgcacacagttccttccaaatggctctgtctaagggttggcctttgtatctgagcaccaaaaacactattctgaagaaatatgatgggcgttttaaagacatctttcaggagatatatgacaagcagtacaagtcccagtttgaagctcaaaagatctggtatgagcataggctcatcgacgacatggtggcccaagctatgaaatcagagggaggcttcatctgggcctgtaaaaactatgatggtgacgtgcagtcggactctgtggcccaagggtatggctctctcggcatgatgaccagcgtgctggtttgtccagatggcaagacagtagaagcagaggctgcccacgggactgtaacccgtcactaccgcatgtaccagaaaggacaggagacgtccaccaatcccattgcttccatttttgcctggaccagagggttagcccacagagcaaagcttgataacaataaagagcttgccttctttgcaaatgctttggaagaagtctctattgagacaattgaggctggcttcatgaccaaggacttggctgcttgcattaaaggtttacccaatgtgcaacgttctgactacttgaatacatttgagttcatggataaacttggagaaaacttgaagatcaaactagctcaggccaaactttaagttcatacctgagctaagaaggataattgtcttttggtaactaggtctacaggtttacatttttctgtgttacactcaaggataaaggcaaaatcaattttgtaatttgtttagaagccagagtttatcttttctataagtttacagcctttttcttatatatacagttattgccacctttgtgaacatggcaagggacttttttacaatttttattttattttctagtaccagcctaggaattcggttagtactcatttgtattcactgtcactttttctcatgttctaattataaatgaccaaaatcaagattgctcaaaagggtaaatgatagccacagtattgctccctaaaatatgcataaagtagaaattcactgccttcccctcctgtccatgaccttgggcacagggaagttctggtgtcatagatatcccgttttgtgaggtagagctgtgcattaaacttgcacatgactggaacgaagtatgagtgcaactcaaatgtgttgaagatactgcagtcatttttgtaaagaccttgctgaatgtttccaatagactaaatactgtttaggccgcaggagagtttggaatccggaataaatactacctggaggtttgtcctctccatttttctctttctcctcctggcctggcctgaatattatactactctaaatagcatatttcatccaagtgcaataatgtaagctgaatcttttttggacttctgctggcctgttttatttcttttatataaatgtgatttctcagaaattgatattaaacactatcttatcttctcctgaactgttgattttaattaaaattaagtgctaattacca

SEQ ID NO: 328419 - DNA, 2445 bp, Homo sapiens
  misc_feature (308)..(309): n is a, c, g, or t
  misc_feature (354)..(354): n is a, c, g, or t
  misc_feature (366)..(366): n is a, c, g, or t
  misc_feature (368)..(369): n is a, c, g, or t
cctgggaggggacaaagcgggggaagaggaaaagctcggacctaccctgtggtcccgggtttctgcagagtctacttcagaagcggaggcactgggagtccggtttgggattgccaggctgtggttgtgagtctgagcttgtgagcggctgtggcgccccaactcttcgccagcatatcatcccggcaggcgataaactacattcagttgagtctgcaagactgggaggaactggggtgataagaaatctattcactgtcaagttattgaagtcaaaatgtccaaaagaaatcagctgtgcggttctnngtggtacgagcactgcaacggacgacttgaaacactgggaccgancggacacttcantnnttgggggaactttgactttacaacgaagcaaacacccttcgaaattctcgttctgttccgccgccgttaaccggatggggcaaactctgggcatcctacatagctatgatttaggcatagagaatcgtgatgccaccaacgaccaagtcaccaaggatgctgcagaagctataaagaagcataatgttggcgtcaaatgtgccactatcactcctgatgagaagagggttgaggagttcaagttgaaacaaatgtggaaatcaccaaatggcaccatacgaaatattctgggtggcacggtcttcagagaagccattatctgcaaaaatatcccccggcttgtgagtggatgggtaaaacctatcatcataggtcgtcatgcttatggggatcaatacagagcaactgattttgttgttcctgggcctggaaaagtagagataacctacacaccaagtgacggaacccaaaaggtgacatacctggtacataactttgaagaaggtggtggtgttgccatggggatgtataatcaagataagtcaattgaagattttgcacacagttccttccaaatggctctgtctaagggttggcctttgtatctgagcaccaaaaacactattctgaagaaatatgatgggcgttttaaagacatctttcaggagatatatgacaagcagtacaagtcccagtttgaagctcaaaagatctggtatgagcataggctcatcgacgacatggtggcccaagctatgaaatcagagggaggcttcatctgggcctgtaaaaactatgatggtgacgtgcagtcggactctgtggcccaagggtatggctctctcggcatgatgaccagcgtgctggtttgtccagatggcaagacagtagaagcagaggctgcccacgggactgtaacccgtcactaccgcatgtaccagaaaggacaggagacgtccaccaatcccattgcttccatttttgcctggaccagagggttagcccacagagcaaagcttgataacaataaagagcttgccttctttgcaaatgctttggaagaagtctctattgagacaattgaggctggcttcatgaccaaggacttggctgcttgcattaaaggtttacccaatgtgcaacgttctgactacttgaatacatttgagttcatggataaacttggagaaaacttgaagatcaaactagctcaggccaaactttaagttcatacctgagctaagaaggataattgtcttttggtaactaggtctacaggtttacatttttctgtgttacactcaaggataaaggcaaaatcaattttgtaatttgtttagaagccagagtttatcttttctataagtttacagcctttttcttatatatacagttattgccacctttgtgaacatggcaagggacttttttacaatttttattttattttctagtaccagcctaggaattcggttagtactcatttgtattcactgtcactttttctcatgttctaattataaatgaccaaaatcaagattgctcaaaagggtaaatgatagccacagtattgctccctaaaatatgcataaagtagaaattcactgccttcccctcctgtccatgaccttgggcacagggaagttctggtgtcatagatatcccgttttgtgaggtagagctgtgcattaaacttgcacatgactggaacgaagtatgagtgcaactcaaatgtgttgaagatactgcagtcatttttgtaaagaccttgctgaatgtttccaatagactaaatactgtttaggccgcaggagagtttggaatccggaataaatactacctggaggtttgtcctctccatttttctctttctcctcctggcctggcctgaatattatactactctaaatagcatatttcatccaagtgcaataatgtaagctgaatcttttttggacttctgctggcctgttttatttcttttatataaatgtgatttctcagaaattgatattaaacactatcttatcttctcctgaactgttgattttaattaaaattaagtgctaattacca

SEQ ID NO: 328420 - DNA, 2118 bp, Homo sapiens
gtcccagactcttaaacaaccagatttcaagtgaattaactgagcgagaactcacgtaatcaccaaaggggatggtcctaagccattcataagggatccaaccccatgttccaatctcctcccactgggccccacctccaacactgggaatcacatttcaacatgagatttggaagggacaaatatccaaaccatatcagtatgtaaaagaagtttcaaaattatttgccttttcttaaatgtatttctggttcatatcagtttttggcatttctgcatcttcaggattttaaagactgtatgttttttcatttctgctgtccttccaaaacaagttagaatgtccttatctagaactggcttttctctcattatgtgcctcagaaatttgttggaaacctgtctgggacttctgaaatctagtctcagatgtgagagctgagaagtaggtcatttggttgtggtgggtgattttagccttattacaactacattacatttattcttctcccttttttcctctcactggcttctcctctacagaaggtggtggtgttgccatggggatgtataatcaagataagtcaattgaagattttgcacacagttccttccaaatggctctgtctaagggttggcctttgtatctgagcaccaaaaacactattctgaagaaatatgatgggcgttttaaagacatctttcaggagatatatgacaagcagtacaagtcccagtttgaagctcaaaagatctggtatgagcataggctcatcgacgacatggtggcccaagctatgaaatcagagggaggcttcatctgggcctgtaaaaactatgatggtgacgtgcagtcggactctgtggcccaagggtatggctctctcggcatgatgaccagcgtgctggtttgtccagatggcaagacagtagaagcagaggctgcccacgggactgtaacccgtcactaccgcatgtaccagaaaggacaggagacgtccaccaatcccattgcttccatttttgcctggaccagagggttagcccacagagcaaagcttgataacaataaagagcttgccttctttgcaaatgctttggaagaagtctctattgagacaattgaggctggcttcatgaccaaggacttggctgcttgcattaaaggtttacccaatgtgcaacgttctgactacttgaatacatttgagttcatggataaacttggagaaaacttgaagatcaaactagctcaggccaaactttaagttcatacctgagctaagaaggataattgtcttttggtaactaggtctacaggtttacatttttctgtgttacactcaaggataaaggcaaaatcaattttgtaatttgtttagaagccagagtttatcttttctataagtttacagcctttttcttatatatacagttattgccacctttgtgaacatggcaagggacttttttacaatttttattttattttctagtaccagcctaggaattcggttagtactcatttgtattcactgtcactttttctcatgttctaattataaatgaccaaaatcaagattgctcaaaagggtaaatgatagccacagtattgctccctaaaatatgcataaagtagaaattcactgccttcccctcctgtccatgaccttgggcacagggaagttctggtgtcatagatatcccgttttgtgaggtagagctgtgcattaaacttgcacatgactggaacgaagtatgagtgcaactcaaatgtgttgaagatactgcagtcatttttgtaaagaccttgctgaatgtttccaatagactaaatactgtttaggccgcaggagagtttggaatccggaataaatactacctggaggtttgtcctctccatttttctctttctcctcctggcctggcctgaatattatactactctaaatagcatatttcatccaagtgcaataatgtaagctgaatcttttttggacttctgctggcctgttttatttcttttatataaatgtgatttctcagaaattgatattaaacactatcttatcttctcctgaactgttgattttaattaaaattaagtgctaattacca

SEQ ID NO: 328421 - DNA, 1086 bp, Homo sapiens
  misc_feature (705)..(705): n is a, c, g, or t
  misc_feature (710)..(710): n is a, c, g, or t
  misc_feature (713)..(713): n is a, c, g, or t
  misc_feature (718)..(718): n is a, c, g, or t
cctgggaggggacaaagcgggggaagaggaaaagctcggacctaccctgtggtcccgggtttctgcagagtctacttcagaagcggaggcactgggagtccggtttgggattgccaggctgtggttgtgagtctgagcttgtgagcggctgtggcgccccaactcttcgccagcatatcatcccggcaggcgataaactacattcagttgagtctgcaagactgggaggaactggggtgataagaaatctattcactgtcaaggtttattgaagtcaaaatgtccaaaaaaatcagtggcggttctgtggtagagatgcaaggagatgaaatgacacgaatcatttgggaattgattaaagagaaactcatttttccctacgtggaattggatctacatagctatgatttaggcatagagaatcgtgatgccaccaacgaccaagtcaccaaggatgctgcagaagctataaagaagcataatgttggcgtcaaatgtgccactatcactcctgatgagaagagggttgaggagttcaagttgaaacaaatgtggaaatcaccaaatggcaccatacgaaatattctgggtggcacggtcttcagagaagccattatctgcaaaaatatcccccggcttgtgagtggatgggtaaaacctatcatcataggtcgtcatgcttatggggatcaatacagagcctgntttgntgntcctnggcctggaaaaaaaaaaaaaaaaaaaaaaaaaaaaaatttggggggggctgggcggggaaagggtttttaaaaccctttggtggggggggggggccatgggttagtgcacacattgcccaaagcgcggctccagaggaaacctgtgggcctgaactaaggtggtgggttttttccacccaaataaaaaaacggcgtgggaacacggggtgtttttggaacaactcacgagtggggtgtcgggggcatgacccggtcttatcaaaggggtccaaggagtgccagttctacgcgcccccgcgtggtggggggcacgtacagaagaaacgcaaccccaggaaacagaaaatacaacagaaagagggaccag

SEQ ID NO: 328422 - DNA, 250 bp, Homo sapiens
gggctttgggagccagggacagtttatctgatatcacaggagagagagcaccctgaggtgggcattggctgtggctggagcctgtgaatggagaggagtggaacagtaggagcccggacgggcaggcgagatcaggtcctggagactttgattggatcttaggtgactgtcaagagtagttggaagccgctgatggatttgaagcttggcagtatcatagtcggcactcttctgtaaaaggaaccgtatg

SEQ ID NO: 328423 - DNA, 173 bp, Homo sapiens
aaatgtgaggacagagaaagaataagcggccagtggcatcactgagacccatctgcccagtcttctgtccagaagtctgtgcaagaaaacatgtagctattgcctaaatgtacagataggctttccagtgcatatatcttttggtgttttgaatttggtgaaggtagatctat

SEQ ID NO: 328424 - DNA, 450 bp, Homo sapiens
acctgggacttgggggctcaatcacgggtggccatcagctaccctgggcagggaggtggtcagaggcagctgtgaagtacaagctcctggaaaatggcagacctggaggcctcattgagctttgagctcaccctaagctcaccctaaattggagaattccttctggaatgttggtgccattccctctatccaggagggaagatgatggtgggaccactcctaaggacattcctctcaactggcctccctcctttccaccgcctctgtcaccccatcacctccgctcagtgtcaccccaggccggctccaggcatgcctagcatctgagacgtgcccagctcactcacagacaaggcactcataccccccagggctccagttccagccccagtcacccattcatagcctcagcccccttctcttatgccaaggattgcctgtggacctcca

SEQ ID NO: 328425 - DNA, 649 bp, Homo sapiens
ttcactcactcctctaatacagagcacctcctatatgcaaggcgcctgtgcaggcacctaggaggctgcaaagatgaacaaagatggtctctgcccagacaccaagtccttattggaaaatagaactcccaattactgcctttcccccttttgacagagcaatgaagtgcagcattgcctgtatcatcctttccctgtgccccgtcgcattactggaattaatacatgttcagtaaatattctttgaatgatagggtttttcttattttgaacagctttaatgaggtataatttatgctccataaaattcacccattttaagggtacgactgaatgattttgggtaaatttaccaagttgttgccactcttgccataatccagttttagaatgttttcatcattttgtaggttgaaaccgcaggcctattcatttctttcttccttcctctctctcctgtaagtgttgattgagcatccaccctgtcctagaccctgcttggtgctagggacataccagtgagcagggtggatgaggtcctcacccgtgagctcatatgctgatgggggagacctacagcaagcaaggagataaataaatacatcatttacctctatttgatggtcgacgcgggccgctaatttaatag

SEQ ID NO: 328426 - DNA, 1694 bp, Homo sapiens
  misc_feature (1614)..(1614): n is a, c, g, or t
acgtcacggcagcgcgccggccgcgagagagggccccgtcgcgaccgcgtccccttgggtccttgatcctgagctgaccgggtagccatggccttgcggctcctgaagctggcagcgacgtccgcgtccgcccgggtcgtggcggcgggcgcccagcgcgtgagaggaattcatagcagtgtgcagtgcaaactgcgctatggaatgtggcatttcctacttggggataaagcaagcaaaagactgacagaacgcagcagagtgataactgtagatggcaatatatgtactggaaaaggcaaacttgcaaaagaaatagcagagaaactaggcttcaagcactttcctgaagcggggattcattatccagacagtaccacaggagatgggaagcccctcgccaccgactataatggcaactgtagtttggagaaattttacgatgatccgagaagcaatgatggcaacagttaccgcctgcagtcctggttgtacagcagtcgcctgctgcagtactcagatgccttggagcacttgctgaccacaggacaaggtgttgtgttggagcgctccatcttcagtgactttgtgttcctggaggcgatgtacaaccagggattcatccgaaagcagtgtgtggaccactacaacgaggtgaagagcgtcaccatctgcgattacctgcccccccacctggtgatttacatcgatgtgcccgttccagaggtccagaggcggattcagaagaaaggagatccacatgaaatgaagatcacctctgcctatctacaggacattgagaatgcctataagaaaacctttctccctgagatgagtgaaaaatgtgaggttttacaatattctgcaagggaagctcaagattcaaaaaaggtggtagaggacattgaatacctgaagttcgataaagggccgtggctcaagcaggacaatcgcactttataccacctgcgattactggttcaggataagtttgaggtgctgaattacacaagcattcctatctttctcccggaagtcaccattggagctcatcagactgaccgtgtcttacatcagttcagagagctgccgggccgcaagtacagccctgggtacaacaccgaggtgggagacaagtggatctggctgaagtgaacgggccgccttctgctccagctgcatcacagtgatggccaagctgcatcagccgcactctcctggacgccatatagctttaagatcgggggagggtaaataatgcaaaaattgcacagtggaagaaggggtctcacaaaaagcaatccatcctgtagtataggtaatggagttgggggaagcagcttccattctggatgtttggaaccctttagctttgttttggaatggcccaccattctcactggaaaacagtggtctgctgtgaaaggccagctctcggcagcccctgtggtttcagcgctgccgctctgtgtcattcaggttgtgcacattgtttttcttctgacttccagaaataaaagtgtttccatgggaaaaaaaaaaaaaaaaaaaaaaaaaaaaaaaaaaaaaaaaaaaaaactcaggggggccccgtcccaattgcctatgagggcngttacaattaatgccgtgtttacacttggactggaaacctgggttccatttaaagctttgagaattcctttttcagttgc

SEQ ID NO: 328427 - DNA, 1647 bp, Homo sapiens
acgtcacggcagcgcgccggccgcgagagagggccccgtcgcgaccgcgtccccttgggtccttgatcctgagctgaccgggtagccatggccttgcggctcctgaagctggcagcgacgtccgcgtccgcccgggtcgtggcggcgggcgcccagcgcgtgagaggaattcatagcagtgtgcagtgcaaactgcgctatggaatgtggcatttcctacttggggataaagcaagcaaaagactgacagaacgcagcagagtgataactgtagatggcaatatatgtactggaaaaggcaaacttgcaaaagaaatagcagagaaactaggcttcaagcactttcctgaagcggggattcattatccagacagtaccacaggagatgggaagcccctcgccaccgactataatggcaactgtagtttggagaaattttacgatgatccgagaagcaatgatggcaacagttaccgcctgcagtcctggttgtacagcagtcgcctgctgcagtactcagatgccttggagcacttgctgaccacaggacaaggtgttgtgttggagcgctccatcttcagtgactttgtgttcctggaggcgatgtacaaccagggattcatccgaaagcagtgtgtggaccactacaacgaggtgaagagcgtcaccatctgcgattacctgcccccccacctggtgatttacatcgatgtgcccgttccagaggtccagaggcggattcagaagaaaggagatccacatgaaatgaagatcacctctgcctatctacaggacattgagaatgcctataagaaaacctttctccctgagatgagtgaaaaatgtgaggttttacaatattctgcaagggaagctcaagattcaaaaaaggtggtagaggacattgaatacctgaagttcgataaagggccgtggctcaagcaggacaatcgcactttataccacctgcgattactggttcaggataagtttgaggtgctgaattacacaagcattcctatctttctcccggaagtcaccattggagctcatcagactgaccgtgtcttacatcagttcagagagctgccgggccgcaagtacagccctgggtacaacaccgaggtgggagacaagtggatctggctgaagtgaacgggccgccttctgctccagctgcatcacagtgatggccaagctgcatcagccgcactctcctggacgccatatagctttaagatcgggggagggtaaataatgcaaaaattgcacagtggaagaaggggtctcacaaaaagcaatccatcctgtagtataggtaatggagttgggggaagcagcttccattctggatgtttggaaccctttagctttgttttggaatggcccaccattctcactggaaaacagtggtctgctgtgaaaggccagctctcggcagcccctgtggtttcagcgctgccgctctgtgtcattcaggttgtgcacattgtttttcttctgacttccagaaataaaagtgtttccatgggaaaaaccacaaaaaaaaaaccgcgggtttttgtggggggggaaaaaaggtaagggcatggtcatagttcgaccgtttgaaaggggaagcgggcccaaggggaatcgactcgaacc

SEQ ID NO: 328428 - DNA, 1527 bp, Homo sapiens
acgtcacggcagcgcgccggccgcgagagagggccccgtcgcgaccgcgtccccttgggtccttgatcctgagctgaccgggtagccatggccttgcggctcctgaagctggcagcgacgtccgcgtccgcccgggtcgtggcggcgggcgcccagcgcgtgagaggaattcatagcagtgtgcagtgcaaactgcgctatggaatgtggcatttcctacttggggataaagcaagcaaaagactgacagaacgcagcagagtgataactgtagatggcaatatatgtactggaaaaggcaaacttgcaaaagaaatagcagagaaactaggcttcaagcactttcctgaagcggggattcattatccagacagtaccacaggagatgggaagcccctcgccaccgactataatggcaactgtagtttggagaaattttacgatgatccgagaagcaatgatggcaacagttaccgcctgcagtcctggttgtacagcagtcgcctgctgcagtactcagatgccttggagcacttgctgaccacaggacaaggtgttgtgttggagcgctccatcttcagtgactttgtgttcctggaggcgatgtacaaccagggattcatccgaaagcagtgtgtggaccactacaacgaggtgaagagcgtcaccatctgcgattacctgcccccccacctggtgatttacatcgatgtgcccgttccagaggtccagaggcggattcagaagaaaggagatccacatgaaatgaagatcacctctgcctatctacaggacattgagaatgcctataagaaaacctttctccctgagatgagtgaaaaatgtgaggttttacaatattctgcaagggaagctcaagattcaaaaaaggtggtagaggacattgaatacctgaagttcgataaagggccgtggctcaagcaggacaatcgcactttataccacctgcgattactggttcaggataagtttgaggtgctgaattacacaagcattcctatctttctcccggaagtcaccattggagctcatcagactgaccgtgtcttacatcagttcagagagctgccgggccgcaagtacagccctgggtacaacaccgaggtgggagacaagtggatctggctgaagtgaacgggccgccttctgctccagctgcatcacagtgatggccaagctgcatcagccgcactctcctggacgccatatagctttaagatcgggggagggtaaataatgcaaaaattgcacagtggaagaaggggtctcacaaaaagcaatccatcctgtagtataggtaatggagttgggggaagcagcttccattctggatgtttggaaacacttttatttctggaagtcagaagaaaaacaatgtgcacaacctgaatgacacagagcggcagcgctgaaaccacaggggctgccgagagctggcctttcacagcagaccactgttttccagtgagaatggtgggccattccaaaacaaagctaaagggttcc

SEQ ID NO: 328429 - DNA, 1282 bp, Homo sapiens
acgtcacggcagcgcgccggccgcgagagagggccccgtcgcgaccgcgtccccttgggtccttgatcctgagctgaccgggtagccatggccttgcggctcctgaagctggcagcgacgtccgcgtccgcccgggtcgtggcggcgggcgcccagcgcgtgagaggaattcatagcagtgtgcagtgcaaactgcgctatggaatgtggcatttcctacttggggataaagcaagcaaaagactgacagaacgcagcagagtgataactgtagatggcaatatatgtactggaaaaggcaaacttgcaaaagaaatagcagagaaactaggcttcaagcactttcctgaagcggggattcattatccagacagtaccacaggagatgggaagcccctcgccaccgactataatggcaactgtagtttggagaaattttacgatgatccgagaagcaatgatggcaacagttaccgcctgcagtcctggttgtacagcagtcgcctgctgcagtactcagatgccttggagcacttgctgaccacaggacaaggtgttgtgttggagcgctccatcttcagtgactttgtgttcctggaggcgatgtacaaccagggattcatccgaaagcagtgtgtggaccactacaacgaggtgaagagcgtcaccatctgcgattacctgcccccccacctggtgatttacatcgatgtgcccgttccagaggtccagaggcggattcagaagaaaggagatccacatgaaatgaagatcacctctgcctatctacaggacattgagaatgcctataagaaaacctttctccctgagatgagtgaaaaatgtgaggttttacaatattctgcaagggaagctcaagattcaaaaaaggtggtagaggacattgaatacctgaagttcgataaagggccgtggctcaagcaggacaatcgcactttataccacctgcgattactggttcaggataagtttgaggtgctgaattacacaagcattcctatctttctcccggaagtcaccattggagctcatcagactgaccgtgtcttacatcagttcagagagctgccgggccgcaagtacagccctgggtacaacaccgaggtgggagacaagtggatctggctgaagtgaacgggccgccttctgctccagctgcatcacagtgatggccaagctgcgtttttcgctctggaatgagccacatacaactttaaggtcttcgcttggccttgttttaccctcaggaatcagctatgcg

SEQ ID NO: 328430 - DNA, 1503 bp, Homo sapiens
aaactgattactagtgcgatcccggctttatttcagtcacgaggccggcttccatggccttgcggctcctgaagctggcagcgacgtccgcgtccgcccgggtcgtggcggcgggcgcccagcgcgtgagaggaattcatagcagtgtgcagtgcaaactgcgctatggaatgtggcatttcctacttggggataaagcaagcaaaagactgacagaacgcagcagagtgataactgtagatggcaatatatgtactggaaaaggcaaacttgcaaaagaaatagcagagaaactaggcttcaagcactttcctgaagcggggattcattatccagacagtaccacaggagatgggaagcccctcgccaccgactataatggcaactgtagtttggagaaattttacgatgatccgagaagcaatgatggcaacagttaccgcctgcagtcctggttgtacagcagtcgcctgctgcagtactcagatgccttggagcacttgctgaccacaggacaaggtgttgtgttggagcgctccatcttcagtgactttgtgttcctggaggcgatgtacaaccagggattcatccgaaagcagtgtgtggaccactacaacgaggtgaagagcgtcaccatctgcgattacctgcccccccacctggtgatttacatcgatgtgcccgttccagaggtccagaggcggattcagaagaaaggagatccacatgaaatgaagatcacctctgcctatctacaggacattgagaatgcctataagaaaacctttctccctgagatgagtgaaaaatgtgaggttttacaatattctgcaagggaagctcaagattcaaaaaaggtggtagaggacattgaatacctgaagttcgataaagggccgtggctcaagcaggacaatcgcactttataccacctgcgattactggttcaggataagtttgaggtgctgaattacacaagcattcctatctttctcccggaagtcaccattggagctcatcagactgaccgtgtcttacatcagttcagagagctgccgggccgcaagtacagccctgggtacaacaccgaggtgggagacaagtggatctggctgaagtgaacgggccgccttctgctccagctgcatcacagtgatggccaagctgcatcagccgcactctcctggacgccatatagctttaagatcgggggagggtaaataatgcaaaaattgcacagtggaagaaggggtctcacaaaaagcaatccatcctgtagtataggtaatggagttgggggaagcagcttccattctggatgtttggaaccctttagctttgttttggaatggcccaccattctcactggaaaacagtggtctgctgtgaaaggccagctctcggcagcccctgtggtttcagcgctgccgctctgtgtcattcaggttgtgcacattgtttttcttctgacttccagaaataaaagtgtttccatgggaaaaa

SEQ ID NO: 328431 - DNA, 998 bp, Homo sapiens
acgtcacggcagcgcgccggccgcgagagagggccccgtcgcgaccgcgtccccttgggtccttgatcctgagctgaccgggtagccatggccttgcggctcctgaagctggcagcgacgtccgcgtccgcccgggtcgtggcggcgggcgcccagcgcgtgagaggaattcatagcagtgtgcagtgcaaactgcgctatggaatgtggcatttcctacttggggataaagcaagcaaaagactgacagaacgcagcagagtgataactgtagatggcaatatatgtactggaaaaggcaaacttgcaaaagaaatagcagagaaactaggcttcaagcactttcctgaagcggggattcattatccagacagtaccacaggagatgggaagcccctcgccaccgactataatggcaactgtagtttggagaaattttacgatgatccgagaagcaatgatggcaacagttaccgcctgcagtcctggttgtacagcagtcgcctgctgcagtactcagatgccttggagcacttgctgaccacaggacaaggtgttgtgttggagcgctccatcttcagtgactttgtgttcctggaggcgatgtacaaccagggattcatccgaaagcagtgtgtggaccactacaacgaggtgaagagcgtcaccatctgcgattacctgcccccccacctggtgatttacatcgatgtgcccgttccagaggtccagaggcggattcagaagaaaggagatccacatgaaatgaagatcacctctgcctatctacaggacattgagaatgcctataagaaaacctttctccctgagatgagtgaaaaatgtgaggttttacaatattctgcaagggaagctcaagattcaaaaaaggtggtagaggacattgaatacctgaagttcgataaagggccgtggctcaagcaggacaatcgcactttataccacctgcgattactgtaagtgcatctgtgtggggg

SEQ ID NO: 328432 - DNA, 1444 bp, Homo sapiens
gaggataaaactaggtccaaagagacgtccgcgttcgccagggttgtgtcggggggcgaaaagagcgtgagaggaattcatagcagtgtgcagtgcaaactgcgctatggaatgtggcatttcctacttggggataaagcaagcaaaagactgacagaacgcagcagagtgataactgtagatggcaatatatgtactggaaaaggcaaacttgcaaaagaaatagcagagaaactaggcttcaagcactttcctgaagcggggattcattatccagacagtaccacaggagatgggaagcccctcgccaccgactataatggcaactgtagtttggagaaattttacgatgatccgagaagcaatgatggcaacagttaccgcctgcagtcctggttgtacagcagtcgcctgctgcagtactcagatgccttggagcacttgctgaccacaggacaaggtgttgtgttggagcgctccatcttcagtgactttgtgttcctggaggcgatgtacaaccagggattcatccgaaagcagtgtgtggaccactacaacgaggtgaagagcgtcaccatctgcgattacctgcccccccacctggtgatttacatcgatgtgcccgttccagaggtccagaggcggattcagaagaaaggagatccacatgaaatgaagatcacctctgcctatctacaggacattgagaatgcctataagaaaacctttctccctgagatgagtgaaaaatgtgaggttttacaatattctgcaagggaagctcaagattcaaaaaaggtggtagaggacattgaatacctgaagttcgataaagggccgtggctcaagcaggacaatcgcactttataccacctgcgattactggttcaggataagtttgaggtgctgaattacacaagcattcctatctttctcccggaagtcaccattggagctcatcagactgaccgtgtcttacatcagttcagagagctgccgggccgcaagtacagccctgggtacaacaccgaggtgggagacaagtggatctggctgaagtgaacgggccgccttctgctccagctgcatcacagtgatggccaagctgcatcagccgcactctcctggacgccatatagctttaagatcgggggagggtaaataatgcaaaaattgcacagtggaagaaggggtctcacaaaaagcaatccatcctgtagtataggtaatggagttgggggaagcagcttccattctggatgtttggaaccctttagctttgttttggaatggcccaccattctcactggaaaacagtggtctgctgtgaaaggccagctctcggcagcccctgtggtttcagcgctgccgctctgtgtcattcaggttgtgcacattgtttttcttctgacttccagaaataaaagtgtttccatgggaaaaa

SEQ ID NO: 328433 - DNA, 1557 bp, Homo sapiens
acgtcacggcagcgcgccggccgcgagagagggccccgtcgcgaccgcgtccccttgggtccttgatcctgagctgaccgggtagccatggccttgcggctcctgaagctggcagcgacgtccgcgtccgcccgggtcgtggcggcgggcgcccagcgcgtgagaggaattcatagcagtgtgcagtgcaaactgcgctatggaatgtggcatttcctacttggggataaagcaagcaaaagactgacagaacgcagcagagtgataactgtagatggcaatatatgtactggaaaaggcaaacttgcaaaagaaatagcagagaaactaggcttcaagcactttcctgaagcggggattcattatccagacagtaccacaggagatgggaagcccctcgccaccgactataatggcaactgtagtttggagaaattttacgatgatccgagaagcaatgatggcaacagttaccgcctgcagtcctggttgtacagcagtcgcctgctgcagtactcagatgccttggagcacttgctgaccacaggacaaggtgttgtgttggagcgctccatcttcagtgactttgtgttcctggaggcgatgtacaaccagggattcatccgaaagcagtgtgtggaccactacaacgaggtgaagagcgtcaccatctgcgattacctgcccccccacctggtgatttacatcgatgtgcccgttccagaggtccagaggcggattcagaagaaaggagatgtaatgcagttttcaatcaaaggccaagcatctctattttgaatgtagatcagcactaaaagccctgttttaatagcatttatactaattcctaccagtcctcacgaggagggtgacacacaccctgttcccacttgagagagggcatctgcaggggtggaggggagaccccatggctcggcctggtgccacagcctgcgggcctgccgcccaccagtgctctgcggtcccactgtggtccccgagtcccctcagctgtttaaacttgggaggctggtgagggcctcctggcagagcgtcctccatccctctgtcacgtacctttctgttctctgatgaggtttttgtgtcctatcgttttcttccacattggaagcaatttctaatatccctcatcacttcaatctatttaacgcaaatcgtgcctctccccctttttcttacttaccaattctagaacagtagagcagtgatatccacacacatccatttactctttgtagttttcattggatcttaattaggtggcctcgaagcaacgccttttgaagtgaccctgtggccgttggtagctctgttggcggcttgatggaggatcctgagatgaaacaaagaccgtctttgccctgtggcgagttctttgttttttttttttgagacagagtctcgctctgtcacccaggctggagtgcagtggcacgatctcggctcactgcaagctccgcctcccgggttcacgccattctcctgcctcagcctcccaagtagctgggactacaggcgcacgccaccatgcccggc

SEQ ID NO: 328434 - DNA, 977 bp, Homo sapiens
  misc_feature (19)..(19): n is a, c, g, or t
ctaggctaggtacgaggcngggtggtttgtgttcctggaggcgatgtacaaccagggattcatccgaaagcagtgtgtggaccactacaacgaggtgaagagcgtcaccatctgcgattacctgcccccccacctggtgatttacatcgatgtgcccgttccagaggtccagaggcggattcagaagaaaggagatccacatgaaatgaagatcacctctgcctatctacaggacattgagaatgcctataagaaaacctttctccctgagatgagtgaaaaatgtgaggttttacaatattctgcaagggaagctcaagattcaaaaaaggtggtagaggacattgaatacctgaagttcgataaagggccgtggctcaagcaggacaatcgcactttataccacctgcgattactggttcaggataagtttgaggtgctgaattacacaagcattcctatctttctcccggaagtcaccattggagctcatcagactgaccgtgtcttacatcagttcagagagctgccgggccgcaagtacagccctgggtacaacaccgaggtgggagacaagtggatctggctgaagtgaacgggccgccttctgctccagctgcatcacagtgatggccaagctgcatcagccgcactctcctggacgccatatagctttaagatcgggggagggtaaataatgcaaaaattgcacagtggaagaaggggtctcacaaaaagcaatccatcctgtagtataggtaatggagttgggggaagcagcttccattctggatgtttggaaccctttagctttgttttggaatggcccaccattctcactggaaaacagtggtctgctgtgaaaggccagctctcggcagcccctgtggtttcagcgctgccgctctgtgtcattcaggttgtgcacattgtttttcttctgacttccagaaataaaagtgtttccatgggaaaaa

SEQ ID NO: 328435 - DNA, 1286 bp, Homo sapiens
  misc_feature (1232)..(1232): n is a, c, g, or t
  misc_feature (1253)..(1253): n is a, c, g, or t
  misc_feature (1278)..(1279): n is a, c, g, or t
acgtcacggcagcgcgccggccgcgagagagggccccgtcgcgaccgcgtccccttgggtccttgatcctgagctgaccgggtagccatggccttgcggctcctgaagctggcagcgacgtccgcgtccgcccgggtcgtggcggcgggcgcccagcgcgtgagaggaattcatagcagtgtgcagtgcaaactgcgctatggaatgtggcatttcctacttggggataaagcaagcaaaagactgacagaacgcagcagagtgataactgtagatggcaatatatgtactggaaaaggcaaacttgcaaaagaaatagcagagaaactaggcttcaagcactttcctgaagcggggattcattatccagacagtaccacaggagatgggaagcccctcgccaccgactataatggcaactgtagtttggagaaattttacgatgatccgagaagcaatgatggcaacagttaccgcctgcagtcctggttgtacagcagtcgcctgctgcagtactcagatgccttggagcacttgctgaccacaggacaaggtgttgtgttggagcgctccatcttcagtgactttgtgttcctggaggcgatgtacaaccagggattcatccgaaagcagtgtgtggaccactacaacgaggtgaagagcgtcaccatctgcgattacctgcccccccacctggtgatttacatcgatgtgcccgttccagaggtccagaggcggattcagaagaaaggagatgtaatgcagttttcaatcaaaggccaagcatctctattttgaatgtagatcagcactaaaagccctgttttaatagcatttatactaattcctaccagtcctcacgaggagggtgacacacaccctgttcccacttgagagagggcatctgcaggggtggaggggagaccccatggctcggcctggtgccacagcctgcgggcctgccgcccaccagtgctctgcggtcccactgtggtccccgagtcccctcagctgtttaaacttgggaggctggtgagggcctcctggcagagcgtcctccatccctctgtcacgtacctttctgttctctgatgaggtttttgtgtcctatcgttttcttccacattggaagcaatttcttttgcaagtttgccttttccagtacatatattggccatctacatgttatcactctcgctgcgttcggtcagtctttggctgtgctttatccncccaagtaggaacatgccacnattccagtagacacagctgtgcacnngggtacc

SEQ ID NO: 328436 - DNA, 1081 bp, Homo sapiens
acgtcacggcagcgcgccggccgcgagagagggccccgtcgcgaccgcgtccccttgggtccttgatcctgagctgaccgggtagccatggccttgcggctcctgaagctggcagcgacgtccgcgtccgcccgggtcgtggcggcgggcgcccagcgcgtgagaggaattcatagcagtgtgcagtgcaaactgcgctatggaatgtggcccatctgcgattacctgcccccccacctggtgatttacatcgatgtgcccgttccagaggtccagaggcggattcagaagaaaggagatccacatgaaatgaagatcacctctgcctatctacaggacattgagaatgcctataagaaaacctttctccctgagatgagtgaaaaatgtgaggttttacaatattctgcaagggaagctcaagattcaaaaaaggtggtagaggacattgaatacctgaagttcgataaagggccgtggctcaagcaggacaatcgcactttataccacctgcgattactggttcaggataagtttgaggtgctgaattacacaagcattcctatctttctcccggaagtcaccattggagctcatcagactgaccgtgtcttacatcagttcagagagctgccgggccgcaagtacagccctgggtacaacaccgaggtgggagacaagtggatctggctgaagtgaacgggccgccttctgctccagctgcatcacagtgatggccaagctgcatcagccgcactctcctggacgccatatagctttaagatcgggggagggtaaataatgcaaaaattgcacagtggaagaaggggtctcacaaaaagcaatccatcctgtagtataggtaatggagttgggggaagcagcttccattctggatgtttggaaccctttagctttgttttggaatggcccaccattctcactggaaaacagtggtctgctgtgaaaggccagctctcggcagcccctgtggtttcagcgctgccgctctgtgtcattcaggttgtgcacattgtttttcttctgacttccagaaataaaagtgtttccatgggaaaaa

SEQ ID NO: 328437 - DNA, 2029 bp, Homo sapiens
ttcactcactcctctaatacagagcacctcctatatgcaaggcgcctgtgcaggcacctaggaggctgcaaagatgaacaaagatggtctctgcccagacaccaagtccttattggaaaatagaactcccaattactgcctttcccccttttgacagagcaatgaagtgcagcattgcctgtatcatcctttccctgtgccccgtcgcattactggaattaatacatgttcagtaaatattctttgaatgatagggtttttcttattttgaacagctttaatgaggtataatttatgctccataaaattcacccattttaagggtacgactgaatgattttgggtaaatttaccaagttgttgccactcttgccataatccagttttagaatgttttcatcattttgtaggttgaaaccgcaggcctattcatttctttcttccttcctctctctcctgtaagtgttgattgagcatccaccctgtcctagaccctgcttggtgctagggacataccagtgagcagggtggatgaggtcctcacccgtgagctcatatgctgatgggggagacctacagcaagcaaggagataaataaatacatcaaatagaggtaaatgatgtgaagaaaacaaaacgggctgagaagatagtgtgagactgtaaggagttttaaattttaaaacttgctactcataattagatattcaagtttctgaaattcgcatagtgcatttcagatgatgagagaggtgacagccgtagaaagtgggagaagtggttgcggggagatgggtgagcgatggaggtggcgagcaagttggagagatgcagggagagtcaggtgacaagaagagagtgtgctgaggacagatggcggacagacaggccgctgcccccaatttttggtgctctttcattcctgcactcaggcacgaggcagacaggaaagacaggcagtgctgcttcgtaacaggcatctttcttgccctaagtatacatcttagaatgtgtggagaaagtcacgctatgggagcacttgggcaggctcaggtgttcactgtagtagaaggagaatgactctagctgatgttgggaccctttgctgtcaccccgcagtccccacagtgcccggtgtgagttgtaagaaaatggtggtcagtgattgtcttcgcattttatatacgcacaggtcaaagagaatgaactctaaatgtttcccagtttgatttttctgcttctgtttagccacatgaaatgaagatcacctctgcctatctacaggacattgagaatgcctataagaaaacctttctccctgagatgagtgaaaaatgtgaggttttacaatattctgcaagggaagctcaagattcaaaaaaggtggtagaggacattgaatacctgaagttcgataaagggccgtggctcaagcaggacaatcgcactttataccacctgcgattactggttcaggataagtttgaggtgctgaattacacaagcattcctatctttctcccggaagtcaccattggagctcatcagactgaccgtgtcttacatcagttcagagagctgccgggccgcaagtacagccctgggtacaacaccgaggtgggagacaagtggatctggctgaagtgaacgggccgccttctgctccagctgcatcacagtgatggccaagctgcatcagccgcactctcctggacgccatatagctttaagatcgggggagggtaaataatgcaaaaattgcacagtggaagaaggggtctcacaaaaagcaatccatcctgtagtataggtaatggagttgggggaagcagcttccattctggatgtttggaaccctttagctttgttttggaatggcccaccattctcactggaaaacagtggtctgctgtgaaaggccagctctcggcagcccctgtggtttcagcgctgccgctctgtgtcattcaggttgtgcacattgtttttcttctgacttccagaaataaaagtgtttccatgggaaaaa

SEQ ID NO: 328438 - DNA, 2186 bp, Homo sapiens
  misc_feature (2106)..(2106): n is a, c, g, or t
ttcactcactcctctaatacagagcacctcctatatgcaaggcgcctgtgcaggcacctaggaggctgcaaagatgaacaaagatggtctctgcccagacaccaagtccttattggaaaatagaactcccaattactgcctttcccccttttgacagagcaatgaagtgcagcattgcctgtatcatcctttccctgtgccccgtcgcattactggaattaatacatgttcagtaaatattctttgaatgatagggtttttcttattttgaacagctttaatgaggtataatttatgctccataaaattcacccattttaagggtacgactgaatgattttgggtaaatttaccaagttgttgccactcttgccataatccagttttagaatgttttcatcattttgtaggttgaaaccgcaggcctattcatttctttcttccttcctctctctcctgtaagtgttgattgagcatccaccctgtcctagaccctgcttggtgctagggacataccagtgagcagggtggatgaggtcctcacccgtgagctcatatgctgatgggggagacctacagcaagcaaggagataaataaatacatcaaatagaggtaaatgatgtgaagaaaacaaaacgggctgagaagatagtgtgagactgtaaggagttttaaattttaaaacttgctactcataattagatattcaagtttctgaaattcgcatagtgcatttcagatgatgagagaggtgacagccgtagaaagtgggagaagtggttgcggggagatgggtgagcgatggaggtggcgagcaagttggagagatgcagggagagtcaggtgacaagaagagagtgtgctgaggacagatggcggacagacaggccgctgcccccaatttttggtgctctttcattcctgcactcaggcacgaggcagacaggaaagacaggcagtgctgcttcgtaacaggcatctttcttgccctaagtatacatcttagaatgtgtggagaaagtcacgctatgggagcacttgggcaggctcaggtgttcactgtagtagaaggagaatgactctagctgatgttgggaccctttgctgtcaccccgcagtccccacagtgcccggtgtgagttgtaagaaaatggtggtcagtgattgtcttcgcattttatatacgcacaggtcaaagagaatgaactctaaatgtttcccagtttgatttttctgcttctgtttagccacatgaaatgaagatcacctctgcctatctacaggacattgagaatgcctataagaaaacctttctccctgagatgagtgaaaaatgtgaggttttacaatattctgcaagggaagctcaagattcaaaaaaggtggtagaggacattgaatacctgaagttcgataaagggccgtggctcaagcaggacaatcgcactttataccacctgcgattactggttcaggataagtttgaggtgctgaattacacaagcattcctatctttctcccggaagtcaccattggagctcatcagactgaccgtgtcttacatcagttcagagagctgccgggccgcaagtacagccctgggtacaacaccgaggtgggagacaagtggatctggctgaagtgaacgggccgccttctgctccagctgcatcacagtgatggccaagctgcatcagccgcactctcctggacgccatatagctttaagatcgggggagggtaaataatgcaaaaattgcacagtggaagaaggggtctcacaaaaagcaatccatcctgtagtataggtaatggagttgggggaagcagcttccattctggatgtttggaaccctttagctttgttttggaatggcccaccattctcactggaaaacagtggtctgctgtgaaaggccagctctcggcagcccctgtggtttcagcgctgccgctctgtgtcattcaggttgtgcacattgtttttcttctgacttccagaaataaaagtgtttccatgggaaaaaaaaaaaaaaaaaaaaaaaaaaaaaaaaaaaaaaaaaaaaaactcaggggggccccgtcccaattgcctatgagggcngttacaattaatgccgtgtttacacttggactggaaacctgggttccatttaaagctttgagaattcctttttcagttgc

SEQ ID NO: 328439 - DNA, 1537 bp, Homo sapiens
acgtcacggcagcgcgccggccgcgagagagggccccgtcgcgaccgcgtccccttgggtccttgatcctgagctgaccgggtagccatggccttgcggctcctgaagctggcagcgacgtccgcgtccgcccgggtcgtggcggcgggcgcccagcgcgtgagaggaattcatagcagtgtgcagtgcaaactgcgctatggaatgtggcatttcctacttggggataaagcaagcaaaagactgacagaacgcagcagagtgataactgtagatggcaatatatgtactggaaaaggcaaacttgcaaaagaaatagcagagaaactaggcttcaagcactttcctgaagcggggattcattatccagacagtaccacaggagatgggaagcccctcgccaccgactataatggcaactgtagtttggagaaattttacgatgatccgagaagcaatgatggcaacagttaccgcctgcagtcctggttgtacagcagtcgcctgctgcagtactcagatgccttggagcacttgctgaccacaggacaaggtgttgtgttggagcgctccatcttcagtgactttgtgttcctggaggcgatgtacaaccagggattcatccgaaagcagtgtgtggaccactacaacgaggtgaagagcgtcaccatctgcgattacctgcccccccacctggtgatttacatcgatgtgcccgttccagaggtccagaggcggattcagaagaaaggagatccacatgaaatgaagatcacctctgcctatctacaggacattgagaatgcctataagaaaacctttctccctgagatgagtgaaaaatgtgaggttttacaatattctgcaagggaagctcaagattcaaaaaaggtggtagaggacattgaatacctgaagttcgataaagggccgtggctcaagcaggacaatcgcactttataccacctgcgattactggttcaggataagtttgaggtgctgaattacacaagcattcctatctttctcccggaagtcaccattggagctcatcagactgaccgtgtcttacatcagttcagagagctgccgggccgcaagtacagccctgggtacaacaccgaggtgggagacaagtggatctggctgaagtgaacgggccgccttctgctccagctgcatcacagtgatggccaagctgcatcagccgcactctcctggacgccatatagctttaagatcgggggagggtaaataatgcaaaaattgcacagtggaagaaggggtctcacaaaaagcaatccatcctgtagtataggtaatggagttgggggaagcagcttccattctggatgtttggaaccctttagctttgttttggaatggcccaccattctcactggaaaacagtggtctgctgtgaaaggccagctctcggcagcccctgtggtttcagcgctgccgctctgtgtcattcaggttgtgcacattgtttttcttctgacttccagaaataaaagtgtttccatgggaaaaa

SEQ ID NO: 328440 - DNA, 1516 bp, Homo sapiens
acgtcacggcagcgcgccggccgcgagagagggccccgtcgcgaccgcgtccccttgggtccttgatcctgagctgaccgggtagccatggccttgcggctcctgaagctggcagcgacgtccgcgtccgcccgggtcgtgagaggaattcatagcagtgtgcagtgcaaactgcgctatggaatgtggcatttcctacttggggataaagcaagcaaaagactgacagaacgcagcagagtgataactgtagatggcaatatatgtactggaaaaggcaaacttgcaaaagaaatagcagagaaactaggcttcaagcactttcctgaagcggggattcattatccagacagtaccacaggagatgggaagcccctcgccaccgactataatggcaactgtagtttggagaaattttacgatgatccgagaagcaatgatggcaacagttaccgcctgcagtcctggttgtacagcagtcgcctgctgcagtactcagatgccttggagcacttgctgaccacaggacaaggtgttgtgttggagcgctccatcttcagtgactttgtgttcctggaggcgatgtacaaccagggattcatccgaaagcagtgtgtggaccactacaacgaggtgaagagcgtcaccatctgcgattacctgcccccccacctggtgatttacatcgatgtgcccgttccagaggtccagaggcggattcagaagaaaggagatccacatgaaatgaagatcacctctgcctatctacaggacattgagaatgcctataagaaaacctttctccctgagatgagtgaaaaatgtgaggttttacaatattctgcaagggaagctcaagattcaaaaaaggtggtagaggacattgaatacctgaagttcgataaagggccgtggctcaagcaggacaatcgcactttataccacctgcgattactggttcaggataagtttgaggtgctgaattacacaagcattcctatctttctcccggaagtcaccattggagctcatcagactgaccgtgtcttacatcagttcagagagctgccgggccgcaagtacagccctgggtacaacaccgaggtgggagacaagtggatctggctgaagtgaacgggccgccttctgctccagctgcatcacagtgatggccaagctgcatcagccgcactctcctggacgccatatagctttaagatcgggggagggtaaataatgcaaaaattgcacagtggaagaaggggtctcacaaaaagcaatccatcctgtagtataggtaatggagttgggggaagcagcttccattctggatgtttggaaccctttagctttgttttggaatggcccaccattctcactggaaaacagtggtctgctgtgaaaggccagctctcggcagcccctgtggtttcagcgctgccgctctgtgtcattcaggttgtgcacattgtttttcttctgacttccagaaataaaagtgtttccatgggaaaaa

SEQ ID NO: 328441 - DNA, 1038 bp, Homo sapiens
acgtcacggcagcgcgccggccgcgagagagggccccgtcgcgaccgcgtccccttgggtccttgatcctgagctgaccgggtagccatggccttgcggctcctgaagctggcagcgacgtccgcgtccgcccgggtcgtggcggcgggcgcccagcgcgtgagaggaattcatagcagtgtgcagtgcaaactgcgctatggaatgtggcatttcctacttggggataaagcaagcaaaagactgacagaacgcagcagagtgataactgtagatggcaatatatgtactggaaaaggcaaacttgcaaaagaaatagcagagaaactaggcttcaagcactttcctgaagcggggattcattatccagacagtaccacaggagatgggaagcccctcgccaccgactataatggcaactgtagtttggagaaattttacgatgatccgagaagcaatgatggcaacagttaccgcctgcagtcctggttgtacagcagtcgcctgctgcagtactcagatgccttggagcacttgctgaccacaggacaaggtgttgtgttggagcgctccatcttcagtgactttgtgttcctggaggcgatgtacaaccagggattcatccgaaagcagtgtgtggaccactacaacgaggtgaagagcgtcaccatctgcgattacctgcccccccacctggtgatttacatcgatgtgcccgttccagaggtccagaggcggattcagaagaaaggagatgtaatgcagttttcaatcaaaggccaagcatctctattttgaatgtagatcagcactaaaagccctgttttaatagcatttatactaattcctaccagtcctcacgaggagggtgacacacaccctgttcccacttgagagagggcatctgcaggggtggaggggagaccccatggctcggcctggtgccacagcctgcgggcctgccgcccaccagtgctctgcggtcccactgtggtccccgagtcccctcagagagagctcgggatcctctagatcaac

SEQ ID NO: 328442 - DNA, 767 bp, Homo sapiens
acgtcacggcagcgcgccggccgcgagagagggccccgtcgcgaccgcgtccccttgggtccttgatcctgagctgaccgggtagccatggccttgcggctcctgaagctggcagcgacgtccgcgtccgcccgggtcgtggcggcgggcgcccagcgcgtgagaggaattcatagcagtgtgcagtgcaaactgcgctatggaatgtggcatttcctacttggggataaagcaagcaaaagactgacagaacgcagcagagtgataactgtagatggcaatatatgtactggaaaaggcaaacttgcaaaagaaatagcagagaaactaggcttcaagcactttcctgaagcggggattcattatccagacagtaccacaggagatgggaagcccctcgccaccgactataatggcaactgtagtttggagaaattttacgatgatccgagaagcaatgatggcaacagttaccgcctgcagtcctggttgtacagcagtcgcctgctgcagtactcagatgccttggagcacttgctgaccacaggacaaggtgttgtgttggagcgctccatcttcagtgactttgtgttcctggaggcgatgtacaaccagggattcatccgaaagcagtgtgagtcagcattgcagacccacttctgggtgtgtggtgcgactttgcaagggctgtgatagactcaccttgcacttactgtgtttatgaatgtctgttagatagatgaataaatgccattacttaatcggtc

SEQ ID NO: 328443 - DNA, 331 bp, Homo sapiens
atgaaaattatgtatttctcaatatccttccctttcccctttagatattgaaaccctcaaaatcatctatggggaaaggaatagacctatctcccaggtgtgtatccttaactttggcaaataaacctcaaaaaatgattgagattttcctgggtcattttccttgattgaccacggagggatcctgagtgaaggtggccctggcctgcagcagctctcctattggtaccagattgggctctttatagcccaaaccaataagacaatttgttgaggtctgggacctcctccctgcaggaagttggggctctgaggtttaatttgatgttta

SEQ ID NO: 328444 - DNA, 222 bp, Homo sapiens
tttggtcgtggttcatccacacgtgtcctgaccctggctccagtaaagagtcctgctgtacacaaaactgactttggaggtggcatcgtggagactggggcattttccccacgagtcacagctcactgggccccccgaagcgcctgtgaaggatgcctgttcccaggagaatgacttctgtgtccccagtgctgaagccctcgctggaatgcaacccagtgg

SEQ ID NO: 328445 - DNA, 649 bp, Homo sapiens
agctccattcttgcccatattgcataacacaataccatgttgtgatttgtgtcttatgtccgtctccccaaccaacaatccacattcctcccatggtgtctgctgtggccaggtcaaggcctctcacagagtaggcagatgctcacgtgcccacagggattgccccagcagtgggagtggtccctcaggggactgggcccaaaagaacctagaacctcaggcctcctacacaatgggaacagatttggcccggattggaactttagacaccaggccaggcttctgcccactctatcctttgtcccacgaagctgccaaggatggcagttccagctggcaagtaataagaatttcttcctggaaggattcttggcttgagaactggcctttacctcgtctaggcttctttgatgccctcaagttgctggggacatggggaatgggagggagaggctgagtcggccccagcattgttactgttcccctaaaggccttgtgcccacttcttacctcctctaactgcacatggcagggattcccaagatcatgggttttccaaccctgagtagaggtgggggacgggactggcccaacatttgatgccaggagagtaacactgcctttggccacacatgtcccagccctaact

SEQ ID NO: 328446 - DNA, 410 bp, Homo sapiens
gggtaggaggtgaaaaatgctggctgcttgcgtcacttgggaagaaatcgtagtcctggatttggagctgggtagggttaactagttactagttagcttcagttttgtttcttcaagaatgatggccggatgtggtggctaacacctgtaatcccagcactttgggaggctcaggtgggagaattgcttgaagccaggagtttgagaccagctggggcagcatcatgagagcctgtctctacaaaaaaaattttgaaaaattagctgagtgtggtcacacatgcctgtagtcccaactgtttgggaggctgaggagagagaatcgcttgagtccgggagtttgaggctgcagtgagctataatcttgtactgtactctattctgggtgagatcctgtctttaaaaaaaaa

SEQ ID NO: 328447 - DNA, 464 bp, Homo sapiens
catcgctgctgatatgcatgttatgtaacacttgtttctatagtatgagaaccgagagagagaaaaaaaaaagcttcctgacaagtaattttgtacgtaaaaaataatctgccagaggcttgggaaaatgtacctgtaattcttccacacattggcacttacacccgcttgcctgccgaccaattctgccttcaaacgccctgggagcaaaacaccattacacaagaaaggcaagaatgtcctttccgctttcagaatctgggaccaacagtgtgtgtgtgtgtgtgtgtgtgtgtgtgtgtgtcgagagagagagagagagagagagagagagagagagagcaccacaggggagacctacagaaaaaagaaaaacaacaaagtgaagaccactcccaccccccccttattcaaatacatatccctgagtagagagtgaaagagagtacatatatctcacacaa

SEQ ID NO: 328448 - DNA, 279 bp, Homo sapiens
ccagactccgttaaaaaaaaaaaaaagagagaaatactaaaaaagtaatacatgtaatcgaacaagagaaagttacccttgaccagtcccttactcctgccctcagccaaatcccaagagtgggctacacagataaccactgtttggtccagaccttttacctctgcatttatgcatatgcacacatgcatatgatggatcatcttttaaacatacaaataagatcatatgatagatatatatagatgtggttctgacatgctttttttgtttctattt

SEQ ID NO: 328449 - DNA, 320 bp, Homo sapiens
ctttcgacccccacattctcaccacctgtttctttgtttgatcaccaataaatagtctgggcttccagagctcagggccttcacagcctccatacttagcgatggccccctggacccactttcgctctcaaactgtcttttctcattccttcgactccaccagacttcgtcacccccacgacctggtgttgggtctgatcaccccagcaaaaattaaatagaagagtaaaacataagcccctcttagaaataaaacaaaacaaagaaatctttgcaactttgagtttggcagagttcctacatgacaccaaaatgatgac

SEQ ID NO: 328450 - DNA, 251 bp, Homo sapiens
agaagagcaagttagtaccttgtaccaaaacatcaaccttgtggagccaagattaattcagccatatgaacatgttataaagaacttcatccgtgagatcagacttcaaagcacagaaatggaaaatttggccattgcggtgaagagagcccaggacaaggcagctatgcagttgagtgagttggaagaggaaatggatcagaggattcaggctgcagaacataagacacggaaagacgtgagtttctggg

SEQ ID NO: 328451 - DNA, 1108 bp, Homo sapiens
  misc_feature (36)..(36): n is a, c, g, or t
caccacaggaccccagcaaatcattaatctggactnctatgattaaatgagcacaatgcagaccatccccctatttacagaagagtaaattatgttaaattcttcaatttagcagaaaggcattcttccgaaacctttcagaaccactgttatttacccatttaccaaggcaacattctccccaaataaaattttaaatgatattgccttaaacaccaataattttttttttcctcaatgctagtcttaactgagagatttttaggcagttaactctcccagcacagcaataagcagcttattagtagatattatctcttgttgatttgttacccttgagatttactgtgcttgcaaaacacctgtctgtatttgagctttgctaggtagttggcttttgtgtttgactgaagattttttccaaagaaagcaaatagctattaggaaaagaaagagtcagcaaatttctgtatgctttcatggaagagatttcccaattagaaagcttttgtaggcttaaccttttgccctaaagtaacccaacatttcattatgtattccattgaggttttggagctcggcaccagaaagcgaggaccaaggttgaatgtgaaaggaatattcagaggatgaagctcatagtcaacaaagtgctgcttcataggctaggtccaaaaataacctgcttgccatagggagcaagaatggaggtagcattagctgctgttttgagcagtgtttcatgtcctgtcatgtcattccagaatggttttttggttttgtttagagacagggtcttgctctgttgaccaggccagagtgcagtgtggtgtgattgtagctcacagtcacctcaaactcctgggctcaagtgatcctcccatctcagtttcctgaatagctgggactacagacacacaccattgcacttggctagtggttttatttttagtatagacagtgtctcggtttgttgcctaggctggtctcaaactcctggcctgaagcagttatcctaccttggccttccaaagcactggaattataggcatgagcagccacacctggtctcattccagaataattaaaattatgtttaaggcagccg

SEQ ID NO: 328452 - DNA, 595 bp, Homo sapiens
tgttctcaaagagcataataggggttttgtgactttcagactttcctgaaaaagcctaaccgtggattttagaattattaagctagaaaaatacacacatacacacacaggtttgtttgggacccttagtctccaccctggaattaagtgacactgaaaataactctggaataaaaggtttttatgtagcagaatagttgacttacaggggttcttccctttgcacattttctctgggtagaaaatgagcttgtttttcttttagttgtattacaattttttttttcctcaatgctagtcttaactgagagatttttaggcagttaactctcccagcacagcaataagcagcttattagtagatattatctcttgttgatttgttacccttgagatttactgtgcttgcaaaacacctgtctgtatttgagctttgctaggtagttggcttttgtgtttgactgaagattttttccaaagaaagcaaatagctattaggaaaagaaagagtcagcaaatttctgtatgctttcatggaagagatttcccaattagaaagcttttgtaggcttaaccttttgccctaaagtaaccc

SEQ ID NO: 328453 - DNA, 501 bp, Homo sapiens
aaattcaaaggattccgatcattcagagtatgttctctgatcacaatggaattgatagaaatcagtatcaaaatatccttagaaacccccctaaatatcaagaatctaaataatagactttttagtaacccttgaattaaagaagaaatcaaaaggcaaattaggaagtagtttgaatggaatgaaaaggaaaagacaatataccagaatttgtgggatgcacctaaagcaaaacttaaagaaaagtgtatagtgctatattggaaagaagaaacttctcaaatcactgacctcagcttccaccttaagacactagagaaagaggagcaagtaaagcccaaagtaaacagaagaatggaaataataaaaatcagagcagaaatcattgcagtgaaatacagaaagccaacagaaaccaatgaaaccaaaagctggtcctttgagaatttcagtaaaattgacacacctttaatcaaaatgatcagaaaaaaagaaaacaca

SEQ ID NO: 328454 - DNA, 430 bp, Homo sapiens
aatatgaagaaccatatacgtttaaagcaaaagaatggaaaaagatatgttaatagatctggagtgggtatattagtatcaaagtagatttctgagcaaaggatattaccagagataaagaatgttatatcctaatgataaagtggtcagttcgtcaagagaatgtaagttctaaacatttctgcacttaacagtgcttcaaacatattaagcaaaaactaatagagctgcaagaagaaatacacaaattcacaattacgtttgcagttttcagtaccttttaataatttttagaataattaggcaataaatcagcagggatatagtagaaaagccaacagaaaccaatgaaaccaaaagctggtcctttgagaatttcagtaaaattgacacacctttaatcaaaatgatcagaaaaaaagaaaacaca

SEQ ID NO: 328455 - DNA, 160 bp, Homo sapiens
gtagctcaaaagcccccaagatgtgactgtgttccaataaaactttattaacagacacatagggggctggatttaacctatgcaaggctaatttttttgtttttgatgttttgtagagatgaggtcttgctatgttacccaggctgggtttttttttttt

SEQ ID NO: 328456 - DNA, 372 bp, Homo sapiens
cccacagaaatgaaacagacaaggacttgaaggcagtaagatggagttacacctgaggttaatttgtttgtctactggctatcctactctagaaaatttacttaacccaagtttcttcacctttaaaatagggtaacagtgtccacttcatagaattgtttgtaaggacaatggacggcatctaacacatagtaggtcgttaatacatggtaatgacaatatatccaagagtgggataatactatttattgagtacatgccatccactatttaatgaaagacgtaatctatatgaaaagacacaaggctggcatggtggctcacgcctataatcctagcactttgggaggccaaggcaggaggatgacttga

SEQ ID NO: 328457 - DNA, 199 bp, Homo sapiens
atgataatggatttttgtttaaaatttttgttgttcattctaaatagggtaaatgtgaaaatccattttgttaaattaatggtgtatgcttagtagacacaaagtgaaaaaaatgataaaatctggtttgtattgtttgaaaataaaaaattttctgtgattaatatgtttataattttagagttggaaaacataaaaa

SEQ ID NO: 328458 - DNA, 286 bp, Homo sapiens
tcccccctggtctgtacttaggcgaggtgagtgatccaggcatgggagaacatgcagatggaagcctcgtgctcccagagtttctgactattcaccatgcactcatcccccttcctggcccagcccctattcctgcacctcactctttgagagcccaggttctccttcctcagtcacctcagagaacctctcttgatcctcattcccctttttgtctcctgttccacccctagcctttgtctgaactcctcattctctccactccaccagaattctttccctaagt

SEQ ID NO: 328459 - DNA, 342 bp, Homo sapiens
acagaatccaagtgctggctgtgttgtctggcgattgagaacacaaaagacatgatcatcacctcactaaacttacaatctaatagaacagacaggcttataaataactcacgctaagaggattggaaacataatatatcagccatcagggcttggtcggagggtatgttctattacttgttattcactggctttcaaagcccagtgggggaatgtcaatatttagggaggatcatgtggaaactatgcagtcctctaacactctgagaactcaagatcccttctttacatgaaatcagactgccaaagactcatgctgggtgtctgtcctctacctgtgct

SEQ ID NO: 328460 - DNA, 137 bp, Homo sapiens
aaaaatctttgagtaccaataatatcaaaatctatccatgattgaaagctcactatatgccaggagttgtgcaagagttgtatatacatcacctcataatgagtagaaaacctaatttcttgtttttgtaattgtcg

SEQ ID NO: 328461 - DNA, 209 bp, Homo sapiens
gggagagattaggacttctgtttgggacatgttagaatggagatgccgctcagataatcaggtgcagatgttgcatagaaagtagaaaatgtagatcaagagttcaggggagaggtctgggctgaagaatgaatatttgggagtcctcagcctgtagatggtactgaaagcaaagagactggatgtactcggctagggagtaattggag

SEQ ID NO: 328462 - DNA, 116 bp, Homo sapiens
tgactgattagcttctagtgaatacagtgtgatgggaggaagggtgtgggactttggagactgggtcattaagggcactgcgggttcctcctgtgtcctctctcggatcactcgtt

SEQ ID NO: 328463 - DNA, 533 bp, Homo sapiens
cacggcctgccctgggagccccatatcagtgtctgacttccccatctcatcaaccaaagtgggctgctggcacggccaagagcaattactttcgactgttaattgtctggcgctgccaatggccagaagagtcgactccccttgggttgagaagccagggacgtggcagagtgctgggaatctgtgccctggcagacacagagccagagctgtgggctccgatccgtatccagatcttggcctgccacgtgccaggtgagtcccaggcacatctctcctatctttttgccgtgtcatctggcccgacccttctgggggcttcaaggacactggcctctcgccttctgccaccctggtggaggcagatcaatgccatgtcaaaaacaaaggtactgggctcaaatggatctgcgtctgaagcatggctcccctcaaccagctgtgtgaccttgggccagtcacttggtgtctctgagcctccgtacactgagatcatacaggacctagcctcaagggtggctgtggaaactgag

SEQ ID NO: 328464 - DNA, 803 bp, Homo sapiens
ttctttttttttttctgggcacagaaaaaaattgctagcctaagtcactctggtttcctacattggtttttattgtttgaagcagtaagcagtaatggtgtcctgctttttttttccaggttccggtggaggaggaggttgctggtgatctctgctcctaacgatgaagactgggcctattcacagcagctctctgccctcagtggtcaggcgtgcaattttggtctgcgccacataaccattctgaagcttttaggcgttggagaggaagttgggggagtgttagaactgttcccaattaatgggagctctgttgttgagcgagaagacgtaccagcccatttggtgaaagacattcgtaactattttcaagtgagcccggagtacttctccatgcttctagtcggaaaagacggaaatgtcaaatcctggtatccttccccaatgtggtccatggtgattgtgtacgatttaattgattcgatgcaacttcggagacaggaaatggcgattcagcagtcactggggatgcgctgcccagaagatgagtatgcaggctatggttaccatagttaccaccaaggataccaggatggttaccaggatgactaccgtcatcatgagagttatcaccatggatacccttactgagcagaaatatgtaaccttagactcagccagtttcctctgcagctgctaaaactacatgtggccagctccattcttccacactgcgtactacatttcctgcctttttctttcagtgtttttctaagactaaataaatagcaaactttcaccta

SEQ ID NO: 328465 - DNA, 965 bp, Homo sapiens
caaatgccaaagcagaaagactgtgaagttacaacagaaaaactacaggagtgtagcaatgcagtttaatggctttgagaagcatggttccggtggaggaggaggttgctggtgatctctgctcctaacgatgaagactgggcctattcacagcagctctctgccctcagtggtcaggcgtgcaattttggtctgcgccacataaccattctgaagcttttaggcgttggagaggaagttgggggagtgttagaactgttcccaattaatgggagctctgttgttgagcgagaagacgtaccagcccatttggtgaaagacattcgtaactattttcaagtgagcccggagtacttctccatgcttctagtcggaaaagacggaaatgtcaaatcctggtatccttccccaatgtggtccatggtgattgtgtacgatttaattgattcgatgcaacttcggagacaggaaatggcgattcagcagtcactggggatgcgctgcccagaagatgagtatgcaggctatggttaccatagttaccaccaaggataccaggatggttaccaggatgactaccgtcatcatgagagttatcaccatggatacccttactgagcagaaatatgtaaccttagactcagccagtttcctctgcagctgctaaaactacatgtggccagctccattcttccacactgcgtactacatttcctgcctttttctttcagtgtttttctaagactaaataaatagcaaactttcacctaaaacaacaggatactataattactcgccttggcctcggcgggcctaagcggtggacctctggggccctttccctttaatgaggggtaattcctgaatctttggtcactgaactcgttcgctaggcctttcggttagggtgagcgtgatacacctcacccaagggagaattactggttttcaccagatctggtgag

SEQ ID NO: 328466 - DNA, 907 bp, Homo sapiens
  misc_feature (790)..(790): n is a, c, g, or t
  misc_feature (798)..(798): n is a, c, g, or t
  misc_feature (811)..(811): n is a, c, g, or t
gccttctcactcctcactgagtccactctgaacgtgctaaaatgggaaggaggcggtgttttgctgatctgttaaattcttagtgaagtttccttgatttccagtggctgctgttgtttgagtttggtttggagcaaaactgaggtagtcctaacatttctgggactgaatccaggcaagagaaagaagaaaaagaagaagaaaaagaggaggaaaaaggtagggagaaataaagggaggagagaagcacagtgaaagaaaaaaaaagtcccttttcgacatcacattcctgtgttttccctcagcctggaaaacatattaatcccagtgcttttacgcccggaaacaaagagactaagccagactatgggggaaagggagataagaaggatcctggaactttaaagagggaaagagtgagattcagaaatcgccaggactggactttaagggacgtcctgtgtcagcacaagggactggcacacacagacacacgagaccgaggagaaactgcagacaaatggagatacaaagacttagaaggacagctcctttcacctcatcctacttgtccagaaggtaaaaagacacagccagaaagaaaaggcatcggctcagctctcagatcaggacaggctgtggatctgtggcggtactctgaaagctggagctgcagcacaccccttttgtattgctcaccctcggtaaagagagagagggctgggaggaaaagtagttcatctaggaaactgtcctgggaaccaaacttctgatttcttttgcaaccccntggttccnttctttggccccntgggtttcccatgcactgggatggtggcccgtcacatctgtggcagtggttcttgtgggtaacccaaacacgacataaagcccagaaaaacttcgt

SEQ ID NO: 328467 - DNA, 3832 bp, Homo sapiens
gccttctcactcctcactgagtccactctgaacgtgctaaaatgggaaggaggcggtgttttgctgatctgttaaattcttagtgaagtttccttgatttccagtggctgctgttgtttgagtttggtttggagcaaaactgaggtagtcctaacatttctgggactgaatccaggcaagagaaagaagaaaaagaagaagaaaaagaggaggaaaaaggtagggagaaataaagggaggagagaagcacagtgaaagaaaaaaaaagtcccttttcgacatcacattcctgtgttttccctcagcctggaaaacatattaatcccagtgcttttacgcccggaaacaaagagactaagccagactatgggggaaagggagataagaaggatcctggaactttaaagagggaaagagtgagattcagaaatcgccaggactggactttaagggacgtcctgtgtcagcacaagggactggcacacacagacacacgagaccgaggagaaactgcagacaaatggagatacaaagacttagaaggacagctcctttcacctcatcctacttgtccagaaggtaaaaagacacagccagaaagaaaaggcatcggctcagctctcagatcaggacaggctgtggatctgtggcggtactctgaaagctggagctgcagcacaccccttttgtattgctcaccctcggtaaagagagagagggctgggaggaaaagtagttcatctaggaaactgtcctgggaaccaaacttctgatttcttttgcaaccctctgcattccatctctatgagccaccattggattacacaatgacatggagaatgggaccccgtttcactatgctgttggccatgtggctagtgtgtggatcagaaccccacccccatgccactattagaggcagccacggaggacggaaagtgcctttggtttctccggacagcagtaggccagctcggtttctgaggcacactgggaggtctcgcggaattgagagatccactctggaggaaccaaaccttcagcctctccagagaaggaggagtgtgcccgtgttgagactagctcgcccaacagagccgccagcccgctcggacatcaatggggccgccgtgagacctgagcaaagaccagcagccaggggctctccgcgtgagatgatcagagatgaggggtcctcagctcggtcaagaatgttgcgtttcccttcggggtccagctctcccaacatccttgccagctttgcagggaagaacagagtatgggtcatctcagcccctcatgcctcggaaggctactaccgcctcatgatgagcctgctgaaggacgatgtgtactgtgagctggcggagaggcacatccaacagattgtgctcttccaccaggcaggtgaggaaggaggcaaggtgagaaggatcaccagcgagggccagatcctggagcagcccctggaccctagcctcatccctaagctgatgagcttcctgaagctggagaagggcaagtttggcatggtgctgctgaagaagacgctgcaggtggaggagcgctatccatatcccgttaggctggaagccatgtacgaggtcatcgaccaaggccccatccgtaggatcgagaagatcaggcagaagggctttgtccagaaatgtaaggcctctggtgtagagggccaggtggtggcggaggggaatgacggtggagggggagcaggaaggccaagcctgggcagcgagaagaagaaagaggacccaaggagagcacaagtcccaccaaccagagagagtcgggtgaaggtcctgagaaaactggccgccactgcaccagctttgccccaacctccctcaacccccagagccaccacccttcctcctgccccagccacaacagtgactcggtccacgtcccgggcggtaacagttgctgcaagacctatgaccaccactgcctttcccaccacgcagaggccctggaccccctcaccctcccacaggccccctacaaccactgaggtgatcactgccaggagaccctcagtttcagagaatctttaccctccatcccggaaggatcagcacagggagaggccacagacaaccaggaggcccagcaaggccaccagcttggagagcttcacaaatgcccctcccaccaccatctcagaacccagcacaagggctgctggcccaggccgtttccgggacaaccgcatggacaggcgggaacatggccaccgagacccaaatgtggtgccaggtcctcccaagccagcaaaggagaaacctcccaaaaagaaggcccaggacaaaattcttagtaatgagtatgaggagaagtatgacctcagccggcctactgcctctcagctggaggacgagctgcaggtggggaatgttccccttaaaaaagcaaaggagtctaaaaagcatgaaaagcttgagaaaccagagaaggagaagaaaaaaaagatgaagaatgagaacgcagacaagttacttaagagtgaaaagcaaatgaagaagtctgagaaaaagagcaagcaagagaaagagaagagcaagaagaaaaaaggaggtaaaacagaacaggatggctatcagaaacccaccaacaaacacttcacgcagagtcccaagaagtcagtggccgacctgctggggtcctttgaaggcaaacgaagactccttctgatcactgctcccaaggctgagaacaatatgtatgtgcaacaacgtgatgaatatctggaaagtttctgcaagatggctaccaggaaaatctctgtgatcaccatcttcggccctgtcaacaacagcaccatgaaaatcgaccactttcagctagataatgagaagcccatgcgagtggtggatgatgaagacttggtagaccagcgtctcatcagcgagctgaggaaagagtacggaatgacctacaatgacttcttcatggtgctaacagatgtggatctgagagtcaagcaatactatgaggtaccaataacaatgaagtctgtgtttgatctgatcgatactttccagtcccgaatcaaagatatggagaagcagaagaaggagggcattgtttgcaaagaggacaaaaagcagtccctggagaacttcctatccaggttccggtggaggaggaggttgctggtgatctctgctcctaacgatgaagactgggcctattcacagcagctctctgccctcagtggtcaggcgtgcaattttggtctgcgccacataaccattctgaagcttttaggcgttggagaggaagttgggggagtgttagaactgttcccaattaatgggagctctgttgttgagcgagaagacgtaccagcccatttggtgaaagacattcgtaactattttcaagtgagcccggagtacttctccatgcttctagtcggaaaagacggaaatgtcaaatcctggtatccttccccaatgtggtccatggtgattgtgtacgatttaattgattcgatgcaacttcggagacaggaaatggcgattcagcagtcactggggatgcgctgcccagaagatgagtatgcaggctatggttaccatagttaccaccaaggataccaggatggttaccaggatgactaccgtcatcatgagagttatcaccatggatacccttactgagcagaaatatgtaaccttagactcagccagtttcctctgcagctgctaaaactacatgtggccagctccattcttccacactgcgtactacatttcctgcctttttctttcagtgtttttctaagactaaataaatagcaaactttcaccta

SEQ ID NO: 328468 - DNA, 4078 bp, Homo sapiens
ttgacccttatgatggatgaggaaaagtatcacatcttcccgccgctacagtggaaatttcagaaatgaagactcaaagacccagaggaaatttaaaaaaattcatagatgaaccatgtagcctggaaatataaaaaaaaaattaagaaaacagttgcagaaaaatagaaagatctaaatggaggacttacaaaatatggagctcttaaataacggacttgaaattgagaattattacaagccattaatcattatagatctccccggaaatgaatgaatgagaatttatcattgctcttattaggtacgtgcctccaatacttcttcaggaggattttctgaagccccagtggctgctgttgtttgagtttggtttggagcaaaactgaggtagtcctaacatttctgggactgaatccaggcaagagaaagaagaaaaagaagaagaaaaagaggaggaaaaaggtagggagaaataaagggaggagagaagcacagtgaaagaaaaaaaaagtcccttttcgacatcacattcctgtgttttccctcagcctggaaaacatattaatcccagtgcttttacgcccggaaacaaagagactaagccagactatgggggaaagggagataagaaggatcctggaactttaaagagggaaagagtgagattcagaaatcgccaggactggactttaagggacgtcctgtgtcagcacaagggactggcacacacagacacacgagaccgaggagaaactgcagacaaatggagatacaaagacttagaaggacagctcctttcacctcatcctacttgtccagaaggtaaaaagacacagccagaaagaaaaggcatcggctcagctctcagatcaggacaggctgtggatctgtggcggtactctgaaagctggagctgcagcacaccccttttgtattgctcaccctcggtaaagagagagagggctgggaggaaaagtagttcatctaggaaactgtcctgggaaccaaacttctgatttcttttgcaaccctctgcattccatctctatgagccaccattggattacacaatgacatggagaatgggaccccgtttcactatgctgttggccatgtggctagtgtgtggatcagaaccccacccccatgccactattagaggcagccacggaggacggaaagtgcctttggtttctccggacagcagtaggccagctcggtttctgaggcacactgggaggtctcgcggaattgagagatccactctggaggaaccaaaccttcagcctctccagagaaggaggagtgtgcccgtgttgagactagctcgcccaacagagccgccagcccgctcggacatcaatggggccgccgtgagacctgagcaaagaccagcagccaggggctctccgcgtgagatgatcagagatgaggggtcctcagctcggtcaagaatgttgcgtttcccttcggggtccagctctcccaacatccttgccagctttgcagggaagaacagagtatgggtcatctcagcccctcatgcctcggaaggctactaccgcctcatgatgagcctgctgaaggacgatgtgtactgtgagctggcggagaggcacatccaacagattgtgctcttccaccaggcaggtgaggaaggaggcaaggtgagaaggatcaccagcgagggccagatcctggagcagcccctggaccctagcctcatccctaagctgatgagcttcctgaagctggagaagggcaagtttggcatggtgctgctgaagaagacgctgcaggtggaggagcgctatccatatcccgttaggctggaagccatgtacgaggtcatcgaccaaggccccatccgtaggatcgagaagatcaggcagaagggctttgtccagaaatgtaaggcctctggtgtagagggccaggtggtggcggaggggaatgacggtggagggggagcaggaaggccaagcctgggcagcgagaagaagaaagaggacccaaggagagcacaagtcccaccaaccagagagagtcgggtgaaggtcctgagaaaactggccgccactgcaccagctttgccccaacctccctcaacccccagagccaccacccttcctcctgccccagccacaacagtgactcggtccacgtcccgggcggtaacagttgctgcaagacctatgaccaccactgcctttcccaccacgcagaggccctggaccccctcaccctcccacaggccccctacaaccactgaggtgatcactgccaggagaccctcagtttcagagaatctttaccctccatcccggaaggatcagcacagggagaggccacagacaaccaggaggcccagcaaggccaccagcttggagagcttcacaaatgcccctcccaccaccatctcagaacccagcacaagggctgctggcccaggccgtttccgggacaaccgcatggacaggcgggaacatggccaccgagacccaaatgtggtgccaggtcctcccaagccagcaaaggagaaacctcccaaaaagaaggcccaggacaaaattcttagtaatgagtatgaggagaagtatgacctcagccggcctactgcctctcagctggaggacgagctgcaggtggggaatgttccccttaaaaaagcaaaggagtctaaaaagcatgaaaagcttgagaaaccagagaaggagaagaaaaaaaagatgaagaatgagaacgcagacaagttacttaagagtgaaaagcaaatgaagaagtctgagaaaaagagcaagcaagagaaagagaagagcaagaagaaaaaaggaggtaaaacagaacaggatggctatcagaaacccaccaacaaacacttcacgcagagtcccaagaagtcagtggccgacctgctggggtcctttgaaggcaaacgaagactccttctgatcactgctcccaaggctgagaacaatatgtatgtgcaacaacgtgatgaatatctggaaagtttctgcaagatggctaccaggaaaatctctgtgatcaccatcttcggccctgtcaacaacagcaccatgaaaatcgaccactttcagctagataatgagaagcccatgcgagtggtggatgatgaagacttggtagaccagcgtctcatcagcgagctgaggaaagagtacggaatgacctacaatgacttcttcatggtgctaacagatgtggatctgagagtcaagcaatactatgaggtaccaataacaatgaagtctgtgtttgatctgatcgatactttccagtcccgaatcaaagatatggagaagcagaagaaggagggcattgtttgcaaagaggacaaaaagcagtccctggagaacttcctatccaggttccggtggaggaggaggttgctggtgatctctgctcctaacgatgaagactgggcctattcacagcagctctctgccctcagtggtcaggcgtgcaattttggtctgcgccacataaccattctgaagcttttaggcgttggagaggaagttgggggagtgttagaactgttcccaattaatgggagctctgttgttgagcgagaagacgtaccagcccatttggtgaaagacattcgtaactattttcaagtgagcccggagtacttctccatgcttctagtcggaaaagacggaaatgtcaaatcctggtatccttccccaatgtggtccatggtgattgtgtacgatttaattgattcgatgcaacttcggagacaggaaatggcgattcagcagtcactggggatgcgctgcccagaagatgagtatgcaggctatggttaccatagttaccaccaaggataccaggatggttaccaggatgactaccgtcatcatgagagttatcaccatggatacccttactgagcagaaatatgtaaccttagactcagccagtttcctctgcagctgctaaaactacatgtggccagctccattcttccacactgcgtactacatttcctgcctttttctttcagtgtttttctaagactaaataaatagcaaactttcaccta

SEQ ID NO: 328469 - DNA, 3481 bp, Homo sapiens
ttgacccttatgatggatgaggaaaagtatcacatcttcccgccgctacagtggaaatttcagaaatgaagactcaaagacccagaggaaatttaaaaaaattcatagatgaaccatgtagcctggaaatataaaaaaaaaattaagaaaacagttgcagaaaaatagaaagatctaaatggaggacttacaaaatatggagctcttaaataacggacttgaaattgagaattattacaagccattaatcattatagatctccccggaaatgaatgaatgagaatttatcattgctcttattaggtacgtgcctccaatacttcttcaggaggattttctgaagccccagtggctgctgttgtttgagtttggtttggagcaaaactgaggtagtcctaacatttctgggactgaatccaggcaagagaaagaagaaaaagaagaagaaaaagaggaggaaaaagtggattacacaatgacatggagaatgggaccccgtttcactatgctgttggccatgtggctagtgtgtggatcagaaccccacccccatgccactattagaggcagccacggaggacggaaagtgcctttggtttctccggacagcagtaggccagctcggtttctgaggcacactgggaggtctcgcggaattgagagatccactctggaggaaccaaaccttcagcctctccagagaaggaggagtgtgcccgtgttgagactagctcgcccaacagagccgccagcccgctcggacatcaatggggccgccgtgagacctgagcaaagaccagcagccaggggctctccgcgtgagatgatcagagatgaggggtcctcagctcggtcaagaatgttgcgtttcccttcggggtccagctctcccaacatccttgccagctttgcagggaagaacagagtatgggtcatctcagcccctcatgcctcggaaggctactaccgcctcatgatgagcctgctgaaggacgatgtgtactgtgagctggcggagaggcacatccaacagattgtgctcttccaccaggcaggtgaggaaggaggcaaggtgagaaggatcaccagcgagggccagatcctggagcagcccctggaccctagcctcatccctaagctgatgagcttcctgaagctggagaagggcaagtttggcatggtgctgctgaagaagacgctgcaggtggaggagcgctatccatatcccgttaggctggaagccatgtacgaggtcatcgaccaaggccccatccgtaggatcgagaagatcaggcagaagggctttgtccagaaatgtaaggcctctggtgtagagggccaggtggtggcggaggggaatgacggtggagggggagcaggaaggccaagcctgggcagcgagaagaagaaagaggacccaaggagagcacaagtcccaccaaccagagagagtcgggtgaaggtcctgagaaaactggccgccactgcaccagctttgccccaacctccctcaacccccagagccaccacccttcctcctgccccagccacaacagtgactcggtccacgtcccgggcggtaacagttgctgcaagacctatgaccaccactgcctttcccaccacgcagaggccctggaccccctcaccctcccacaggccccctacaaccactgaggtgatcactgccaggagaccctcagtttcagagaatctttaccctccatcccggaaggatcagcacagggagaggccacagacaaccaggaggcccagcaaggccaccagcttggagagcttcacaaatgcccctcccaccaccatctcagaacccagcacaagggctgctggcccaggccgtttccgggacaaccgcatggacaggcgggaacatggccaccgagacccaaatgtggtgccaggtcctcccaagccagcaaaggagaaacctcccaaaaagaaggcccaggacaaaattcttagtaatgagtatgaggagaagtatgacctcagccggcctactgcctctcagctggaggacgagctgcaggtggggaatgttccccttaaaaaagcaaaggagtctaaaaagcatgaaaagcttgagaaaccagagaaggagaagaaaaaaaagatgaagaatgagaacgcagacaagttacttaagagtgaaaagcaaatgaagaagtctgagaaaaagagcaagcaagagaaagagaagagcaagaagaaaaaaggaggtaaaacagaacaggatggctatcagaaacccaccaacaaacacttcacgcagagtcccaagaagtcagtggccgacctgctggggtcctttgaaggcaaacgaagactccttctgatcactgctcccaaggctgagaacaatatgtatgtgcaacaacgtgatgaatatctggaaagtttctgcaagatggctaccaggaaaatctctgtgatcaccatcttcggccctgtcaacaacagcaccatgaaaatcgaccactttcagctagataatgagaagcccatgcgagtggtggatgatgaagacttggtagaccagcgtctcatcagcgagctgaggaaagagtacggaatgacctacaatgacttcttcatggtgctaacagatgtggatctgagagtcaagcaatactatgaggtaccaataacaatgaagtctgtgtttgatctgatcgatactttccagtcccgaatcaaagatatggagaagcagaagaaggagggcattgtttgcaaagaggacaaaaagcagtccctggagaacttcctatccaggttccggtggaggaggaggttgctggtgatctctgctcctaacgatgaagactgggcctattcacagcagctctctgccctcagtggtcaggcgtgcaattttggtctgcgccacataaccattctgaagcttttaggcgttggagaggaagttgggggagtgttagaactgttcccaattaatgggagctctgttgttgagcgagaagacgtaccagcccatttggtgaaagacattcgtaactattttcaagtgagcccggagtacttctccatgcttctagtcggaaaagacggaaatgtcaaatcctggtatccttccccaatgtggtccatggtgattgtgtacgatttaattgattcgatgcaacttcggagacaggaaatggcgattcagcagtcactggggatgcgctgcccagaagatgagtatgcaggctatggttaccatagttaccaccaaggataccaggatggttaccaggatgactaccgtcatcatgagagttatcaccatggatacccttactgagcagaaatatgtaaccttagactcagccagtttcctctgcagctgctaaaactacatgtggccagctccattcttccacactgcgtactacatttcctgcctttttctttcagtgtttttctaagactaaataaatagcaaactttcaccta

SEQ ID NO: 328470 - DNA, 3751 bp, Homo sapiens
gccttctcactcctcactgagtccactctgaacgtgctaaaatgggaaggaggcggtgttttgctgatctgttaaattcttagtgaagtttccttgatttccagtggctgctgttgtttgagtttggtttggagcaaaactgaggtagtcctaacatttctgggactgaatccaggcaagagaaagaagaaaaagaagaagaaaaagaggaggaaaaaggtagggagaaataaagggaggagagaagcacagtgaaagaaaaaaaaagtcccttttcgacatcacattcctgtgttttccctcagcctggaaaacatattaatcccagtgcttttacgcccggaaacaaagagactaagccagactatgggggaaagggagataagaaggatcctggaactttaaagagggaaagagtgagattcagaaatcgccaggactggactttaagggacgtcctgtgtcagcacaagggactggcacacacagacacacgagaccgaggagaaactgcagacaaatggagatacaaagacttagaaggacagctcctttcacctcatcctacttgtccagaaggtaaaaagacacagccagaaagaaaaggcatcggctcagctctcagatcaggacaggctgtggatctgtggcggtactctgaaagctggagctgcagcacaccccttttgtattgctcaccctcggtaaagagagagagggctgggaggaaaagtagttcatctaggaaactgtcctgggaaccaaacttctgatttcttttgcaaccctctgcattccatctctatgagccaccattggattacacaatgacatggagaatgggaccccgtttcactatgctgttggccatgtggctagtgtgtggatcagaaccccacccccatgccactattagaggcagccacggaggacggaaagtgcctttggtttctccggacagcagtaggccagctcggtttctgaggcacactgggaggtctcgcggaattgagagatccactctggaggaaccaaaccttcagcctctccagagaaggaggagtgtgcccgtgttgagactagctcgcccaacagagccgccagcccgctcggacatcaatggggccgccgtgagacctgagcaaagaccagcagccaggggctctccgcgtgagatgatcagagatgaggggtcctcagctcggtcaagaatgttgcgtttcccttcggggtccagctctcccaacatccttgccagctttgcagggaagaacagagtatgggtcatctcagcccctcatgcctcggaaggctactaccgcctcatgatgagcctgctgaaggacgatgtgtactgtgagctggcggagaggcacatccaacagattgtgctcttccaccaggcaggtgaggaaggaggcaaggtgagaaggatcaccagcgagggccagatcctggagcagcccctggaccctagcctcatccctaagctgatgagcttcctgaagctggagaagggcaagtttggcatggtgctgctgaagaagacgctgcaggtggaggagcgctatccatatcccgttaggctggaagccatgtacgaggtcatcgaccaaggccccatccgtaggatcgagaagatcaggcagaagggctttgtccagaaatgtaaggcctctggtgtagagggccaggtggtggcggaggggaatgacggtggagggggagcaggaaggccaagcctgggcagcgagaagaagaaagaggacccaaggagagcacaagtcccaccaaccagagagagtcgggtgaaggtcctgagaaaactggccgccactgcaccagctttgccccaacctccctcaacccccagagccaccacccttcctcctgccccagccacaacagtgactcggtccacgtcccgggcggtaacagttgctgcaagacctatgaccaccactgcctttcccaccacgcagaggccctggaccccctcaccctcccacaggccccctacaaccactgaggtgatcactgccaggagaccctcagtttcagagaatctttaccctccatcccggaaggatcagcacagggagaggccacagacaaccaggaggcccagcaaggccaccagcttggagagcttcacaaatgcccctcccaccaccatctcagaacccagcacaagggctgctggcccaggccgtttccgggacaaccgcatggacaggcgggaacatggccaccgagacccaaatgtggtgccaggtcctcccaagccagcaaaggagaaacctcccaaaaagaaggcccaggacaaaattcttagtaatgagtatgaggagaagtatgacctcagccggcctactgcctctcagctggaggacgagctgcaggtggggaatgttccccttaaaaaagcaaaggagtctaaaaagcatgaaaagcttgagaaaccagagaaggagaagaaaaaaaagatgaagaatgagaacgcagacaagttacttaagagtgaaaagcaaatgaagaagtctgagaaaaagagcaagcaagagaaagagaagagcaagaagaaaaaaggaggtaaaacagaacaggatggctatcagaaacccaccaacaaacacttcacgcagagtcccaagaagtcagtggccgacctgctggggtcctttgaaggcaaacgaagactccttctgatcactgctcccaaggctgagaacaatatgtatgtgcaacaacgtgatgaatatctggaaagtttctgcaagatggctaccaggaaaatctctgtgatcaccatcttcggccctgtcaacaacagcaccatgaaaatcgaccactttcagctagataatgagaagcccatgcgagtggtggatgatgaagacttggtagaccagcgtctcatcagcgagctgaggaaagagtacggaatgacctacaatgacttcttcatggtgctaacagatgtggatctgagagtcaagcaatactatgaggtaccaataacaatgaagtctgtgtttgatctgatcgatactttccagtcccgaatcaaagatatggagaagcagaagaaggagggcattgtttgcaaagaggacaaaaagcagtccctggagaacttcctatccaggttccggtggaggaggaggttgctggtgatctctgctcctaacgatgaagactgggcctattcacagcagctctctgccctcagtggtcaggcgtgcaattttgggagctctgttgttgagcgagaagacgtaccagcccatttggtgaaagacattcgtaactattttcaagtgagcccggagtacttctccatgcttctagtcggaaaagacggaaatgtcaaatcctggtatccttccccaatgtggtccatggtgattgtgtacgatttaattgattcgatgcaacttcggagacaggaaatggcgattcagcagtcactggggatgcgctgcccagaagatgagtatgcaggctatggttaccatagttaccaccaaggataccaggatggttaccaggatgactaccgtcatcatgagagttatcaccatggatacccttactgagcagaaatatgtaaccttagactcagccagtttcctctgcagctgctaaaactacatgtggccagctccattcttccacactgcgtactacatttcctgcctttttctttcagtgtttttctaagactaaataaatagcaaactttcaccta

SEQ ID NO: 328471 - DNA, 4027 bp, Homo sapiens
gccttctcactcctcactgagtccactctgaacgtgctaaaatgggaaggaggcggtgttttgctgatctgttaaattcttagtgaagtttccttgatttccagtggctgctgttgtttgagtttggtttggagcaaaactgaggtagtcctaacatttctgggactgaatccaggcaagagaaagaagaaaaagaagaagaaaaagaggaggaaaaaggtagggagaaataaagggaggagagaagcacagtgaaagaaaaaaaaagtcccttttcgacatcacattcctgtgttttccctcagcctggaaaacatattaatcccagtgcttttacgcccggaaacaaagagactaagccagactatgggggaaagggagataagaaggatcctggaactttaaagagggaaagagtgagattcagaaatcgccaggactggactttaagggacgtcctgtgtcagcacaagggactggcacacacagacacacgagaccgaggagaaactgcagacaaatggagatacaaagacttagaaggacagctcctttcacctcatcctacttgtccagaaggtaaaaagacacagccagaaagaaaaggcatcggctcagctctcagatcaggacaggctgtggatctgtggcggtactctgaaagctggagctgcagcacaccccttttgtattgctcaccctcggtaaagagagagagggctgggaggaaaagtagttcatctaggaaactgtcctgggaaccaaacttctgatttcttttgcaaccctctgcattccatctctatgagccaccattggattacacaatgacatggagaatgggaccccgtttcactatgctgttggccatgtggctagtgtgtggatcagaaccccacccccatgccactattagaggcagccacggaggacggaaagtgcctttggtttctccggacagcagtaggccagctcggtttctgaggcacactgggaggtctcgcggaattgagagatccactctggaggaaccaaaccttcagcctctccagagaaggaggagtgtgcccgtgttgagactagctcgcccaacagagccgccagcccgctcggacatcaatggggccgccgtgagacctgagcaaagaccagcagccaggggctctccgcgtgagatgatcagagatgaggggtcctcagctcggtcaagaatgttgcgtttcccttcggggtccagctctcccaacatccttgccagctttgcagggaagaacagagtatgggtcatctcagcccctcatgcctcggaaggctactaccgcctcatgatgagcctgctgaaggacgatgtgtactgtgagctggcggagaggcacatccaacagattgtgctcttccaccaggcaggtgaggaaggaggcaaggtgagaaggatcaccagcgagggccagatcctggagcagcccctggaccctagcctcatccctaagctgatgagcttcctgaagctggagaagggcaagtttggcatggtgctgctgaagaagacgctgcaggtggaggagcgctatccatatcccgttaggctggaagccatgtacgaggtcatcgaccaaggccccatccgtaggatcgagaagatcaggcagaagggctttgtccagaaatgtaaggcctctggtgtagagggccaggtggtggcggaggggaatgacggtggagggggagcaggaaggccaagcctgggcagcgagaagaagaaagaggacccaaggagagcacaagtcccaccaaccagagagagtcgggtgaaggtcctgagaaaactggccgccactgcaccagctttgccccaacctccctcaacccccagagccaccacccttcctcctgccccagccacaacagtgactcggtccacgtcccgggcggtaacagttgctgcaagacctatgaccaccactgcctttcccaccacgcagaggccctggaccccctcaccctcccacaggccccctacaaccactgaggtgatcactgccaggagaccctcagtttcagagaatctttaccctccatcccggaaggatcagcacagggagaggccacagacaaccaggaggcccagcaaggccaccagcttggagagcttcacaaatgcccctcccaccaccatctcagaacccagcacaagggctgctggcccaggccgtttccgggacaaccgcatggacaggcgggaacatggccaccgagacccaaatgtggtgccaggtcctcccaagccagcaaaggagaaacctcccaaaaagaaggcccaggacaaaattcttagtaatgagtatgaggagaagtatgacctcagccggcctactgcctctcagctggaggacgagctgcaggtggggaatgttccccttaaaaaagcaaaggagtctaaaaagcatgaaaagcttgagaaaccagagaaggagaagaaaaaaaagatgaagaatgagaacgcagacaagttacttaagagtgaaaagcaaatgaagaagtctgagaaaaagagcaagcaagagaaagagaagagcaagaagaaaaaaggaggtaaaacagaacaggatggctatcagaaacccaccaacaaacacttcacgcagagtcccaagaagtcagtggccgacctgctggggtcctttgaaggcaaacgaagactccttctgatcactgctcccaaggctgagaacaatatgtatgtgcaacaacgtgatgaatatctggaaagtttctgcaagatggctaccaggaaaatctctgtgatcaccatcttcggccctgtcaacaacagcaccatgaaaatcgaccactttcagctagataatgagaagcccatgcgagtggtggatgatgaagacttggtagaccagcgtctcatcagcgagctgaggaaagagtacggaatgacctacaatgacttcttcatggtgctaacagatgtggatctgagagtcaagcaatactatgaggtaccaataacaatgaagtctgtgtttgatctgatcgatactttccagtcccgaatcaaagatatggagaagcagaagaaggagggcattgtttgcaaagaggacaaaaagcagtccctggagaacttcctatccaggttccggtggaggaggaggttgctggtgatctctgctcctaacgatgaagactgggcctattcacagcagctctctgccctcagtggtcaggcgtgcaattttggtctgcgccacataaccattctgaagcttttaggcgttggagaggaagttgggggagtgttagaactgttcccaattaatgggagctctgttgttgagcgagaagacgtaccagcccatttggtgaaagacattcgtaactattttcaagtgagcccggagtacttctccatgcttctagtcggaaaagacggaaatgtcaaatcctggtatccttccccaatgtggtccatggtgattgtgtacgatttaattgattcgatgcaacttcggagacaggaaatggcgattcagcagtcactggggatgcgctgcccagaagatgagtatgcaggctatggttaccatagttaccaccaaggataccaggatggttaccaggatgactaccgtcatcatgagagttatcaccatggatacccttactgagcagaaatatgtaaccttagactcagccagtttcctctgcagctgctaaaactacatgtggccagctccattcttccacactgcgtactacatttcctgcctttttctttcagtgtttttctaagactaaataaatagcaaactttcacctaaaacaacaggatactataattactcgccttggcctcggcgggcctaagcggtggacctctggggccctttccctttaatgaggggtaattcctgaatctttggtcactgaactcgttcgctaggcctttcggttagggtgagcgtgatacacctcacccaagggagaattactggttttcaccagatctggtgag

SEQ ID NO: 328472 - DNA, 3701 bp, Homo sapiens
gccttctcactcctcactgagtccactctgaacgtgctaaaatgggaaggaggcggtgttttgctgatctgttaaattcttagtgaagtttccttgatttccagtggctgctgttgtttgagtttggtttggagcaaaactgaggtagtcctaacatttctgggactgaatccaggcaagagaaagaagaaaaagaagaagaaaaagaggaggaaaaaggtagggagaaataaagggaggagagaagcacagtgaaagaaaaaaaaagtcccttttcgacatcacattcctgtgttttccctcagcctggaaaacatattaatcccagtgcttttacgcccggaaacaaagagactaagccagactatgggggaaagggagataagaaggatcctggaactttaaagagggaaagagtgagattcagaaatcgccaggactggactttaagggacgtcctgtgtcagcacaagggactggcacacacagacacacgagaccgaggagaaactgcagacaaatggagatacaaagacttagaaggacagctcctttcacctcatcctacttgtccagaaggtaaaaagacacagccagaaagaaaaggcatcggctcagctctcagatcaggacaggctgtggatctgtggcggtactctgaaagctggagctgcagcacaccccttttgtattgctcaccctcggtaaagagagagagggctgggaggaaaagtagttcatctaggaaactgtcctgggaaccaaacttctgatttcttttgcaaccctctgcattccatctctatgagccaccattggattacacaatgacatggagaatgggaccccgtttcactatgctgttggccatgtggctagtgtgtggatcagaaccccacccccatgccactattagaggcagccacggaggacggaaagtgcctttggtttctccggacagcagtaggccagctcggtttctgaggcacactgggaggtctcgcggaattgagagatccactctggaggaaccaaaccttcagcctctccagagaaggaggagtgtgcccgtgttgagactagctcgcccaacagagccgccagcccgctcggacatcaatggggccgccgtgagacctgagcaaagaccagcagccaggggctctccgcgtgagatgatcagagatgaggggtcctcagctcggtcaagaatgttgcgtttcccttcggggtccagctctcccaacatccttgccagctttgcagggaagaacagagtatgggtcatctcagcccctcatgcctcggaaggctactaccgcctcatgatgagcctgctgaaggacgatgtgtactgtgagctggcggagaggcacatccaacagattgtgctcttccaccaggcaggtgaggaaggaggcaaggtgagaaggatcaccagcgagggccagatcctggagcagcccctggaccctagcctcatccctaagctgatgagcttcctgaagctggagaagggcaagtttggcatggtgctgctgaagaagacgctgcaggtggaggagcgctatccatatcccgttaggctggaagccatgtacgaggtcatcgaccaaggccccatccgtaggatcgagaagatcaggcagaagggctttgtccagaaatgtaaggcctctggtgtagagggccaggtggtggcggaggggaatgacggtggagggggagcaggaaggccaagcctgggcagcgagaagaagaaagaggacccaaggagagcacaagtcccaccaaccagagagagtcgggtgaaggtcctgagaaaactggccgccactgcaccagctttgccccaacctccctcaacccccagagccaccacccttcctcctgccccagccacaacagtgactcggtccacgtcccgggcggtaacagttgctgcaagacctatgaccaccactgcctttcccaccacgcagaggccctggaccccctcaccctcccacaggccccctacaaccactgaggtgatcactgccaggagaccctcagtttcagagaatctttaccctccatcccggaaggatcagcacagggagaggccacagacaaccaggaggcccagcaaggccaccagcttggagagcttcacaaatgcccctcccaccaccatctcagaacccagcacaagggctgctggcccaggccgtttccgggacaaccgcatggacaggcgggaacatggccaccgagacccaaatgtggtgccaggtcctcccaagccagcaaaggagaaacctcccaaaaagaaggcccaggacaaaattcttagtaatgagtatgaggagaagtatgacctcagccggcctactgcctctcagctggaggacgagctgcaggtggggaatgttccccttaaaaaagcaaaggagtctaaaaagcatgaaaagcttgagaaaccagagaaggagaagaaaaaaaagatgaagaatgagaacgcagacaagttacttaagagtgaaaagcaaatgaagaagtctgagaaaaagagcaagcaagagaaagagaagagcaagaagaaaaaaggaggtaaaacagaacaggatggctatcagaaacccaccaacaaacacttcacgcagagtcccaagaagtcagtggccgacctgctggggtcctttgaaggcaaacgaagactccttctgatcactgctcccaaggctgagaacaatatgtatgtgcaacaacgtgatgaatatctggaaagtttctgcaagatggctaccaggaaaatctctgtgatcaccatcttcggccctgtcaacaacagcaccatgaaaatcgaccactttcagctagataatgagaagcccatgcgagtggtggatgatgaagacttggtagaccagcgtctcatcagcgagctgaggaaagagtacggaatgacctacaatgacttcttcatggtgctaacagatgtggatctgagagtcaagcaatactatgaggtaccaataacaatgaagtctgtgtttgatctgatcgatactttccagtcccgaatcaaagatatggagaagcagaagaaggagggcattgtttgcaaagaggacaaaaagcagtccctggagaacttcctatccaggttccggtggaggaggaggttgctggtgatctctgctcctaacgatgaagactgggcctattcacagcagctctctgccctcagtggtcaggcgtgcaattttggtctgcgccacataaccattctgaagcttttaggcgttggagaggaagttgggggagtgttagaactgttcccaattaatgggagctctgttgttgagcgagaagacgtaccagcccatttggtgaaagacattcgtaactattttcaagtgagcccggagtacttctccatgcttctagtcggaaaagacggaaatgtcaaatcctggtatccttccccaatgtggtccatgccaggatggttaccaggatgactaccgtcatcatgagagttatcaccatggatacccttactgagcagaaatatgtaaccttagactcagccagtttcctctgcagctgctaaaactacatgtggccagctccattcttccacactgcgtactacatttcctgcctttttctttcagtgtttttctaagactaaataaatagcaaactttcaccta

SEQ ID NO: 328473 - DNA, 2938 bp, Homo sapiens
  misc_feature (2927)..(2927): n is a, c, g, or t
gccttctcactcctcactgagtccactctgaacgtgctaaaatgggaaggaggcggtgttttgctgatctgttaaattcttagtgaagtttccttgatttccagtggctgctgttgtttgagtttggtttggagcaaaactgaggtagtcctaacatttctgggactgaatccaggcaagagaaagaagaaaaagaagaagaaaaagaggaggaaaaaggtagggagaaataaagggaggagagaagcacagtgaaagaaaaaaaaagtcccttttcgacatcacattcctgtgttttccctcagcctggaaaacatattaatcccagtgcttttacgcccggaaacaaagagactaagccagactatgggggaaagggagataagaaggatcctggaactttaaagagggaaagagtgagattcagaaatcgccaggactggactttaagggacgtcctgtgtcagcacaagggactggcacacacagacacacgagaccgaggagaaactgcagacaaatggagatacaaagacttagaaggacagctcctttcacctcatcctacttgtccagaaggtaaaaagacacagccagaaagaaaaggcatcggctcagctctcagatcaggacaggctgtggatctgtggcggtactctgaaagctggagctgcagcacaccccttttgtattgctcaccctcggtaaagagagagagggctgggaggaaaagtagttcatctaggaaactgtcctgggaaccaaacttctgatttcttttgcaaccctctgcattccatctctatgagccaccattggattacacaatgacatggagaatgggaccccgtttcactatgctgttggccatgtggctagtgtgtggatcagaaccccacccccatgccactattagaggcagccacggaggacggaaagtgcctttggtttctccggacagcagtaggccagctcggtttctgaggcacactgggaggtctcgcggaattgagagatccactctggaggaaccaaaccttcagcctctccagagaaggaggagtgtgcccgtgttgagactagctcgcccaacagagccgccagcccgctcggacatcaatggggccgccgtgagacctgagcaaagaccagcagccaggggctctccgcgtgagatgatcagagatgaggggtcctcagctcggtcaagaatgttgcgtttcccttcggggtccagctctcccaacatccttgccagctttgcagggaagaacagagtatgggtcatctcagcccctcatgcctcggaaggctactaccgcctcatgatgagcctgctgaaggacgatgtgtactgtgagctggcggagaggcacatccaacagattgtgctcttccaccaggcaggtgaggaaggaggcaaggtgagaaggatcaccagcgagggccagatcctggagcagcccctggaccctagcctcatccctaagctgatgagcttcctgaagctggagaagggcaagtttggcatggtgctgctgaagaagacgctgcaggtggaggagcgctatccatatcccgttaggctggaagccatgtacgaggtcatcgaccaaggccccatccgtaggatcgagaagatcaggcagaagggctttgtccagaaatgtaaggcctctggtgtagagggccaggtggtggcggaggggaatgacggtggagggggagcaggaaggccaagcctgggcagcgagaagaagaaagaggacccaaggagagcacaagtcccaccaaccagagagagtcgggtgaaggtcctgagaaaactggccgccactgcaccagctttgccccaacctccctcaacccccagagccaccacccttcctcctgccccagccacaacagtgactcggtccacgtcccgggcggtaacagttgctgcaagacctatgaccaccactgcctttcccaccacgcagaggccctggaccccctcaccctcccacaggccccctacaaccactgaggtgatcactgccaggagaccctcagtttcagagaatctttaccctccatcccggaaggatcagcacagggagaggccacagacaaccaggaggcccagcaaggccaccagcttggagagcttcacaaatgcccctcccaccaccatctcagaacccagcacaagggctgctggcccaggccgtttccgggacaaccgcatggacaggcgggaacatggccaccgagacccaaatgtggtgccaggtcctcccaagccagcaaaggagaaacctcccaaaaagaaggcccaggacaaaattcttagtaatgagtatgaggagaagtatgacctcagccggcctactgcctctcagctggaggacgagctgcaggtggggaatgttccccttaaaaaagcaaaggagtctaaaaagcatgaaaagcttgagaaaccagagaaggagaagaaaaaaaagatgaagaatgagaacgcagacaagttacttaagagtgaaaagcaaatgaagaagtctgagaaaaagagcaagcaagagaaagagaagagcaagaagaaaaaaggaggtaaaacagaacaggatggctatcagaaacccaccaacaaacacttcacgcagagtcccaagaagtcagtggccgacctgctggggtcctttgaaggcaaacgaagactccttctgatcactgctcccaaggctgagaacaatatgtatgtgcaacaacgtgatgaatatctggaaagtttctgcaagatggctaccaggaaatggaaaagcttgagaaaccagagaaggagaagaaaaaaaagatgaagaatgagaacgcagacaagttacttaagagtgaaaagcaaatgaagaagtctgagaaaaagagcaagccagagaaagagaagagcnagaagaaaaaa

SEQ ID NO: 328474 - DNA, 222 bp, Homo sapiens
tacattggtttttattgtttgaagcagtaagcagtaatggtgtcctgctttttttttccaggttccggtggaggaggaggttgctggtgatctctgctcctaacgatgaagactgggcctattcacagcagctctctgccctcagtggtcaggcgtgcaattttggtgagtgggaagccacctcattactgctttcccataccactctcctcctggtcaatt

SEQ ID NO: 328475 - DNA, 359 bp, Homo sapiens
gaaatgagtaaagagagtgagcatgattcagatgaatcctctgatgatgacagtgattcagaggaaccaagcaaatacatcaatgcatcttttataatgagctactggaaacctgaagtgatgattgctgctcagggaccactccaggatggttaccaggatgactaccgtcatcatgagagttatcaccatggatacccttactgagcagaaatatgtaaccttagactcagccagtttcctctgcagctgctaaaactacatgtggccagctccattcttccacactgcgtactacatttcctgcctttttctttcagtgtttttctaagactaaataaatagcaaactttcaccta

SEQ ID NO: 328476 - DNA, 3866 bp, Homo sapiens
gtagacagatcatgccctccgtatacccgcctggtcctcctcaattgctatctacctaagtgccacagtggaacacaacattagatctcaatgaaaaccagaatggaaccctttcactatcataaactcatttataaaagtgcccatgatgaatagcaagaagtacccagtggcccatctcattgaccaaacttagaaagccaaggtggggcatctgcagctctcccacaatctgagtttgtgttgatccttgtaccccacaacctgaaacatcttcttatatatatcgagcgagctctcagcccttctgttttcaaggccatcatggagaaactggagatgtccaagttccagcccactctcctaacactaccccgcatcaaagagactaagccagactatgggggaaagggagataagaaggatcctggaactttaaagagggaaagagtgagattcagaaatcgccaggactggactttaagggacgtcctgtgtcagcacaagggactggcacacacagacacacgagaccgaggagaaactgcagacaaatggagatacaaagacttagaaggacagctcctttcacctcatcctacttgtccagaaggtaaaaagacacagccagaaagaaaaggcatcggctcagctctcagatcaggacaggctgtggatctgtggcggtactctgaaagctggagctgcagcacaccccttttgtattgctcaccctcggtaaagagagagagggctgggaggaaaagtagttcatctaggaaactgtcctgggaaccaaacttctgatttcttttgcaaccctctgcattccatctctatgagccaccattggattacacaatgacatggagaatgggaccccgtttcactatgctgttggccatgtggctagtgtgtggatcagaaccccacccccatgccactattagaggcagccacggaggacggaaagtgcctttggtttctccggacagcagtaggccagctcggtttctgaggcacactgggaggtctcgcggaattgagagatccactctggaggaaccaaaccttcagcctctccagagaaggaggagtgtgcccgtgttgagactagctcgcccaacagagccgccagcccgctcggacatcaatggggccgccgtgagacctgagcaaagaccagcagccaggggctctccgcgtgagatgatcagagatgaggggtcctcagctcggtcaagaatgttgcgtttcccttcggggtccagctctcccaacatccttgccagctttgcagggaagaacagagtatgggtcatctcagcccctcatgcctcggaaggctactaccgcctcatgatgagcctgctgaaggacgatgtgtactgtgagctggcggagaggcacatccaacagattgtgctcttccaccaggcaggtgaggaaggaggcaaggtgagaaggatcaccagcgagggccagatcctggagcagcccctggaccctagcctcatccctaagctgatgagcttcctgaagctggagaagggcaagtttggcatggtgctgctgaagaagacgctgcaggtggaggagcgctatccatatcccgttaggctggaagccatgtacgaggtcatcgaccaaggccccatccgtaggatcgagaagatcaggcagaagggctttgtccagaaatgtaaggcctctggtgtagagggccaggtggtggcggaggggaatgacggtggagggggagcaggaaggccaagcctgggcagcgagaagaagaaagaggacccaaggagagcacaagtcccaccaaccagagagagtcgggtgaaggtcctgagaaaactggccgccactgcaccagctttgccccaacctccctcaacccccagagccaccacccttcctcctgccccagccacaacagtgactcggtccacgtcccgggcggtaacagttgctgcaagacctatgaccaccactgcctttcccaccacgcagaggccctggaccccctcaccctcccacaggccccctacaaccactgaggtgatcactgccaggagaccctcagtttcagagaatctttaccctccatcccggaaggatcagcacagggagaggccacagacaaccaggaggcccagcaaggccaccagcttggagagcttcacaaatgcccctcccaccaccatctcagaacccagcacaagggctgctggcccaggccgtttccgggacaaccgcatggacaggcgggaacatggccaccgagacccaaatgtggtgccaggtcctcccaagccagcaaaggagaaacctcccaaaaagaaggcccaggacaaaattcttagtaatgagtatgaggagaagtatgacctcagccggcctactgcctctcagctggaggacgagctgcaggtggggaatgttccccttaaaaaagcaaaggagtctaaaaagcatgaaaagcttgagaaaccagagaaggagaagaaaaaaaagatgaagaatgagaacgcagacaagttacttaagagtgaaaagcaaatgaagaagtctgagaaaaagagcaagcaagagaaagagaagagcaagaagaaaaaaggaggtaaaacagaacaggatggctatcagaaacccaccaacaaacacttcacgcagagtcccaagaagtcagtggccgacctgctggggtcctttgaaggcaaacgaagactccttctgatcactgctcccaaggctgagaacaatatgtatgtgcaacaacgtgatgaatatctggaaagtttctgcaagatggctaccaggaaaatctctgtgatcaccatcttcggccctgtcaacaacagcaccatgaaaatcgaccactttcagctagataatgagaagcccatgcgagtggtggatgatgaagacttggtagaccagcgtctcatcagcgagctgaggaaagagtacggaatgacctacaatgacttcttcatggtgctaacagatgtggatctgagagtcaagcaatactatgaggtaccaataacaatgaagtctgtgtttgatctgatcgatactttccagtcccgaatcaaagatatggagaagcagaagaaggagggcattgtttgcaaagaggacaaaaagcagtccctggagaacttcctatccaggttccggtggaggaggaggttgctggtgatctctgctcctaacgatgaagactgggcctattcacagcagctctctgccctcagtggtcaggcgtgcaattttggtctgcgccacataaccattctgaagcttttaggcgttggagaggaagttgggggagtgttagaactgttcccaattaatgggagctctgttgttgagcgagaagacgtaccagcccatttggtgaaagacattcgtaactattttcaagtgagcccggagtacttctccatgcttctagtcggaaaagacggaaatgtcaaatcctggtatccttccccaatgtggtccatggtgattgtgtacgatttaattgattcgatgcaacttcggagacaggaaatggcgattcagcagtcactggggatgcgctgcccagaagatgagtatgcaggctatggttaccatagttaccaccaaggataccaggatggttaccaggatgactaccgtcatcatgagagttatcaccatggatacccttactgagcagaaatatgtaaccttagactcagccagtttcctctgcagctgctaaaactacatgtggccagctccattcttccacactgcgtactacatttcctgcctttttctttcagtgtttttctaagactaaataaatagcaaactttcaccta

SEQ ID NO: 328477 - DNA, 3773 bp, Homo sapiens
gccttctcactcctcactgagtccactctgaacgtgctaaaatgggaaggaggcggtgttttgctgatctgttaaattcttagtgaagtttccttgatttccagtggctgctgttgtttgagtttggtttggagcaaaactgaggtagtcctaacatttctgggactgaatccaggcaagagaaagaagaaaaagaagaagaaaaagaggaggaaaaaggtagggagaaataaagggaggagagaagcacagtgaaagaaaaaaaaagtcccttttcgacatcacattcctgtgttttccctcagcctggaaaacatattaatcccagtgcttttacgcccggaaacaaagagactaagccagactatgggggaaagggagataagaaggatcctggaactttaaagagggaaagagtgagattcagaaatcgccaggactggactttaagggacgtcctgtgtcagcacaagggactggcacacacagacacacgagaccgaggagaaactgcagacaaatggagatacaaagacttagaaggacagctcctttcacctcatcctacttgtccagaaggtaaaaagacacagccagaaagaaaaggcatcggctcagctctcagatcaggacaggctgtggatctgtggcggtactctgaaagctggagctgcagcacaccccttttgtattgctcaccctcggtaaagagagagagggctgggaggaaaagtagttcatctaggaaactgtcctgggaaccaaacttctgatttcttttgcaaccctctgcattccatctctatgagccaccattggattacacaatgacatggagaatgggaccccgtttcactatgctgttggccatgtggctagtgtgtggatcagaaccccacccccatgccactattagaggcagccacggaggacggaaagtgcctttggtttctccggacagcagtaggccagctcggtttctgaggcacactgggaggtctcgcggaattgagagatccactctggaggaaccaaaccttcagcctctccagagaaggaggagtgtgcccgtgttgagactagctcgcccaacagagccgccagcccgctcggacatcaatggggccgccgtgagacctgagcaaagaccagcagccaggggctctccgcgtgagatgatcagagatgaggggtcctcagctcggtcaagaatgttgcgtttcccttcggggtccagctctcccaacatccttgccagctttgcagggaagaacagagtatgggtcatctcagcccctcatgcctcggaaggctactaccgcctcatgatgagcctgctgaaggacgatgtgtactgtgagctggcggagaggcacatccaacagattgtgctcttccaccaggcaggtgaggaaggaggcaaggtgagaaggatcaccagcgagggccagatcctggagcagcccctggaccctagcctcatccctaagctgatgagcttcctgaagctggagaagggcaagtttggcatggtgctgctgaagaagacgctgcaggtggaggagcgctatccatatcccgttaggctggaagccatgtacgaggtcatcgaccaaggccccatccgtaggatcgagaagatcaggcagaagggctttgtccagaaatgtaaggcctctggtgtagagggccaggtggtggcggaggggaatgacggtggagggggagcaggaaggccaagcctgggcagcgagaagaagaaagaggacccaaggagagcacaagtcccaccaaccagagagagtcgggtgaaggtcctgagaaaactggccgccactgcaccagctttgccccaacctccctcaacccccagagccaccacccttcctcctgccccagccacaacagtgactcggtccacgtcccgggcggtaacagttgctgcaagacctatgaccaccactgcctttcccaccacgcagaggccctggaccccctcaccctcccacaggccccctacaaccactgaggtgatcactgccaggagaccctcagtttcagagaatctttaccctccatcccggaaggatcagcacagggagaggccacagacaaccaggagaacccagcacaagggctgctggcccaggccgtttccgggacaaccgcatggacaggcgggaacatggccaccgagacccaaatgtggtgccaggtcctcccaagccagcaaaggagaaacctcccaaaaagaaggcccaggacaaaattcttagtaatgagtatgaggagaagtatgacctcagccggcctactgcctctcagctggaggacgagctgcaggtggggaatgttccccttaaaaaagcaaaggagtctaaaaagcatgaaaagcttgagaaaccagagaaggagaagaaaaaaaagatgaagaatgagaacgcagacaagttacttaagagtgaaaagcaaatgaagaagtctgagaaaaagagcaagcaagagaaagagaagagcaagaagaaaaaaggaggtaaaacagaacaggatggctatcagaaacccaccaacaaacacttcacgcagagtcccaagaagtcagtggccgacctgctggggtcctttgaaggcaaacgaagactccttctgatcactgctcccaaggctgagaacaatatgtatgtgcaacaacgtgatgaatatctggaaagtttctgcaagatggctaccaggaaaatctctgtgatcaccatcttcggccctgtcaacaacagcaccatgaaaatcgaccactttcagctagataatgagaagcccatgcgagtggtggatgatgaagacttggtagaccagcgtctcatcagcgagctgaggaaagagtacggaatgacctacaatgacttcttcatggtgctaacagatgtggatctgagagtcaagcaatactatgaggtaccaataacaatgaagtctgtgtttgatctgatcgatactttccagtcccgaatcaaagatatggagaagcagaagaaggagggcattgtttgcaaagaggacaaaaagcagtccctggagaacttcctatccaggttccggtggaggaggaggttgctggtgatctctgctcctaacgatgaagactgggcctattcacagcagctctctgccctcagtggtcaggcgtgcaattttggtctgcgccacataaccattctgaagcttttaggcgttggagaggaagttgggggagtgttagaactgttcccaattaatgggagctctgttgttgagcgagaagacgtaccagcccatttggtgaaagacattcgtaactattttcaagtgagcccggagtacttctccatgcttctagtcggaaaagacggaaatgtcaaatcctggtatccttccccaatgtggtccatggtgattgtgtacgatttaattgattcgatgcaacttcggagacaggaaatggcgattcagcagtcactggggatgcgctgcccagaagatgagtatgcaggctatggttaccatagttaccaccaaggataccaggatggttaccaggatgactaccgtcatcatgagagttatcaccatggatacccttactgagcagaaatatgtaaccttagactcagccagtttcctctgcagctgctaaaactacatgtggccagctccattcttccacactgcgtactacatttcctgcctttttctttcagtgtttttctaagactaaataaatagcaaactttcaccta

SEQ ID NO: 328478 - DNA, 4656 bp, Homo sapiens
gccttctcactcctcactgagtccactctgaacgtgctaaaatgggaaggaggcggtgttttgctgatctgttaaattcttagtgaagtttccttgatttccagtggctgctgttgtttgagtttggtttggagcaaaactgaggtagtcctaacatttctgggactgaatccaggcaagagaaagaagaaaaagaagaagaaaaagaggaggaaaaaggtagggagaaataaagggaggagagaagcacagtgaaagaaaaaaaaagtcccttttcgacatcacattcctgtgttttccctcagcctggaaaacatattaatcccagtgcttttacgcccggaaacaaagagactaagccagactatgggggaaagggagataagaaggatcctggaactttaaagagggaaagagtgagattcagaaatcgccaggactggactttaagggacgtcctgtgtcagcacaagggactggcacacacagacacacgagaccgaggagaaactgcagacaaatggagatacaaagacttagaaggacagctcctttcacctcatcctacttgtccagaaggtaaaaagacacagccagaaagaaaaggcatcggctcagctctcagatcaggacaggctgtggatctgtggcggtactctgaaagctggagctgcagcacaccccttttgtattgctcaccctcggtaaagagagagagggctgggaggaaaagtagttcatctaggaaactgtcctgggaaccaaacttctgatttcttttgcaaccctctgcattccatctctatgagccaccattggattacacaatgacatggagaatgggaccccgtttcactatgctgttggccatgtggctagtgtgtggatcagaaccccacccccatgccactattagaggcagccacggaggacggaaagtgcctttggtttctccggacagcagtaggccagctcggtttctgaggcacactgggaggtctcgcggaattgagagatccactctggaggaaccaaaccttcagcctctccagagaaggaggagtgtgcccgtgttgagactagctcgcccaacagagccgccagcccgctcggacatcaatggggccgccgtgagacctgagcaaagaccagcagccaggggctctccgcgtgagatgatcagagatgaggggtcctcagctcggtcaagaatgttgcgtttcccttcggggtccagctctcccaacatccttgccagctttgcagggaagaacagagtatgggtcatctcagcccctcatgcctcggaaggctactaccgcctcatgatgagcctgctgaaggacgatgtgtactgtgagctggcggagaggcacatccaacagattgtgctcttccaccaggcaggtgaggaaggaggcaaggtgagaaggatcaccagcgagggccagatcctggagcagcccctggaccctagcctcatccctaagctgatgagcttcctgaagctggagaagggcaagtttggcatggtgctgctgaagaagacgctgcaggtggaggagcgctatccatatcccgttaggctggaagccatgtacgaggtcatcgaccaaggccccatccgtaggatcgagaagatcaggcagaagggctttgtccagaaatgtaaggcctctggtgtagagggccaggtggtggcggaggggaatgacggtggagggggagcaggaaggccaagcctgggcagcgagaagaagaaagaggacccaaggagagcacaagtcccaccaaccagagagagtcgggtgaaggtcctgagaaaactggccgccactgcaccagctttgccccaacctccctcaacccccagagccaccacccttcctcctgccccagccacaacagtgactcggtccacgtcccgggcggtaacagttgctgcaagacctatgaccaccactgcctttcccaccacgcagaggccctggaccccctcaccctcccacaggccccctacaaccactgaggtgatcactgccaggagaccctcagtttcagagaatctttaccctccatcccggaaggatcagcacagggagaggccacagacaaccaggaggcccagcaaggccaccagcttggagagcttcacaaatgcccctcccaccaccatctcagaacccagcacaagggctgctggcccaggccgtttccgggacaaccgcatggacaggcgggaacatggccaccgagacccaaatgtggtgccaggtcctcccaagccagcaaaggagaaacctcccaaaaagaaggcccaggacaaaattcttagtaatgagtatgaggagaagtatgacctcagccggcctactgcctctcagctggaggacgagctgcaggtggggaatgttccccttaaaaaagcaaaggagtctaaaaagcatgaaaagcttgagaaaccagagaaggagaagaaaaaaaagatgaagaatgagaacgcagacaagttacttaagagtgaaaagcaaatgaagaagtctgagaaaaagagcaagcaagagaaagagaagagcaagaagaaaaaaggaggtaaaacagaacaggatggctatcagaaacccaccaacaaacacttcacgcagagtcccaagaagtcagtggccgacctgctggggtcctttgaaggcaaacgaagactccttctgatcactgctcccaaggctgagaacaatatgtatgtgcaacaacgtgatgaatatctggaaagtttctgcaagatggctaccaggaaaatctctgtgatcaccatcttcggccctgtcaacaacagcaccatgaaaatcgaccactttcagctagataatgagaagcccatgcgagtggtggatgatgaagacttggtagaccagcgtctcatcagcgagctgaggaaagagtacggaatgacctacaatgacttcttcatggtgctaacagatgtggatctgagagtcaagcaatactatgaggtaccaataacaatgaagtctgtgtttgatctgatcgatactttccagtcccgaatcaaagatatggagaagcagaagaaggagggcattgtttgcaaagaggacaaaaagcagtccctggagaacttcctatccaggttccggtggaggaggaggttgctggtgatctctgctcctaacgatgaagactgggcctattcacagcagctctctgccctcagtggtcaggcgtgcaattttggtctgcgccacataaccattctgaagcttttaggcgttggagaggaagttgggggagtgttagaactgttcccaattaatgggagctctgttgttgagcgagaagacgtaccagcccatttggtgaaagacattcgtaactattttcaagtgagcccggagtacttctccatgcttctagtcggaaaagacggaaatgtcaaatcctggtatccttccccaatgtggtccatggtgattgtgtacgatttaattgattcgatgcaacttcggagacaggaaatggcgattcagcagtcactggggatgcgctgcccagaagatgagtatgcaggctatggttaccatagttaccaccaaggataccaggatggttaccaggatgactaccgtcatcatgagagttatcaccatggatacccttactgagcagaaatatgtaaccttagactcagccagtttcctctgcagctgctaaaactacatgtggccagctccattcttccacactgcgtactacatttcctgcctttttctttcagtgtttttctaagactaaataaatagcaaactttcacctattcatgagttattattgaaacctcaaatcataaagacatttaaaagaattgtttttctaactggaggggctctagtgctaaataatagtactgaaaattgatattattttccttttcttatatgaaggaccttatttggcatataaaattttataaaatatgtatttaaagctttttcttattttttgtattaattggtaagtgaaaactctgttaaagatcacaccacaatgttttcaagaaacatctgaaaagataaaacaaagaacaaataacttataatacttacttaaattgacactttttgaaatgccagtctgaaaataattaagatatctctgctttgtatgagtttcttttatgaaacttgataccacgggagtccagtaatattggccacaaaagccagagaaagtaccaagcccagctttgttatcatagccacttcctgccctgcttctgttatttttagtgttttttcagatataaatcggggtccaggaaatcctcaccagaatctggcactgcagccaaaggcgatacttccagagttctagtaggctgctatggaatttctggcatgaaaattcttgacccctcacactttaccccctgtacagcacaggcataccatggagatattacaggatcagttccagaccaccataataaagtggatatcgcaataaagtgagtcacacaaaatttttggtttctcagtgcatataaaagttatgtttacactctttagtagtctattaagtgtataatagctttatgtccaaaaaatgtacatgttttattttaaaaatactttattgcta

SEQ ID NO: 328479 - DNA, 3682 bp, Homo sapiens
gccttctcactcctcactgagtccactctgaacgtgctaaaatgggaaggaggcggtgttttgctgatctgttaaattcttagtgaagtttccttgatttccagtggctgctgttgtttgagtttggtttggagcaaaactgaggtagtcctaacatttctgggactgaatccaggcaagagaaagaagaaaaagaagaagaaaaagaggaggaaaaaggtagggagaaataaagggaggagagaagcacagtgaaagaaaaaaaaagtcccttttcgacatcacattcctgtgttttccctcagcctggaaaacatattaatcccagtgcttttacgcccggaaacaaagagactaagccagactatgggggaaagggagataagaaggatcctggaactttaaagagggaaagagtgagattcagaaatcgccaggactggactttaagggacgtcctgtgtcagcacaagggactggcacacacagacacacgagaccgaggagaaactgcagacaaatggagatacaaagacttagaaggacagctcctttcacctcatcctacttgtccagaaggtaaaaagacacagccagaaagaaaaggcatcggctcagctctcagatcaggacaggctgtggatctgtggcggtactctgaaagctggagctgcagcacaccccttttgtattgctcaccctcggtaaagagagagagggctgggaggaaaagtagttcatctaggaaactgtcctgggaaccaaacttctgatttcttttgcaaccctctgcattccatctctatgagccaccattggattacacaatgacatggagaatgggaccccgtttcactatgctgttggccatgtggctagtgtgtggatcagaaccccacccccatgccactattagaggcagccacggaggacggaaagtgcctttggtttctccggacagcagtaggccagctcggtttctgaggcacactgggaggtctcgcggaattgagagatccactctggaggaaccaaaccttcagcctctccagagaaggaggagtgtgcccgtgttgagactagctcgcccaacagagccgccagcccgctcggacatcaatggggccgccgtgagacctgagcaaagaccagcagccaggggctctccgcgtgagatgatcagagatgaggggtcctcagctcggtcaagaatgttgcgtttcccttcggggtccagctctcccaacatccttgccagctttgcagggaagaacagagtatgggtcatctcagcccctcatgcctcggaaggctactaccgcctcatgatgagcctgctgaaggacgatgtgtactgtgagctggcggagaggcacatccaacagattgtgctcttccaccaggcaggtgaggaaggaggcaaggtgagaaggatcaccagcgagggccagatcctggagcagcccctggaccctagcctcatccctaagctgatgagcttcctgaagctggagaagggcaagtttggcatggtgctgctgaagaagacgctgcaggtggaggagcgctatccatatcccgttaggctggaagccatgtacgaggtcatcgaccaaggccccatccgtaggatcgagaagatcaggcagaagggctttgtccagaaatgtaaggcctctggtgtagagggccaggtggtggcggaggggaatgacggtggagggggagcaggaaggccaagcctgggcagcgagaagaagaaagaggacccaaggagagcacaagtcccaccaaccagagagagtcgggtgaaggtcctgagaaaactggccgccactgcaccagctttgccccaacctccctcaacccccagagccaccacccttcctcctgccccagccacaacagtgactcggtccacgtcccgggcggtaacagttgctgcaagacctatgaccaccactgcctttcccaccacgcagaggccctggaccccctcaccctcccacaggccccctacaaccactgaggtgatcactgccaggagaccctcagtttcagagaatctttaccctccatcccggaaggatcagcacagggagaggccacagacaaccaggaggcccagcaaggccaccagcttggagagcttcacaaatgcccctcccaccaccatctcagaacccagcacaagggctgctggcccaggccgtttccgggacaaccgcatggacaggcgggaacatggccaccgagacccaaatgtggtgccaggtcctcccaagccagcaaaggagaaacctcccaaaaagaaggcccaggacaaaattcttagtaatgagtatgaggagaagtatgacctcagccggcctactgcctctcagctggaggacgagctgcaggtggggaatgttccccttaaaaaagcaaaggagtctaaaaagcatgaaaagcttgagaaaccagagaaggagaagaaaaaaaagatgaagaatgagaacgcagacaagttacttaagagtgaaaagcaaatgaagaagtctgagaaaaagagcaagcaagagaaagagaagagcaagaagaaaaaaggaggtaaaacagaacaggatggctatcagaaacccaccaacaaacacttcacgcagagtcccaagaagtcagtggccgacctgctggggtcctttgaaggcaaacgaagactccttctgatcactgctcccaaggctgagaacaatatgtatgtgcaacaacgtgatgaatatctggaaagtttctgcaagatggctaccaggaaaatctctgtgatcaccatcttcggccctgtcaacaacagcaccatgaaaatcgaccactttcagctaggttctcttaaacattttaattatattattgtttttctcatatctaaggtgggacaaactttatggtagaggtacatgggggatccaaaagaaaatgaagatgttcagagggctctttggttgtgataacacaggtcagtttgcctgcttatttaaatagccattccaggatggttctcgtttaagttttaagcactgtaaaaaagaaaaatacgcaaacactctattgtctgaaagtcagtaaggtggaagaaaatgggaaaagtaacacagtgtgggagagaatcagagaggcattcagacactttttctgggtactgagtcttctcgcctgtgagcagccccgtctgatcttcctgcagactctccgctgcaggtgactcatcacagatgggacttgccagactctcggaagtacttgactctggcaagcctgaggaaggaattaaccagaactgagagaagctgttaagataaatgaaaagtcactgaaaatatggactgaactgcacccaagtccttttggagagtagaagaatttggctgaatttagagttttcgcaattttacatatgaatggtgcatgtgagactcatgaggcgtacagcccagtgttggacagctgagatctaactcattgcagttctcctgggaacgttgcaagatttactgtgattagttaagcctcatagtcagaagcccaaaatatgacccacccagtttatttcataattattgcatctctagggctttattttttaaaaagctttttttcttatatgcactttctactgttttgttgttgttcatggtttaactac

SEQ ID NO: 328480 - DNA, 2136 bp, Homo sapiens
agtctcagggcctcatgcaaaactatacagctaataaacagtagagttgggatctaagcccagggaattttactctagaactcgcagtattaaccacagtgctctcttggcttatatttctaaggcacatgctgtaaccacttttttttttttttttttgagatggggtctcactctgacatccaagctggggtgcagtggcgcgatctcggcacactgcaaccttcgcctcccagattcaagggattctcctgcctcaggctcctgagtagctaggattacaggcacatgccaccatgcccgtataattttttgtatttttagtagagacggggtttcgccatgttgcccaggctggtctcaaacacctgacctcaggtgatccgcccatctcggcctcccaaagtgctgggattacaggtgtaagccgccacgccctgcctataaccattctttttttagggaggtgtggtatatggtgctaccctggatctgtagtcaggatttgaagaagggagaaggtatttgcttgtgaagaaggcaccatgcattgtgctctgtagtggtgactggagagagagctgggaggggcacaggcagcaaggtccctgcttaaagacagttatctagtttggagaaacttagctggatagtcagttcttacatgcatttggcaagcacttatcatacactgtaaagaggcaatatgtctagcttgttagagggtgggctctggagtcagacttctggctttgaaccccaacttccctgccattttcaaatgacactggagaagtcacaaaacctatttctgtctcagattcctccccagtaaaagtgggatattaatagtacctcctttggcttgatatgaaaattcaatgagttgatatatgcagaacatcttagaacagcaactagcttagagtaaatcttcagtaattgtaaactgtgaatatactatgtttttggcactgaagccacgtcgtggtaagacagtgcctgacctcaagaagctcagagtctagtactggagacaggtgaacaaatacttgcaaagtgtgtggtgtgagagaggtgtgacaggtgggcgggagcctgcagcaggcacatctgacccatcctaggtgtgtgttgtgcagaaaagttagcctaggctttctaggggcactgatgtctgggccgagtcttgtagggcagggaattagtcaaggggagcacgtgaggggacatgcagggactgcccgtgtgaacggcttcaaccgcatgccccccaccccacagtcgccaagaagactgggaggtccgcatcggcggtgggtacaacgtcattcaggctgcgaggcgagtcaggcctttccagacctcgccggactgggttgggctgcgccggaaattgaccggaacagggactatgagaaaatagttgagcaatcgaggagtcagctgaaaagcggaggctcaagagccatttcaagctgggctgtaccagaaattgattggaatagggactatgagaaaatagtcgggcaaaggaggagtaagctcaaaagtggagtctcaaagccatttcaaccttcccgccccagccagtcgaagcagtggcgcggggcctcccaagcccaggagccggagatggaggaggtggtggaagagttggggctgcctttgcagctttccaccctaggcggagggaacctgccagggggcgtgcggaggtccgcaatctgagaccgcgaaatggcttacagctggacgtgattgccaagacccttctgggctgcttccagaagcgcggaggctggggtgctgtgcgcactggggagcacatgaggggacatgcagggactaccggcgcgaatggcttcaaccctacgccccccaccccacatttcacagttgccatgaagaccgggaggtctgcaaaagcagcgggtacaagtcattgaggccaagaggcgagtcaggcctttctagacctcgcccaactcagctgggctgcgctggaaattgaccggaacaggaactatgagaaaatagtcgggcaaatgagaagtaagctcaaaagcgtaggctcaagagccatttcaagccgggctgcgccggaaattgaccagaacagggactatgagaaaa

SEQ ID NO: 328481 - DNA, 3200 bp, Homo sapiens
agtctcagggcctcatgcaaaactatacagctaataaacagtagagttgggatctaagcccagggaattttactctagaactcgcagtattaaccacagtgctctcttggcttatatttctaaggcacatgctgtaaccacttttttttttttttttttgagatggggtctcactctgacatccaagctggggtgcagtggcgcgatctcggcacactgcaaccttcgcctcccagattcaagggattctcctgcctcaggctcctgagtagctaggattacaggcacatgccaccatgcccgtataattttttgtatttttagtagagacggggtttcgccatgttgcccaggctggtctcaaacacctgacctcaggtgatccgcccatctcggcctcccaaagtgctgggattacaggtgtaagccgccacgccctgcctataaccattctttttttagggaggtgtggtatatggtgctaccctggatctgtagtcaggatttgaagaagggagaaggtatttgcttgtgaagaaggcaccatgcattgtgctctgtagtggtgactggagagagagctgggaggggcacaggcagcaaggtccctgcttaaagacagttatctagtttggagaaacttagctggatagtcagttcttacatgcatttggcaagcacttatcatacactgtaaagaggcaatatgtctagcttgttagagggtgggctctggagtcagacttctggctttgaaccccaacttccctgccattttcaaatgacactggagaagtcacaaaacctatttctgtctcagattcctccccagtaaaagtgggatattaatagtacctcctttggcttgatatgaaaattcaatgagttgatatatgcagaacatcttagaacagcaactagcttagagtaaatcttcagtaattgtaaactgtgaatatactatgtttttggcactgaagccacgtcgtggtaagacagtgcctgacctcaagaagctcagagtctagtactggagacaggtgaacaaatacttgcaaagtgtgtggtgtgagagaggtgtgacaggtgggcgggagcctgcagcaggcacatctgacccatcctaggtgtgtgttgtgcagaaaagttagcctaggctttctaggggcactgatgtctgggccgagtcttgtagggcagggaattagtcaaggggagctgtagtgatccagctggggctgagcaggagctgaaagtgaacagctcacatctgtagggttgccagatttagcaacggaaagtacaagatgccctattaaatgtgaatttcagataaaataataactttgaagaatatgtgtcatgcaatatttttagtataagtatgtcccaaatattgtataaccacacacattattcattgtttatctgaaattcaaatttcactgggcatcctatgaaaagtctgtcaattttatctgtccgcatttaggaaggtgcagtatgtttcagagtagctggagtgatgcagggaggaaaggcagagtgggccggatggggctgagaggcacacaggaggcagtttgtaaaaaacctatgctatgttaagggatttagattttatcctgaaattagtgatgagcccttggagagctttaaccacagggatgtgaaaccacagagacagcagtgtcgggcacgaagaaatgagtgtcactttctatggctgaatagcaaattactccaaatttaaagtcttaaacagtaaacattatctcccagtttctgtggctcaggaattcagaggcaacttagctgggtggttctggctgaggtttctcatgaggttgtagataagatagtgaccagagtggcagttatctaaaggatgcactggagctggagaatttgcttctagggtgactcactctaatggttgggaaggtactgctggctgtcagcaggagagctcagttccttgctacaggaccccccataggacaacttgagcctcctcacaacatgacagctggcttagtaatccaagacagcaaagtgacattaactttggaagtcacatgccaccttgtcattcccatatatcccagtgctaacacagctcagccctgctcagtgcaggagggtcctacacaaggatgtacatacaagaaggtggggatcatggggttatcttggaggctggttttctgggatgggaggcttacatggtgatgcctgtgaccttggaggtggaggagaatgatgggcgtacagaggagtgaagaaaggctgggaggaatagagatgtgggagaggaggtgaggcaaagaaaaaagaaaggaggaaggggtgttggagcagattgtagttgatccacagcaaagagcatcaccaaagccattccaggaggaactagatccaccacttcctctgctgggcatgctccaaaaatggttgtggcctccagagaggactccaaaagaaagcacaaaaactagacagtgggagggcatacccaaaagccctgagtttctgaaaaaatattgaaagtttctatggtgaaataggaagttaatgtgcttaggaagaaaaaagtggtaatgattcaaggaaacataatcacacacggttttagttttaatggacatgggaggagccataaaagtagtctatctatcatcagttacatatctaatgaactgtctatctgggataccctatcctgttttaatctgagtgactctctctcagctgagagagctggacagactccattttagcctcttcacttgcagtccccttatccccctcccttaagggaataactagtgcaagctgactccaagcacatccaggaatgcacttactgataagatattgaggcaagctgtaccagcagctcctggggacgtgctcagtggatggtacccaagcccctgcatttatctctttgtgatagtttaagcccctgcacctggaactgtgtatttttctgtaactatctctgtaaccattaattttttttaactttttgcgtgttctgcttctgtaaaaattgcttcagctaggctccccctgccctatttagaccacggtataaaaagaaatctatccccttcttcggggctgagagaattttgagctctagccatctctcggtcactggcaataaaagaactcctgaattagaaaaaaaaaaa

SEQ ID NO: 328482 - DNA, 3070 bp, Homo sapiens
ttttctcatagtccctattccagtcaatttctggcacagcccagcttgaaactgctcttgagcctccgattttgagcttactcctggtttgcccgactattttctcataatccctgttccggtcagtttccggcacagcccactaggattacaggcacatgccaccatgcccgtataattttttgtatttttagtagagacggggtttcgccatgttgcccaggctggtctcaaacacctgacctcaggtgatccgcccatctcggcctcccaaagtgctgggattacaggtgtaagccgccacgccctgcctataaccattctttttttagggaggtgtggtatatggtgctaccctggatctgtagtcaggatttgaagaagggagaaggtatttgcttgtgaagaaggcaccatgcattgtgctctgtagtggtgactggagagagagctgggaggggcacaggcagcaaggtccctgcttaaagacagttatctagtttggagaaacttagctggatagtcagttcttacatgcatttggcaagcacttatcatacactgtaaagaggcaatatgtctagcttgttagagggtgggctctggagtcagacttctggctttgaaccccaacttccctgccattttcaaatgacactggagaagtcacaaaacctatttctgtctcagattcctccccagtaaaagtgggatattaatagtacctcctttggcttgatatgaaaattcaatgagttgatatatgcagaacatcttagaacagcaactagcttagagtaaatcttcagtaattgtaaactgtgaatatactatgtttttggcactgaagccacgtcgtggtaagacagtgcctgacctcaagaagctcagagtctagtactggagacaggtgaacaaatacttgcaaagtgtgtggtgtgagagaggtgtgacaggtgggcgggagcctgcagcaggcacatctgacccatcctaggtgtgtgttgtgcagaaaagttagcctaggctttctaggggcactgatgtctgggccgagtcttgtagggcagggaattagtcaaggggagctgtagtgatccagctggggctgagcaggagctgaaagtgaacagctcacatctgtagggttgccagatttagcaacggaaagtacaagatgccctattaaatgtgaatttcagataaaataataactttgaagaatatgtgtcatgcaatatttttagtataagtatgtcccaaatattgtataaccacacacattattcattgtttatctgaaattcaaatttcactgggcatcctatgaaaagtctgtcaattttatctgtccgcatttaggaaggtgcagtatgtttcagagtagctggagtgatgcagggaggaaaggcagagtgggccggatggggctgagaggcacacaggaggcagtttgtaaaaaacctatgctatgttaagggatttagattttatcctgaaattagtgatgagcccttggagagctttaaccacagggatgtgaaaccacagagacagcagtgtcgggcacgaagaaatgagtgtcactttctatggctgaatagcaaattactccaaatttaaagtcttaaacagtaaacattatctcccagtttctgtggctcaggaattcagaggcaacttagctgggtggttctggctgaggtttctcatgaggttgtagataagatagtgaccagagtggcagttatctaaaggatgcactggagctggagaatttgcttctagggtgactcactctaatggttgggaaggtactgctggctgtcagcaggagagctcagttccttgctacaggaccccccataggacaacttgagcctcctcacaacatgacagctggcttagtaatccaagacagcaaagtgacattaactttggaagtcacatgccaccttgtcattcccatatatcccagtgctaacacagctcagccctgctcagtgcaggagggtcctacacaaggatgtacatacaagaaggtggggatcatggggttatcttggaggctggttttctgggatgggaggcttacatggtgatgcctgtgaccttggaggtggaggagaatgatgggcgtacagaggagtgaagaaaggctgggaggaatagagatgtgggagaggaggtgaggcaaagaaaaaagaaaggaggaaggggtgttggagcagattgtagttgatccacagcaaagagcatcaccaaagccattccaggaggaactagatccaccacttcctctgctgggcatgctccaaaaatggttgtggcctccagagaggactccaaaagaaagcacaaaaactagacagtgggagggcatacccaaaagccctgagtttctgaaaaaatattgaaagtttctatggtgaaataggaagttaatgtgcttaggaagaaaaaagtggtaatgattcaaggaaacataatcacacacggttttagttttaatggacatgggaggagccataaaagtagtctatctatcatcagttacatatctaatgaactgtctatctgggataccctatcctgttttaatctgagtgactctctctcagctgagagagctggacagactccattttagcctcttcacttgcagtccccttatccccctcccttaagggaataactagtgcaagctgactccaagcacatccaggaatgcacttactgataagatattgaggcaagctgtaccagcagctcctggggacgtgctcagtggatggtacccaagcccctgcatttatctctttgtgatagtttaagcccctgcacctggaactgtgtatttttctgtaactatctctgtaaccattaattttttttaactttttgcgtgttctgcttctgtaaaaattgcttcagctaggctccccctgccctatttagaccacggtataaaaagaaatctatccccttcttcggggctgagagaattttgagctctagccatctctcggtcactggcaataaaagaactcctgaattagaaaaaaaaaaa

SEQ ID NO: 328483 - DNA, 2398 bp, Homo sapiens
agtctcagggcctcatgcaaaactatacagctaataaacagtagagttgggatctaagcccagggaattttactctagaactcgcagtattaaccacagtgctctcttggcttatatttctaaggcacatgctgtaaccacttttttttttttttttttgagatggggtctcactctgacatccaagctggggtgcagtggcgcgatctcggcacactgcaaccttcgcctcccagattcaagggattctcctgcctcaggctcctgagtagctaggattacaggcacatgccaccatgcccgtataattttttgtatttttagtagagacggggtttcgccatgttgcccaggctggtctcaaacacctgacctcaggtgatccgcccatctcggcctcccaaagtgctgggattacaggtgtaagccgccacgccctgcctataaccattctttttttagggaggtgtggtatatggtgctaccctggatctgtagtcaggatttgaagaagggagaaggtatttgcttgtgaagaaggcaccatgcattgtgctctgtagtggtgactggagagagagctgggaggggcacaggcagcaaggtccctgcttaaagacagttatctagtttggagaaacttagctggatagtcagttcttacatgcatttggcaagcacttatcatacactgtaaagaggcaatatgtctagcttgttagagggtgggctctggagtcagacttctggctttgaaccccaacttccctgccattttcaaatgacactggagaagtcacaaaacctatttctgtctcagattcctccccagtaaaagtgggatattaatagtacctcctttggcttgatatgaaaattcaatgagttgatatatgcagaacatcttagaacagcaactagcttagagtaaatcttcagtaattgtaaactgtgaatatactatgtttttggcactgaagccacgtcgtggtaagacagtgcctgacctcaagaagctcagagtctagtactggagacaggtgaacaaatacttgcaaagtgtgtggtgtgagagaggtgtgacaggtgggcgggagcctgcagcaggcacatctgacccatcctaggtgtgtgttgtgcagaaaagttagcctaggctttctaggggcactgatgtctgggccgagtcttgtagggcagggaattagtcaaggggagctgtagtgatccagctggggctgagcaggagctgaaagtgaacagctcacatctgtagggttgccagatttagcaacggaaagtacaagatgccctattaaatgtgaatttcagataaaataataactttgaagaatatgtgtcatgcaatatttttagtataagtatgtcccaaatattgtataaccacacacattattcattgtttatctgaaattcaaatttcactgggcatcctatgaaaagtctgtcaattttatctgtccgcatttaggaaggtgcagtatgtttcagagtagctggagtgatgcagggaggaaaggcagagtgggccggatggggctgagaggcacacaggaggcagtttgtaaaaaacctatgctatgttaagggatttagattttatcctgaaattagtgatgagcccttggagagctttaaccacagggatgtgaaaccacagagacagcagtgtcgggcacgaagaaatgagtgtcactttctatggctgaatagcaaattactccaaatttaaagtcttaaacagtaaacattatctcccagtttctgtggctcaggaattcagaggcaacttagctgggtggttctggctgaggtttctcatgaggttgtagataagatagtgaccagagtggcagttatctaaaggatgcactggagctggagaatttgcttctagggtgactcactctaatggttgggaaggtactgctggctgtcagcaggagagctcagttccttgctacaggaccccccataggacaacttgagcctcctcacaacatgacagctggcttagtaatccaagacagcaaagtgacattaactttggaagtcacatgccaccttgtcattcccatatatcccagtgctaacacagctcagccctgctcagtgcaggagggtcctacacaaggatgtacatacaagaaggtggggatcatggggttatcttggaggctggttttctgggatgggaggcttacatggtgatgcctgtgaccttggaggtggaggagaatgatgggctccccctgccctatttagaccacggtataaaaagaaatctatccccttcttcggggctgagagaattttgagctctagccatctctcggtcactggcaataaaagaactcctgaattagaaaaaaaaaaa

SEQ ID NO: 328484 - DNA, 1466 bp, Homo sapiens
agtctcagggcctcatgcaaaactatacagctaataaacagtagagttgggatctaagcccagggaattttactctagaactcgcagtattaaccacagtgctctcttggcttatatttctaaggcacatgctgtaaccacttttttttttttttttttgagatggggtctcactctgacatccaagctggggtgcagtggcgcgatctcggcacactgcaaccttcgcctcccagattcaagggattctcctgcctcaggctcctgagtagctaggattacaggcacatgccaccatgcccgtataattttttgtatttttagtagagacggggtttcgccatgttgcccaggctggtctcaaacacctgacctcaggtgatccgcccatctcggcctcccaaagtgctgggattacaggtgtaagccgccacgccctgcctataaccattctttttttagggaggtgtggtatatggtgctaccctggatctgtagtcaggatttgaagaagggagaaggtatttgcttgtgaagaaggcaccatgcattgtgctctgtagtggtgactggagagagagctgggaggggcacaggcagcaaggtccctgcttaaagacagttatctagtttggagaaacttagctggatagtcagttcttacatgcatttggcaagcacttatcatacactgtaaagaggcaatatgtctagcttgttagagggtgggctctggagtcagacttctggctttgaaccccaacttccctgccattttcaaatgacactggagaagtcacaaaacctatttctgtctcagattcctccccagtaaaagtgggatattaatagtacctcctttggcttgatatgaaaattcaatgagttgatatatgcagaacatcttagaacagcaactagcttagagtaaatcttcagtaattgtaaactgtgaatatactatgtttttggcactgaagccacgtcgtggtaagacagtgcctgacctcaagaagctcagagtctagtactggagacaggtgaacaaatacttgcaaagtgtgtggtgtgagagaggtgtgacaggtgggcgggagcctgcagcaggcacatctgacccatcctaggtgtgtgttgtgcagaaaagttagcctaggctttctaggggcactgatgtctgggccgagtcttgtagggcagggaattagtcaaggggagctgtagtgatccagctggggctgagcaggagctgaaagtgaacagctcacatctgtaaccattaattttttttaactttttgcgtgttctgcttctgtaaaaattgcttcagctaggctccccctgccctatttagaccacggtataaaaagaaatctatccccttcttcggggctgagagaattttgagctctagccatctctcggtcactggcaataaaagaactcctgaattagaaaaaaaaaaa

SEQ ID NO: 328485 - DNA, 1380 bp, Homo sapiens
agtctcagggcctcatgcaaaactatacagctaataaacagtagagttgggatctaagcccagggaattttactctagaactcgcagtattaaccacagtgctctcttggcttatatttctaaggcacatgctgtaaccacttttttttttttttttttgagatggggtctcactctgacatccaagctggggtgcagtggcgcgatctcggcacactgcaaccttcgcctcccagattcaagggattctcctgcctcaggctcctgagtagctaggattacaggcacatgccaccatgcccgtataattttttgtatttttagtagagacggggtttcgccatgttgcccaggctggtctcaaacacctgacctcaggtgatccgcccatctcggcctcccaaagtgctgggattacaggtgtaagccgccacgccctgcctataaccattctttttttagggaggtgtggtatatggtgctaccctggatctgtagtcaggatttgaagaagggagaaggtatttgcttgtgaagaaggcaccatgcattgtgctctgtagtggtgactggagagagagctgggaggggcacaggcagcaaggtccctgcttaaagacagttatctagtttggagaaacttagctggatagtcagttcttacatgcatttggcaagcacttatcatacactgtaaagaggcaatatgtctagcttgttagagggtgggctctggagtcagacttctggctttgaaccccaacttccctgccattttcaaatgacactggagaagtcacaaaacctatttctgtctcagattcctccccagtaaaagtgggatattaatagtacctcctttggcttgatatgaaaattcaatgagttgatatatgcagaacatcttagaacagcaactagcttagagtaaatcttcagtaattgtaaactgtgaatatactatgtttttggcactgaagccacgtcgtggtaagacagtgcctgacctcaagaagctcagagtctagtactggagacaggtgaacaaatacttgcaaagtgtgtggtgtgagagaggtgtgacaggtgggcgggagcctgcagcaggcacatctgacccatcctaggtgtgtgttgtgcagaaatgaaagaaaaaataattatacaaactcccttcgtcccattgcctcccttctgttataacgtgtttaaatttatcgtgtatttatattttaatgttcctctcgaatgcaatacaaattattttatagaggaaggcatgtaaactaaggtaccaggatacgggaaaggaaaaaaggtgaggaaaaggcaatataagtcaagtaagctgatcaagtggggtactgctagcctagctgc

SEQ ID NO: 328486 - DNA, 1193 bp, Homo sapiens
ttttctcatagtccctattccagtcaatttctggcacagcccagcttgaaactgctcttgagcctccgattttgagcttactcctggtttgcccgactattttctcataatccctgttccggtcagtttccggcacagcccagcttgaaacagctcttgagcctccccttttgagcttactcctcctttgcctgactcttttctcatagtccctgttctggtcaatttccggcgcagcccggcttgaaatggctcttgagcctacgcttttgagcttacttctcatttgcccgactattttctcatagttcctgttccggtcaatttccagcgcagcccagctgagttgggcgaggtctagaaaggcctgactcgcctcttggcctcaatgacttgtacccgctgcttttgcagacctcccggtcttcatggcaactgtgaaatgtggggtggggggcgtagggttgaagccattcgcgccggtagtccctgcatgtcccctcatgtgctccccagtgcgcacagcaccccagcctccgcgcttctggaagcagcccagaagggtcttggcaatcacgtccagctgtaagccatttcgcggtctcagattgcggacctccgcacgccccctggcaggttccctccgcctagggtggaaagctgcaaaggcagccccaactcttccaccacctcctccatctccggctcctgggcttgggaggccccgcgccactgcttcgactggctggggcgggaaggttgaaatggctttgagactccacttttgagcttactcctcctttgcccgactattttctcatagtccctattccaatcaatttctggtgcagcccagcttgaaatggctcttgagcctccgcttttcagctgactcctcgattgctcaactattttctcatagtccctgttccggtcaatttccggcgcagcccagcccagtccggcgaggtctggaaaggcctgactcgcctcgcagcctgaatgacttgtacccaccgccgatgcggacctcccagtcttcttggcgactgtggggtggggggcatgcggttgaagccgttcacacgggcagtccctgcatgtcccctcacgtgctccccagtgcacgcggcacccccgcctccacgcttccctgagcgtgcagcctttggtgagggcagccccacgcacag

SEQ ID NO: 328487 - DNA, 753 bp, Homo sapiens
ttaaaagcaagagactttgtaagatgaggagagtgggtttaagagttagagggttgctgcaattccttattgagaggacagagctggaaggaattattgatcagaggttttacttaaagtccacgatgactccacagattctgtttgaagccactaccaaagaaagaattctcaaatgtttactgtagctaaagaaaaactgttgagaaagaaatgctgtaactctaatgtgctataaattcttctgagcttgctgtggctaatttattaatttaaaaagtattttttgtctttcttaggcctccttgaatctagtcactctagagatagaatacacaatcttgtcctgatgtttttacttgcaactcacaatcttgtttggtggtttagtttgcaggtttcagagattagaccgtatatatctaaatgctgggatcatgcctaatccacaactaaatatcaaagcacttctctttggcctcttttcaaggtaattttcattttatggatgaactgattggaaggaatgtgttcatttttctgcctagttttgatggcgtgttaagttggggggatgaaaggtaaggggttgttgaaaaggttgagccctaacaggagcccgctcagcccctcatttgatacgcctgcctctcaacccttccgatgcatctctctggtccctcttcccttcataggcaccatcctctccgccggccttccgccactttccctcgccgccggtctccctttccc

SEQ ID NO: 328488 - DNA, 449 bp, Homo sapiens
gatggtctagacctggcttattctggaattgctacctttatcaggtgttattctgtgttctggctcttagaatgatgcccccctgggtgacagcgagaccctgtctcaaaacatatatatatttaatatatatgtaaagccagagctgacaatgacactctggaacattgcataccttctgtacattctggggtacatggatttctactgagttggataatatgcatttgtaataaactatgaactatgactctcttttccttccttttggaattatctccaagactgtgtatgtgtatgcatatgagaaaaagattgggccgggcacggtggctcaagcctgtaatcccagcactttgggagcctgaggtgggcgcatcatgaggtcaggagtttgagaccagcctggccaacatggcaaaaacccatctctactaaaaatacaaaac

SEQ ID NO: 328489 - DNA, 243 bp, Homo sapiens
acccacctcggcctcccaaagtgctgggattacaggcgtcagccattgcgcctggccagtaccacattttcaatctcaatcatgatcataattatttcatggagactaatttataagtacatcctgatgtgtgatcagttggtgctgggattacaggcatgagccattgcacccagccagtaccacattttcagtctcaatcacgatcataattatttcatggagactaagttatgagtacat

SEQ ID NO: 328490 - DNA, 1746 bp, Homo sapiens
gaggcggcccgaaatcgtaggacttccgaaagcagcggcggcgtttgcttcactgcttggaagtgtgagtgcgcgaagatgcgaaaggtggttttgatcaccggggctagcagtggcattggcctggccctctgcaagcggctgctggcggaagatgatgagcttcatctgtgtttggcgtgcaggaatatgagcaaggcagaagctgtctgtgctgctctgctggcctctcaccccactgctgaggtcaccattgtccaggtggatgtcagcaacctgcagtcattcttccgggcctccaaggaacttaagcaaaggatgatcaagaaatggttgtatgtgatccgtgttgaagaccatttgcaggtttcagagattagaccgtatatatctaaatgctgggatcatgcctaatccacaactaaatatcaaagcacttctctttggcctcttttcaagaaaagtgattcatatgttctccacagctgaaggcctgctgacccagggtgataagatcactgctgatggacttcaggaggtgtttgagaccgatgtctttggccattttatcctgattcgggaactggagcctctcctctgtcacagtgacaatccatctcagctcatctggacatcatctcgcaatgcaaggaaatctaatttcagcctcgaggacttccagcacagcaaaggcaaggaaccctacagctcttccaaatatgccactgaccttttgagtgtggctttgaacaggaactttcaaccagcaggtgctgtattcgtctgtgtatgtcattaaatacctgcctcattacatggaggtgggtctaagtattaccattttcagatgaggcactaaatcttggagaacttcgcttttttgcaaatgcattcactttgacaccatataatggaacagaagctctggtatggcttttccaccaaaagcctgaatctgtcaatcctctgatcaaatatctgagtgccaccactggctttggaagaaattacattatgacccagaagatggacctagatgaagacactgctgaaaaattttatcaaaagttactggaactggaaaagcacattagggtcactattcaaaaaacagatgatcaggccaggctcagtggctcatgcctataattccagcactttgggaggccaaggcagaaggatcacttgagaccaggagttcgagaccagcctgagaaacatagtgagcccttgtctctacaaaaagaaataaaaataatagctgggtgtggtggcatgcgcatgtagtcccaactactcaggaggatgaggtggggggatctcttgaggctgggaggcggaggttgcagtgagctgagattgtgccactgcactccagcctgggtgacagcgagaccctgtctcaaaacatatatatatttaatatatatgtaaagccagagctgacaatgacactctggaacattgcataccttctgtacattctggggtacatggatttctactgagttggataatatgcatttgtaataaactatgaactatgactctcttttccttccttttggaattatctccaagactgtgtatgtgtatgcatatgagaaaaagattgggccgggcacggtggctcaagcctgtaatcccagcactttgggagcctgaggtgggcgcatcatgaggtcaggagtttgagaccagcctggccaacatggcaaaaacccatctctactaaaaatacaaaac

SEQ ID NO: 328491 - DNA, 1703 bp, Homo sapiens
gaggcggcccgaaatcgtaggacttccgaaagcagcggcggcgtttgcttcactgcttggaagtgtgagtgcgcgaagatgcgaaaggtggttttgatcaccggggctagcagtggcattggcctggccctctgcaagcggctgctggcggaagatgatgagcttcatctgtgtttggcgtgcaggaatatgagcaaggcagaagctgtctgtgctgctctgctggcctctcaccccactgctgaggtcaccattgtccaggtggatgtcagcaacctgcagtcattcttccgggcctccaaggaacttaagcaaagttgcaggtttcagagattagaccgtatatatctaaatgctgggatcatgcctaatccacaactaaatatcaaagcacttctctttggcctcttttcaagaaaagtgattcatatgttctccacagctgaaggcctgctgacccagggtgataagatcactgctgatggacttcaggaggtgtttgagaccgatgtctttggccattttatcctgattcgggaactggagcctctcctctgtcacagtgacaatccatctcagctcatctggacatcatctcgcaatgcaaggaaatctaatttcagcctcgaggacttccagcacagcaaaggcaaggaaccctacagctcttccaaatatgccactgaccttttgagtgtggctttgaacaggaactttcaaccagcaggtgctgtattcgtctgtgtatgtcattaaatacctgcctcattacatggaggtgggtctaagtattaccattttcagatgaggcactaaatcttggagaacttcgcttttttgcaaatgcattcactttgacaccatataatggaacagaagctctggtatggcttttccaccaaaagcctgaatctgtcaatcctctgatcaaatatctgagtgccaccactggctttggaagaaattacattatgacccagaagatggacctagatgaagacactgctgaaaaattttatcaaaagttactggaactggaaaagcacattagggtcactattcaaaaaacagatgatcaggccaggctcagtggctcatgcctataattccagcactttgggaggccaaggcagaaggatcacttgagaccaggagttcgagaccagcctgagaaacatagtgagcccttgtctctacaaaaagaaataaaaataatagctgggtgtggtggcatgcgcatgtagtcccaactactcaggaggatgaggtggggggatctcttgaggctgggaggcggaggttgcagtgagctgagattgtgccactgcactccagcctgggtgacagcgagaccctgtctcaaaacatatatatatttaatatatatgtaaagccagagctgacaatgacactctggaacattgcataccttctgtacattctggggtacatggatttctactgagttggataatatgcatttgtaataaactatgaactatgactctcttttccttccttttggaattatctccaagactgtgtatgtgtatgcatatgagaaaaagattgggccgggcacggtggctcaagcctgtaatcccagcactttgggagcctgaggtgggcgcatcatgaggtcaggagtttgagaccagcctggccaacatggcaaaaacccatctctactaaaaatacaaaac

SEQ ID NO: 328492 - DNA, 1677 bp, Homo sapiens
ttaaaagcaagagactttgtaagatgaggagagtgggtttaagagttagagggttgctgcaattccttattgagaggacagagctggaaggaattattgatcagaggttttacttaaagtccacgatgactccacagattctgtttgaagccactaccaaagaaagaattctcaaatgtttactgtagctaaagaaaaactgttgagaaagaaatgctgtaactctaatgtgctataaattcttctgagcttgctgtggctaatttattaatttaaaaagtattttttgtctttcttaggcctccttgaatctagtcactctagagatagaatacacaatcttgtcctgatgtttttacttgcaactcacaatcttgtttggtggtttagtttgcaggtttcagagattagaccgtatatatctaaatgctgggatcatgcctaatccacaactaaatatcaaagcacttctctttggcctcttttcaagaaaagtgattcatatgttctccacagctgaaggcctgctgacccagggtgataagatcactgctgatggacttcaggaggtgtttgagaccgatgtctttggccattttatcctgattcgggaactggagcctctcctctgtcacagtgacaatccatctcagctcatctggacatcatctcgcaatgcaaggaaatctaatttcagcctcgaggacttccagcacagcaaaggcaaggaaccctacagctcttccaaatatgccactgaccttttgagtgtggctttgaacaggaactttcaaccagcagcttcgcttttttgcaaatgcattcactttgacaccatataatggaacagaagctctggtatggcttttccaccaaaagcctgaatctgtcaatcctctgatcaaatatctgagtgccaccactggctttggaagaaattacattatgacccagaagatggacctagatgaagacactgctgaaaaattttatcaaaagttactggaactggaaaagcacattagggtcactattcaaaaaacagatgatcaggccaggctcagtggctcatgcctataattccagcactttgggaggccaaggcagaaggatcacttgagaccaggagttcgagaccagcctgagaaacatagtgagcccttgtctctacaaaaagaaataaaaataatagctgggtgtggtggcatgcgcatgtagtcccaactactcaggaggatgaggtggggggatctcttgaggctgggaggcggaggttgcagtgagctgagattgtgccactgcactccagcctgggtgacagcgagaccctgtctcaaaacatatatatatttaatatatatgtaaagccagagctgacaatgacactctggaacattgcataccttctgtacattctggggtacatggatttctactgagttggataatatgcatttgtaataaactatgaactatgactctcttttccttccttttggaattatctccaagactgtgtatgtgtatgcatatgagaaaaagattgggccgggcacggtggctcaagcctgtaatcccagcactttgggagcctgaggtgggcgcatcatgaggtcaggagtttgagaccagcctggccaacatggcaaaaacccatctctactaaaaatacaaaac

SEQ ID NO: 328493 - DNA, 659 bp, Homo sapiens
gaggcggcccgaaatcgtaggacttccgaaagcagcggcggcgtttgcttcactgcttggaagtgtgagtgcgcgaagatgcgaaaggtggttttgatcaccggggctagcagtggcattggcctggccctctgcaagcggctgctggcggaagatgatgagcttcatctgtgtttggcgtgcaggaatatgagcaaggcagaagctgtctgtgctgctctgctggcctctcaccccactgctgaggtcaccattgtccaggtggatgtcagcaacctgcagtcattcttccgggcctccaaggaacttaagcaaaggtatatctcttgctgatggattttttttttctcgtgtgattgtgcagcataacacttaataaaataagagaggaaagaaaaacctaaaaagaaacaggtgcggtgtaagcagttatgttgaagaagtctgtatagggtgacccactgtgtctcagtaccacgttttctttctttctttttttttttttaaagagatagagtcttgctctgttgcccaggctggagtgcaatggcggtgatctcggctcacttcaacctctgcctcctgggtccaagtgattctcctgctcaacctcctgagtagctgggattacagacttgcgccaccatgcctggttaatt

SEQ ID NO: 328494 - DNA, 1603 bp, Homo sapiens
gaggcggcccgaaatcgtaggacttccgaaagcagcggcggcgtttgcttcactgcttggaagtgtgagtgcgcgaagatgcgaaaggtggttttgatcaccggggctagcagtggcattggcctggccctctgcaagcggctgctggcggaagatgatgagcttcatctgtgtttggcgtgcaggaatatgagcaaggcagaagctgtctgtgctgctctgctggcctctcaccccactgctgaggtcaccattgtccaggtggatgtcagcaacctgcagtcattcttccgggcctccaaggaacttaagcaaagttgcaggtttcagagattagaccgtatatatctaaatgctgggatcatgcctaatccacaactaaatatcaaagcacttctctttggcctcttttcaagaaaagtgattcatatgttctccacagctgaaggcctgctgacccagggtgataagatcactgctgatggacttcaggaggtgtttgagaccgatgtctttggccattttatcctgattcgggaactggagcctctcctctgtcacagtgacaatccatctcagctcatctggacatcatctcgcaatgcaaggaaatctaatttcagcctcgaggacttccagcacagcaaaggcaaggaaccctacagctcttccaaatatgccactgaccttttgagtgtggctttgaacaggaactttcaaccagcagcttcgcttttttgcaaatgcattcactttgacaccatataatggaacagaagctctggtatggcttttccaccaaaagcctgaatctgtcaatcctctgatcaaatatctgagtgccaccactggctttggaagaaattacattatgacccagaagatggacctagatgaagacactgctgaaaaattttatcaaaagttactggaactggaaaagcacattagggtcactattcaaaaaacagatgatcaggccaggctcagtggctcatgcctataattccagcactttgggaggccaaggcagaaggatcacttgagaccaggagttcgagaccagcctgagaaacatagtgagcccttgtctctacaaaaagaaataaaaataatagctgggtgtggtggcatgcgcatgtagtcccaactactcaggaggatgaggtggggggatctcttgaggctgggaggcggaggttgcagtgagctgagattgtgccactgcactccagcctgggtgacagcgagaccctgtctcaaaacatatatatatttaatatatatgtaaagccagagctgacaatgacactctggaacattgcataccttctgtacattctggggtacatggatttctactgagttggataatatgcatttgtaataaactatgaactatgactctcttttccttccttttggaattatctccaagactgtgtatgtgtatgcatatgagaaaaagattgggccgggcacggtggctcaagcctgtaatcccagcactttgggagcctgaggtgggcgcatcatgaggtcaggagtttgagaccagcctggccaacatggcaaaaacccatctctactaaaaatacaaaac

SEQ ID NO: 328495 - DNA, 1079 bp, Homo sapiens
gaggcggcccgaaatcgtaggacttccgaaagcagcggcggcgtttgcttcactgcttggaagtgtgagtgcgcgaagatgcgaaaggtggttttgatcaccggggctagcagtggcattggcctggccctctgcaagcggctgctggcggaagatgatgagcttcatctgtgtttggcgtgcaggaatatgagcaaggcagaagctgtctgtgctgctctgctggcctctcaccccactgctgaggtcaccattgtccaggtggatgtcagcaacctgcagtcattcttccgggcctccaaggaacttaagcaaagttgcaggtttcagagattagaccgtatatatctaaatgctgggatcatgcctaatccacaactaaatatcaaagcacttctctttggcctcttttcaagaaaagtgattcatatgttctccacagctgaaggcctgctgacccagggtgataagatcactgctgatggacttcaggaggtgtttgagaccgatgtctttggccattttatcctggtaaagaagctgtgggcttaataagctaatatttggtgtgatagttcgtgtaaagctctgggcacagggcattattatagttgagcagccagttaactgatttaatctcatgtttgagttttcttgattgcatttgccttgtttattgtgagcatggaatacttctggaagctttcctagtagatttttctttaataaatgtactaatagtttttgatttacagaattactgcaaagatagtacagagactttctgtatgccctacacccagtttcccctattattaacatttcgcattggtatgatgcatttgtcgaaatagatgaatcaattctgctacattattattaactaaagtacacactttattcaggttctgtttttgcctaatgtcttttttcagttctaggatcccattcaagatactacattacatttagcagtcatgtctccttaggctcttcttggttgtgacagcttctcagactttccttgtttttgatgaccttgacagttttgaggagtactgcttaggtgttttgtagac

SEQ ID NO: 328496 - DNA, 912 bp, Homo sapiens
aggataaataaaatgaaaaccacatgaaattacaccattgtaaaactgctgataaccaaagatggaaaaagtataaagaagccaaaagaaatattactttgaaaggagcgacaattaagctaatagctggcattttttctttctttcttaaatgcttgatagaatacaacagtgaaactatccagacctggagttttctctgttgaaaggttttaaccacgaattccatttcttttacggatataggacattgtgaagcttttcttgagcaagctttggtagtttgattgtgttaattatctattgctacacaataaattattgcaaaacttaacagcttggaaaaataaacagttatctcacagtttctgtgggtcaggaattcaggagcatttagctgagtagttctggctcaggatcaagaatgggtcaagatgttaactaaggctgaagccatatgaaagcttgactggggctagagtatctgcttccaaggtggcccactcgtggtttttggcaagaagcctcatttccttattggctattgacaggaggcctcagtttctcactgatagaaaggctcaaggtattgctgattggcagaaggcttcattttccaactacatgggcctctccatagtgctgatcaagtatccttaaaaaaagaaaaggtagctgttttcttgccaagtgagtgagccaagagaaagggcaaagaagaaaccacaggccaggcgtggtggctgatgcccttaatcccagcactttggaaggccgaggtgggtggatcacctgagctcaggagttcaagaccagcctggccaacatggaaaccccatctctactaaaaagtagctgggtgtggtggcaggcgctagtaatcccagctacttgggaggctgaggcaggaga

SEQ ID NO: 328497 - DNA, 329 bp, Homo sapiens
caccatgcccagctaattttttgtatttttagtagacacggggtttcatcatgttagccaggatggtctcgatctcctgacctcatgatccacctgcctgggcctcccaaagtgctgggattacaggcatgagccaccacgccgaggtcacattcttagtgtcactggcaaagaagtctgagaaaaaaggttaaacccagaagaaaaaggaaaacaggccctctcagcaccagggggcagctccggcccttccccaagcaggctgttctctgcgttccagcaggctgagggcactcaggcaaagagaatgccacagaaggagcctcagg

SEQ ID NO: 328498 - DNA, 1392 bp, Homo sapiens
gaagctgagactgcacttcctgcgaggcccctgcagcagcagcggcgtggtcagagcgagcttcggagaagcagtggtgggttccatgtgatggtggagtaggaggcaggtctccgcggttcatctgtgttgctctaaatgacactgcttcattattttgatggctggagaatatttcctagtgtatgtatatgagagtttcttgatctctttatctgtggatgaacagctactttgaaacatatggtacatttgtgttaaggctagtcaccctgctgtggaatagaaggccagaattgatcagtctcatctgagagtaactttgtacccatcactgattccttctgagactgcctccacttccccagcagcctctggtttcttcatgtggctgcagatggcaggatttcccaaaggtttctggctgaaacatattccgtggtgtatctgtacagcagtttcctcatccctgcagctgtgtttgaacaggtcatttaccatgctgtcctccaggttcaacagtatggctccaaatgatgaaatttcattctgattttctggctgaagactattctctttgtgtatgtccaccacagttactttatcccttcatctgtggatgggcaggctaaacaatattcacagcattttcaccaggagtaaatttcatctcacaaaaccactttccaggctctttctggactgtagagttctttccaggctaccttgtggcagtttaagagtctggcatcattttccgctgggacctaaggatcgaggaggtgcttgtgactagactgccaatggacccatcacaaagtttaacccaaccttgatccccgagtcttcacaaatgctcactgaagaaaattcctggaacaattcagggtcctttcataacctctactctgaggtgttaataaaaaaccttagtaacttaaaaaaaatgagctgtacacaaatactgaacaataatgctacatatgttaagtatgtaagaaaaatatatactttgacataaataagaaacggtgagttgataattggatagaatggtggatagagtgatagatatgtagtaaagcaaatataacaaaatgataattgtacaatctaagtggttggactataaatatgcacttcccacaacatttttatatgtttaaacagttttataataccatattagggaaactgtttgtctcaaggaaatagagattgtgatatgttctagtacaatgaagtgtaatcatgtaaaataaaagcttttacttctggcaattaaagttaatcatgttagaacactgtctaggaatggttggaaaatcatattttattttctaatcaatatatttatgtcatctgtcaatcagaattacactgactttaaaa

SEQ ID NO: 328499 - DNA, 1484 bp, Homo sapiens
gaagctgagactgcacttcctgcgaggcccctgcagcagcagcggcgtggtcagagcgagcttcggagaagcagtggtgggttccatgtgatggtggagtaggaggcaggtctccgcggttcatctgtgttgctctaaatgacactgcttcattattttgatggctggagaatatttcctagtgtatgtatatgagagtttcttgatctctttatctgtggatgaacagctctcaacatctcttcttaattggagaaagtgttaagccccaaagtagctggagcagtacatcttcaatttttgacaagaaagcaggaacttgattactttgagtgctattcattagtttctgctttcattgagaatgcaacaaaagccaactaggctgctgctaactccttgctggacttcttctgccactgtcacaggaactgtaatctcactggacaattaactagggagtctttcatcttgagtgactgctgcacaaatgatcttcaaagcattttagccaccagaggaattctcttgaaatacccaaaatccatcagtatcttgaatcatgctggattttgaagaattcttaacaagccatgtaaagggggctctctggccttgaaatagtgatgttttttatacagaaaggagaatgcagaatggtcagactaccatgcactgttaaatttgatttcaagaaattacaggaaaactttccaaagttccatctcacagaaattatttttacaaagaattccaagataagtttagttttatgggaagacttttatgtggtttttactcactcttcatctcagacatcaacagatgattacatcacttatttagctagtaaatttattaatataaaaactcagagacattccaatatccacattgcttacaccattaggcatagattcagtgtcagctatgacaattgaaaataagctgttttgtgatttaaaggtttaaatttctctaaccaaactgcttgatccagatgcaggactgcaaatgttaatatttgttctggaagaacaatcaaataagacttaagaggaaaaggaatggccacaatccacctgaaatttttttttaaaaagtgtgcagcctactaaatcagaatgaaaatagaagtacaagattataaacaaaatgcaatcaaacttttcttaagcttacctaaagttatttcatctgaaaatttcaagcaactttgttcaacattaaattgacaatctaaactaacaagtcttttgaatttatgcatggtagtaaacattctctctattaactttattacctaaggctaaacctaaaatttttaagcaaaattagaaaaatagtcttcactcatcaaaaaataaagtttgttacatttagtattttcccaataaaattggtcgttcttggttttttatttggagagtctgtgcaaaatgtcactaaaaataaattagcactagaaattatttctaaatacc

SEQ ID NO: 328500 - DNA, 805 bp, Homo sapiens
gaagctgagactgcacttcctgcgaggcccctgcagcagcagcggcgtggtcagagcgagcttcggagaagcagtggtgggttccatgtgatggtggagtaggaggcaggtctccgcgctactttgaaacatatggtacatttgtgttaaggctagtcaccctgctgtggaatagaaggccagaattgatcagtctcatctgagagtaactttgtacccatcactgattccttctgagactgcctccacttccccagcagcctctggtttcttcatgtggctgcagatggcaggatttcccaaaggtttctggctgaaacatattccgtggtgtatctgtacagcagtttcctcatccctgcagctgtgtttgaacaggtcatttaccatgctgtcctccaggttcaacagtatggctccaaatgatgaaatttcattctgattttctggctgaagactattctctttgtgtatgtccaccacagttactttatcccttcatctgtggatgggcagtctcgctgtattgcccaggctggagtgcagtggcatgatctcagctcactgcaagctctgcttcctgggttcacgccattctcctgcctcagcctcctgagtagctgggattacaggcacccgccaccacgcccaggaaagaaaaaagaagaaaacaaacctccatacgagaatgggtctaaaggaacttcccaaacctccatgattttgcaggaaacaagataaagctggttggtggagaatttgaactggagatgaactctattatccaggatgctgagagtataat

SEQ ID NO: 328501 - DNA, 4767 bp, Homo sapiens
  misc_feature (1621)..(1621): n is a, c, g, or t
gaagctgagactgcacttcctgcgaggcccctgcagcagcagcggcgtggtcagagcgagcttcggagaagcagtggtgggttccatgtgatggtggagtaggaggcaggtctccgcggttcatctgtgttgctctaaatgacactgcttcattattttgatggctggagaatatttcctagtgtatgtatatgagagtttcttgatctctttatctgtggatgaacagctactttgaaacatatggtacatttgtgttaaggctagtcaccctgctgtggaatagaaggccagaattgatcagtctcatctgagagtaactttgtacccatcactgattccttctgagactgcctccacttccccagcagcctctggtttcttcatgtggctgcagatggcaggatttcccaaaggtttctggctgaaacatattccgtggtgtatctgtacagcagtttcctcatccctgcagctgtgtttgaacaggtcatttaccatgctgtcctccaggttcaacagtatggctccaaatgatgaaatttcattctgattttctggctgaagactattctctttgtgtatgtccaccacagttactttatcccttcatctgtggatgggcagtctcgctgtattgcccaggctggagtgcagtggcatgatctcagctcactgcaagctctgcttcctgggttcacgccattctcctgcctcagcctcctgagtagctgggattacaggcacccgccaccacgcccaggaaagaaaaaagaagaaaacaaacctccatacgagaatgggtctaaaggaacttcccaaacctccatgattttgcaggaaacaagataaaggtggtttccacaagaaaaatggcacaatgtttctcagaagacaattacataagaatcagcatacttcaaattcacagcaaataatcagacaattgatgaaaatacttacccaaacactaattgtagactatgccttctgaatatgtttgtcataaacttggagtaaggaatcctcacaggcactggacaattcaaaaaacgtaaagttgtttgttagaatactggtgcttttggatagaaaccctcatccatatcctggtaaggcttgaagttgcacaggagttttcatttgtcaaaacccagaaaaccataagctttagatttgtgaattttatattgtattatatgtgacctttctttttaaaaaatgagctgtaagcagtctcccagacagtagctcagcctccagaactctctttctgcatagttgaagacccctcttcacacaagatggtagcaacaaatcataggtgcaattgcaccaaattcacagaagatcaattgaaaatcctcatcaataccttcactcaaaaaccttacccaggttatgctaccaaacaaaaacttgctttagcaatcaatgcagaagagtccagaatccagatttggtttcagaatcaaagagctaggcatggattccagaaaacaccagaacctgactttagatttaagccacagccatggacaagattaacctggtgtggagtttcaaaatagagaagccagatggtgttgtaccacctatagcacctttcaattacacacantcatccatgcatttatgaaaaacccataccctgggattgattccggagaacaacttgctgaagaaattggtgcttcagagtcaagagtccaaatttggttccaaaatcaaagatctagatttcatctccagagaaaaagagaacctgttatgtccttagaatgagaagaccagagaagaccaggggcaaggtttctgagggacttcaaggtacagaagatacacaaagtggcaccagcctcactagcactctcatttctcaagagccagaacatggtgaatacagtcaagttcagtgtatttgataatatcaatttgggccccaaatctctctcacagtcttcctgggagtctattcttcttccaaaagtgcaagctaagccttctgaagatggtaaagaacttggccgggtgtggtggctcatgcctgtaatcccagcactttaggaggctgaggctggaagattgcttgagcctaggagtttgaaaccagtctgagcaacatagtaagaccctgtctctattctaaaaaacaaaataagtaaaaaggactgtaggaggccaagacaggtacaggaggcaccacactaccctgttgacacagcctggatccagagttcagcagaccttgagacaatgaaaacaaacttagtaataatcatttttcaatcattgcagtaattattgatttggacaaaaatcaattgatgtcaaaaccttaaagtgacgtttctctgcctatggagtggtcattcttttattcctttagtttcataataaattttcttttacttaaaaaaacttatagtttgatgaagagtgagatatatacctcatctcaaagaatcttcacacacacacttattaattacaaaaggaaaatcagtaattttgcagtggagacatatggccaactccaccttacccaagtggctgaaagtcactgcaccagtaatggcacaaaccaatgtgagatgattcctgatatgatacactaaaaagggcactgtctcttctgcatgttgcagacaaaaagtgggtaagctgacactgaaactaataattaggcaatgtcaagcaaatacaaattcaggttgacagtctgcaaagtaacatccatgtactcttcaacaatggatcgaccctagctactcaggaggctgaggtggaataattgtttgaggccaggagttccagatcagcctgggcaacatcatgcgaccccatctctaaaaacatctttttaaaaatgagccaggtgtggtagcatgcacccgtagtctcagctactcaggagcctgaggcaggaggatggtttcaacataggagatcgaggctgctgtgagctatgatcgtgctactgcactccagcctgggtgacacagcaagttcctgtttccaaacaacaacaagaaaacaaaacaaaacaaaacaaaaaatagatagaatagtgacaataaaaatggagaaaaagtaggctgactcaggaaatgcttagaaagtacagccatacctcaaagatattgtagatttgattcgagaccaccacaataaagcagatattgctacaaagtgagtcacacaaattgttttgtttccttgtgaatatgaagttatattggctgggtgtgatggctcatgcctataatcccagtactttaggagacggaggcgggagggtcacttgagcccaggaattgtgagatcaacctgggcatatagggagatcctgtctctatttaaaaaaagaagctatgtttacactacactatagtctatttaaagtgtgaaatggcgttatgtccttaattttaaaactcttgatgctggctgggttcggtggctcatacctgtaatcccatcactttgggaggccaagacaggttgattacttgaattcaggagttcaagaccagcctggacaacatggcaaaacacgtctttaaaaaaagaaaagaaaaaagaaaaacagaaagaaaaagaagaaaaactacttgctgcccttacttgaagctcaattatttaaaacaaagaaaaaatagaaaaatcttttattgctcaaaatgctaatgatcacctgagccttcagggagtcttagtctttttgctggtgaagggtcttgccttgatgttgttggctgctgcctgataagggcgatggttgctgaatattgaagtggttgtcacaatttcttaaaagaaaacaacgaaatttgccacattaactgactcttccttccacgaaagatttcagtgtaccatgcgatactgtttgataagcattttacccatagtagaacttctttcaaaattggagtcagtcctctcacaccctgccactgttttactatgtttatcaatattctaaatcctttgttgtaggctaaacaatattcacagcattttcaccaggagtaaatttcatctcacaaaaccactttccaggctctttctggactgtagagttctttccaggctaccttgtggcagtttaagagtctggcatcattttccgctgggacctaaggatcgaggaggtgcttgtgactagactgccaatggacccatcacaaagtttaacccaaccttgatccccgagtcttcacaaatgctcactgaagaaaattcctggaacaattcagggtcctttcataacctctactctgaggtgttaataaaaaaccttagtaacttaaaaaaaatgagctgtacacaaatactgaacaataatgctacatatgttaagtatgtaagaaaaatatatactttgacataaataagaaacggtgagttgataattggatagaatggtggatagagtgatagatatgtagtaaagcaaatataacaaaatgataattgtacaatctaagtggttggactataaatatgcacttcccacaacatttttatatgtttaaacagttttataataccatattagggaaactgtttgtctcaaggaaatagagattgtgatatgttctagtacaatgaagtgtaatcatgtaaaataaaagcttttacttctggcaattaaagttaatcatgttagaacactgtctaggaatggttggaaaatcatattttattttctaatcaatatatttatgtcatctgtcaatcagaattacactgactttaaaa

SEQ ID NO: 328502 - DNA, 4508 bp, Homo sapiens
  misc_feature (1362)..(1362): n is a, c, g, or t
gaagctgagactgcacttcctgcgaggcccctgcagcagcagcggcgtggtcagagcgagcttcggagaagcagtggtgggttccatgtgatggtggagtaggaggcaggtctccgcggtttcttcatgtggctgcagatggcaggatttcccaaaggtttctggctgaaacatattccgtggtgtatctgtacagcagtttcctcatccctgcagctgtgtttgaacaggtcatttaccatgctgtcctccaggttcaacagtatggctccaaatgatgaaatttcattctgattttctggctgaagactattctctttgtgtatgtccaccacagttactttatcccttcatctgtggatgggcagtctcgctgtattgcccaggctggagtgcagtggcatgatctcagctcactgcaagctctgcttcctgggttcacgccattctcctgcctcagcctcctgagtagctgggattacaggcacccgccaccacgcccaggaaagaaaaaagaagaaaacaaacctccatacgagaatgggtctaaaggaacttcccaaacctccatgattttgcaggaaacaagataaaggtggtttccacaagaaaaatggcacaatgtttctcagaagacaattacataagaatcagcatacttcaaattcacagcaaataatcagacaattgatgaaaatacttacccaaacactaattgtagactatgccttctgaatatgtttgtcataaacttggagtaaggaatcctcacaggcactggacaattcaaaaaacgtaaagttgtttgttagaatactggtgcttttggatagaaaccctcatccatatcctggtaaggcttgaagttgcacaggagttttcatttgtcaaaacccagaaaaccataagctttagatttgtgaattttatattgtattatatgtgacctttctttttaaaaaatgagctgtaagcagtctcccagacagtagctcagcctccagaactctctttctgcatagttgaagacccctcttcacacaagatggtagcaacaaatcataggtgcaattgcaccaaattcacagaagatcaattgaaaatcctcatcaataccttcactcaaaaaccttacccaggttatgctaccaaacaaaaacttgctttagcaatcaatgcagaagagtccagaatccagatttggtttcagaatcaaagagctaggcatggattccagaaaacaccagaacctgactttagatttaagccacagccatggacaagattaacctggtgtggagtttcaaaatagagaagccagatggtgttgtaccacctatagcacctttcaattacacacantcatccatgcatttatgaaaaacccataccctgggattgattccggagaacaacttgctgaagaaattggtgcttcagagtcaagagtccaaatttggttccaaaatcaaagatctagatttcatctccagagaaaaagagaacctgttatgtccttagaatgagaagaccagagaagaccaggggcaaggtttctgagggacttcaaggtacagaagatacacaaagtggcaccagcctcactagcactctcatttctcaagagccagaacatggtgaatacagtcaagttcagtgtatttgataatatcaatttgggccccaaatctctctcacagtcttcctgggagtctattcttcttccaaaagtgcaagctaagccttctgaagatggtaaagaacttggccgggtgtggtggctcatgcctgtaatcccagcactttaggaggctgaggctggaagattgcttgagcctaggagtttgaaaccagtctgagcaacatagtaagaccctgtctctattctaaaaaacaaaataagtaaaaaggactgtaggaggccaagacaggtacaggaggcaccacactaccctgttgacacagcctggatccagagttcagcagaccttgagacaatgaaaacaaacttagtaataatcatttttcaatcattgcagtaattattgatttggacaaaaatcaattgatgtcaaaaccttaaagtgacgtttctctgcctatggagtggtcattcttttattcctttagtttcataataaattttcttttacttaaaaaaacttatagtttgatgaagagtgagatatatacctcatctcaaagaatcttcacacacacacttattaattacaaaaggaaaatcagtaattttgcagtggagacatatggccaactccaccttacccaagtggctgaaagtcactgcaccagtaatggcacaaaccaatgtgagatgattcctgatatgatacactaaaaagggcactgtctcttctgcatgttgcagacaaaaagtgggtaagctgacactgaaactaataattaggcaatgtcaagcaaatacaaattcaggttgacagtctgcaaagtaacatccatgtactcttcaacaatggatcgaccctagctactcaggaggctgaggtggaataattgtttgaggccaggagttccagatcagcctgggcaacatcatgcgaccccatctctaaaaacatctttttaaaaatgagccaggtgtggtagcatgcacccgtagtctcagctactcaggagcctgaggcaggaggatggtttcaacataggagatcgaggctgctgtgagctatgatcgtgctactgcactccagcctgggtgacacagcaagttcctgtttccaaacaacaacaagaaaacaaaacaaaacaaaacaaaaaatagatagaatagtgacaataaaaatggagaaaaagtaggctgactcaggaaatgcttagaaagtacagccatacctcaaagatattgtagatttgattcgagaccaccacaataaagcagatattgctacaaagtgagtcacacaaattgttttgtttccttgtgaatatgaagttatattggctgggtgtgatggctcatgcctataatcccagtactttaggagacggaggcgggagggtcacttgagcccaggaattgtgagatcaacctgggcatatagggagatcctgtctctatttaaaaaaagaagctatgtttacactacactatagtctatttaaagtgtgaaatggcgttatgtccttaattttaaaactcttgatgctggctgggttcggtggctcatacctgtaatcccatcactttgggaggccaagacaggttgattacttgaattcaggagttcaagaccagcctggacaacatggcaaaacacgtctttaaaaaaagaaaagaaaaaagaaaaacagaaagaaaaagaagaaaaactacttgctgcccttacttgaagctcaattatttaaaacaaagaaaaaatagaaaaatcttttattgctcaaaatgctaatgatcacctgagccttcagggagtcttagtctttttgctggtgaagggtcttgccttgatgttgttggctgctgcctgataagggcgatggttgctgaatattgaagtggttgtcacaatttcttaaaagaaaacaacgaaatttgccacattaactgactcttccttccacgaaagatttcagtgtaccatgcgatactgtttgataagcattttacccatagtagaacttctttcaaaattggagtcagtcctctcacaccctgccactgttttactatgtttatcaatattctaaatcctttgttgtaggctaaacaatattcacagcattttcaccaggagtaaatttcatctcacaaaaccactttccaggctctttctggactgtagagttctttccaggctaccttgtggcagtttaagagtctggcatcattttccgctgggacctaaggatcgaggaggtgcttgtgactagactgccaatggacccatcacaaagtttaacccaaccttgatccccgagtcttcacaaatgctcactgaagaaaattcctggaacaattcagggtcctttcataacctctactctgaggtgttaataaaaaaccttagtaacttaaaaaaaatgagctgtacacaaatactgaacaataatgctacatatgttaagtatgtaagaaaaatatatactttgacataaataagaaacggtgagttgataattggatagaatggtggatagagtgatagatatgtagtaaagcaaatataacaaaatgataattgtacaatctaagtggttggactataaatatgcacttcccacaacatttttatatgtttaaacagttttataataccatattagggaaactgtttgtctcaaggaaatagagattgtgatatgttctagtacaatgaagtgtaatcatgtaaaataaaagcttttacttctggcaattaaagttaatcatgttagaacactgtctaggaatggttggaaaatcatattttattttctaatcaatatatttatgtcatctgtcaatcagaattacactgactttaaaa

SEQ ID NO: 328503 - DNA, 4656 bp, Homo sapiens
  misc_feature (1510)..(1510): n is a, c, g, or t
gaagctgagactgcacttcctgcgaggcccctgcagcagcagcggcgtggtcagagcgagcttcggagaagcagtggtgggttccatgtgatggtggagtaggaggcaggtctccgcgctactttgaaacatatggtacatttgtgttaaggctagtcaccctgctgtggaatagaaggccagaattgatcagtctcatctgagagtaactttgtacccatcactgattccttctgagactgcctccacttccccagcagcctctggtttcttcatgtggctgcagatggcaggatttcccaaaggtttctggctgaaacatattccgtggtgtatctgtacagcagtttcctcatccctgcagctgtgtttgaacaggtcatttaccatgctgtcctccaggttcaacagtatggctccaaatgatgaaatttcattctgattttctggctgaagactattctctttgtgtatgtccaccacagttactttatcccttcatctgtggatgggcagtctcgctgtattgcccaggctggagtgcagtggcatgatctcagctcactgcaagctctgcttcctgggttcacgccattctcctgcctcagcctcctgagtagctgggattacaggcacccgccaccacgcccaggaaagaaaaaagaagaaaacaaacctccatacgagaatgggtctaaaggaacttcccaaacctccatgattttgcaggaaacaagataaaggtggtttccacaagaaaaatggcacaatgtttctcagaagacaattacataagaatcagcatacttcaaattcacagcaaataatcagacaattgatgaaaatacttacccaaacactaattgtagactatgccttctgaatatgtttgtcataaacttggagtaaggaatcctcacaggcactggacaattcaaaaaacgtaaagttgtttgttagaatactggtgcttttggatagaaaccctcatccatatcctggtaaggcttgaagttgcacaggagttttcatttgtcaaaacccagaaaaccataagctttagatttgtgaattttatattgtattatatgtgacctttctttttaaaaaatgagctgtaagcagtctcccagacagtagctcagcctccagaactctctttctgcatagttgaagacccctcttcacacaagatggtagcaacaaatcataggtgcaattgcaccaaattcacagaagatcaattgaaaatcctcatcaataccttcactcaaaaaccttacccaggttatgctaccaaacaaaaacttgctttagcaatcaatgcagaagagtccagaatccagatttggtttcagaatcaaagagctaggcatggattccagaaaacaccagaacctgactttagatttaagccacagccatggacaagattaacctggtgtggagtttcaaaatagagaagccagatggtgttgtaccacctatagcacctttcaattacacacantcatccatgcatttatgaaaaacccataccctgggattgattccggagaacaacttgctgaagaaattggtgcttcagagtcaagagtccaaatttggttccaaaatcaaagatctagatttcatctccagagaaaaagagaacctgttatgtccttagaatgagaagaccagagaagaccaggggcaaggtttctgagggacttcaaggtacagaagatacacaaagtggcaccagcctcactagcactctcatttctcaagagccagaacatggtgaatacagtcaagttcagtgtatttgataatatcaatttgggccccaaatctctctcacagtcttcctgggagtctattcttcttccaaaagtgcaagctaagccttctgaagatggtaaagaacttggccgggtgtggtggctcatgcctgtaatcccagcactttaggaggctgaggctggaagattgcttgagcctaggagtttgaaaccagtctgagcaacatagtaagaccctgtctctattctaaaaaacaaaataagtaaaaaggactgtaggaggccaagacaggtacaggaggcaccacactaccctgttgacacagcctggatccagagttcagcagaccttgagacaatgaaaacaaacttagtaataatcatttttcaatcattgcagtaattattgatttggacaaaaatcaattgatgtcaaaaccttaaagtgacgtttctctgcctatggagtggtcattcttttattcctttagtttcataataaattttcttttacttaaaaaaacttatagtttgatgaagagtgagatatatacctcatctcaaagaatcttcacacacacacttattaattacaaaaggaaaatcagtaattttgcagtggagacatatggccaactccaccttacccaagtggctgaaagtcactgcaccagtaatggcacaaaccaatgtgagatgattcctgatatgatacactaaaaagggcactgtctcttctgcatgttgcagacaaaaagtgggtaagctgacactgaaactaataattaggcaatgtcaagcaaatacaaattcaggttgacagtctgcaaagtaacatccatgtactcttcaacaatggatcgaccctagctactcaggaggctgaggtggaataattgtttgaggccaggagttccagatcagcctgggcaacatcatgcgaccccatctctaaaaacatctttttaaaaatgagccaggtgtggtagcatgcacccgtagtctcagctactcaggagcctgaggcaggaggatggtttcaacataggagatcgaggctgctgtgagctatgatcgtgctactgcactccagcctgggtgacacagcaagttcctgtttccaaacaacaacaagaaaacaaaacaaaacaaaacaaaaaatagatagaatagtgacaataaaaatggagaaaaagtaggctgactcaggaaatgcttagaaagtacagccatacctcaaagatattgtagatttgattcgagaccaccacaataaagcagatattgctacaaagtgagtcacacaaattgttttgtttccttgtgaatatgaagttatattggctgggtgtgatggctcatgcctataatcccagtactttaggagacggaggcgggagggtcacttgagcccaggaattgtgagatcaacctgggcatatagggagatcctgtctctatttaaaaaaagaagctatgtttacactacactatagtctatttaaagtgtgaaatggcgttatgtccttaattttaaaactcttgatgctggctgggttcggtggctcatacctgtaatcccatcactttgggaggccaagacaggttgattacttgaattcaggagttcaagaccagcctggacaacatggcaaaacacgtctttaaaaaaagaaaagaaaaaagaaaaacagaaagaaaaagaagaaaaactacttgctgcccttacttgaagctcaattatttaaaacaaagaaaaaatagaaaaatcttttattgctcaaaatgctaatgatcacctgagccttcagggagtcttagtctttttgctggtgaagggtcttgccttgatgttgttggctgctgcctgataagggcgatggttgctgaatattgaagtggttgtcacaatttcttaaaagaaaacaacgaaatttgccacattaactgactcttccttccacgaaagatttcagtgtaccatgcgatactgtttgataagcattttacccatagtagaacttctttcaaaattggagtcagtcctctcacaccctgccactgttttactatgtttatcaatattctaaatcctttgttgtaggctaaacaatattcacagcattttcaccaggagtaaatttcatctcacaaaaccactttccaggctctttctggactgtagagttctttccaggctaccttgtggcagtttaagagtctggcatcattttccgctgggacctaaggatcgaggaggtgcttgtgactagactgccaatggacccatcacaaagtttaacccaaccttgatccccgagtcttcacaaatgctcactgaagaaaattcctggaacaattcagggtcctttcataacctctactctgaggtgttaataaaaaaccttagtaacttaaaaaaaatgagctgtacacaaatactgaacaataatgctacatatgttaagtatgtaagaaaaatatatactttgacataaataagaaacggtgagttgataattggatagaatggtggatagagtgatagatatgtagtaaagcaaatataacaaaatgataattgtacaatctaagtggttggactataaatatgcacttcccacaacatttttatatgtttaaacagttttataataccatattagggaaactgtttgtctcaaggaaatagagattgtgatatgttctagtacaatgaagtgtaatcatgtaaaataaaagcttttacttctggcaattaaagttaatcatgttagaacactgtctaggaatggttggaaaatcatattttattttctaatcaatatatttatgtcatctgtcaatcagaattacactgactttaaaa

SEQ ID NO: 328504 - DNA, 4122 bp, Homo sapiens
  misc_feature (976)..(976): n is a, c, g, or t
gaagctgagactgcacttcctgcgaggcccctgcagcagcagcggcgtggtcagagcgagcttcggagaagcagtggtgggttccatgtgatggtggagtaggaggcaggtctccgcggaaagaaaaaagaagaaaacaaacctccatacgagaatgggtctaaaggaacttcccaaacctccatgattttgcaggaaacaagataaaggtggtttccacaagaaaaatggcacaatgtttctcagaagacaattacataagaatcagcatacttcaaattcacagcaaataatcagacaattgatgaaaatacttacccaaacactaattgtagactatgccttctgaatatgtttgtcataaacttggagtaaggaatcctcacaggcactggacaattcaaaaaacgtaaagttgtttgttagaatactggtgcttttggatagaaaccctcatccatatcctggtaaggcttgaagttgcacaggagttttcatttgtcaaaacccagaaaaccataagctttagatttgtgaattttatattgtattatatgtgacctttctttttaaaaaatgagctgtaagcagtctcccagacagtagctcagcctccagaactctctttctgcatagttgaagacccctcttcacacaagatggtagcaacaaatcataggtgcaattgcaccaaattcacagaagatcaattgaaaatcctcatcaataccttcactcaaaaaccttacccaggttatgctaccaaacaaaaacttgctttagcaatcaatgcagaagagtccagaatccagatttggtttcagaatcaaagagctaggcatggattccagaaaacaccagaacctgactttagatttaagccacagccatggacaagattaacctggtgtggagtttcaaaatagagaagccagatggtgttgtaccacctatagcacctttcaattacacacantcatccatgcatttatgaaaaacccataccctgggattgattccggagaacaacttgctgaagaaattggtgcttcagagtcaagagtccaaatttggttccaaaatcaaagatctagatttcatctccagagaaaaagagaacctgttatgtccttagaatgagaagaccagagaagaccaggggcaaggtttctgagggacttcaaggtacagaagatacacaaagtggcaccagcctcactagcactctcatttctcaagagccagaacatggtgaatacagtcaagttcagtgtatttgataatatcaatttgggccccaaatctctctcacagtcttcctgggagtctattcttcttccaaaagtgcaagctaagccttctgaagatggtaaagaacttggccgggtgtggtggctcatgcctgtaatcccagcactttaggaggctgaggctggaagattgcttgagcctaggagtttgaaaccagtctgagcaacatagtaagaccctgtctctattctaaaaaacaaaataagtaaaaaggactgtaggaggccaagacaggtacaggaggcaccacactaccctgttgacacagcctggatccagagttcagcagaccttgagacaatgaaaacaaacttagtaataatcatttttcaatcattgcagtaattattgatttggacaaaaatcaattgatgtcaaaaccttaaagtgacgtttctctgcctatggagtggtcattcttttattcctttagtttcataataaattttcttttacttaaaaaaacttatagtttgatgaagagtgagatatatacctcatctcaaagaatcttcacacacacacttattaattacaaaaggaaaatcagtaattttgcagtggagacatatggccaactccaccttacccaagtggctgaaagtcactgcaccagtaatggcacaaaccaatgtgagatgattcctgatatgatacactaaaaagggcactgtctcttctgcatgttgcagacaaaaagtgggtaagctgacactgaaactaataattaggcaatgtcaagcaaatacaaattcaggttgacagtctgcaaagtaacatccatgtactcttcaacaatggatcgaccctagctactcaggaggctgaggtggaataattgtttgaggccaggagttccagatcagcctgggcaacatcatgcgaccccatctctaaaaacatctttttaaaaatgagccaggtgtggtagcatgcacccgtagtctcagctactcaggagcctgaggcaggaggatggtttcaacataggagatcgaggctgctgtgagctatgatcgtgctactgcactccagcctgggtgacacagcaagttcctgtttccaaacaacaacaagaaaacaaaacaaaacaaaacaaaaaatagatagaatagtgacaataaaaatggagaaaaagtaggctgactcaggaaatgcttagaaagtacagccatacctcaaagatattgtagatttgattcgagaccaccacaataaagcagatattgctacaaagtgagtcacacaaattgttttgtttccttgtgaatatgaagttatattggctgggtgtgatggctcatgcctataatcccagtactttaggagacggaggcgggagggtcacttgagcccaggaattgtgagatcaacctgggcatatagggagatcctgtctctatttaaaaaaagaagctatgtttacactacactatagtctatttaaagtgtgaaatggcgttatgtccttaattttaaaactcttgatgctggctgggttcggtggctcatacctgtaatcccatcactttgggaggccaagacaggttgattacttgaattcaggagttcaagaccagcctggacaacatggcaaaacacgtctttaaaaaaagaaaagaaaaaagaaaaacagaaagaaaaagaagaaaaactacttgctgcccttacttgaagctcaattatttaaaacaaagaaaaaatagaaaaatcttttattgctcaaaatgctaatgatcacctgagccttcagggagtcttagtctttttgctggtgaagggtcttgccttgatgttgttggctgctgcctgataagggcgatggttgctgaatattgaagtggttgtcacaatttcttaaaagaaaacaacgaaatttgccacattaactgactcttccttccacgaaagatttcagtgtaccatgcgatactgtttgataagcattttacccatagtagaacttctttcaaaattggagtcagtcctctcacaccctgccactgttttactatgtttatcaatattctaaatcctttgttgtaggctaaacaatattcacagcattttcaccaggagtaaatttcatctcacaaaaccactttccaggctctttctggactgtagagttctttccaggctaccttgtggcagtttaagagtctggcatcattttccgctgggacctaaggatcgaggaggtgcttgtgactagactgccaatggacccatcacaaagtttaacccaaccttgatccccgagtcttcacaaatgctcactgaagaaaattcctggaacaattcagggtcctttcataacctctactctgaggtgttaataaaaaaccttagtaacttaaaaaaaatgagctgtacacaaatactgaacaataatgctacatatgttaagtatgtaagaaaaatatatactttgacataaataagaaacggtgagttgataattggatagaatggtggatagagtgatagatatgtagtaaagcaaatataacaaaatgataattgtacaatctaagtggttggactataaatatgcacttcccacaacatttttatatgtttaaacagttttataataccatattagggaaactgtttgtctcaaggaaatagagattgtgatatgttctagtacaatgaagtgtaatcatgtaaaataaaagcttttacttctggcaattaaagttaatcatgttagaacactgtctaggaatggttggaaaatcatattttattttctaatcaatatatttatgtcatctgtcaatcagaattacactgactttaaaa

SEQ ID NO: 328505 - DNA, 4320 bp, Homo sapiens
  misc_feature (1174)..(1174): n is a, c, g, or t
gagtgagatgtggcaatgtttttctttctctacctggttcaggtcatttaccatgctgtcctccaggttcaacagtatggctccaaatgatgaaatttcattctgattttctggctgaagactattctctttgtgtatgtccaccacagttactttatcccttcatctgtggatgggcagtctcgctgtattgcccaggctggagtgcagtggcatgatctcagctcactgcaagctctgcttcctgggttcacgccattctcctgcctcagcctcctgagtagctgggattacaggcacccgccaccacgcccaggaaagaaaaaagaagaaaacaaacctccatacgagaatgggtctaaaggaacttcccaaacctccatgattttgcaggaaacaagataaaggtggtttccacaagaaaaatggcacaatgtttctcagaagacaattacataagaatcagcatacttcaaattcacagcaaataatcagacaattgatgaaaatacttacccaaacactaattgtagactatgccttctgaatatgtttgtcataaacttggagtaaggaatcctcacaggcactggacaattcaaaaaacgtaaagttgtttgttagaatactggtgcttttggatagaaaccctcatccatatcctggtaaggcttgaagttgcacaggagttttcatttgtcaaaacccagaaaaccataagctttagatttgtgaattttatattgtattatatgtgacctttctttttaaaaaatgagctgtaagcagtctcccagacagtagctcagcctccagaactctctttctgcatagttgaagacccctcttcacacaagatggtagcaacaaatcataggtgcaattgcaccaaattcacagaagatcaattgaaaatcctcatcaataccttcactcaaaaaccttacccaggttatgctaccaaacaaaaacttgctttagcaatcaatgcagaagagtccagaatccagatttggtttcagaatcaaagagctaggcatggattccagaaaacaccagaacctgactttagatttaagccacagccatggacaagattaacctggtgtggagtttcaaaatagagaagccagatggtgttgtaccacctatagcacctttcaattacacacantcatccatgcatttatgaaaaacccataccctgggattgattccggagaacaacttgctgaagaaattggtgcttcagagtcaagagtccaaatttggttccaaaatcaaagatctagatttcatctccagagaaaaagagaacctgttatgtccttagaatgagaagaccagagaagaccaggggcaaggtttctgagggacttcaaggtacagaagatacacaaagtggcaccagcctcactagcactctcatttctcaagagccagaacatggtgaatacagtcaagttcagtgtatttgataatatcaatttgggccccaaatctctctcacagtcttcctgggagtctattcttcttccaaaagtgcaagctaagccttctgaagatggtaaagaacttggccgggtgtggtggctcatgcctgtaatcccagcactttaggaggctgaggctggaagattgcttgagcctaggagtttgaaaccagtctgagcaacatagtaagaccctgtctctattctaaaaaacaaaataagtaaaaaggactgtaggaggccaagacaggtacaggaggcaccacactaccctgttgacacagcctggatccagagttcagcagaccttgagacaatgaaaacaaacttagtaataatcatttttcaatcattgcagtaattattgatttggacaaaaatcaattgatgtcaaaaccttaaagtgacgtttctctgcctatggagtggtcattcttttattcctttagtttcataataaattttcttttacttaaaaaaacttatagtttgatgaagagtgagatatatacctcatctcaaagaatcttcacacacacacttattaattacaaaaggaaaatcagtaattttgcagtggagacatatggccaactccaccttacccaagtggctgaaagtcactgcaccagtaatggcacaaaccaatgtgagatgattcctgatatgatacactaaaaagggcactgtctcttctgcatgttgcagacaaaaagtgggtaagctgacactgaaactaataattaggcaatgtcaagcaaatacaaattcaggttgacagtctgcaaagtaacatccatgtactcttcaacaatggatcgaccctagctactcaggaggctgaggtggaataattgtttgaggccaggagttccagatcagcctgggcaacatcatgcgaccccatctctaaaaacatctttttaaaaatgagccaggtgtggtagcatgcacccgtagtctcagctactcaggagcctgaggcaggaggatggtttcaacataggagatcgaggctgctgtgagctatgatcgtgctactgcactccagcctgggtgacacagcaagttcctgtttccaaacaacaacaagaaaacaaaacaaaacaaaacaaaaaatagatagaatagtgacaataaaaatggagaaaaagtaggctgactcaggaaatgcttagaaagtacagccatacctcaaagatattgtagatttgattcgagaccaccacaataaagcagatattgctacaaagtgagtcacacaaattgttttgtttccttgtgaatatgaagttatattggctgggtgtgatggctcatgcctataatcccagtactttaggagacggaggcgggagggtcacttgagcccaggaattgtgagatcaacctgggcatatagggagatcctgtctctatttaaaaaaagaagctatgtttacactacactatagtctatttaaagtgtgaaatggcgttatgtccttaattttaaaactcttgatgctggctgggttcggtggctcatacctgtaatcccatcactttgggaggccaagacaggttgattacttgaattcaggagttcaagaccagcctggacaacatggcaaaacacgtctttaaaaaaagaaaagaaaaaagaaaaacagaaagaaaaagaagaaaaactacttgctgcccttacttgaagctcaattatttaaaacaaagaaaaaatagaaaaatcttttattgctcaaaatgctaatgatcacctgagccttcagggagtcttagtctttttgctggtgaagggtcttgccttgatgttgttggctgctgcctgataagggcgatggttgctgaatattgaagtggttgtcacaatttcttaaaagaaaacaacgaaatttgccacattaactgactcttccttccacgaaagatttcagtgtaccatgcgatactgtttgataagcattttacccatagtagaacttctttcaaaattggagtcagtcctctcacaccctgccactgttttactatgtttatcaatattctaaatcctttgttgtaggctaaacaatattcacagcattttcaccaggagtaaatttcatctcacaaaaccactttccaggctctttctggactgtagagttctttccaggctaccttgtggcagtttaagagtctggcatcattttccgctgggacctaaggatcgaggaggtgcttgtgactagactgccaatggacccatcacaaagtttaacccaaccttgatccccgagtcttcacaaatgctcactgaagaaaattcctggaacaattcagggtcctttcataacctctactctgaggtgttaataaaaaaccttagtaacttaaaaaaaatgagctgtacacaaatactgaacaataatgctacatatgttaagtatgtaagaaaaatatatactttgacataaataagaaacggtgagttgataattggatagaatggtggatagagtgatagatatgtagtaaagcaaatataacaaaatgataattgtacaatctaagtggttggactataaatatgcacttcccacaacatttttatatgtttaaacagttttataataccatattagggaaactgtttgtctcaaggaaatagagattgtgatatgttctagtacaatgaagtgtaatcatgtaaaataaaagcttttacttctggcaattaaagttaatcatgttagaacactgtctaggaatggttggaaaatcatattttattttctaatcaatatatttatgtcatctgtcaatcagaattacactgactttaaaa

SEQ ID NO: 328506 - DNA, 1455 bp, Homo sapiens
gaagctgagactgcacttcctgcgaggcccctgcagcagcagcggcgtggtcagagcgagcttcggagaagcagtggtgggttccatgtgatggtggagtaggaggcaggtctccgcggttcatctgtgttgctctaaatgacactgcttcattattttgatggctggagaatatttcctagtgtatgtatatgagagtttcttgatctctttatctgtggatgaacagctactttgaaacatatggtacatttgtgttaaggctagtcaccctgctgtggaatagaaggccagaattgatcagtctcatctgagagtaactttgtacccatcactgattccttctgagactgcctccacttccccagcagcctctggtttcttcatgtggctgcagatggcaggatttcccaaaggtttctggctgaaacatattccgtggtgtatctgtacagcagtttcctcatccctgcagctgtgtttgaacaggtcatttaccatgctgtcctccaggttcaacagtatggctccaaatgatgaaatttcattctgattttctggctgaagactattctctttgtgtatgtccaccacagttactttatcccttcatctgtggatgggcagtccagcctgggtgacaagagcaactccgtctccccaaaaaaaaaaagaagaattgtcaacaagagggagtggcaattcagaagcatatttaagccaagtcctcaagactagaaagcatgaagcaggggaggcgttttgaaagcgtaagaacaatagaccatgggcatggatggccgagtctggggatcagcatcgtaatttgttgagaaggaggccgtgctgtgctgccagttattaattggtttaatcggttgatacacagccctactggcctaaccagtagcccagggccctggaggatttgcaggtcgtgtcagaatttgattgcagttccttccacttggcataaggagacactatcagcctgattgggagggtgatggtgggatggagcctgccgaggtggcggcgctgagctgaccacaccaccggccatagagtgggagcctttcctgcccgcttaactgcagctaatatcaaaagcactggtatgggctgtctatctgtgctggaacctgagtttatctttgtctgcaattacgattcttctgggtttattttgccagctcattatccagccccctggaatcaggcctcccaaatttagcaggtgctggggaggaccctagggagtggtttatgggggctagctggtgaaactgccctttcctttctgttctatgagtgtgatggtgtttgagaaaatgtggggctatggttcaggcgcacttcacatgtgcaaagatggagaaagcactcacctacacgtttaggctcagaatattgattgaaacattttgaatgatcaaaaataaaatgttattttta

SEQ ID NO: 328507 - DNA, 732 bp, Homo sapiens
tagtgccgcagtcttggatgatgggttcctagaagctctcaacatctcttcttaattggagaaagtgttaagccccaaagtagctggagcagtacatcttcaatttttgacaagaaagcaggaacttgattactttgagtgctattcattagtttctgctttcattgagaatgcaacaaaagccaactaggctgctgctaactccttgctggacttcttctgccactgtcacaggaactgtaatctcactggacaattaactagggagtctttcatcttgagtgactgctgcacaaatgatcttcaaagcattttagccaccagaggaattctcttgaaatacccaaaatccatcagtatcttgaatcatgctggattttgaagaattcttaacaagccatgtaaagggggctctctggccttgaaatagtgatgttttttatacagaaaggagaatgcagaatggtcagactaccatgcactgttaaatttgatttcaagaaattacaggaaaactttccaaagttccatctcacagaaattatttttacaaagaattccaagataagtttagttttatgggaagacttttatgtggtttttactcactcttcatctcagacatcaacagatgattacatcacttatttagctagtaaatttattaatataaaaactcagagacattccaatatccacattgcttacaccattaggcatagattcagtgtc

SEQ ID NO: 328508 - DNA, 385 bp, Homo sapiens
cctatttctgatccctgcccatgcctctgcttccttccaatctctggaaaccactgttgtgctctctagatctattgcaataaagccttttattttgggttctacatgagtgagatgtggcaatgtttttctttctctacctggttcaggtcatttaccatgctgtcctccaggttcaacagtatggctccaaatgatgaaatttcattctgattttctggctgaagactattctctttgtgtatgtccaccacagttactttatcccttcatctgtggatgggcaggtaagtttattccttatcttggcgattgtgaatagtgctgcagtccacataggatggctgatacctcttgcataaactgatttctttggcactgaaag

SEQ ID NO: 328509 - DNA, 564 bp, Homo sapiens
ttagtccatggctaaagctggtgatccaagacaagtggcaggtgaaggagcaagtcaactgaaaaggcagaagcaggtgggactcaaggtacaggagcagatttctacctcaaacagaaataggatggaaatgtccatgtgaccaagagacagagtttttattgggaaaaaaggacacaaggctgactagagaaatgaatgggattttggcagtattgaggctccatccaattgggtctggagagtatgaacttgctgtggcaccagtgtaagtggttgtgtttttctctggaaacacaagggttaaaaatggggagatcacacaggtggattaatcctggcttgttatctcctgtttgggtttatgaggagaacaatgaagggttagcaagaaagcagttgagaaataagactattaggtctttaacgtaataagaggagctagaaagaaagaaaactatgcttagagtgtgggatatttgagtttaagattttgaggttggttggagcagttctggctgatgacaaagttcagagtgtggccatggaggtgaattgccaagg

SEQ ID NO: 328510 - DNA, 441 bp, Homo sapiens
  misc_feature (31)..(31): n is a, c, g, or t
  misc_feature (34)..(34): n is a, c, g, or t
  misc_feature (50)..(50): n is a, c, g, or t
  misc_feature (60)..(60): n is a, c, g, or t
actcagcggcgcctttaatagttaagggtcntanaatgtttctttggaantttaaaaatntcagaggaaatgacaaagtgtctgtcaaaaacaggcataatctaaaacaaggtggatgtagcaaatctctgtcactgcttgagaactttgagcttgtggcagttttgcagacttacatgacttcagcactttacgacatattttttactatgaatgttcaatacaatttaatatttataactgatttctgagggatctgctccatgtctattctgttatctgcatgaaaacaaaatgtatgccaatttcagtatgtcaataatcaaggttttaaatgtttggaagaaaatacaaacaagattgctgatctgttctgtattagtgacattctggtacttctagatttgcaataaatttatggattttttatttaaagagaac

SEQ ID NO: 328511 - DNA, 3754 bp, Homo sapiens
ttgggggtttattctcttcccttctaacttgacagggtcttgctctgtcattcaggcaagagtgcagtagtgtgatcacttcttactgccgcctcaagcttccagcctcaactcaagcaatcctcccacctcagccacccaagtggctgggactacagattaagaatgacccaaaataaattaaagctttgttccaaagccaatgtgtatactgaagtgcctgatggaggatggggctgggcggtagctgtttcatttttcttcgttgaagtcttcacctacggcatcatcaagacatttggtgtcttctttaatgacttaatggacagttttaatgaatccaatagcaggatctcatggataatctcaatctgtgtgtttgtcttaacattttcagctcccctcgccacagtcctgagcaatcgtttcggacaccgtctggtagtgatgttgggggggctacttgtcagcaccgggatggtggccgcctccttctcacaagaggtttctcatatgtacgtcgccatcggcatcatctctggtctgggatactgctttagttttctcccaactgtaaccatcctatcacaatattttggcaaaagacgttccatagtcactgcagttgcttccacaggagaatgtttcgctgtgtttgctttcgcaccagcaatcatggctctgaaggagcgcattggctggagatacagcctcctcttcgtgggcctactacagttaaacattgtcatcttcggagcactgctcagacccatctttatcagaggaccagcgtcaccgaaaatagtcatccaggaaaatcggaaagaagcgcagtatatgcttgaaaatgagaaaacacgaacctcaatagactccattgactcaggagtagaactaactacctcacctaaaaatgtgcctactcacactaacctggaactggagccgaaggccgacatgcagcaggtcctggtgaagaccagccccaggccaagcgaaaagaaagccccgctattagacttctccattttgaaagagaaaagttttatttgttatgcattatttggtctctttgcaacactgggattctttgcaccttccttgtacatcattcctctgggcattagtctgggcattgaccaggaccgcgctgcttttttattatctacgatggccattgcagaagttttcggaaggatcggagctggttttgtcctcaacagggagcccattcgtaagatttacattgagctcatctgcgtcatcttattgactgtgtctctgtttgcctttacttttgctactgaattctggggtctaatgtcatgcagcatattttttgggtttatggttggaacaataggaggactcacattccactgcttgctgaagatgatgtcgtgggcattgcagaagatgtcttctgcagctggggtctacatcttcattcagagcatagcaggactggctggaccgccccttgcaggtttgttggtggaccaaagtaagatctacagcagggccttctactcctgcgcagctggcatggccctggctgctgtgtgcctcgccctggtgagaccgtgtaagatgggactgtgccagcgtcatcactcaggtgaaacaaaggtagtgagccatcgtgggaagactttacaggacatacctgaagactttctggaaatggatcttgcaaaaaatgagcacagagttcacgtgcaaatggagccggtatgacacactttcttacaacaacagccactgtgttggctggagagggatggggtgggcccaacggggacacaaggaggcagaggagctaacccctctactccactttcaaaactacattttaaagggaatgtgtatgtgaagagcactaccaacatcgcttttgttttgttttgttttgttttaagctttttttttttgcttgtttttaaagccaaaacaaaaaacaaccaagcactcttccatatataaatctggctgtattcagtagcaatacaagagatatgtagaaagactctttggttcacattccgatattaaaatagtgacatgaactggcaaagtggttttaaaagctttcacgtgggataaatgattttctttttttcttttctttcttcctatggtcttgtctgaataaactactctcctgaataaaacaacatccaacccaggtcattgaaatgaaattggccagtcaaaaaaaaaaagacttcaatcatttttaaaattcctaattttcagaaatatgaataaatagtttttgttaaaccctttgtaaaataccaaggttcccgttaacaaattacggcctctgcttgctggaaatgaaatatagtttaagaccaaacattttactaataaacaaattttaagtatatatatatatatataacttgaacttcataaatgtgaagattaccacttctttttatggccagtccttatcagaagtgtttcagtacagaatatacaaaatggcatttaaaaatgtgtttcctgttgcttttagttatacagaaatatgtgactgtagtgtctttaatttaaaccgctatttattattaagttattctaggatgattaaagtaatcaaaagaaataaaatctgagacataagcagcatttttacctcctttctgcaatcctttaaatgcctcacagaatacgtcttatcttgtaaaaatactttcataaaaggccaagttgtcatgattcttccatttgattaggggcaacgtgtgctattaaaggggaaaaaataatggattgcaaatcgccttagctttcaaaactaatttgttttatcatttaagaatacttgaggaacttctttgatcagaattatatttcagagaattgttaaagcatttctgatttaaagaaaattatgttatagcgagttacaagttgcaatttacatcttctataacacatgacttgattggtctaagttgccagaggtatcgggtaactggtcattgttttgttttgtttgttttattcttccttttttttggagtcacactacatgtatagtattgctcacgttagcagttttctgtaaggagggcaagtgtcaggataataggtggactttttactcacctattttaccacaatctcaccctgcaggtgatggtcaatgcttgctgctccatctttattcatcgttaatgttaatttatgacaactcagggggaaaaacataacaagcctagtttggttacaggtacacacaagcttgaatatttctctgcactgaaatgaaagtggcatagttcatcaccacctgctacattttgtagagcatcttatcagccatagaaataggacaatctataaaactttggggagggtgggggaggaaatgacaaagtgtctgtcaaaaacaggcataatctaaaacaaggtggatgtagcaaatctctgtcactgcttgagaactttgagcttgtggcagttttgcagacttacatgacttcagcactttacgacatattttttactatgaatgttcaatacaatttaatatttataactgatttctgagggatctgctccatgtctattctgttatctgcatgaaaacaaaatgtatgccaatttcagtatgtcaataatcaaggttttaaatgtttggaagaaaatacaaacaagattgctgatctgttctgtattagtgacattctggtacttctagatttgcaataaatttatggattttttatttaaagagaac

SEQ ID NO: 328512 - DNA, 675 bp, Homo sapiens
caggagtctgacaaatcgtgttgaatttgaacaaatagtaaaataattcctgcactgactttgcatgaaatgtgttatggtttggttttgttttttcttgagacagggtctcactctgtcacccagtatggagtgcagtggtgcaatcttggctcactgcatcgtctgcctcccaggctcaaacaatcctcccatctctgcctgccaagtagctgggactacaggtgcacaccaccatgcctggctaatttttgtattttttgtagagacggggtttcaccatgttgcccgggctagtcttgaactcctgggctcaagcgatcctccgtcctcaacctcccaaagtgctgggattacaggcatgagccactgcgctcggccatatttatattcgacatcatctctccatgtgcaagacgtggaggaaggagtcttatggcagctaaccctgaagcctctgtgagttaaaatatcgttttgttctttcccggcagctcccctcgccacagtcctgagcaatcgtttcggacaccgtctggtagtgatgttgggggggctacttgtcagcaccgggatggtggccgcctccttctcacaagaggtttctcatatgtacgtcgccatcggcatcatctctggtaagtgttcctctttggctcagaagttgtctagaca

SEQ ID NO: 328513 - DNA, 3808 bp, Homo sapiens
ttgggggtttattctcttcccttctaacttgacagggtcttgctctgtcattcaggcaagagtgcagtagtgtgatcacttcttactgccgcctcaagcttccagcctcaactcaagcaatcctcccacctcagccacccaagtggctgggactacagattaagaatgacccaaaataaattaaagctttgttccaaagccaatgtgtatactgaagtgcctgatggaggatggggctgggcggtagctgtttcatttttcttcgttgaagtcttcacctacggcatcatcaagacatttggtgtcttctttaatgacttaatggacagttttaatgaatccaatagcaggatctcatggataatctcaatctgtgtgtttgtcttaacattttcagctcccctcgccacagtcctgagcaatcgtttcggacaccgtctggtagtgatgttgggggggctacttgtcagcaccgggatggtggccgcctccttctcacaagaggtttctcatatgtacgtcgccatcggcatcatctctggtctgggatactgctttagttttctcccaactgtaaccatcctatcacaatattttggcaaaagacgttccatagtcactgcagttgcttccacaggagaatgtttcgctgtgtttgctttcgcaccagcaatcatggctctgaaggagcgcattggctggagatacagcctcctcttcgtgggcctactacagttaaacattgtcatcttcggagcactgctcagacccatctttatcagaggaccagcgtcaccgaaaatagtcatccaggaaaatcggaaagaagcgcagtatatgcttgaaaatgagaaaacacgaacctcaatagactccattgactcaggagtagaactaactacctcacctaaaaatgtgcctactcacactaacctggaactggagccgaaggccgacatgcagcaggtcctggtgaagaccagccccaggccaagcgaaaagaaagccccgctattagacttctccattttgaaagagaaaagttttatttgttatgcattatttggtctctttgcaacactgggattctttgcaccttccttgtacatcattcctctgggcattagtctgggcattgaccaggaccgcgctgcttttttattatctacgatggccattgcagaagttttcggaaggatcggagctggttttgtcctcaacagggagcccattcgtaagatttacattgagctcatctgcgtcatcttattgactgtgtctctgtttgcctttacttttgctactgaattctggggtctaatgtcatgcagcatattttttgggtttatggttggaacaataggaggactcacattccactgcttgctgaagatgatgtcgtgggcattgcagaagatgtcttctgcagctggggtctacatcttcattcagagcatagcaggactggctggaccgccccttgcaggtttgttggtggaccaaagtaagatctacagcagggccttctactcctgcgcagctggcatggccctggctgctgtgtgcctcgccctggtgagaccgtgtaagatgggactgtgccagcgtcatcactcaggtgaaacaaaggtagtgagccatcgtgggaagactttacaggacatacctgaagactttctggaaatggatcttgcaaaaaatgagcacagagttcacgtgcaaatggagccggtatgacacactttcttacaacaacagccactgtgttggctggagagggatggggtgggcccaacggggacacaaggaggcagaggagctaacccctctactccactttcaaaactacattttaaagggaatgtgtatgtgaagagcactaccaacatcgcttttgttttgttttgttttgttttaagctttttttttttgcttgtttttaaagccaaaacaaaaaacaaccaagcactcttccatatataaatctggctgtattcagtagcaatacaagagatatgtagaaagactctttggttcacattccgatattaaaatagtgacatgaactggcaaagtggttttaaaagctttcacgtgggataaatgattttctttttttcttttctttcttcctatggtcttgtctgaataaactactctcctgaataaaacaacatccaacccaggtcattgaaatgaaattggccagtcaaaaaaaaaaagacttcaatcatttttaaaattcctaattttcagaaatatgaataaatagtttttgttaaaccctttgtaaaataccaaggttcccgttaacaaattacggcctctgcttgctggaaatgaaatatagtttaagaccaaacattttactaataaacaaattttaagtatatatatatatatataacttgaacttcataaatgtgaagattaccacttctttttatggccagtccttatcagaagtgtttcagtacagaatatacaaaatggcatttaaaaatgtgtttcctgttgcttttagttatacagaaatatgtgactgtagtgtctttaatttaaaccgctatttattattaagttattctaggatgattaaagtaatcaaaagaaataaaatctgagacataagcagcatttttacctcctttctgcaatcctttaaatgcctcacagaatacgtcttatcttgtaaaaatactttcataaaaggccaagttgtcatgattcttccatttgattaggggcaacgtgtgctattaaaggggaaaaaataatggattgcaaatcgccttagctttcaaaactaatttgttttatcatttaagaatacttgaggaacttctttgatcagaattatatttcagagaattgttaaagcatttctgatttaaagaaaaaaccatctaattattgaagcatttctgtatttcacatgggggtaacagagacaattatgttatagcgagttacaagttgcaatttacatcttctataacacatgacttgattggtctaagttgccagaggtatcgggtaactggtcattgttttgttttgtttgttttattcttccttttttttggagtcacactacatgtatagtattgctcacgttagcagttttctgtaaggagggcaagtgtcaggataataggtggactttttactcacctattttaccacaatctcaccctgcaggtgatggtcaatgcttgctgctccatctttattcatcgttaatgttaatttatgacaactcagggggaaaaacataacaagcctagtttggttacaggtacacacaagcttgaatatttctctgcactgaaatgaaagtggcatagttcatcaccacctgctacattttgtagagcatcttatcagccatagaaataggacaatctataaaactttggggagggtgggggaggaaatgacaaagtgtctgtcaaaaacaggcataatctaaaacaaggtggatgtagcaaatctctgtcactgcttgagaactttgagcttgtggcagttttgcagacttacatgacttcagcactttacgacatattttttactatgaatgttcaatacaatttaatatttataactgatttctgagggatctgctccatgtctattctgttatctgcatgaaaacaaaatgtatgccaatttcagtatgtcaataatcaaggttttaaatgtttggaagaaaatacaaacaagattgctgatctgttctgtattagtgacattctggtacttctagatttgcaataaatttatggattttttatttaaagagaac

SEQ ID NO: 328514 - DNA, 3754 bp, Homo sapiens
ttgggggtttattctcttcccttctaacttgacagggtcttgctctgtcattcaggcaagagtgcagtagtgtgatcacttcttactgccgcctcaagcttccagcctcaactcaagcaatcctcccacctcagccacccaagtggctgggactacagattaagaatgacccaaaataaattaaagctttgttccaaagccaatgtgtatactgaagtgcctgatggaggatggggctgggcggtagctgtttcatttttcttcgttgaagtcttcacctacggcatcatcaagacatttggtgtcttctttaatgacttaatggacagttttaatgaatccaatagcaggatctcatggataatctcaatctgtgtgtttgtcttaacattttcagctcccctcgccacagtcctgagcaatcgtttcggacaccgtctggtagtgatgttgggggggctacttgtcagcaccgggatggtggccgcctccttctcacaagaggtttctcatatgtacgtcgccatcggcatcatctctggtctgggatactgctttagttttctcccaactgtaaccatcctatcacaatattttggcaaaagacgttccatagtcactgcagttgcttccacaggagaatgtttcgctgtgtttgctttcgcaccagcaatcatggctctgaaggagcgcattggctggagatacagcctcctcttcgtgggcctactacagttaaacattgtcatcttcggagcactgctcagacccatctttatcagaggaccagcgtcaccgaaaatagtcatccaggaaaatcggaaagaagcgcagtatatgcttgaaaatgagaaaacacgaacctcaatagactccattgactcaggagtagaactaactacctcacctaaaaatgtgcctactcacactaacctggaactggagccgaaggccgacatgcagcaggtcctggtgaagaccagccccaggccaagcgaaaagaaagccccgctattagacttctccattttgaaagagaaaagttttatttgttatgcattatttggtctctttgcaacactgggattctttgcaccttccttgtacatcattcctctgggcattagtctgggcattgaccaggaccgcgctgcttttttattatctacgatggccattgcagaagttttcggaaggatcggagctggttttgtcctcaacagggagcccattcgtaagatttacattgagctcatctgcgtcatcttattgactgtgtctctgtttgcctttacttttgctactgaattctggggtctaatgtcatgcagcatattttttgggtttatggttggaacaataggaggactcacattccactgcttgctgaagatgatgtcgtgggcattgcagaagatgtcttctgcagctggggtctacatcttcattcagagcatagcaggactggctggaccgccccttgcaggtttgttggtggaccaaagtaagatctacagcagggccttctactcctgcgcagctggcatggccctggctgctgtgtgcctcgccctggtgagaccgtgtaagatgggactgtgccagcgtcatcactcaggtgaaacaaaggtagtgagccatcgtgggaagactttacaggacatacctgaagactttctggaaatggatcttgcaaaaaatgagcacagagttcacgtgcaaatggagccggtatgacacactttcttacaacaacagccactgtgttggctggagagggatggggtgggcccaacggggacacaaggaggcagaggagctaacccctctactccactttcaaaactacattttaaagggaatgtgtatgtgaagagcactaccaacatcgcttttgttttgttttgttttgttttaagctttttttttttgcttgtttttaaagccaaaacaaaaaacaaccaagcactcttccatatataaatctggctgtattcagtagcaatacaagagatatgtagaaagactctttggttcacattccgatattaaaatagtgacatgaactggcaaagtggttttaaaagctttcacgtgggataaatgattttctttttttcttttctttcttcctatggtcttgtctgaataaactactctcctgaataaaacaacatccaacccaggtcattgaaatgaaattggccagtcaaaaaaaaaaagacttcaatcatttttaaaattcctaattttcagaaatatgaataaatagtttttgttaaaccctttgtaaaataccaaggttcccgttaacaaattacggcctctgcttgctggaaatgaaatatagtttaagaccaaacattttactaataaacaaattttaagtatatatatatatatataacttgaacttcataaatgtgaagattaccacttctttttatggccagtccttatcagaagtgtttcagtacagaatatacaaaatggcatttaaaaatgtgtttcctgttgcttttagttatacagaaatatgtgactgtagtgtctttaatttaaaccgctatttattattaagttattctaggatgattaaagtaatcaaaagaaataaaatctgagacataagcagcatttttacctcctttctgcaatcctttaaatgcctcacagaatacgtcttatcttgtaaaaatactttcataaaaggccaagttgtcatgattcttccatttgattaggggcaacgtgtgctattaaaggggaaaaaataatggattgcaaatcgccttagctttcttatatttcagagaattgttaaagcatttctgatttaaagaaaaaaccatctaattattgaagcatttctgtatttcacatgggggtaacagagacaattatgttatagcgagttacaagttgcaatttacatcttctataacacatgacttgattggtctaagttgccagaggtatcgggtaactggtcattgttttgttttgtttgttttattcttccttttttttggagtcacactacatgtatagtattgctcacgttagcagttttctgtaaggagggcaagtgtcaggataataggtggactttttactcacctattttaccacaatctcaccctgcaggtgatggtcaatgcttgctgctccatctttattcatcgttaatgttaatttatgacaactcagggggaaaaacataacaagcctagtttggttacaggtacacacaagcttgaatatttctctgcactgaaatgaaagtggcatagttcatcaccacctgctacattttgtagagcatcttatcagccatagaaataggacaatctataaaactttggggagggtgggggaggaaatgacaaagtgtctgtcaaaaacaggcataatctaaaacaaggtggatgtagcaaatctctgtcactgcttgagaactttgagcttgtggcagttttgcagacttacatgacttcagcactttacgacatattttttactatgaatgttcaatacaatttaatatttataactgatttctgagggatctgctccatgtctattctgttatctgcatgaaaacaaaatgtatgccaatttcagtatgtcaataatcaaggttttaaatgtttggaagaaaatacaaacaagattgctgatctgttctgtattagtgacattctggtacttctagatttgcaataaatttatggattttttatttaaagagaac

SEQ ID NO: 328515 - DNA, 3474 bp, Homo sapiens
  misc_feature (44)..(44): n is a, c, g, or t
  misc_feature (51)..(51): n is a, c, g, or t
  misc_feature (57)..(57): n is a, c, g, or t
  misc_feature (59)..(59): n is a, c, g, or t
cccaagttggaatccccctattggataatctccaacctgtgtgntttgtcntaacantntcagctcccctcgccacagtcctgagcaatcgtttcggacaccgtctggtagtgatgttgggggggctacttgtcagcaccgggatggtggccgcctccttctcacaagaggtttctcatatgtacgtcgccatcggcatcatctctggtctgggatactgctttagttttctcccaactgtaaccatcctatcacaatattttggcaaaagacgttccatagtcactgcagttgcttccacaggagaatgtttcgctgtgtttgctttcgcaccagcaatcatggctctgaaggagcgcattggctggagatacagcctcctcttcgtgggcctactacagttaaacattgtcatcttcggagcactgctcagacccatctttatcagaggaccagcgtcaccgaaaatagtcatccaggaaaatcggaaagaagcgcagtatatgcttgaaaatgagaaaacacgaacctcaatagactccattgactcaggagtagaactaactacctcacctaaaaatgtgcctactcacactaacctggaactggagccgaaggccgacatgcagcaggtcctggtgaagaccagccccaggccaagcgaaaagaaagccccgctattagacttctccattttgaaagagaaaagttttatttgttatgcattatttggtctctttgcaacactgggattctttgcaccttccttgtacatcattcctctgggcattagtctgggcattgaccaggaccgcgctgcttttttattatctacgatggccattgcagaagttttcggaaggatcggagctggttttgtcctcaacagggagcccattcgtaagatttacattgagctcatctgcgtcatcttattgactgtgtctctgtttgcctttacttttgctactgaattctggggtctaatgtcatgcagcatattttttgggtttatggttggaacaataggaggactcacattccactgcttgctgaagatgatgtcgtgggcattgcagaagatgtcttctgcagctggggtctacatcttcattcagagcatagcaggactggctggaccgccccttgcaggtttgttggtggaccaaagtaagatctacagcagggccttctactcctgcgcagctggcatggccctggctgctgtgtgcctcgccctggtgagaccgtgtaagatgggactgtgccagcgtcatcactcaggtgaaacaaaggtagtgagccatcgtgggaagactttacaggacatacctgaagactttctggaaatggatcttgcaaaaaatgagcacagagttcacgtgcaaatggagccggtatgacacactttcttacaacaacagccactgtgttggctggagagggatggggtgggcccaacggggacacaaggaggcagaggagctaacccctctactccactttcaaaactacattttaaagggaatgtgtatgtgaagagcactaccaacatcgcttttgttttgttttgttttgttttaagctttttttttttgcttgtttttaaagccaaaacaaaaaacaaccaagcactcttccatatataaatctggctgtattcagtagcaatacaagagatatgtagaaagactctttggttcacattccgatattaaaatagtgacatgaactggcaaagtggttttaaaagctttcacgtgggataaatgattttctttttttcttttctttcttcctatggtcttgtctgaataaactactctcctgaataaaacaacatccaacccaggtcattgaaatgaaattggccagtcaaaaaaaaaaagacttcaatcatttttaaaattcctaattttcagaaatatgaataaatagtttttgttaaaccctttgtaaaataccaaggttcccgttaacaaattacggcctctgcttgctggaaatgaaatatagtttaagaccaaacattttactaataaacaaattttaagtatatatatatatatataacttgaacttcataaatgtgaagattaccacttctttttatggccagtccttatcagaagtgtttcagtacagaatatacaaaatggcatttaaaaatgtgtttcctgttgcttttagttatacagaaatatgtgactgtagtgtctttaatttaaaccgctatttattattaagttattctaggatgattaaagtaatcaaaagaaataaaatctgagacataagcagcatttttacctcctttctgcaatcctttaaatgcctcacagaatacgtcttatcttgtaaaaatactttcataaaaggccaagttgtcatgattcttccatttgattaggggcaacgtgtgctattaaaggggaaaaaataatggattgcaaatcgccttagctttcaaaactaatttgttttatcatttaagaatacttgaggaacttctttgatcagaattatatttcagagaattgttaaagcatttctgatttaaagaaaaaaccatctaattattgaagcatttctgtatttcacatgggggtaacagagacaattatgttatagcgagttacaagttgcaatttacatcttctataacacatgacttgattggtctaagttgccagaggtatcgggtaactggtcattgttttgttttgtttgttttattcttccttttttttggagtcacactacatgtatagtattgctcacgttagcagttttctgtaaggagggcaagtgtcaggataataggtggactttttactcacctattttaccacaatctcaccctgcaggtgatggtcaatgcttgctgctccatctttattcatcgttaatgttaatttatgacaactcagggggaaaaacataacaagcctagtttggttacaggtacacacaagcttgaatatttctctgcactgaaatgaaagtggcatagttcatcaccacctgctacattttgtagagcatcttatcagccatagaaataggacaatctataaaactttggggagggtgggggaggaaatgacaaagtgtctgtcaaaaacaggcataatctaaaacaaggtggatgtagcaaatctctgtcactgcttgagaactttgagcttgtggcagttttgcagacttacatgacttcagcactttacgacatattttttactatgaatgttcaatacaatttaatatttataactgatttctgagggatctgctccatgtctattctgttatctgcatgaaaacaaaatgtatgccaatttcagtatgtcaataatcaaggttttaaatgtttggaagaaaatacaaacaagattgctgatctgttctgtattagtgacattctggtacttctagatttgcaataaatttatggattttttatttaaagagaac

SEQ ID NO: 328516 - DNA, 845 bp, Homo sapiens
ggcactcgtgcctcagccccactgtagcccttgatttcctgcctgaatggtacagtgagttggcgctgggattcctggccctgccctcctttgccttctctgtccccacaggcgcacttgcaacctgtgcgggtcatgaggacaaggcaggctgcccacctcgcccgcaccctcccccggcccctcctgctcggtctcggccctatgcgtgctctgtctgtggaaagaggttttcactcaagcatcagatggagacgcactaccgagtccacacaggagagaagcccttctcctgtagcctttgtcctcagcgctcccgggacttctcggccatgaccaagcacctgcggacacacggggccgctccgtaccgctgctccctgtgcggggccggctgtcccagcctggcctccatgcaggcgcacatgcgcggtcactcgcccagccaactcccgcccggatggaccatccgctccaccttcctctactcctcctcgaggccgtctcggccctcgacctctccctgttgtccttcttcctccaccacctgacggggtgtcggtagcgtcttagccaagagtccaattaaagaacgaaaagcgggccggctcggcttctgacctggcaccgctgctacggcggcctagcaaattccgccccagaagcgccccaggaagggcgccgagtgccctctcctggacgatcgcgggtcgcagaagcccaggccagcgagccctacagagtgaggacactgaagtgtgcaggagcgaaggttaacagtaggggagattgtcgatctcatcaccataataaagagtttcctgtgccctcccttcaggactaga

SEQ ID NO: 328517 - DNA, 727 bp, Homo sapiens
ccctggcctcgctccattccccacttttaacggtcactcggccttaagccgtcctgggtgtatgtgaggctgaaagggaaggaggaacagggtctgggccgctgtgtgctctgccgtcatctctaagaaacaaccataccactgaatgctactgtgtacttacaaaccacactcatattcgtcacgtcatttcatcttcacccccacctccaaatgaggtaagcagatattatgcctatttcatgaatgaggttactgaggcccagagaagtgacttgcccaaggtgactcaaatagtaaatggcagagatgaaactcaaaggcagggctgattattccaaggtccttgctgccacagatacacttctttgactctaggagttcacaaacgaagtgaggagacaggaggctaggggcagaatgtgtgcattctggaggtagagggggtggtctctcctgcaggcagaaggcagaggcagggttagaaaaccacaccccttcggggggactgtggcagactgatacttgggacatccaatggaggcctgtgaggtcaggggcggggctagctccagggggggccccaggagccccaacagtagttcagagcatgcggtgtcctggaagaagctacaagcggtgagtgatagcctctctccagctgaggccttcttcccatcacaactctttctgtctcctccctgccaacctagagccctctccctga

SEQ ID NO: 328518 - DNA, 2080 bp, Homo sapiens
ccctggcctcgctccattccccacttttaacggtcactcggccttaagccgtcctgggtgtatgtgaggctgaaagggaaggaggaacagggtctgggccgctgtgtgctctgccgtcatctctaagaaacaaccataccactgaatgctactgtgtacttacaaaccacactcatattcgtcacgtcatttcatcttcacccccacctccaaatgaggcttgaaatgagatgagatgttcctccctcccctttcaaccatggacctcacactgtggacttcctcttagagcctctgagttaggtacccaagccaaggcacaatgtccctgccccccataagactgcccagcccctatggctctgatcggctggtacagctagcagccaggctccggccagcactctgtgatactctgatcaccgtagggagccaggagttccccgcccacagcctggtgctagcaggtgtcagccagcagctgggccgcaggggccagtgggctctgggagaaggcatcagcccttctacctttgcccagctcctgaactttgtgtatggggagagtgtagagctgcagcctggagagctaaggccccttcaggaggcggccagggccttgggagtgcagtccctggaagaggcatgctggagggctcgaggggacagggctaaaaagccagatccaggcctgaagaaacatcaggaggagccagagaaaccctcaaggaatcctgagagagaactgggggaccctggagagaagcagaaaccagaacaggtttctagaactggtgggagagaacaggagatgttgcacaagcactcgccaccaagaggcagacccgagatggcaggagcaacgcaggaggctcagcaggaacagaccaggtcaaaggagaaacgcctccaagcccctgttggccaaaggggagcagatgggaagcatggagtgctcacgtggttgagggaaaatccagggggctctgaggaaagtctgcgcaagctccctggcccccttcccccagcaggctccctgcaaaccagcgtcacccctaggccctcgtgggctgaggccccttggttggtggggggccagcctgccctgtggagcatcctgctgatgccgcccagatatggcattcccttctaccatagcacccccaccactggagcctggcaggaggtctggcgggaacagaggatcccactgtccctaaatgcccccaaagggctctggagccagaaccagttggcctcctccagccctaccccaggttccctcccccagggccccgcacagctcagccctggggagatggaagagtctgatcaggggcacacaggcgcacttgcaacctgtgcgggtcatgaggacaaggcaggctgcccacctcgcccgcaccctcccccggcccctcctgctcggtctcggccctatgcgtgctctgtctgtggaaagaggttttcactcaagcatcagatggagacgcactaccgagtccacacaggagagaagcccttctcctgtagcctttgtcctcagcgctcccgggacttctcggccatgaccaagcacctgcggacacacggggccgctccgtaccgctgctccctgtgcggggccggctgtcccagcctggcctccatgcaggcgcacatgcgcggtcactcgcccagccaactcccgcccggatggaccatccgctccaccttcctctactcctcctcgaggccgtctcggccctcgacctctccctgttgtccttcttcctccaccacctgacggggtgtcggtagcgtcttagccaagagtccaattaaagaacgaaaagcgggccggctcggcttctgacctggcaccgctgctacggcggcctagcaaattccgccccagaagcgccccaggaagggcgccgagtgccctctcctggacgatcgcgggtcgcagaagcccaggccagcgagccctacagagtgaggacactgaagtgtgcaggagcgaaggttaacagtaggggagattgtcgatctcatcaccataataaagagtttcctgtgccctcccttcaggactaga

SEQ ID NO: 328519 - DNA, 2456 bp, Homo sapiens
ccctggcctcgctccattccccacttttaacggtcactcggccttaagccgtcctgggtgtatgtgaggctgaaagggaaggaggaacagggtctgggccgctgtgtgctctgccgtcatctctaagaaacaaccataccactgaatgctactgtgtacttacaaaccacactcatattcgtcacgtcatttcatcttcacccccacctccaaatgagtgccggcgttgactgggttttgtggtgatccttgtctggaatgaagaaagcctggcttgcgcagaggtgtttccctgcagaggggcttggagaagcagaagtggcagtatctgctatcttttacgtcagagactgccaactggcagacttcccgcacgcctgtcttaaacccactactagatatttctgttaactgactggcccttgctctttaagtcctgaatttggtctgatttccattctctcgccaccatgcctacctgctatgattctggataagctccaatcctctcttgggttactttatttgctcactcaggacagagggctctgatctaggaccagcaactcacaccctctcccctcacatccacaggcttgaaatgagatgagatgttcctccctcccctttcaaccatggacctcacactgtggacttcctcttagagcctctgagttaggtacccaagccaaggcacaatgtccctgccccccataagactgcccagcccctatggctctgatcggctggtacagctagcagccaggctccggccagcactctgtgatactctgatcaccgtagggagccaggagttccccgcccacagcctggtgctagcaggtgtcagccagcagctgggccgcaggggccagtgggctctgggagaaggcatcagcccttctacctttgcccagctcctgaactttgtgtatggggagagtgtagagctgcagcctggagagctaaggccccttcaggaggcggccagggccttgggagtgcagtccctggaagaggcatgctggagggctcgaggggacagggctaaaaagccagatccaggcctgaagaaacatcaggaggagccagagaaaccctcaaggaatcctgagagagaactgggggaccctggagagaagcagaaaccagaacaggtttctagaactggtgggagagaacaggagatgttgcacaagcactcgccaccaagaggcagacccgagatggcaggagcaacgcaggaggctcagcaggaacagaccaggtcaaaggagaaacgcctccaagcccctgttggccaaaggggagcagatgggaagcatggagtgctcacgtggttgagggaaaatccagggggctctgaggaaagtctgcgcaagctccctggcccccttcccccagcaggctccctgcaaaccagcgtcacccctaggccctcgtgggctgaggccccttggttggtggggggccagcctgccctgtggagcatcctgctgatgccgcccagatatggcattcccttctaccatagcacccccaccactggagcctggcaggaggtctggcgggaacagaggatcccactgtccctaaatgcccccaaagggctctggagccagaaccagttggcctcctccagccctaccccaggttccctcccccagggccccgcacagctcagccctggggagatggaagagtctgatcaggggcacacaggcgcacttgcaacctgtgcgggtcatgaggacaaggcaggctgcccacctcgcccgcaccctcccccggcccctcctgctcggtctcggccctatgcgtgctctgtctgtggaaagaggttttcactcaagcatcagatggagacgcactaccgagtccacacaggagagaagcccttctcctgtagcctttgtcctcagcgctcccgggacttctcggccatgaccaagcacctgcggacacacggggccgctccgtaccgctgctccctgtgcggggccggctgtcccagcctggcctccatgcaggcgcacatgcgcggtcactcgcccagccaactcccgcccggatggaccatccgctccaccttcctctactcctcctcgaggccgtctcggccctcgacctctccctgttgtccttcttcctccaccacctgacggggtgtcggtagcgtcttagccaagagtccaattaaagaacgaaaagcgggccggctcggcttctgacctggcaccgctgctacggcggcctagcaaattccgccccagaagcgccccaggaagggcgccgagtgccctctcctggacgatcgcgggtcgcagaagcccaggccagcgagccctacagagtgaggacactgaagtgtgcaggagcgaaggttaacagtaggggagattgtcgatctcatcaccataataaagagtttcctgtgccctcccttcaggactaga

SEQ ID NO: 328520 - DNA, 168 bp, Homo sapiens
agagaagatggcttttcctaagataatatattggtagtttttcataggtaactgaaaaacttggggcagctcaagtgctattaaggattgaagtaattaatgaataaatcgcagaaactatatcttcttattttgtgcttatagtaaacataaagtctgttggagaag

SEQ ID NO: 328521 - DNA, 452 bp, Homo sapiens
tactagaaaaaaaatgtaggagaaatgcttcaagacattgatctgcacaaagattttatggagaagacttcaaaagcataggcaacaaaagcaaaattacacaattagacatcacgagattatatcaaactaaaaagcttctgcacagcaaaggaaacaatcaacagagggaaaagagtacagaatgggagaaatatatgtaagctattcatccaataagggattaatatccagaacatgcagggagctcaaacaacagcaaaaaacaaaaaactcccccccaaaacacaaaacaacaaataatctgatttaaacataaacaaaatgagctgaataagtatctctcaaaagaagacatagaaatggctaacaggtatatgaaaaatgctcaacatcactaatcatcagggaaatgcaaatcaaaaccacaatgaaatatcatcttaccctag

SEQ ID NO: 328522 - DNA, 7403 bp, Homo sapiens
gccctgtgactgctgctgtcactactaccacccctcaagtgtttttagaaaatactactgctgtgacacctatgactgctatttctgacgtggaaactaaagaaactacttattcttctggtgccaccactacaggggttgttgaggtctctgaaactaataccagcacctctgtaacatctacccagtctacagccactgtgaaccttaccaaaaccactgggataactacccctgtggcttcagttgcttttcctaagtctttggtagcatctccttcaaccataactcttcctgttgcttccactgcttccacctccttagtcgtggtgactgcagctgcatcttcctccatggtgaccacaccaacttcatctctgggctctgttcctattatactctcaggaattaatgggagtccaccagtgagccagagaccagaaaatgctgctcaaattccagtggctactccacaggtctctcctaacacagtgaaacgtgctggacctcgattgttgttgattccagtgcagcagggttctcctactcttagacctgtctcaaacacacaacttcagggacatcggatggtcttgcagcctgttaggagtccaagtggaatgaacttattcaggcaccctaatgggcagattgtccagcttctacctttgcatcagcttcgaggctctaatacccagcccaacttacagcctgtcatgtttcggaacccagggtctgtgatgggaatccggttacctgctccttccaaaccctctgagactccgccatcttccacttcgtcctctgctttctctgtcatgaatcctgtaattcaagctgttgggtcttcttcagcagtgaatgttatcactcaggcaccatcattgctttcctctggagctagttttgtgtctcaggctggtacattgaccctgaggatttctcctcctgaaccacaaagctttgcaagtaaaacaggctctgaaaccaaaataacttatagctcaggaggacagcctgttggtacagccagtcttattcctctccagtctggtagttttgccttgttacagctcccaggacaaaagcctgttcctagctccattcttcagcatgttgcttcccttcagatgaaaagagaatctcagaatccagaccagaaagatgaaacaaactcaataaaaagagagcaagaaacgaagaaggttctacagtcagaaggagaggctgtagaccctgaggctaatgtaataaaacaaaactcaggagctgctacctcagaagaaactctgaatgattccttggaagataggggtgatcatttggatgaagaatgccttccagaagaaggttgtgcaactgtcaaaccatctgagcattcctgtatcactgggtcacatacagatcaagattataaagatgttaatgaagaatatggggctaggaatcgtaagagttccaaagaaaaagtggctgttctggaagttaggaccatttctgaaaaagccagtaataagacagtccaaaatttaagtaaagtacagcatcaaaaacttggtgatgtgaaggtggaacagcagaaaggatttgacaatccagaagaaaactcaagtgaatttccagtcacctttaaggaagaaagtaaatttgaattgtcaggaagcaaagttatggagcagcaatctaatctacagccagaggccaaagagaaggaatgtggagactctctggagaaagacagggaaagatggagaaaacatctgaagggccccttaaccaggaaatgtgttggagcttcacaggaatgtaagaaagaggcagacgagcagttaattaaagaaacaaagacatgtcaggaaaattcagatgtgtttcagcaagaacaaggcatctctgacttacttggaaaaagtggaattactgaagatgccagagttttgaaaactgaatgtgattcttggagtaggatttctaatccttcagccttctccattgttcctaggagagctgcaaaaagcagcagagggaatggacattttcagggtcacttactgctacctggagaacagatacaaccaaagcaagagaagaagggtgggagaagcagtgctgacttcactgttttggatttggaagaagatgatgaagatgataatgagaaaactgatgattctattgatgaaattgtggatgttgtttctgactaccagagtgaggaggttgatgatgtagaaaagaataactgtgtagaatacattgaggatgatgaggagcacgtggacattgagactgtagaagagctctcagaggaaattaatggttgctcacctgaagaccacagcgggcccacacacagtcattcaaacagccgtcctgtactcacatctctgcagatgaaaaagcagctgaaaggagtcgaaaggctccaccaattcctctaaaactgaagcctgattactggagtgacaaactacagaaagaagcagaagcgtttgcttattatcgccggacacacactgccaatgagcggcggcggcgtggtgaaatgagggatctctttgagaaattaaagatcacattgggattacttcattcttccaaggtttccaaaagtctcattcttactcgagccttcagtgaaattcagggactaacagatcaggcagacaaattgataggacagaaaaatctcctgactcgaaaacggaatattctgatacggaaagtatcgtctctttcaggtaagacagaagaagtggtcctgaagaagctagagtatatttatgcaaaacagcaagcactagaggcacaaaaaagaaaaaagaagatgggatcagatgagtttgacatatctcccagaattagcaaacagcaggaaggatcttctgcatcatctgtagatcttggacagatgtttataaataacaggagggggaaacctttgattctttccagaaaaaaagaccaggccacagaaaatacctcacccttgaacactccacacacctctgccaaccttgtgatgactccgcaagggcaattgctcaccctaaaaggtcccctattctcaggaccagtggtagctgtttctcctgatctcttagaatctgatcttaagcctcaagttgccggtagtgctgtggctctaccagaaaatgacgacttatttatgatgccacgaattgttaatgtgacatcattggccacagagggaggtttggtagatatgggtggcagcaaatatcctcatgaagttcctgatagcaagccatctgaccatctgaaagacaccgtcaggaatgaagataattccttagaggataagggtagaatctcttccagaggaaacagagatggcagagtgacgttgggtccaacgcaggtttttctggcaaacaaagattctggttatccacaaatagttgacgtttccaatatgcagaaagcacaagagttcttacctaaaaagatttctggtgatatgagagggattcagtataaatggaaagagagtgaatcaagaggggagagagtgaagtcaaaggattcttcatttcataaattaaagatgaaagatctcaaggactcaagcatagagatggaactgaggaaagtaacatcagctatagaggaagcagctcttgattccagtgaactgctgactaacatggaagatgaggatgatactgatgagacactgacttcactgctcaatgaaattgcctttcttaatcaacaactaaatgatgactctgttggcctggctgaactacccagctctatggatacagagttcccaggggatgctcggcgggcttttattagtaaggttcctcctggaagcagagcaactttccaggttgagcacttgggaactggtttgaaagagttgcctgatgttcaaggggagagtgactctatcagtcccctcctcttgcacttggaagacgatgacttttctgagaatgaaaaacaacttgcagaaccagcctctgagccagatgtccttaagattgttattgactctgaaataaaggattccctcctttccaacaagaaagctattgatggagggaagaatacttctggcctccctgcagagcccgaaagtgtgtcctcaccccccaccctacacatgaagactggcttggagaacagcaacagcacagacactttgtggaggcctatgccaaagttggcccctctaggtttaaaagtagctaatccttccagtgatgcagatggtcagagtctcaaggtgatgccttgtttggcacctatagctgccaaagttgggtcagttggacacaaaatgaacttaacagggaatgaccaggaaggccgggaaagcaaggtgatgcctacattggcacctgttgtggctaaattgggcaactcgggggcctcaccaagttctgcagggaaatgaacttacttgtccttaagcagaagccaggctgtgaggggaaatagatctcacctcctttctctgcaggcatctgtttgtttgtgtcttagaacttggatccttgacttcaatgatgcagtggataatgatgggagaaagggggtagggtgctgaccctggtataagaagtactctgaaattctgatcatgttaaaatgtgttacctcacttgtggtgctgggtcccctcatcctctctaagaagatgtgatccattactgaacatgaggtgcccctcttacccaaggaatttataacatgactctggctccacagtggtttctagttcttcccccacaagcgaaagagctgtttgcaactttggagttgctgtagactgaactgtagcttgtagctgttgaattaagtccaaaatctaaggaatgcgatggacttgtgcaaagggatccagaagagacactttttagttgatgtttcaagaatagggagagagaggatgggtaccatggaataccaaagtgaaggactttgtgtcattcagtaaaattttcttttttcatatcctaagtagctcccattccctcaccttttcaatcagaattaacaaattcaagccttcagtaaagtagggatgcttttaacttttattattaattattttgagatcttaaaaaaatagtagttctcccttattatttttgtgggcattgaaaagctcatttcacagtaccagagatttttactgggagtatatattttggaggtaggcatagagggagccctaccccttccacaaattacgttactcaagagacagctaaaataaaatgcattatctccccagaccagagacagtggccaaaataaaaaatcatggggctggaaatttcccaaatcaaaccagcctcctggtgcttgaaggtttcattcactattacctgcacaggatgtaaagaaaagtcacagtaggcactctttaccagggaaataaggcagtatttgaatcacaagatatattttttatctgcaaccatggatccaatgatctgtagagctttttcactcattaactgtcaggatatgaaggactgacagtctgtaaagatatttatatttttgtatagttgttttcatagatttctcaaaggctgaagttttcaacctagaagatgagatttgtattgagtatagaaatgatgtttcctatctagtttgtaaataatcatggtgcacttgaggggtctcttggaaactcctagggggtcaagaatcactattctgaaactgtatagactgggatttagctgctgcattttgcctttcttaaataattatattttggaatgtaacccctgttctgtcttcattgacaggatttgcttgtgttgttaaaacactaacacaagagcttccagtgcctgggccgtgcctaggtgatgctatttcttctatatctcctgtcttctttatcccaaatcccactcagcatatcttcagacctaggttgtaagaccaactttggattggatctagccagtgaattattatttccatggttggttccctttctgttaactctggtaatcaacagattgaaaacggtggaagaacttcttctgaaaattgcagtgggagcaaattcttgttggttttgtgctgcttgcctttctagatctgctcatcagcacttaaccttccctcctctaaaggttactaaagaagcctgaagtaggtaaagagtgctcctcagcttcttatccttccactctttacccagcagatttcattcaatgccttagccaaggagtccagcacctgtctcccctgctaataattgtccttagagatgctagtactttaatccaggtatagcagtttcccgttattttcttgcttgtcgttcccctacatttcctcctgatttcccaagactctctttgtggcttttgagggtcagccaaggagcaggcaagtgagtgaacaatcctcaggaaaagaaggaccattttagcttaacacttccttttttttttttttttttttaagaagaatataggtaaacaggtaatgattcttgattggagataccatttgactcttgatgagagttgtacgaagatggaaatgagggatgattccaggcgttttagggggaaggctgcagataccattctaacccccaagatactgtgttctcaagacctcttagaactaggtgttgtcagggataatttgaggagggcttagtcttcagaacaatcctgcagtcttgacagaaatctaaaatctccaaaaactcctaccctttaaccttaccctagggggaactgatctatgaatattacatgtgtgattatgaaaggtgaagttgagtgagaggagttgaggaacgtggaagacagtgagctctcaccctaacactataagaagcatgatctcaatagaccaataattcacctttttatacatctgtaaataaatggaatgtttttaagaatataattatgtcagatttagcattttcttttatatattaaatatatatatctttccttttctgctttcgaaaagtgactatttttttagaaatctaagaacagaagtttggtgattgaaaggtagaatatataaacctgaaataaagcagttaaaacaattaaagcagaacttggtgttgggaggtttgtgccaacttggagtggagaattctaattccctaagacatatttgagagaggtgccactgaagtggttttatcataggaatcctttccttttctctaagtttctgatatgccatttgggggaggttttcgatgttctaatccttgtagcatgttttacatggaggcttcaaaattgtgtgcaacctgatggcaagtatttgttttagaagtcattctaaaatcattctggtgtcagtatgagcaaggcagttcacctgttaaccttggggagtaaaggtacacaaacaca

SEQ ID NO: 328523 - DNA, 7020 bp, Homo sapiens
gttgatgtttcaagaatagggagagagaggatgggtaccatggaataccaaagtgaaggactttgtgtcattcagtaaaattttcttttttcatatcctaagtagctcccattccctcaccttttcaatcagaattaacaaattcaagccttcagtaaagtagggatgcttttaacttttattattaattattttgagatcttaaatagtggttctcctactcttagacctgtctcaaacacacaacttcagggacatcggatggtcttgcagcctgttaggagtccaagtggaatgaacttattcaggcaccctaatgggcagattgtccagcttctacctttgcatcagcttcgaggctctaatacccagcccaacttacagcctgtcatgtttcggaacccagggtctgtgatgggaatccggttacctgctccttccaaaccctctgagactccgccatcttccacttcgtcctctgctttctctgtcatgaatcctgtaattcaagctgttgggtcttcttcagcagtgaatgttatcactcaggcaccatcattgctttcctctggagctagttttgtgtctcaggctggtacattgaccctgaggatttctcctcctgaaccacaaagctttgcaagtaaaacaggctctgaaaccaaaataacttatagctcaggaggacagcctgttggtacagccagtcttattcctctccagtctggtagttttgccttgttacagctcccaggacaaaagcctgttcctagctccattcttcagcatgttgcttcccttcagatgaaaagagaatctcagaatccagaccagaaagatgaaacaaactcaataaaaagagagcaagaaacgaagaaggttctacagtcagaaggagaggctgtagaccctgaggctaatgtaataaaacaaaactcaggagctgctacctcagaagaaactctgaatgattccttggaagataggggtgatcatttggatgaagaatgccttccagaagaaggttgtgcaactgtcaaaccatctgagcattcctgtatcactgggtcacatacagatcaagattataaagatgttaatgaagaatatggggctaggaatcgtaagagttccaaagaaaaagtggctgttctggaagttaggaccatttctgaaaaagccagtaataagacagtccaaaatttaagtaaagtacagcatcaaaaacttggtgatgtgaaggtggaacagcagaaaggatttgacaatccagaagaaaactcaagtgaatttccagtcacctttaaggaagaaagtaaatttgaattgtcaggaagcaaagttatggagcagcaatctaatctacagccagaggccaaagagaaggaatgtggagactctctggagaaagacagggaaagatggagaaaacatctgaagggccccttaaccaggaaatgtgttggagcttcacaggaatgtaagaaagaggcagacgagcagttaattaaagaaacaaagacatgtcaggaaaattcagatgtgtttcagcaagaacaaggcatctctgacttacttggaaaaagtggaattactgaagatgccagagttttgaaaactgaatgtgattcttggagtaggatttctaatccttcagccttctccattgttcctaggagagctgcaaaaagcagcagagggaatggacattttcagggtcacttactgctacctggagaacagatacaaccaaagcaagagaagaagggtgggagaagcagtgctgacttcactgttttggatttggaagaagatgatgaagatgataatgagaaaactgatgattctattgatgaaattgtggatgttgtttctgactaccagagtgaggaggttgatgatgtagaaaagaataactgtgtagaatacattgaggatgatgaggagcacgtggacattgagactgtagaagagctctcagaggaaattaatggttgctcacctgaagaccacagcgggcccacacacagtcattcaaacagccgtcctgtactcacatctctgcagatgaaaaagcagctgaaaggagtcgaaaggctccaccaattcctctaaaactgaagcctgattactggagtgacaaactacagaaagaagcagaagcgtttgcttattatcgccggacacacactgccaatgagcggcggcggcgtggtgaaatgagggatctctttgagaaattaaagatcacattgggattacttcattcttccaaggtttccaaaagtctcattcttactcgagccttcagtgaaattcagggactaacagatcaggcagacaaattgataggacagaaaaatctcctgactcgaaaacggaatattctgatacggaaagtatcgtctctttcaggtaagacagaagaagtggtcctgaagaagctagagtatatttatgcaaaacagcaagcactagaggcacaaaaaagaaaaaagaagatgggatcagatgagtttgacatatctcccagaattagcaaacagcaggaaggatcttctgcatcatctgtagatcttggacagatgtttataaataacaggagggggaaacctttgattctttccagaaaaaaagaccaggccacagaaaatacctcacccttgaacactccacacacctctgccaaccttgtgatgactccgcaagggcaattgctcaccctaaaaggtcccctattctcaggaccagtggtagctgtttctcctgatctcttagaatctgatcttaagcctcaagttgccggtagtgctgtggctctaccagaaaatgacgacttatttatgatgccacgaattgttaatgtgacatcattggccacagagggaggtttggtagatatgggtggcagcaaatatcctcatgaagttcctgatagcaagccatctgaccatctgaaagacaccgtcaggaatgaagataattccttagaggataagggtagaatctcttccagaggaaacagagatggcagagtgacgttgggtccaacgcaggtttttctggcaaacaaagattctggttatccacaaatagttgacgtttccaatatgcagaaagcacaagagttcttacctaaaaagatttctggtgatatgagagggattcagtataaatggaaagagagtgaatcaagaggggagagagtgaagtcaaaggattcttcatttcataaattaaagatgaaagatctcaaggactcaagcatagagatggaactgaggaaagtaacatcagctatagaggaagcagctcttgattccagtgaactgctgactaacatggaagatgaggatgatactgatgagacactgacttcactgctcaatgaaattgcctttcttaatcaacaactaaatgatgactctgttggcctggctgaactacccagctctatggatacagagttcccaggggatgctcggcgggcttttattagtaaggttcctcctggaagcagagcaactttccaggttgagcacttgggaactggtttgaaagagttgcctgatgttcaaggggagagtgactctatcagtcccctcctcttgcacttggaagacgatgacttttctgagaatgaaaaacaacttgcagaaccagcctctgagccagatgtccttaagattgttattgactctgaaataaaggattccctcctttccaacaagaaagctattgatggagggaagaatacttctggcctccctgcagagcccgaaagtgtgtcctcaccccccaccctacacatgaagactggcttggagaacagcaacagcacagacactttgtggaggcctatgccaaagttggcccctctaggtttaaaagtagctaatccttccagtgatgcagatggtcagagtctcaaggtgatgccttgtttggcacctatagctgccaaagttgggtcagttggacacaaaatgaacttaacagggaatgaccaggaaggccgggaaagcaaggtgatgcctacattggcacctgttgtggctaaattgggcaactcgggggcctcaccaagttctgcagggaaatgaacttacttgtccttaagcagaagccaggctgtgaggggaaatagatctcacctcctttctctgcaggcatctgtttgtttgtgtcttagaacttggatccttgacttcaatgatgcagtggataatgatgggagaaagggggtagggtgctgaccctggtataagaagtactctgaaattctgatcatgttaaaatgtgttacctcacttgtggtgctgggtcccctcatcctctctaagaagatgtgatccattactgaacatgaggtgcccctcttacccaaggaatttataacatgactctggctccacagtggtttctagttcttcccccacaagcgaaagagctgtttgcaactttggagttgctgtagactgaactgtagcttgtagctgttgaattaagtccaaaatctaaggaatgcgatggacttgtgcaaagggatccagaagagacactttttagttgatgtttcaagaatagggagagagaggatgggtaccatggaataccaaagtgaaggactttgtgtcattcagtaaaattttcttttttcatatcctaagtagctcccattccctcaccttttcaatcagaattaacaaattcaagccttcagtaaagtagggatgcttttaacttttattattaattattttgagatcttaaaaaaatagtagttctcccttattatttttgtgggcattgaaaagctcatttcacagtaccagagatttttactgggagtatatattttggaggtaggcatagagggagccctaccccttccacaaattacgttactcaagagacagctaaaataaaatgcattatctccccagaccagagacagtggccaaaataaaaaatcatggggctggaaatttcccaaatcaaaccagcctcctggtgcttgaaggtttcattcactattacctgcacaggatgtaagatatattttttatctgcaaccatggatccaatgatctgtagagctttttcactcattaactgtcaggatatgaaggactgacagtctgtaaagatatttatatttttgtatagttgttttcatagatttctcaaaggctgaagttttcaacctagaagatgagatttgtattgagtatagaaatgatgtttcctatctagtttgtaaataatcatggtgcacttgaggggtctcttggaaactcctagggggtcaagaatcactattctgaaactgtatagactgggatttagctgctgcattttgcctttcttaaataattatattttggaatgtaacccctgttctgtcttcattgacaggatttgcttgtgttgttaaaacactaacacaagagcttccagtgcctgggccgtgcctaggtgatgctatttcttctatatctcctgtcttctttatcccaaatcccactcagcatatcttcagacctaggttgtaagaccaactttggattggatctagccagtgaattattatttccatggttggttccctttctgttaactctggtaatcaacagattgaaaacggtggaagaacttcttctgaaaattgcagtgggagcaaattcttgttggttttgtgctgcttgcctttctagatctgctcatcagcacttaaccttccctcctctaaaggttactaaagaagcctgaagtaggtaaagagtgctcctcagcttcttatccttccactctttacccagcagatttcattcaatgccttagccaaggagtccagcacctgtctcccctgctaataattgtccttagagatgctagtactttaatccaggtatagcagtttcccgttattttcttgcttgtcgttcccctacatttcctcctgatttcccaagactctctttgtggcttttgagggtcagccaaggagcaggcaagtgagtgaacaatcctcaggaaaagaaggaccattttagcttaacacttccttttttttttttttttttttaagaagaatataggtaaacaggtaatgattcttgattggagataccatttgactcttgatgagagttgtacgaagatggaaatgagggatgattccaggcgttttagggggaaggctgcagataccattctaacccccaagatactgtgttctcaagacctcttagaactaggtgttgtcagggataatttgaggagggcttagtcttcagaacaatcctgcagtcttgacagaaatctaaaatctccaaaaactcctaccctttaaccttaccctagggggaactgatctatgaatattacatgtgtgattatgaaaggtgaagttgagtgagaggagttgaggaacgtggaagacagtgagctctcaccctaacactataagaagcatgatctcaatagaccaataattcacctttttatacatctgtaaataaatggaatgtttttaagaatataattatgtcagatttagcattttcttttatatattaaatatatatatctttccttttctgctttcgaaaagtgactatttttttagaaatctaagaacagaagtttggtgattgaaaggtagaatatataaacctgaaataaagcagttaaaacaattaaagcagaacttggtgttgggaggtttgtgccaacttggagtggagaattctaattccctaagacatatttgagagaggtgccactgaagtggttttatcataggaatcctttccttttctctaagtttctgatatgccatttgggggaggttttcgatgttctaatccttgtagcatgttttacatggaggcttcaaaattgtgtgcaacctgatggcaagtatttgttttagaagtcattctaaaatcattctggtgtcagtatgagcaaggcagttcacctgttaaccttggggagtaaaggtacacaaacaca

SEQ ID NO: 328524 - DNA, 385 bp, Homo sapiens
ggttgctcacctgaagaccacagcgggcccacacacagtcattcaaacagccgtaagtcttatttctctttggattgttgtttttgtagttttgtaaccagaaacaaaatgagatgttctgttcaggagctctgggtaactcatctggttccttcttcctctagctttttttctgattagtatagatgaggagaggaactagaatttgggtaattaattttctttggtcgttggtaggaggcagtgtgtaaatgtgaataacatgcttttggagcccgatagactggtattataaaatattagttttgctagtttgtaggtatttaaccttgggcaaatctttaatctctctgaacctcagattctttacctatgaaatgaggaa

SEQ ID NO: 328525 - DNA, 7077 bp, Homo sapiens
gttgatgtttcaagaatagggagagagaggatgggtaccatggaataccaaagtgaaggactttgtgtcattcagtaaaattttcttttttcatatcctaagtagctcccattccctcaccttttcaatcagaattaacaaattcaagccttcagtaaagtagggatgcttttaacttttattattaattattttgagatcttaaatagtggttctcctactcttagacctgtctcaaacacacaacttcagggacatcggatggtcttgcagcctgttaggagtccaagtggaatgaacttattcaggcaccctaatgggcagattgtccagcttctacctttgcatcagcttcgaggctctaatacccagcccaacttacagcctgtcatgtttcggaacccagggtctgtgatgggaatccggttacctgctccttccaaaccctctgagactccgccatcttccacttcgtcctctgctttctctgtcatgaatcctgtaattcaagctgttgggtcttcttcagcagtgaatgttatcactcaggcaccatcattgctttcctctggagctagttttgtgtctcaggctggtacattgaccctgaggatttctcctcctgaaccacaaagctttgcaagtaaaacaggctctgaaaccaaaataacttatagctcaggaggacagcctgttggtacagccagtcttattcctctccagtctggtagttttgccttgttacagctcccaggacaaaagcctgttcctagctccattcttcagcatgttgcttcccttcagatgaaaagagaatctcagaatccagaccagaaagatgaaacaaactcaataaaaagagagcaagaaacgaagaaggttctacagtcagaaggagaggctgtagaccctgaggctaatgtaataaaacaaaactcaggagctgctacctcagaagaaactctgaatgattccttggaagataggggtgatcatttggatgaagaatgccttccagaagaaggttgtgcaactgtcaaaccatctgagcattcctgtatcactgggtcacatacagatcaagattataaagatgttaatgaagaatatggggctaggaatcgtaagagttccaaagaaaaagtggctgttctggaagttaggaccatttctgaaaaagccagtaataagacagtccaaaatttaagtaaagtacagcatcaaaaacttggtgatgtgaaggtggaacagcagaaaggatttgacaatccagaagaaaactcaagtgaatttccagtcacctttaaggaagaaagtaaatttgaattgtcaggaagcaaagttatggagcagcaatctaatctacagccagaggccaaagagaaggaatgtggagactctctggagaaagacagggaaagatggagaaaacatctgaagggccccttaaccaggaaatgtgttggagcttcacaggaatgtaagaaagaggcagacgagcagttaattaaagaaacaaagacatgtcaggaaaattcagatgtgtttcagcaagaacaaggcatctctgacttacttggaaaaagtggaattactgaagatgccagagttttgaaaactgaatgtgattcttggagtaggatttctaatccttcagccttctccattgttcctaggagagctgcaaaaagcagcagagggaatggacattttcagggtcacttactgctacctggagaacagatacaaccaaagcaagagaagaagggtgggagaagcagtgctgacttcactgttttggatttggaagaagatgatgaagatgataatgagaaaactgatgattctattgatgaaattgtggatgttgtttctgactaccagagtgaggaggttgatgatgtagaaaagaataactgtgtagaatacattgaggatgatgaggagcacgtggacattgagactgtagaagagctctcagaggaaattaatggttgctcacctgaagaccacagcgggcccacacacagtcattcaaacagccgtcctgtactcacatctctgcagatgaaaaagcagctgaaaggagtcgaaaggctccaccaattcctctaaaactgaagcctgattactggagtgacaaactacagaaagaagcagaagcgtttgcttattatcgccggacacacactgccaatgagcggcggcggcgtggtgaaatgagggatctctttgagaaattaaagatcacattgggattacttcattcttccaaggtttccaaaagtctcattcttactcgagccttcagtgaaattcagggactaacagatcaggcagacaaattgataggacagaaaaatctcctgactcgaaaacggaatattctgatacggaaagtatcgtctctttcaggtaagacagaagaagtggtcctgaagaagctagagtatatttatgcaaaacagcaagcactagaggcacaaaaaagaaaaaagaagatgggatcagatgagtttgacatatctcccagaattagcaaacagcaggaaggatcttctgcatcatctgtagatcttggacagatgtttataaataacaggagggggaaacctttgattctttccagaaaaaaagaccaggccacagaaaatacctcacccttgaacactccacacacctctgccaaccttgtgatgactccgcaagggcaattgctcaccctaaaaggtcccctattctcaggaccagtggtagctgtttctcctgatctcttagaatctgatcttaagcctcaagttgccggtagtgctgtggctctaccagaaaatgacgacttatttatgatgccacgaattgttaatgtgacatcattggccacagagggaggtttggtagatatgggtggcagcaaatatcctcatgaagttcctgatagcaagccatctgaccatctgaaagacaccgtcaggaatgaagataattccttagaggataagggtagaatctcttccagaggaaacagagatggcagagtgacgttgggtccaacgcaggtttttctggcaaacaaagattctggttatccacaaatagttgacgtttccaatatgcagaaagcacaagagttcttacctaaaaagatttctggtgatatgagagggattcagtataaatggaaagagagtgaatcaagaggggagagagtgaagtcaaaggattcttcatttcataaattaaagatgaaagatctcaaggactcaagcatagagatggaactgaggaaagtaacatcagctatagaggaagcagctcttgattccagtgaactgctgactaacatggaagatgaggatgatactgatgagacactgacttcactgctcaatgaaattgcctttcttaatcaacaactaaatgatgactctgttggcctggctgaactacccagctctatggatacagagttcccaggggatgctcggcgggcttttattagtaaggttcctcctggaagcagagcaactttccaggttgagcacttgggaactggtttgaaagagttgcctgatgttcaaggggagagtgactctatcagtcccctcctcttgcacttggaagacgatgacttttctgagaatgaaaaacaacttgcagaaccagcctctgagccagatgtccttaagattgttattgactctgaaataaaggattccctcctttccaacaagaaagctattgatggagggaagaatacttctggcctccctgcagagcccgaaagtgtgtcctcaccccccaccctacacatgaagactggcttggagaacagcaacagcacagacactttgtggaggcctatgccaaagttggcccctctaggtttaaaagtagctaatccttccagtgatgcagatggtcagagtctcaaggtgatgccttgtttggcacctatagctgccaaagttgggtcagttggacacaaaatgaacttaacagggaatgaccaggaaggccgggaaagcaaggtgatgcctacattggcacctgttgtggctaaattgggcaactcgggggcctcaccaagttctgcagggaaatgaacttacttgtccttaagcagaagccaggctgtgaggggaaatagatctcacctcctttctctgcaggcatctgtttgtttgtgtcttagaacttggatccttgacttcaatgatgcagtggataatgatgggagaaagggggtagggtgctgaccctggtataagaagtactctgaaattctgatcatgttaaaatgtgttacctcacttgtggtgctgggtcccctcatcctctctaagaagatgtgatccattactgaacatgaggtgcccctcttacccaaggaatttataacatgactctggctccacagtggtttctagttcttcccccacaagcgaaagagctgtttgcaactttggagttgctgtagactgaactgtagcttgtagctgttgaattaagtccaaaatctaaggaatgcgatggacttgtgcaaagggatccagaagagacactttttagttgatgtttcaagaatagggagagagaggatgggtaccatggaataccaaagtgaaggactttgtgtcattcagtaaaattttcttttttcatatcctaagtagctcccattccctcaccttttcaatcagaattaacaaattcaagccttcagtaaagtagggatgcttttaacttttattattaattattttgagatcttaaaaaaatagtagttctcccttattatttttgtgggcattgaaaagctcatttcacagtaccagagatttttactgggagtatatattttggaggtaggcatagagggagccctaccccttccacaaattacgttactcaagagacagctaaaataaaatgcattatctccccagaccagagacagtggccaaaataaaaaatcatggggctggaaatttcccaaatcaaaccagcctcctggtgcttgaaggtttcattcactattacctgcacaggatgtaaagaaaagtcacagtaggcactctttaccagggaaataaggcagtatttgaatcacaagatatattttttatctgcaaccatggatccaatgatctgtagagctttttcactcattaactgtcaggatatgaaggactgacagtctgtaaagatatttatatttttgtatagttgttttcatagatttctcaaaggctgaagttttcaacctagaagatgagatttgtattgagtatagaaatgatgtttcctatctagtttgtaaataatcatggtgcacttgaggggtctcttggaaactcctagggggtcaagaatcactattctgaaactgtatagactgggatttagctgctgcattttgcctttcttaaataattatattttggaatgtaacccctgttctgtcttcattgacaggatttgcttgtgttgttaaaacactaacacaagagcttccagtgcctgggccgtgcctaggtgatgctatttcttctatatctcctgtcttctttatcccaaatcccactcagcatatcttcagacctaggttgtaagaccaactttggattggatctagccagtgaattattatttccatggttggttccctttctgttaactctggtaatcaacagattgaaaacggtggaagaacttcttctgaaaattgcagtgggagcaaattcttgttggttttgtgctgcttgcctttctagatctgctcatcagcacttaaccttccctcctctaaaggttactaaagaagcctgaagtaggtaaagagtgctcctcagcttcttatccttccactctttacccagcagatttcattcaatgccttagccaaggagtccagcacctgtctcccctgctaataattgtccttagagatgctagtactttaatccaggtatagcagtttcccgttattttcttgcttgtcgttcccctacatttcctcctgatttcccaagactctctttgtggcttttgagggtcagccaaggagcaggcaagtgagtgaacaatcctcaggaaaagaaggaccattttagcttaacacttccttttttttttttttttttttaagaagaatataggtaaacaggtaatgattcttgattggagataccatttgactcttgatgagagttgtacgaagatggaaatgagggatgattccaggcgttttagggggaaggctgcagataccattctaacccccaagatactgtgttctcaagacctcttagaactaggtgttgtcagggataatttgaggagggcttagtcttcagaacaatcctgcagtcttgacagaaatctaaaatctccaaaaactcctaccctttaaccttaccctagggggaactgatctatgaatattacatgtgtgattatgaaaggtgaagttgagtgagaggagttgaggaacgtggaagacagtgagctctcaccctaacactataagaagcatgatctcaatagaccaataattcacctttttatacatctgtaaataaatggaatgtttttaagaatataattatgtcagatttagcattttcttttatatattaaatatatatatctttccttttctgctttcgaaaagtgactatttttttagaaatctaagaacagaagtttggtgattgaaaggtagaatatataaacctgaaataaagcagttaaaacaattaaagcagaacttggtgttgggaggtttgtgccaacttggagtggagaattctaattccctaagacatatttgagagaggtgccactgaagtggttttatcataggaatcctttccttttctctaagtttctgatatgccatttgggggaggttttcgatgttctaatccttgtagcatgttttacatggaggcttcaaaattgtgtgcaacctgatggcaagtatttgttttagaagtcattctaaaatcattctggtgtcagtatgagcaaggcagttcacctgttaaccttggggagtaaaggtacacaaacaca

SEQ ID NO: 328526 - DNA, 6760 bp, Homo sapiens
gttgatgtttcaagaatagggagagagaggatgggtaccatggaataccaaagtgaaggactttgtgtcattcagtaaaattttcttttttcatatcctaagtagctcccattccctcaccttttcaatcagaattaacaaattcaagccttcagtaaagtagggatgcttttaacttttattattaattattttgagatcttaaatagtggttctcctactcttagacctgtctcaaacacacaacttcagggacatcggatggtcttgcagcctgttaggagtccaagtggaatgaacttattcaggcaccctaatgggcagattgtccagcttctacctttgcatcagcttcgaggctctaatacccagcccaacttacagcctgtcatgtttcggaacccagggtctgtgatgggaatccggttacctgctccttccaaaccctctgagactccgccatcttccacttcgtcctctgctttctctgtcatgaatcctgtaattcaagctgttgggtcttcttcagcagtgaatgttatcactcaggcaccatcattgctttcctctggagctagttttgtgtctcaggctggtacattgaccctgaggatttctcctcctgaaccacaaagctttgcaagtaaaacaggctctgaaaccaaaataacttatagctcaggaggacagcctgttggtacagccagtcttattcctctccagtctggtagttttgccttgttacagctcccaggacaaaagcctgttcctagctccattcttcagcatgttgcttcccttcagatgaaaagagaatctcagaatccagaccagaaagatgaaacaaactcaataaaaagagagcaagaaacgaagaaggttctacagtcagaaggagaggctgtagaccctgaggctaatgtaataaaacaaaactcaggagctgctacctcagaagaaactctgaatgattccttggaagataggggtgatcatttggatgaagaatgccttccagaagaaggttgtgcaactgtcaaaccatctgagcattcctgtatcactgggtcacatacagatcaagattataaagatgttaatgaagaatatggggctaggaatcgtaagagttccaaagaaaaagtggctgttctggaagttaggaccatttctgaaaaagccagtaataagacagtccaaaatttaagtaaagtacagcatcaaaaacttggtgatgtgaaggtggaacagcagaaaggatttgacaatccagaagaaaactcaagtgaatttccagtcacctttaaggaagaaagtaaatttgaattgtcaggaagcaaagttatggagcagcaatctaatctacagccagaggccaaagagaaggaatgtggagactctctggagaaagacagggaaagatggagaaaacatctgaagggccccttaaccaggaaatgtgttggagcttcacaggaatgtaagaaagaggcagacgagcagttaattaaagaaacaaagacatgtcaggaaaattcagatgtgtttcagcaagaacaaggcatctctgacttacttggaaaaagtggaattactgaagatgccagagttttgaaaactgaatgtgattcttggagtaggatttctaatccttcagccttctccattgttcctaggagagctgcaaaaagcagcagagggaatggacattttcagggtcacttactgctacctggagaacagatacaaccaaagcaagagaagaagggtgggagaagcagtgctgacttcactgttttggatttggaagaagatgatgaagatgataatgagaaaactgatgattctattgatgaaattgtggatgttgtttctgactaccagagtgaggaggttgatgatgtagaaaagaataactgtgtagaatacattgaggatgatgaggagcacgtggacattgagactgtagaagagctctcagaggaaattaatggttgctcacctgaagaccacagcgggcccacacacagtcattcaaacagccgtcctgtactcacatctctgcagatgaaaaagcagctgaaaggagtcgaaaggctccaccaattcctctaaaactgaagcctgattactggagtgacaaactacagaaagaagcagaagcgtttgcttattatcgccggacacacactgccaatgagcggcggcggcgtggtgaaatgagggatctctttgagaaattaaagatcacattgggattacttcattcttccaaggtttccaaaagtctcattcttactcgagccttcagtgaaattcagggactaacagatcaggcagacaaattgataggacagaaaaatctcctgactcgaaaacggaatattctgatacggaaagtatcgtctctttcaggtaagacagaagaagtggtcctgaagaagctagagtatatttatgcaaaacagcaagcactagaggcacaaaaaagaaaaaagaagatgggatcagatgagtttgacatatctcccagaattagcaaacagcaggaaggatcttctgcatcatctgtagatcttggacagatgtttataaataacaggagggggaaacctttgattctttccagaaaaaaagaccaggccacagaaaatacctcacccttgaacactccacacacctctgccaaccttgtgatgactccgcaagggcaattgctcaccctaaaaggtcccctattctcaggaccagtggtagctgtttctcctgatctcttagaatctgatcttaagcctcaagttgccggtagtgctgtggctctaccagaaaatgacgacttatttatgatgccacgaattgttaatgtgacatcattggccacagagggaggtttggtagatatgggtggcagcaaatatcctcatgaagttcctgatagcaagccatctgaccatctgaaagacaccgtcaggaatgaagataattccttagaggataagggtagaatctcttccagaggaaacagagatggcagagtgacgttgggtccaacgcaggtttttctggcaaacaaagattctggttatccacaaatagttgacgtttccaatatgcagaaagcacaagagttcttacctaaaaagatttctggtgatatgagagggattcagtataaatggaaagagagtgaatcaagaggggagagagtgaagtcaaaggattcttcatttcataaattaaagatgaaagatctcaaggactcaagcatagagatggaactgaggaaagtaacatcagctatagaggaagcagctcttgattccagtgaactgctgactaacatggaagatgaggatgatactgatgagacactgacttcactgctcaatgaaattgcctttcttaatcaacaactaaatgatgactctgttggcctggctgaactacccagctctatggatacagagttcccaggggatgctcggcgggcttttattagtaaggttcctcctggaagcagagcaactttccaggttgagcacttgggaactggtttgaaagagttgcctgatgttcaaggggagagtgactctatcagtcccctcctcttgcacttggaagacgatgacttttctgagaatgaaaaacaacttgcagaaccagcctctgagccagatgtccttaagattgttattgactctgaaataaaggattccctcctttccaacaagaaagctattgatggagggaagaatacttctggcctccctgcagagcccgaaagtgtgtcctcaccccccaccctacacatgaagactggcttggagaacagcaacagcacagacactttgtggaggcctatgccaaagttggcccctctaggtttaaaagtagctaatccttccagtgatgcagatggtcagagtctcaaggtgatgccttgtttggcacctatagctgccaaagttgggtcagttggacacaaaatgaacttaacagggaatgaccaggaaggccgggaaagcaaggtgatgcctacattggcacctgttgtggctaaattgggcaactcgggggcctcaccaagttctgcagggaaatgaacttacttgtccttaagcagaagccaggctgtgaggggaaatagatctcacctcctttctctgcaggcatctgtttgtttgtgtcttagaacttggatccttgacttcaatgatgcagtggataatgatgggagaaagggggtagggtgctgaccctggtataagaagtactctgaaattctgatcatgttaaaatgtgttacctcacttgtggtgctgggtcccctcatcctctctaagaagatgtgatccattactgaacatgaggtgcccctcttacccaaggaatttataacatgactctggctccacagtggtttctagttcttcccccacaagcgaaagagctgtttgcaactttggagttgctgtagactgaactgtagcttgtagctgttgaattaagtccaaaatctaaggaatgcgatggacttgtgcaaagggatccagaagagacactttttagttgatgtttcaagaatagggagagagaggatgggtaccatggaataccaaagtgaaggactttgtgtcattcagtaaaattttcttttttcatatcctaagtagctcccattccctcaccttttcaatcagaattaacaaattcaagccttcagtaaagtagggatgcttttaacttttattattaattattttgagatcttaaaaaaatagtagttctcccttattatttttgtgggcattgaaaagctcatttcacagtaccagagatttttactgggagtatatattttggaggtaggcatagagggagccctaccccttccacaaattacgttactcaagagacagctaaaataaaatgcattatctccccagaccagagacagtggccaaaataaaaaatcatggggctggaaatttcccaaatcaaaccagcctcctggtgcttgaaggtttcattcactattacctgcacaggatgtaaagaaaagtcacagtaggcactctttaccagggaaataaggcagtatttgaatcacaagatatattttttatctgcaaccatggatccaatgatctgtagagctttttcactcattaactgtcaggatatgaaggactgacagtctgtaaagatatttatatttttgtatagttgttttcatagatttctcaaaggctgaagttttcaacctagaagatgagatttgtattgagtatagaaatgatgtttcctatctagtttgtaaataatcatggtgcacttgaggggtctcttggaaactcctagggggtcaagaatcactattctgaaactgtatagactgggatttagctgctgcattttgcctttcttaaataattatattttggaatgtaacccctgttctgtcttcattgacaggatttgcttgtgttgttaaaacactaacacaagagcttccagtgcctgggccgtgcctaggtgatgctatttcttctatatctcctgtcttctttatcccaaatcccactcagcatatcttcagacctaggttgtaagaccaactttggattggatctagccagtgaattattatttccatggttggttccctttctgttaactctggtaatcaacagattgaaaacggtggaagaacttcttctgaaaattgcagtgggagcaaattcttgttggttttgtgctgcttgcctttctagatctgctcatcagcacttaaccttccctcctctaaaggttactaaagaagcctgaagtaggtaaagagtgctcctcagcttcttatccttccactctttacccagcagatttcattcaatgccttagccaaggagtccagcacctgtctcccctgctaataattgtccttagagatgctagtactttaatccaggtatagcagtttcccgttattttcttgcttgtcgttcccctacatttcctcctgatttcccaagactctctttgtggcttttgagggtcagccaaggagcaggcaagtgagtgaacaatcctcaggaaaagaaggaccattttagcttaacacttccttttttttttttttttttttaagaagaatataggtaaacaggtaatgattcttgattggagataccatttgactcttgatgagagttgtacgaagatggaaatgagggatgattccaggcgttttagggggaaggctgcagataccattctaacccccaagatactgtgttctcaagacctcttagaactaggtgttgtcagggataatttgaggagggcttagtcttcagaacaatcctgcagtcttgacagaaatctaaaatctccaaaaactcctaccctttaaccttaccctagggggaactgatctatgaatattacatgtgtgattatgaaaggtgaagttgagtgagaggagttgaggaacgtggaagacagtgagctctcaccctaacactataagaagcatgatctcaatagaccaataattcacctttttatacatctgtaaataaatggaatgtttttaagaatataattatgtcagatttagcattttcttttatatattaaatatatatatctttccttttctgctttcgaaaagtgactatttttttagaaatctaagaacagaagtttggtgattgaaaggtagaatatataaacctgaaataaagcagttaaaacaatt

SEQ ID NO: 328527 - DNA, 255 bp, Homo sapiens
aatgccatccagggtctagctttttataagcaaagagtcctgaaagactgacttccatcattaccatattttggacagaagctgatttccctgggctgaagacattttgcaagttggaggagtatttgcatgacaagcaacaggagtttttggacatctggaggcttagttccaacgtgaccttaactgtgccctcaatgccacattcatctgctcagtctagtctgcaaatgatcctcttctgtggaccactga

SEQ ID NO: 328528 - DNA, 407 bp, Homo sapiens
cgcctcactgcctgtccccagagccctctgagctgactcatcctccctgcctagcaggcttcacttcacttcctcaatctccctgttctggccaagttgagaggactcccttcctgcaaaaatgtgttctaaggttagctcatggtttttgccgtattaatctctatgccagaactgttatttattaattttttctttaagtttcctcactttttaacttaaattatttaggaaggaaactttgtccttaccatgaatggaaaacaatatcaattgctgtatatagaaagtacacactgaaataaacatatagtcatctactgccgtaaaagatgttcatctgtagagcacccacaatcctctggccaccaccagcttgtggctcccccttccctgcctgttccctc

SEQ ID NO: 328529 - DNA, 365 bp, Homo sapiens
atccaagggagagattctgactggctgagattagctcaggaaaggattgtgggttggtgtaacttaagccaggtgcttacacctggattggtcagttatgggtagagagacgggaccatgttgtccaaatgtgcttctctagaggtgcctctgtacatggtgctggagtcagtagagaacccagaaagttaggagttgggcctgcagcagtgggttctaggaagcaaaacctaatcttcctgccatttggatgaggcactacttacaggcataaattcttgacagccatagaagctgcctgggtcatccaaagttgacactttatagtgatcacaaaatctcaaatatggatacgtatttacaat

SEQ ID NO: 328530 - DNA, 246 bp, Homo sapiens
ccttcccagcctctggtatcaatcattctaggagagttgcctcgtctgatactcacgggtttgataaaccagttttcctgaagaagaaactggggttccaatgccactctttccacaaacaaccaagagccctccaggcactaacttgctcagagttctggtactgcagctcggcctcccaaagtgctgggattataggcgtgagccactgcacccggcctggacctggtgagtctggaagacctg

SEQ ID NO: 328531 - DNA, 277 bp, Homo sapiens
cttccaactgccaacatactaatacacaatacttggcagagctgtccaaagcaagtcagaccacatacagtatacctaaatcctgacacctccaactctcttaacaaataattttttttctccgtggtaatggtctcttggaagttaaaatatagtgagaaatgtgtaaacataccaatatattaaaataagacaagtgaatccctttaagaatcatgaaaaataattaacaacaacaacaaaagaaaaaaacagcaggaggcccagtgaggtggtt

SEQ ID NO: 328532 - DNA, 474 bp, Homo sapiens
tttcaagaagcctaacaaatcccaagcaggataaataaaatctctaatctagatacatcaaagacaaacttcagaccagagacaaagagaaaaatcataaagatagctagagaaacattagaataccttcaaagatacaatagttagattgacagttgacttctcaacaacagtggaagccagtagagtgctatcttgaatgttgatgaaggacaataactgcctacctaggattctaaacccagtgaaaatatatgtcagaatgagggctaattaaagacattttcaatcaaaagagagttttctgtcagcacatcttattgaaggaaattctaaataatgtatttcagatggaaggaaagtgatctcagatggaaagtctgaaaagcagaaagaaatgaagaacaaaaaaagtggtaaagatgtgaaaagactagtcacagggagaagacattgctatatatatttaatagc

SEQ ID NO: 328533 - DNA, 554 bp, Homo sapiens
cattgactacccttcttgataaccacaggttgtgtaactgtccagtgggttcatcttgcccgctgtctagacagagctgatttatcaatacagggaaattgcaatagaaaaaaagtaattcacgcagaaccagccgtgcaggagagcggagttttattattactcacatcagtctcccagaagactcggggatcagagattttaaggataatttggtgggtagtgggctgtgaatcaggagtgctgattggttggctctggaatgaaatcatagggagtcaaagctgtcctctcatgctgattcagttcctgggtagggggccacagaactggttggcaggtccaggtggggccatccagttgttagaaatgcaaatacctgaaaagatatctcaaaaggccaatcttaggttcacgatagtgatgtaagttgcaaatcttatgacctccagaataatggctggtaacatttagaattccagcccctctcatccgtacttggtggctggtggcctttcattcgttttacaagaacagtttagcttttgggaagg

SEQ ID NO: 328534 - DNA, 359 bp, Homo sapiens
tactgctcttttagaaaaaccattctcagtgtactgggatacggtactagtttgagaggctttttaaaagttaaaactctgggagcagctgatgttgctatggcctttatcttgccacactgacccacatgggacaatcatctcagcctgggcagaggagacatgcatagctggctccggggaaagcctaaactggcagcaggataggctgcctcctccaaggacctaattcctagataggctgtctttttttttcttcagtagagacaaagtctggctatgtggcctaggctgctctcgaatttctcagctcgagcaatcctccggcctcagcctcccagagtacaaccggccggtgg

SEQ ID NO: 328535 - DNA, 173 bp, Homo sapiens
agtgcccacccccactgctgctctgctggaagcatagccctgccaccattgcattgaactgtaccactgccgctgagcaaagtcaggatccccaactctgaccattgtatcatgcccggctggctctgcaatgtcattttgatgtgtcttcagtatggatttttttttttttt

SEQ ID NO: 328536 - DNA, 3480 bp, Homo sapiens
  misc_feature (1045)..(1045): n is a, c, g, or t
tacgagggcaggataaatgaaacattctgtctccaatctaagttcggcttggggcctcagaatatgaaggtaaaggggcggggacggactgactgcccctgccccttgcttcagaatcaagtcacatggcgggaacgctctatggagcagattgcttcctttgtacatgccctaggcccgtgttcagcaggcctcagagaagcagaggtgctggcctctcgtctccagaggctgccagctactaagggaggtggaagcaactacccctgggggtggactgctctgggccgggcccgacgtcaggcgtaggggactgaggtgaatcagacgtggtggctgcattgaggaatgctcagtgtagttggggtgtttgtagcgctttctgctgagcatggtctttcctctcagaggggtttctaggcacgttgaagggagctgccgttcagagcatcggagaggtgccagggacgtgagctgctgccagtctgacgtgaacagaaggtgggaatagctggcgctgccgtgcgttgataggagcacagtgtccgctgcgaaggggcggctagggctggagaaagatggcctgatagaagcgcctccacaggcgccgattcagcgaagccccagcagccccgcggggcaggcgaggatcacatgcagctcggagaagaggaggcacttgcccctctgcctgagctgggaggtggtggccagctgcacacagggctgtcccaggatgctgacgaggcgggaccagccacaggccggcagcgctgcactgtgactccctttcacggggcccagccttgtctctggccttccgggactgagtcaggaggcgagggctacgttgctgccccagcacagtcgggccaggtgtggggaaaggcgggagggaggtgtgctgtgctctgagcagcctggcaggccctggagaggcaggaagccactgcaaacttcagaaactgggtgctgcttcctctcggtgaagttgtgttttgctaatctctgataatcaggtcagggatacagaaggaagagttgnccctgggtggctgctgtctttagacttgtcgggctccctctggtacagaagtgcctctcggattttgctgcctggtcttctctcttatggacatggagtagctctcaggctcttatggtacagctctaagaaggaacacttcttgcattgtctagtgaagtttctgggtttatggaagggaaactgacaaactggagccggcacagatggacactgggtaaagagaatgcagcctgtccctggctgcagtgccaggtgtggcctttcctgtgacagcaagtcacgtgctgtggctccagcttcataggaaggctcttgtctgtcaggcagtggagttacttacagacaagagccttgctcaggccagccctgcccctgcctacaggcacaggtgctttgccatctgtcccgttttcctgcttagggaaccaagatggtcagaaagttgcttgactctaacctaaatatttctgccgcttttgcgagtcagactctttttcttttccttgttcatggaaatggatcaaggagtaggagttttagatagctagggaggtggtgagaagttccgtctccacctgtaatttacaagtcgtgtcttaggtttccagcctctttcctctgttctgggtatctcgtgctctccaccctttagggattttggtgtggtgggtccgtggcaagacactcgatccagacacacgcatttccgaggcacttccatgtcacttaccaagcctccttgtgtgtggatatcacttcactggctccctcaggctgcagccctgacccccaaggtagtgatggcagctggtgcatgaggtttgatttggaagtagccaggcaagccctggttgcaaaaaatacctcttctattccgacagcgggccagaggccgctgccattagacgcatccctctacttacccccgatcacttttcatggtcaggccggccttgcacaagcaggttctgttcactgcgcacccccatttcttagatggggtactgagcactgcttttcccttagctcacttcatgtggcagcttctcagggatgggacctaccatggctgtgggagatgctttgctactacttactacctttccgagggaggagggctcatttttagaaatgttactggggagccaaattgtaggcctccgaccagagggcctcgctctctccatctcccaggaaccaagggtagctctggctctctgaggagctgtctccagcctccaggtggacgtcctttccagcataccagggcttatggaggcaaaatgaaagctggtccacgtgggaactccctactgttgtcctttccttgggcagacaccatatactttttagctcctagcagtgtttatcccgttttccccaaagcatccttggactcaggcctttcatcctggacccatctgtctggcctgttgtgctgagcctttggtctaagtggttggttggtcccagccacttcttcaaaagaaggtttcctgaggtaaccataaattagggcaatcgtacttccaggaacagtgaggctgatgggcctgttcccaagggtactttggcagggggtgctggggaaggggctggcctagggcaggtttcatcataccgttagccctgcagccccatgcctgtgtgtcctggtttacccgccgtgtagtggtcctgcaggagtggagcctgtaggacttgcttctcagcggctccaagcagaactctgtctgggaaggtgggaggtgcagccagtctagacctgaagccctcacactaaggactaaggtaggcctgctcagccttagcccttcgttcaggcccaagggtgggggaggcaggaggaggctgagcgtagtcgtggatagaaacctttccctaccgcacggttacacacatggcatgggactcctggctgtagctcactcgggtctactgaagaccaagttggtttttagaaatctatttaaaatatctatcatgtatctatttactgtgtttttctgaatacgcaagtgtaaatagtataatttgcagtgcaaaatccttggcaataactttgtgtattatgtttaaaaacactggaaaccgtgaccaccatggactgcccttcccctctgaggcaattattacatgtaggactctgaactttaaaccttcagcgtgactgaagcagcagcctgcacatgtggatggtcatcagtgcctcgcccagagatacctggccttcatccaaagggaccctgctgccacaagtcctccaggcagcacccgcactgtggctccttcgcactgagtatgttggactctgccatagactgaccctcttgtctggctgctgcagtttgtctgtaatgccctgacatgttgcattctccccatttggataaataaaaacaaacaaatgcttctgtcacaaaaaaaaaaaa

SEQ ID NO: 328537 - DNA, 437 bp, Homo sapiens
aggctacgttaaaggaatatggtagccatcatctgggaggtaaaaaacctatggaaattggcacctggggaactcaggaaagctgaaagcaccttgaaatgagatggaaggaccagaaggttaaggctggtgaagaggagacctggagagaacgtgggcactcctgccagcgtgactgaagcagcagcctgcacatgtggatggtcatcagtgcctcgcccagagatacctggccttcatccaaagggaccctgctgccacaagtcctccaggcagcacccgcactgtggctccttcgcactgagtatgttggactctgccatagactgaccctcttgtctggctgctgcagtttgtctgtaatgccctgacatgttgcattctccccatttggataaataaaaacaaacaaatgcttctgtcacaaaaaaaaaaaa

SEQ ID NO: 328538 - DNA, 3426 bp, Homo sapiens
  misc_feature (1045)..(1045): n is a, c, g, or t
tacgagggcaggataaatgaaacattctgtctccaatctaagttcggcttggggcctcagaatatgaaggtaaaggggcggggacggactgactgcccctgccccttgcttcagaatcaagtcacatggcgggaacgctctatggagcagattgcttcctttgtacatgccctaggcccgtgttcagcaggcctcagagaagcagaggtgctggcctctcgtctccagaggctgccagctactaagggaggtggaagcaactacccctgggggtggactgctctgggccgggcccgacgtcaggcgtaggggactgaggtgaatcagacgtggtggctgcattgaggaatgctcagtgtagttggggtgtttgtagcgctttctgctgagcatggtctttcctctcagaggggtttctaggcacgttgaagggagctgccgttcagagcatcggagaggtgccagggacgtgagctgctgccagtctgacgtgaacagaaggtgggaatagctggcgctgccgtgcgttgataggagcacagtgtccgctgcgaaggggcggctagggctggagaaagatggcctgatagaagcgcctccacaggcgccgattcagcgaagccccagcagccccgcggggcaggcgaggatcacatgcagctcggagaagaggaggcacttgcccctctgcctgagctgggaggtggtggccagctgcacacagggctgtcccaggatgctgacgaggcgggaccagccacaggccggcagcgctgcactgtgactccctttcacggggcccagccttgtctctggccttccgggactgagtcaggaggcgagggctacgttgctgccccagcacagtcgggccaggtgtggggaaaggcgggagggaggtgtgctgtgctctgagcagcctggcaggccctggagaggcaggaagccactgcaaacttcagaaactgggtgctgcttcctctcggtgaagttgtgttttgctaatctctgataatcaggtcagggatacagaaggaagagttgnccctgggtggctgctgtctttagacttgtcgggctccctctggtacagaagtgcctctcggattttgctgcctggtcttctctcttatggacatggagtagctctcaggctcttatggtacagctctaagaaggaacacttcttgcattgtctagtgaagtttctgggtttatggaagggaaactgacaaactggagccggcacagatggacactgggtaaagagaatgcagcctgtccctggctgcagtgccaggtgtggcctttcctgtgacagcaagtcacgtgctgtggctccagcttcataggaaggctcttgtctgtcaggcagtggagttacttacagacaagagccttgctcaggccagccctgcccctgcctacaggcacaggtgctttgccatctgtcccgttttcctgcttagggaaccaagatggtcagaaagttgcttgactctaacctaaatatttctgccgcttttgcgagtcagactctttttcttttccttgttcatggaaatggatcaaggagtaggagttttagatagctagggaggtggtgagaagttccgtctccacctgtaatttacaagtcgtgtcttaggtttccagcctctttcctctgttctgggtatctcgtgctctccaccctttagggattttggtgtggtgggtccgtggcaagacactcgatccagacacacgcatttccgaggcacttccatgtcacttaccaagcctccttgtgtgtggatatcacttcactggctccctcaggctgcagccctgacccccaaggtagtgatggcagctggtgcatgaggtttgatttggaagtagccaggcaagccctggttgcaaaaaatacctcttctattccgacagcgggccagaggccgctgccattagacgcatccctctacttacccccgatcacttttcatggtcaggccggccttgcacaagcaggttctgttcactgcgcacccccatttcttagatggggtactgagcactgcttttcccttagctcacttcatgtggcagcttctcagggatgggacctaccatggctgtgggagatgctttgctactacttactacctttccgagggaggagggctcatttttagaaatgttactggggagccaaattgtaggcctccgaccagagggcctcgctctctccatctcccaggaaccaagggtagctctggctctctgaggagctgtctccagcctccaggtggacgtcctttccagcataccagggcttatggaggcaaaatgaaagctggtccacgtgggaactccctactgttgtcctttccttgggcagacaccatatactttttagctcctagcagtgtttatcccgttttccccaaagcatccttggactcaggcctttcatcctggacccatctgtctggcctgttgtgctgagcctttggtctaagtggttggttggtcccagccacttcttcagtgaggctgatgggcctgttcccaagggtactttggcagggggtgctggggaaggggctggcctagggcaggtttcatcataccgttagccctgcagccccatgcctgtgtgtcctggtttacccgccgtgtagtggtcctgcaggagtggagcctgtaggacttgcttctcagcggctccaagcagaactctgtctgggaaggtgggaggtgcagccagtctagacctgaagccctcacactaaggactaaggtaggcctgctcagccttagcccttcgttcaggcccaagggtgggggaggcaggaggaggctgagcgtagtcgtggatagaaacctttccctaccgcacggttacacacatggcatgggactcctggctgtagctcactcgggtctactgaagaccaagttggtttttagaaatctatttaaaatatctatcatgtatctatttactgtgtttttctgaatacgcaagtgtaaatagtataatttgcagtgcaaaatccttggcaataactttgtgtattatgtttaaaaacactggaaaccgtgaccaccatggactgcccttcccctctgaggcaattattacatgtaggactctgaactttaaaccttcagcgtgactgaagcagcagcctgcacatgtggatggtcatcagtgcctcgcccagagatacctggccttcatccaaagggaccctgctgccacaagtcctccaggcagcacccgcactgtggctccttcgcactgagtatgttggactctgccatagactgaccctcttgtctggctgctgcagtttgtctgtaatgccctgacatgttgcattctccccatttggataaataaaaacaaacaaatgcttctgtcacaaaaaaaaaaaa

SEQ ID NO: 328539 - DNA, 3426 bp, Homo sapiens
  misc_feature (1045)..(1045): n is a, c, g, or t
tacgagggcaggataaatgaaacattctgtctccaatctaagttcggcttggggcctcagaatatgaaggtaaaggggcggggacggactgactgcccctgccccttgcttcagaatcaagtcacatggcgggaacgctctatggagcagattgcttcctttgtacatgccctaggcccgtgttcagcaggcctcagagaagcagaggtgctggcctctcgtctccagaggctgccagctactaagggaggtggaagcaactacccctgggggtggactgctctgggccgggcccgacgtcaggcgtaggggactgaggtgaatcagacgtggtggctgcattgaggaatgctcagtgtagttggggtgtttgtagcgctttctgctgagcatggtctttcctctcagaggggtttctaggcacgttgaagggagctgccgttcagagcatcggagaggtgccagggacgtgagctgctgccagtctgacgtgaacagaaggtgggaatagctggcgctgccgtgcgttgataggagcacagtgtccgctgcgaaggggcggctagggctggagaaagatggcctgatagaagcgcctccacaggcgccgattcagcgaagccccagcagccccgcggggcaggcgaggatcacatgcagctcggagaagaggaggcacttgcccctctgcctgagctgggaggtggtggccagctgcacacagggctgtcccaggatgctgacgaggcgggaccagccacaggccggcagcgctgcactgtgactccctttcacggggcccagccttgtctctggccttccgggactgagtcaggaggcgagggctacgttgctgccccagcacagtcgggccaggtgtggggaaaggcgggagggaggtgtgctgtgctctgagcagcctggcaggccctggagaggcaggaagccactgcaaacttcagaaactgggtgctgcttcctctcggtgaagttgtgttttgctaatctctgataatcaggtcagggatacagaaggaagagttgnccctgggtggctgctgtctttagacttgtcgggctccctctggtacagaagtgcctctcggattttgctgcctggtcttctctcttatggacatggagtagctctcaggctcttatggtacagctctaagaaggaacacttcttgcattgtctagtgaagtttctgggtttatggaagggaaactgacaaactggagccggcacagatggacactgggtaaagagaatgcagcctgtccctggctgcagtgccaggtgtggcctttcctgtgacagcaagtcacgtgctgtggctccagcttcataggaaggctcttgtctgtcaggcagtggagttacttacagacaagagccttgctcaggccagccctgcccctgcctacaggcacaggtgctttgccatctgtcccgttttcctgcttagggaaccaagatggtcagaaagttgcttgactctaacctaaatatttctgccgcttttgcgagtcagactctttttcttttccttgttcatggaaatggatcaaggagtaggagttttagatagctagggaggtggtgagaagttccgtctccacctgtaatttacaagtcgtgtcttaggtttccagcctctttcctctgttctgggtatctcgtgctctccaccctttagggattttggtgtggtgggtccgtggcaagacactcgatccagacacacgcatttccgaggcacttccatgtcacttaccaagcctccttgtgtgtggatatcacttcactggctccctcaggctgcagccctgacccccaaggtagtgatggcagctggtgcatgaggtttgatttggaagtagccaggcaagccctggttgcaaaaaatacctcttctattccgacagcgggccagaggccgctgccattagacgcatccctctacttacccccgatcacttttcatggtcaggccggccttgcacaagcaggttctgttcactgcgcacccccatttcttagatggggtactgagcactgcttttcccttagctcacttcatgtggcagcttctcagggatgggacctaccatggctgtgggagatgctttgctactacttactacctttccgagggaggagggctcatttttagaaatgttactggggagccaaattgtaggcctccgaccagagggcctcgctctctccatctcccaggaaccaagggtagctctggctctctgaggagctgtctccagcctccaggtggacgtcctttccagcataccagggcttatggaggcaacaccatatactttttagctcctagcagtgtttatcccgttttccccaaagcatccttggactcaggcctttcatcctggacccatctgtctggcctgttgtgctgagcctttggtctaagtggttggttggtcccagccacttcttcaaaagaaggtttcctgaggtaaccataaattagggcaatcgtacttccaggaacagtgaggctgatgggcctgttcccaagggtactttggcagggggtgctggggaaggggctggcctagggcaggtttcatcataccgttagccctgcagccccatgcctgtgtgtcctggtttacccgccgtgtagtggtcctgcaggagtggagcctgtaggacttgcttctcagcggctccaagcagaactctgtctgggaaggtgggaggtgcagccagtctagacctgaagccctcacactaaggactaaggtaggcctgctcagccttagcccttcgttcaggcccaagggtgggggaggcaggaggaggctgagcgtagtcgtggatagaaacctttccctaccgcacggttacacacatggcatgggactcctggctgtagctcactcgggtctactgaagaccaagttggtttttagaaatctatttaaaatatctatcatgtatctatttactgtgtttttctgaatacgcaagtgtaaatagtataatttgcagtgcaaaatccttggcaataactttgtgtattatgtttaaaaacactggaaaccgtgaccaccatggactgcccttcccctctgaggcaattattacatgtaggactctgaactttaaaccttcagcgtgactgaagcagcagcctgcacatgtggatggtcatcagtgcctcgcccagagatacctggccttcatccaaagggaccctgctgccacaagtcctccaggcagcacccgcactgtggctccttcgcactgagtatgttggactctgccatagactgaccctcttgtctggctgctgcagtttgtctgtaatgccctgacatgttgcattctccccatttggataaataaaaacaaacaaatgcttctgtcacaaaaaaaaaaaa

SEQ ID NO: 328540 - DNA, 320 bp, Homo sapiens
aaaaacctaattatccaaatgaaactatacgtcaagagctactttatgcatataattgagaaagtataatatcgggtctcttccttcaaaaagactgaatgcttgaagcaatttgaggataccagtccacaaggggttttacaacaaaagggcacatcttgctcaagttcagccctctggcttaaaccccatggtgcatatgcagtctttatcagagctccctggcctacacagcacctttctgggaagtagaaaaggcatgacccaaggaacagccccatggtggcagggcatgagcctttgtgggccaaaaaagtcag

SEQ ID NO: 328541 - DNA, 394 bp, Homo sapiens
gggtgcatgggagcacctgctctcccgtctccctccttgaagcagctcggcagcaagagccatgtctgtagagtcccagtatctaggctctcaaaatggcaccctgctgaggctgctccaggttcagatgcatgtgagattttgtattggtttcctttctggagcaatgcctctgtgcaatgtttaggcagctccgaatgtcaggcccaggccctggcccagtgggtcgaggtttccttccgtggccaagattataaaagtttgttttggagccctagggggttctctcttactgtttccccacatcaggagcctctcccgactctcagtcggttcccagctgggcaagctgcctcgaatcctctccttacttctcatgtttcccatatctttt

SEQ ID NO: 328542 - DNA, 327 bp, Homo sapiens
gtgggggaggggagactgcagagggcagggagctgggcaaggtccagacataacaaaggctgaacgatgaagatgaagaagggggctgtttcaactaatcaggaattggcgatgggttgtgaatcaggacctaccaagccctggagtaaaggcaggaatcaaacaagctacagctggacgctgatgattgtgaagttctgcacgaggctacaaaaagcctgttgcccaaggctgggctgctgggacacgtggctcagctgagctgtgtggggagcacgtgaggctgggtcagctatgagctcagccaagtggtcccccaccaaaact

SEQ ID NO: 328543 - DNA, 589 bp, Homo sapiens
caagttcaatataatgacaacactagttagagttttcaagcactttctccgataagcactttatatgcattgtgtcatttaacaattgcattgactttatgaagtagacatgattatacccattttcataaagaagaaactgaagcacaaggtcaaacaatgagtaaaaagccaactcaatactgcagtccaacttatagaattaagttgccttctagcttggattctgggagagagttgataaagggcactattaaatgaccatcacacatctcttctagtaccagtgtggctattcaatggcttaaccagttctggcactgaaacgactgggcaaaaatcagaccatttgagtttagtccctgtccaggtctcagaacccacattaatctccccactgtcactactccactgcctagaaagactcctatcctttctggtatcctcatatcagagaggttcttatcatccatgttctcacttggaattcctcaccatagaccacaatcactcttgctttgccactggaactgttcatttatttctaacagtttctactatatcctcccaatgttggtggagggatctt

SEQ ID NO: 328544 - DNA, 437 bp, Homo sapiens
tatacttggttctaattagtggttgtttattagaattaatagtatttacagggaagaaagctcttaaagttagatgtttaatatgtggctttttttttcattttgcttacattaaacataattatagttggcattcatttgcatttttattttgcagtctcttgttttcagcagccactgtaaagcagtgagtggctactcagaccaggttgtccatcagcggagatcagctacctcctcgctgcgtcgctgcctgctcactgagctgccatcttttttgtgtgtggccagtccacgacaaaatactgcagcgcttggagcggttacgcttccttcagctagagcaggaacatacgtgtcctcaggaaggacgcgctgaacgcttaagggggcagcccctgaaggtactgtagtttcagaggttaatgaagcaagaa

SEQ ID NO: 328545 - DNA, 4164 bp, Homo sapiens
gactgagtctcaccatgtaggtcaggctggtcttaaactcccgaactcagagataatccacctgcctccacctcccaaagtgccgggattaaaggcgtgagccaacgcgcacggcctcctggggtgctgggattacaggcgtgagccacggcgcctggccttcttattgtactttctaaatttccccatagtctgcatgtatgacttttataatcataaagtgaaaaataaaatgcctttttaaaaattaattgaagtttgagaacatcgtgtcatttgttttaaatgacattgagagccatgccgaaaacaaatctgctattgatgagaatcaactttctcgcttacacatgattttgaagccatttatgctgaggagaatcaagaaagatgtggaaaatgaattatctgacaagattgagattctaatgtattgccaactgaccagccgacagaagctgctatatcaggcactaaagaacaaaatttccattgaggatttattgcagtcttctatgggctctacccaacaagcacagaacaccaccagcagcctcatgaatctggtcatgcagtttaggaaggtgtgtaatcacccggagttatttgaacggcaagaaacttggtctccatttcatatttccctaaagccataccacatttcaaagtttatctaccgtcatggacagatcagggtcttcaatcattcacgagacaggtggttaagggttctttctccatttgcaccagactatatccaacggtctctctttcacagaaaaggtattaatgaagaaagctgtttctctttccttcgctttattgatatatctccagcagaaatggcaaaccttatgcttcagggacttttggccagatggttagctcttttcctgtctctgaaagcctcctacaggctccatcagctacgctcctggggagcgccagaaggggagagccaccagagatacctgaggaacaaggatttccttcttggggttaattttccactctcctttccaaacctttgcagctgccctttgttaaagtctcttgttttcagcagccactgtaaagcagtgagtggctactcagaccaggttgtccatcagcggagatcagctacctcctcgctgcgtcgctgcctgctcactgagctgccatcttttttgtgtgtggccagtccacgagttaccgcagtgccattggattcttactgcaatgaccgaagtgcagaatatgaaaggcgagttctgaaggaaggagggagtctggcagccaagcagtgtttgttgaatggggcccctgaactggctgcagactggctaaatagacgatcacagttcttcccagagccagctggaggtctgtggagcatcagacctcagaatggctggtctttcatcaggattccaggcaaggagagcctcatcactgacagtggaaagctgtatgcccttgatgtcctgctgactcggctcaagtctcaagggcatagggtccttatctactcccagatgaccaggatgatagacctactggaggaatacatggtttacaggaagcatacctacatgaggcttgatggctcatccaagatctcggagaggcgagacatggttgctgattttcagaacaggaatgacatctttgtgttcctgttaagcacacgagctggaggactgggtatcaatctcactgctgcagacacagtgattttctatgatagcgactggaaccccactgtggaccagcaggccatggacagggcccaccgcttagggcagacaaagcaggttactgtgtaccggctcatctgtaaaggcaccattgaagaacgcattctgcaaagagccaaggagaagagtgagattcagcggatggtgatttcaggtgggaacttcaaaccagataccttgaaacccaaagaggtggttagtcttcttctagacgacgaagagttggagaagaaactgaggctgcggcaggaagagaaacggcaacaggaggaaaccaaccgagtgaaagagcgcaagcggaagcgggaaaagtatgcagagaagaagaaaaaagaagatgaattggatgggaaaaggagaaaagagggtgtgaacctggtgatcccatttgttccctcggctgataactccaacctctctgctgacggagatgactccttcattagcgtggactcagccatgccaagccctttcagtgagatctccatcagcagtgagctgcacactggctccattcccctggacgagagcagcagtgacatgctggtcattgtggatgacccagcctcctcagcccctcagtctcgagctaccaactctcccgcatccataacaggctccgtctcagataccgtgaatggaatttccattcaggaaatgccagctgcaggacgtggtcactcagcccgaagccgaggccgccccaaaggttcaggaagcacagccaaaggagcagggaagggccggagccgaaagtccacggcaggcagtgctgctgcaatggcaggagccaaagccggggctgcagcggcctctgcagctgcctatgccgcatacgggtacaacgtgtctaaaggaatctccgccagcagtcctctgcagacatcccttgttcggcctgctggccttgctgactttggaccttcaagcgcctcttctcctttgagttcccctttgagcaagggaaataatgttcctgggaatcccaagaacctccacatgaccagcagcctagccccagactctctggtccggaaacagggcaaaggcaccaacccctctggaggacggtaaccatctgggccctccgacttccttcaaccaaaccagggctagagtcctgacctgccagtggtctttggatggcttgcccgtgcagcatcttgcatcctgagtcagaagtggaaatgtccagcaggggaaggacaggcaggtggatggtgtgagcacttttatcatctgtgtctcatcaggagcatctggggtgcctgtaggaggaaggccacagggcatggatcagccccactgcatctcaagtgaactgtatagccaagtcttaaacctctcacggggcaagcctgacacagaccccctttagatgctcaggcatactgtttccatcccgattccactcttcggctctgacacgtcccttgcaaagtctccgcaggtgctgtgaagagccttccatggtagagatttctcttaagagtgtgatttctcatagggctagtaagggagattgtatacctgttgtccacagtcttcaggcagctccccaggtctctgaaccccagagtgtcatcattggagagagcagtgactgcgagagatggtggaggccgctaagcatggtagaggctagaggaagtctatccacaggcagttgtgttcccagcaattcctcccatcctgcatggttcacaccaagagaaccttcagatcctaccagcaaccgtagcaccttccacccaggggactcccagaagccagtaaagagaccaggagccacctcaatcagcaggacagcctcactgcccctcttgcagagtcccctttgcccatcctgaatgcacagtctccctgctcatgcccttcagtcccctgcttggctgtatgcactgtctatattgcactgagagaggaagggacagcaggagtgaggtgaagagggcggagagagggggcaggctcggcaccggccctcccagcccggccagcctgagcttgctgccctccagtagagacagaggggcagtgtttgcatgggaggtgtttctgcctgtccctgcctgatgtccctggtggagcaggtacctccgggcgggcaagcctctgatttgcacacctgaaaatcgcggaattgagtttcgatagattgatttttaaaacttttttggagtagggggtataggggaatcatttaatttaaatcattaagattcccctgctcaaacccagattcctgtgtacagatgctatttagagggaatcagaaaaatgccaagccttttctctttgaatgtgctatttttataactgaacttgtacatatgtataaagagagacacatcttccttttactaactggataaaaaaatcttaaataaaatggagtgagataattttatgtaaaaaaaaaaaa

SEQ ID NO: 328546 - DNA, 3710 bp, Homo sapiens
caaacagtgttcgttggaagatcctcttacagttccagtgtcggaatcggcttttgctaaccgggaccccaattcagaacaccatggcagagctttgggctctgctgcatttcattatgccaacattatttgattcacatgaggaatttaatgaatggttttccaaggacattgagagccatgccgaaaacaaatctgctattgatgagaatcaactttctcgcttacacatgattttgaagccatttatgctgaggagaatcaagaaagatgtggaaaatgaattatctgacaagattgagattctaatgtattgccaactgaccagccgacagaagctgctatatcaggcactaaagaacaaaatttccattgaggatttattgcagtcttctatgggctctacccaacaagcacagaacaccaccagcagcctcatgaatctggtcatgcagtttaggaaggtgtgtaatcacccggagttatttgaacggcaagaaacttggtctccatttcatatttccctaaagccataccacatttcaaagtttatctaccgtcatggacagatcagggtcttcaatcattcacgagacaggtggttaagggttctttctccatttgcaccagactatatccaacggtctctctttcacagaaaaggtattaatgaagaaagctgtttctctttccttcgctttattgatatatctccagcagaaatggcaaaccttatgcttcagggacttttggccagatggttagctcttttcctgtctctgaaagcctcctacaggctccatcagctacgctcctggggagcgccagaaggggagagccaccagagatacctgaggaacaaggatttccttcttggggttaattttccactctcctttccaaacctttgcagctgccctttgttaaagtctcttgttttcagcagccactgtaaagcagtgagtggctactcagaccaggttgtccatcagcggagatcagctacctcctcgctgcgtcgctgcctgctcactgagctgccatcttttttgtgtgtggccagtccacgagttaccgcagtgccattggattcttactgcaatgaccgaagtgcagaatatgaaaggcgagttctgaaggaaggagggagtctggcagccaagcagtgtttgttgaatggggcccctgaactggctgcagactggctaaatagacgatcacagttcttcccagagccagctggaggtctgtggagcatcagacctcagaatggctggtctttcatcaggattccaggcaaggagagcctcatcactgacagtggaaagctgtatgcccttgatgtcctgctgactcggctcaagtctcaagggcatagggtccttatctactcccagatgaccaggatgatagacctactggaggaatacatggtttacaggaagcatacctacatgaggcttgatggctcatccaagatctcggagaggcgagacatggttgctgattttcagaacaggaatgacatctttgtgttcctgttaagcacacgagctggaggactgggtatcaatctcactgctgcagacacagtgattttctatgatagcgactggaaccccactgtggaccagcaggccatggacagggcccaccgcttagggcagacaaagcaggttactgtgtaccggctcatctgtaaaggcaccattgaagaacgcattctgcaaagagccaaggagaagagtgagattcagcggatggtgatttcaggtgggaacttcaaaccagataccttgaaacccaaagaggtggttagtcttcttctagacgacgaagagttggagaagaaactgaggctgcggcaggaagagaaacggcaacaggaggaaaccaaccgagtgaaagagcgcaagcggaagcgggaaaagtatgcagagaagaagaaaaaagaagatgaattggatgggaaaaggagaaaagagggtgtgaacctggtgatcccatttgttccctcggctgataactccaacctctctgctgacggagatgactccttcattagcgtggactcagccatgccaagccctttcagtgagatctccatcagcagtgagctgcacactggctccattcccctggacgagagcagcagtgacatgctggtcattgtggatgacccagcctcctcagcccctcagtctcgagctaccaactctcccgcatccataacaggctccgtctcagataccgtgaatggaatttccattcaggaaatgccagctgcaggacgtggtcactcagcccgaagccgaggccgccccaaaggttcaggaagcacagccaaaggagcagggaagggccggagccgaaagtccacggcaggcagtgctgctgcaatggcaggagccaaagccggggctgcagcggcctctgcagctgcctatgccgcatacgggtacaacgtgtctaaaggaatctccgccagcagtcctctgcagacatcccttgttcggcctgctggccttgctgactttggaccttcaagcgcctcttctcctttgagttcccctttgagcaagggaaataatgttcctgggaatcccaagaacctccacatgaccagcagcctagccccagactctctggtccggaaacagggcaaaggcaccaacccctctggaggacggtaaccatctgggccctccgacttccttcaaccaaaccagggctagagtcctgacctgccagtggtctttggatggcttgcccgtgcagcatcttgcatcctgagtcagaagtggaaatgtccagcaggggaaggacaggcaggtggatggtgtgagcacttttatcatctgtagtgtcatcattggagagagcagtgactgcgagagatggtggaggccgctaagcatggtagaggctagaggaagtctatccacaggcagttgtgttcccagcaattcctcccatcctgcatggttcacaccaagagaaccttcagatcctaccagcaaccgtagcaccttccacccaggggactcccagaagccagtaaagagaccaggagccacctcaatcagcaggacagcctcactgcccctcttgcagagtcccctttgcccatcctgaatgcacagtctccctgctcatgcccttcagtcccctgcttggctgtatgcactgtctatattgcactgagagaggaagggacagcaggagtgaggtgaagagggcggagagagggggcaggctcggcaccggccctcccagcccggccagcctgagcttgctgccctccagtagagacagaggggcagtgtttgcatgggaggtgtttctgcctgtccctgcctgatgtccctggtggagcaggtacctccgggcgggcaagcctctgatttgcacacctgaaaatcgcggaattgagtttcgatagattgatttttaaaacttttttggagtagggggtataggggaatcatttaatttaaatcattaagattcccctgctcaaacccagattcctgtgtacagatgctatttagagggaatcagaaaaatgccaagccttttctctttgaatgtgctatttttataactgaacttgtacatatgtataaagagagacacatcttccttttactaactggataaaaaaatcttaaataaaatggagtgagataattttatgtaaaaaaaaaaaa

SEQ ID NO: 328547 - DNA, 2331 bp, Homo sapiens
aagaacataagcaaaatacagctgataaaattctaccaaaagatcagatttttcaattttccctaaaaatagaaaaaatctcaatgcatgttccataaaaatacaaacaccatgacgcctctaggggttacaaaaatgtgaaaaatgcgcacaaagcaaacagaaaaactgaagagacagcaaaaagagaggaaaaacaagctggcagaactcagaaaaaaaatagaaagaagaaaaaagaagatgaattggatgggaaaaggagaaaagagggtgtgaacctggtgatcccatttgttccctcggctgataactccaacctctctgctgacggagatgactccttcattagcgtggactcagccatgccaagccctttcagtgagatctccatcagcagtgagctgcacactggctccattcccctggacgagagcagcagtgacatgctggtcattgtggatgacccagcctcctcagcccctcagtctcgagctaccaactctcccgcatccataacaggctccgtctcagataccgtgaatggaatttccattcaggaaatgccagctgcaggacgtggtcactcagcccgaagccgaggccgccccaaaggttcaggaagcacagccaaaggagcagggaagggccggagccgaaagtccacggcaggcagtgctgctgcaatggcaggagccaaagccggggctgcagcggcctctgcagctgcctatgccgcatacgggtacaacgtgtctaaaggaatctccgccagcagtcctctgcagacatcccttgttcggcctgctggccttgctgactttggaccttcaagcgcctcttctcctttgagttcccctttgagcaagggaaataatgttcctgggaatcccaagaacctccacatgaccagcagcctagccccagactctctggtccggaaacagggcaaaggcaccaacccctctggaggacggtaaccatctgggccctccgacttccttcaaccaaaccagggctagagtcctgacctgccagtggtctttggatggcttgcccgtgcagcatcttgcatcctgagtcagaagtggaaatgtccagcaggggaaggacaggcaggtggatggtgtgagcacttttatcatctgtgtctcatcaggagcatctggggtgcctgtaggaggaaggccacagggcatggatcagccccactgcatctcaagtgaactgtatagccaagtcttaaacctctcacggggcaagcctgacacagaccccctttagatgctcaggcatactgtttccatcccgattccactcttcggctctgacacgtcccttgcaaagtctccgcaggtgctgtgaagagccttccatggtagagatttctcttaagagtgtgatttctcatagggctagtaagggagattgtatacctgttgtccacagtcttcaggcagctccccaggtctctgaaccccagagtgtcatcattggagagagcagtgactgcgagagatggtggaggccgctaagcatggtagaggctagaggaagtctatccacaggcagttgtgttcccagcaattcctcccatcctgcatggttcacaccaagagaaccttcagatcctaccagcaaccgtagcaccttccacccaggggactcccagaagccagtaaagagaccaggagccacctcaatcagcaggacagcctcactgcccctcttgcagagtcccctttgcccatcctgaatgcacagtctccctgctcatgcccttcagtcccctgcttggctgtatgcactgtctatattgcactgagagaggaagggacagcaggagtgaggtgaagagggcggagagagggggcaggctcggcaccggccctcccagcccggccagcctgagcttgctgccctccagtagagacagaggggcagtgtttgcatgggaggtgtttctgcctgtccctgcctgatgtccctggtggagcaggtacctccgggcgggcaagcctctgatttgcacacctgaaaatcgcggaattgagtttcgatagattgatttttaaaacttttttggagtagggggtataggggaatcatttaatttaaatcattaagattcccctgctcaaacccagattcctgtgtacagatgctatttagagggaatcagaaaaatgccaagccttttctctttgaatgtgctatttttataactgaacttgtacatatgtataaagagagacacatcttccttttactaactggataaaaaaatcttaaataaaatggagtgagataattttatgtaaaaaaaaaaaa

SEQ ID NO: 328548 - DNA, 196 bp, Homo sapiens
ataatgcttaaaataagagtgtgatttaaacccaaaattgagaatccaagttagaaaaccactggttatctgccttaaacagatagaagtgatacttggaaaataaacatcaggggatatggccaccttaattaagagagtgaggattatgattaccacaggtacttcatcaggtcttaattcattttcttgatag

SEQ ID NO: 328549 - DNA, 395 bp, Homo sapiens
gccgcatacgggtacaacgtgtctaaaggtacagaagcccagggtggctgcagactttgttctggtcagagacagtctagaaattctgtcagtcaggtagaacatgtaggaaaccctgaagccgggagctttcttcctagagccccaattggggttcttcttctttgtaataagcactgttgactcaccccttgccctcctgacggtacagggctgtctgtggattggaagtagttgtaaaaagggagagctgaattgtgaactgtactactttaaacattctgaatttttcttgctttggggatttgttttcttcctaggctttcatttctgagatccacattttagtaatccaaattagcatagttaacgttcattcagctgtgtgatttatc

SEQ ID NO: 328550 - DNA, 471 bp, Homo sapiens
gttaccgcagtgccattggattcttactgcaatgaccgaagtgcagaatatgaaaggcgagttctgaaggaaggagggagtctggcagccaagcagtgtttgttgaatggggcccctgaactggctgcagactggctaaatagacgatcacagttcttcccagagccagctggaggtctgtggagcatcagacctcagaatggctggtctttcatcaggattccaggtgagttctcaatcctcttggaatgtgttcctcgctttggcaaggggagaaccagggttatcttcatgtggtcctttcagatatttggaatttactgttcttgaggtttctgcttccttttttggccttagtaattcataggtaagaatattagtaatttatgatgagtggagagagaaatgtttttagatttgtgcttaaatacactcctttgacatgcttacagctgagaaagaaatgccact

SEQ ID NO: 328551 - DNA, 4044 bp, Homo sapiens
caaacagtgttcgttggaagatcctcttacagttccagtgtcggaatcggcttttgctaaccgggaccccaattcagaacaccatggcagagctttgggctctgctgcatttcattatgccaacattatttgattcacatgaggaatttaatgaatggttttccaaggacattgagagccatgccgaaaacaaatctgctattgatgagaatcaactttctcgcttacacatgattttgaagccatttatgctgaggagaatcaagaaagatgtggaaaatgaattatctgacaagattgagattctaatgtattgccaactgaccagccgacagaagctgctatatcaggcactaaagaacaaaatttccattgaggatttattgcagtcttctatgggctctacccaacaagcacagaacaccaccagcagcctcatgaatctggtcatgcagtttaggaaggtgtgtaatcacccggagttatttgaacggcaagaaacttggtctccatttcatatttccctaaagccataccacatttcaaagtttatctaccgtcatggacagatcagggtcttcaatcattcacgagacaggtggttaagggttctttctccatttgcaccagactatatccaacggtctctctttcacagaaaaggtattaatgaagaaagctgtttctctttccttcgctttattgatatatctccagcagaaatggcaaaccttatgcttcagggacttttggccagatggttagctcttttcctgtctctgaaagcctcctacaggctccatcagctacgctcctggggagcgccagaaggggagagccaccagagatacctgaggaacaaggatttccttcttggggttaattttccactctcctttccaaacctttgcagctgccctttgttaaagtctcttgttttcagcagccactgtaaagcagtgagtggctactcagaccaggttgtccatcagcggagatcagctacctcctcgctgcgtcgctgcctgctcactgagctgccatcttttttgtgtgtggccagtccacgagttaccgcagtgccattggattcttactgcaatgaccgaagtgcagaatatgaaaggcgagttctgaaggaaggagggagtctggcagccaagcagtgtttgttgaatggggcccctgaactggctgcagactggctaaatagacgatcacagttcttcccagagccagctggaggtctgtggagcatcagacctcagaatggctggtctttcatcaggattccaggcaaggagagcctcatcactgacagtggaaagctgtatgcccttgatgtcctgctgactcggctcaagtctcaagggcatagggtccttatctactcccagatgaccaggatgatagacctactggaggaatacatggtttacaggaagcatacctacatgaggcttgatggctcatccaagatctcggagaggcgagacatggttgctgattttcagaacaggaatgacatctttgtgttcctgttaagcacacgagctggaggactgggtatcaatctcactgctgcagacacagtgattttctatgatagcgactggaaccccactgtggaccagcaggccatggacagggcccaccgcttagggcagacaaagcaggttactgtgtaccggctcatctgtaaaggcaccattgaagaacgcattctgcaaagagccaaggagaagagtgagattcagcggatggtgatttcaggtgggaacttcaaaccagataccttgaaacccaaagaggtggttagtcttcttctagacgacgaagagttggagaagaaactgaggctgcggcaggaagagaaacggcaacaggaggaaaccaaccgagtgaaagagcgcaagcggaagcgggaaaagtatgcagagaagaagaaaaaagaagatgaattggatgggaaaaggagaaaagagggtgtgaacctggtgatcccatttgttccctcggctgataactccaacctctctgctgacggagatgactccttcattagcgtggactcagccatgccaagccctttcagtgagatctccatcagcagtgagctgcacactggctccattcccctggacgagagcagcagtgacatgctggtcattgtggatgacccagcctcctcagcccctcagtctcgagctaccaactctcccgcatccataacaggctccgtctcagataccgtgaatggaatttccattcaggaaatgccagctgcaggacgtggtcactcagcccgaagccgaggccgccccaaaggttcaggaagcacagccaaaggagcagggaagggccggagccgaaagtccacggcaggcagtgctgctgcaatggcaggagccaaagccggggctgcagcggcctctgcagctgcctatgccgcatacgggtacaacgtgtctaaaggaatctccgccagcagtcctctgcagacatcccttgttcggcctgctggccttgctgactttggaccttcaagcgcctcttctcctttgagttcccctttgagcaagggaaataatgttcctgggaatcccaagaacctccacatgaccagcagcctagccccagactctctggtccggaaacagggcaaaggcaccaacccctctggaggacggtaaccatctgggccctccgacttccttcaaccaaaccagggctagagtcctgacctgccagtggtctttggatggcttgcccgtgcagcatcttgcatcctgagtcagaagtggaaatgtccagcaggggaaggacaggcaggtggatggtgtgagcacttttatcatctgtgtctcatcaggagcatctggggtgcctgtaggaggaaggccacagggcatggatcagccccactgcatctcaagtgaactgtatagccaagtcttaaacctctcacggggcaagcctgacacagaccccctttagatgctcaggcatactgtttccatcccgattccactcttcggctctgacacgtcccttgcaaagtctccgcaggtgctgtgaagagccttccatggtagagatttctcttaagagtgtgatttctcatagggctagtaagggagattgtatacctgttgtccacagtcttcaggcagctccccaggtctctgaaccccagagtgtcatcattggagagagcagtgactgcgagagatggtggaggccgctaagcatggtagaggctagaggaagtctatccacaggcagttgtgttcccagcaattcctcccatcctgcatggttcacaccaagagaaccttcagatcctaccagcaaccgtagcaccttccacccaggggactcccagaagccagtaaagagaccaggagccacctcaatcagcaggacagcctcactgcccctcttgcagagtcccctttgcccatcctgaatgcacagtctccctgctcatgcccttcagtcccctgcttggctgtatgcactgtctatattgcactgagagaggaagggacagcaggagtgaggtgaagagggcggagagagggggcaggctcggcaccggccctcccagcccggccagcctgagcttgctgccctccagtagagacagaggggcagtgtttgcatgggaggtgtttctgcctgtccctgcctgatgtccctggtggagcaggtacctccgggcgggcaagcctctgatttgcacacctgaaaatcgcggaattgagtttcgatagattgatttttaaaacttttttggagtagggggtataggggaatcatttaatttaaatcattaagattcccctgctcaaacccagattcctgtgtacagatgctatttagagggaatcagaaaaatgccaagccttttctctttgaatgtgctatttttataactgaacttgtacatatgtataaagagagacacatcttccttttactaactggataaaaaaatcttaaataaaatggagtgagataattttatgtaaaaaaaaaaaa

SEQ ID NO: 328552 - DNA, 3810 bp, Homo sapiens
caaacagtgttcgttggaagatcctcttacagttccagtgtcggaatcggcttttgctaaccgggaccccaattcagaacaccatggcagagctttgggctctgctgcatttcattatgccaacattatttgattcacatgaggaatttaatgaatggttttccaaggacattgagagccatgccgaaaacaaatctgctattgatgagaatcaactttctcgcttacacatgattttgaagccatttatgctgaggagaatcaagaaagatgtggaaaatgaattatctgacaagattgagattctaatgtattgccaactgaccagccgacagaagctgctatatcaggcactaaagaacaaaatttccattgaggatttattgcagtcttctatgggctctacccaacaagcacagaacaccaccagcagcctcatgaatctggtcatgcagtttaggaaggtgtgtaatcacccggagttatttgaacggcaagaaacttggtctccatttcatatttccctaaagccataccacatttcaaagtttatctaccgtcatggacagatcagggtcttcaatcattcacgagacaggtggttaagggttctttctccatttgcaccagactatatccaacggtctctctttcacagaaaaggtattaatgaagaaagctgtttctctttccttcgctttattgatatatctccagcagaaatggcaaaccttatgcttcagggacttttggccagatggttagctcttttcctgtctctgaaagcctcctacaggctccatcagctacgctcctggggagcgccagaaggggagagccaccagagatacctgaggaacaaggatttccttcttggggttaattttccactctcctttccaaacctttgcagctgccctttgttaaagtctcttgttttcagcagccactgtaaagcagtgagtggctactcagaccaggttgtccatcagcggagatcagctacctcctcgctgcgtcgctgcctgctcactgagctgccatcttttttgtgtgtggccagtccacgagttaccgcagtgccattggattcttactgcaatgaccgaagtgcagaatatgaaaggcgagttctgaaggaaggagggagtctggcagccaagcagtgtttgttgaatggggcccctgaactggctgcagactggctaaatagacgatcacagttcttcccagagccagctggaggtctgtggagcatcagacctcagaatggctggtctttcatcaggattccaggcaaggagagcctcatcactgacagtggaaagctgtatgcccttgatgtcctgctgactcggctcaagtctcaagggcatagggtccttatctactcccagatgaccaggatgatagacctactggaggaatacatggtttacaggaagcatacctacatgaggcttgatggctcatccaagatctcggagaggcgagacatggttgctgattttcagaacaggaatgacatctttgtgttcctgttaagcacacgagctggaggactgggtatcaatctcactgctgcagacacagtgattttctatgatagcgactggaaccccactgtggaccagcaggccatggacagggcccaccgcttagggcagacaaagcaggttactgtgtaccggctcatctgtaaaggcaccattgaagaacgcattctgcaaagagccaaggagaagagtgagattcagcggatggtgatttcaggtgggaacttcaaaccagataccttgaaacccaaagaggtggttagtcttcttctagacgacgaagagttggagaagaaactgaggctgcggcaggaagagaaacggcaacaggaggaaaccaaccgagtgaaagagcgcaagcggaagcgggaaaagtatgcagagaagaagaaaaaagaagatgaattggatgggaaaaggagaaaagagggtgtgaacctggtgatcccatttgttccctcggctgataactccaacctctctgctgacggagatgactccttcattagcgtggactcagccatgccaagccctttcagtgagatctccatcagcagtgagctgcacactggctccattcccctggacgagagcagcagtgacatgctggtcattgtggatgacccagcctcctcagcccctcagtctcgagctaccaactctcccgcatccataacaggctccgtctcagataccgtgaatggaatttccattcaggaaatgccagctgcaggacgtggtcactcagcccgaagccgaggccgccccaaaggttcaggaagcacagccaaaggagcagggaagggccggagccgaaagtccacggcaggcagtgctgctgcaatggcaggagccaaagccggggctgcagcggcctctgcagctgcctatgccgcatacgggtacaacgtgtctaaaggaatctccgccagcagtcctctgcagacatcccttgttcggcctgctggccttgctgactttggaccttcaagcgcctcttctcctttgagttcccctttgagcaagggaaataatgttcctgggaatcccaagaacctccacatgaccagcagcctagccccagactctctggtccggaaacagggcaaaggcaccaacccctctggaggacggtaaccatctgggccctccgacttccttcaaccaaaccagggctagagtcctgacctgccagtggtctttggatggcttgcccgtgcagcatcttgcatcctgagtcagaagtggaaatgtccagcaggggaaggacaggcaggtggatggtgtgagcacttttatcatctgtgtctcatcaggagcatctggggtgcctgtaggaggaaggccacagggcatggatcagccccactgcatctcaagtgaactgtatagccaagtcttaaacctctcacggggcaagcctgacacagaccccctttagatgctcaggcatactgtttccatcccgattccactcttcggctctgacacgtcccttgcaaagtctccgcaggtgctgtgaagagccttccatggtagagatttctcttaagagtgtgatttctcatagggctagtaagggagattgtatacctgttgtccacagtcttcaggcagctccccaggtctctgaaccccagagtgtcatcattggagagagcagtgactgcgagagatggtggaggccgctaagcatggtagaggctagaggaagtctatccacaggcagttgtgttcccagcaattcctcccatcctgcatggttcacaccaagagaaccttcagatcctaccagcaaccgtagcaccttccacccaggggactcccagaagccagtaaagagaccaggagccacctcaatcagcagtgtttgcatgggaggtgtttctgcctgtccctgcctgatgtccctggtggagcaggtacctccgggcgggcaagcctctgatttgcacacctgaaaatcgcggaattgagtttcgatagattgatttttaaaacttttttggagtagggggtataggggaatcatttaatttaaatcattaagattcccctgctcaaacccagattcctgtgtacagatgctatttagagggaatcagaaaaatgccaagccttttctctttgaatgtgctatttttataactgaacttgtacatatgtataaagagagacacatcttccttttactaactggataaaaaaatcttaaataaaatggagtgagataattttatgtaaaaaaaaaaaa

SEQ ID NO: 328553 - DNA, 2056 bp, Homo sapiens
cgggcagtgacgcgacggcgggccgcgcggcgcatttccgcctctggcgaatggctcgtctgtagtgcacgccgcgggcccagctgcgaccccggccccgcccccgggaccccggccatggacgaactgttccccctcatcttcccggcagagccagcccaggcctctggcccctatgtggagatcattgagcagcccaagcagcggggcatgcgcttccgctacaagtgcgaggggcgctccgcgggcagcatcccaggcgagaggagcacagataccaccaagacccaccccaccatcaagatcaatggctacacaggaccagggacagtgcgcatctccctggtcaccaaggaccctcctcaccggcctcacccccacgagcttgtaggaaaggactgccgggatggcttctatgaggctgagctctgcccggaccgctgcatccacagtttccagaacctgggaatccagtgtgtgaagaagcgggacctggagcaggctatcagtcagcgcatccagaccaacaacaaccccttccaagttcctatagaagagcagcgtggggactacgacctgaatgctgtgcggctctgcttccaggtgacagtgcgggacccatcaggcaggcccctccgcctgccgcctgtcctttctcatcccatctttgacaatcgtgcccccaacactgccgagctcaagatctgccgagtgaaccgaaactctggcagctgcctcggtggggatgagatcttcctactgtgtgacaaggtgcagaaagtgagcccatggaattccagtacctgccagatacagacgatcgtcaccggattgaggagaaacgtaaaaggacatatgagaccttcaagagcatcatgaagaagagtcctttcagcggacccaccgacccccggcctccacctcgacgcattgctgtgccttcccgcagctcagcttctgtccccaagccagcaccccagccctatccctttacgtcatccctgagcaccatcaactatgatgagtttcccaccatggtgtttccttctgggcagatcagccaggcctcggccttggccccggcccctccccaagtcctgccccaggctccagcccctgcccctgctccagccatggtatcagctctgaggccccccgacccagctcctgctccactgggggccccggggctccccaatggcctcctttcaggagatgaagacttctcctccattgcggacatggacttctcagccctgctgagtcagatcagctcctaagggggtgacgcctgccctccccagagcactgggttgcaggggattgaagccctccaaaagcacttacggattctggtggggtgtgttccaactgcccccaactttgtggatgtcttccttggaggggggagccatattttattcttttattgtcagtatctgtatctctctctctttttggaggtgcttaagcagaagcattaacttctctggaaaggggggagctggggaaactcaaacttttcccctgtcctgatggtcagctcccttctctgtagggaactctggggtcccccatccccatcctccagcttctggtactctcctagagacagaagcaggctggaggtaaggcctttgagcccacaaagccttatcaagtgtcttccatcatggattcattacagcttaatcaaaataacgccccagataccagcccctgtatggcactggcattgtccctgtgcctaacaccagcgtttgaggggctggccttcctgccctacagaggtctctgccggctctttccttgctcaaccatggctgaaggaaaccagtgcaacagcactggctctctccaggatccagaaggggtttggtctgggacttccttgctctccctcttctcaagtgccttaatagtagggtaagttgttaagagtgggggagagcaggctggcagctctccagtcaggaggcatagtttttactgaacaatcaaagcacttggactcttgctctttctactctgaactaataaatctgttgccaagctg

SEQ ID NO: 328554 - DNA, 1186 bp, Homo sapiens
  misc_feature (22)..(22): n is a, c, g, or t
  misc_feature (62)..(63): n is a, c, g, or t
  misc_feature (71)..(71): n is a, c, g, or t
  misc_feature (74)..(74): n is a, c, g, or t
  misc_feature (77)..(77): n is a, c, g, or t
  misc_feature (84)..(84): n is a, c, g, or t
  misc_feature (86)..(86): n is a, c, g, or t
  misc_feature (91)..(91): n is a, c, g, or t
  misc_feature (93)..(93): n is a, c, g, or t
cgaatccggaccaccctccagnctacccagcctcttagttgcccccccccccaccccccagnnggaggacnttnagngcccgcncnctcantnatatgagactgggggccttgcttggcaacagcacagacccagctgtgttcacagacctggcatccgtcgacaactccgagtttcagcagctgctgaaccagggcatacctgtggccccccacacaactgagcccatgctgatggagtaccctgaggctataactcgcctagtgacaggggcccagaggccccccgacccagctcctgctccactgggggccccggggctccccaatggcctcctttcaggagatgaagacttctcctccattgcggacatggacttctcagccctgctgagtcagatcagctcctaagggggtgacgcctgccctccccagagcactgggttgcaggggattgaagccctccaaaagcacttacggattctggtggggtgtgttccaactgcccccaactttgtggatgtcttccttggaggggggagccatattttattcttttattgtcagtatctgtatctctctctctttttggaggtgcttaagcagaagcattaacttctctggaaaggggggagctggggaaactcaaacttttcccctgtcctgatggtcagctcccttctctgtagggaactctggggtcccccatccccatcctccagcttctggtactctcctagagacagaagcaggctggaggtaaggcctttgagcccacaaagccttatcaagtgtcttccatcatggattcattacagcttaatcaaaataacgccccagataccagcccctgtatggcactggcattgtccctgtgcctaacaccagcgtttgaggggctggccttcctgccctacagaggtctctgccggctctttccttgctcaaccatggctgaaggaaaccagtgcaacagcactggctctctccaggatccagaaggggtttggtctgggacttccttgctctccctcttctcaagtgccttaatagtagggtaagttgttaagagtgggggagagcaggctggcagctctccagtcaggaggcatagtttttactgaacaatcaaagcacttggactcttgctctttctactctgaactaataaatctgttgccaagctg

SEQ ID NO: 328555 - DNA, 676 bp, Homo sapiens
ggagaccggggttcgtttccccgagggggagccatattttattcttttattgtcagtatctgtatctctctctctttttggaggtgcttaagcagaagcattaacttctctggaaaggggggagctggggaaactcaaacttttcccctgtcctgatggtcagctcccttctctgtagggaactctggggtcccccatccccatcctccagcttctggtactctcctagagacagaagcaggctggaggtaaggcctttgagcccacaaagccttatcaagtgtcttccatcatggattcattacagcttaatcaaaataacgccccagataccagcccctgtatggcactggcattgtccctgtgcctaacaccagcgtttgaggggctggccttcctgccctacagaggtctctgccggctctttccttgctcaaccatggctgaaggaaaccagtgcaacagcactggctctctccaggatccagaaggggtttggtctgggacttccttgctctccctcttctcaagtgccttaatagtagggtaagttgttaagagtgggggagagcaggctggcagctctccagtcaggaggcatagtttttactgaacaatcaaagcacttggactcttgctctttctactctgaactaataaatctgttgccaagctg

SEQ ID NO: 328556 - DNA, 599 bp, Homo sapiens
caggtcatcctcccttgttttcactgcctcaggtgcccccaacactgccgagctcaagatctgccgagtgaaccgaaactctggcagctgcctcggtggggatgagatcttcctactgtgtgacaaggtgcagaaaggtatacatcaggaggcaggggtgggctcttgggagcaaggggtgaagctgagcagagaagtggagtgtcaggtaactggctttggatacttcctcctgtgcctcgggggcctcaggtgggccgaagggtgatgtatcagaagacaagcatcagaagttgagggggagaccatggagggttagacacactgacccacactgccaccgcatctcctgcagaggacattgaggtgtatttcacgggaccaggctgggaggcccgaggctccttttcgcaagctgatgtgcaccgacaagtggccattgtgttccggacccctccctacgcagaccccagcctgcaggctcctgtgcgtgtctccatgcagctgcggcggccttccgaccgggagctcagtgagcccatggaattccagtacctgccagatacaggtacacagctggggtggcagcatcagggcag

SEQ ID NO: 328557 - DNA, 2627 bp, Homo sapiens
cgggcagtgacgcgacggcgggccgcgcggcgcatttccgcctctggcgaatggctcgtctgtagtgcacgccgcgggcccagctgcgaccccggccccgcccccgggaccccggccatggacgaactgttccccctcatcttcccggcagagccagcccaggcctctggcccctatgtggagatcattgagcagcccaagcagcggggcatgcgcttccgctacaagtgcgaggggcgctccgcgggcagcatcccaggcgagaggagcacagataccaccaagacccaccccaccatcaagatcaatggctacacaggaccagggacagtgcgcatctccctggtcaccaaggaccctcctcaccggcctcacccccacgagcttgtaggaaaggactgccgggatggcttctatgaggctgagctctgcccggaccgctgcatccacagtttccagaacctgggaatccagtgtgtgaagaagcgggacctggagcaggctatcagtcagcgcatccagaccaacaacaaccccttccaagttcctatagaagagcagcgtggggactacgacctgaatgctgtgcggctctgcttccaggtgacagtgcgggacccatcaggcaggcccctccgcctgccgcctgtcctttctcatcccatctttgacaatcgtgcccccaacactgccgagctcaagatctgccgagtgaaccgaaactctggcagctgcctcggtggggatgagatcttcctactgtgtgacaaggtgcagaaagaggacattgaggtgtatttcacgggaccaggctgggaggcccgaggctccttttcgcaagctgatgtgcaccgacaagtggccattgtgttccggacccctccctacgcagaccccagcctgcaggctcctgtgcgtgtctccatgcagctgcggcggccttccgaccgggagctcagtgagcccatggaattccagtacctgccagatacagacgatcgtcaccggattgaggagaaacgtaaaaggacatatgagaccttcaagagcatcatgaagaagagtcctttcagcggacccaccgacccccggcctccacctcgacgcattgctgtgccttcccgcagctcagcttctgtccccaagccagcaccccagccctatccctttacgtcatccctgagcaccatcaactatgatgagtttcccaccatggtgtttccttctgggcagatcagccaggcctcggccttggccccggcccctccccaagtcctgccccaggctccagcccctgcccctgctccagccatggtatcagctctggcccaggccccagcccctgtcccagtcctagccccaggccctcctcaggctgtggccccacctgcccccaagcccacccaggctggggaaggaacgctgtcagaggccctgctgcagctgcagtttgatgatgaagacctgggggccttgcttggcaacagcacagacccagctgtgttcacagacctggcatccgtcgacaactccgagtttcagcagctgctgaaccagggcatacctgtggccccccacacaactgagcccatgctgatggagtaccctgaggctataactcgcctagtgacaggggcccagaggccccccgacccagctcctgctccactgggggccccggggctccccaatggcctcctttcaggagatgaagacttctcctccattgcggacatggacttctcagccctgctgagtcagatcagctcctaagggggtgacgcctgccctccccagagcactgggttgcaggggattgaagccctccaaaagcacttacggattctggtggggtgtgttccaactgcccccaactttgtggatgtcttccttggaggggggagccatattttattcttttattgtcagtatctgtatctctctctctttttggaggtgcttaagcagaagcattaacttctctggaaaggggggagctggggaaactcaaacttttcccctgtcctgatggtcagctcccttctctgtagggaactctggggtcccccatccccatcctccagcttctggtactctcctagagacagaagcaggctggaggtaaggcctttgagcccacaaagccttatcaagtgtcttccatcatggattcattacagcttaatcaaaataacgccccagataccagcccctgtatggcactggcattgtccctgtgcctaacaccagcgtttgaggggctggccttcctgccctacagaggtctctgccggctctttccttgctcaaccatggctgaaggaaaccagtgcaacagcactggctctctccaggatccagaaggggtttggtctgggacttccttgctctccctcttctcaagtgccttaatagtagggtaagttgttaagagtgggggagagcaggctggcagctctccagtcaggaggcatagtttttactgaacaatcaaagcacttggactcttgctctttctactctgaactaataaatctgttgccaagctgaaaaaaaaaaagaacagacacacacaggcaaaacaacaaacaaccaaaagaggacaaacacgagagggcgagaagaac

SEQ ID NO: 328558 - DNA, 2970 bp, Homo sapiens
cgggcagtgacgcgacggcgggccgcgcggcgcatttccgcctctggcgaatggctcgtctgtagtgcacgccgcgggcccagctgcgaccccggccccgcccccgggaccccggccatggacgaactgttccccctcatcttcccggcagagccagcccaggcctctggcccctatgtggagatcattgagcagcccaagcagcggggcatgcgcttccgctacaagtgcgaggggcgctccgcgggcagcatcccaggcgagaggagcacagataccaccaagacccaccccaccatcaagatcaatggctacacaggaccagggacagtgcgcatctccctggtcaccaaggaccctcctcaccggcctcacccccacgagcttgtaggaaaggactgccgggatggcttctatgaggctgagctctgcccggaccgctgcatccacagtttccagaacctgggaatccagtgtgtgaagaagcgggacctggagcaggctatcagtcagcgcatccagaccaacaacaaccccttccaagttcctatagaagagcagcgtggggactacgacctgaatgctgtgcggctctgcttccaggtgacagtgcgggacccatcaggcaggcccctccgcctgccgcctgtcctttctcatcccatctttgacaatcgtgcccccaacactgccgagctcaagatctgccgagtgaaccgaaactctggcagctgcctcggtggggatgagatcttcctactgtgtgacaaggtgcagaaagaggacattgaggtgtatttcacgggaccaggctgggaggcccgaggctccttttcgcaagctgatgtgcaccgacaagtggccattgtgttccggacccctccctacgcagaccccagcctgcaggctcctgtgcgtgtctccatgcagctgcggcggccttccgaccgggagctcagtgagcccatggaattccagtacctgccagatacagacgatcgtcaccggattgaggagaaacgtaaaaggacatatgagaccttcaagagcatcatgaagaagagtcctttcagcggacccaccgacccccggcctccacctcgacgcattgctgtgccttcccgcagctcagcttctgtccccaagccagcaccccagccctatccctttacgtcatccctgagcaccatcaactatgatgagtttcccaccatggtgtttccttctgggcagatcagccaggcctcggccttggccccggcccctccccaagtcctgccccaggctccagcccctgcccctgctccagccatggtatcagctctggcccaggccccagcccctgtcccagtcctagccccaggccctcctcaggctgtggccccacctgcccccaagcccacccaggctggggaaggaacgctgtcagaggccctgctgcagctgcagtttgatgatgaagacctgggggccttgcttggcaacagcacagacccagctgtgttcacagacctggcatccgtcgacaactccgagtttcagcagctgctgaaccagggcatacctgtggccccccacacaactgagcccatgctgatggagtaccctgaggctataactcgcctagtgacaggggcccagaggccccccgacccagctcctgctccactgggggccccggggctccccaatggcctcctttcaggagatgaagacttctcctccattgcggacatggacttctcagccctgctgagtcagatcagctcctaagggggtgacgcctgccctccccagagcactgggttgcaggggattgaagccctccaaaagcacttacggattctggtggggtgtgttccaactgcccccaactttgtggatgtcttccttggaggggggagccatattttattcttttattgtcagtatctgtatctctctctctttttggaggtgcttaagcagaagcattaacttctctggaaaggggggagctggggaaactcaaacttttcccctgtcctgatggtcagctcccttctctgtagggaactctggggtcccccatccccatcctccagcttctggtactctcctagagacagaagcaggctggaggtaaggcctttgagcccacaaagccttatcaagtgtcttccatcatggattcattacagcttaatcaaaataacgccccagataccagcccctgtatggcactggcattgtccctgtgcctaacaccagcgtttgaggggctggccttcctgccctacagaggtctctgccggctctttccttgctcaaccatggctgaaggaaaccagtgcaacagcactggctctctccaggatccagaaggggtttggtctgggacttccttgctctccctcttctcaagtgccttaatagtagggtaagttgttaagagtgggggagagcaggctggcagctctccagtcaggaggcatagtttttactgaacaatcaaagcacttggactcttgctctttctactctgaactaataaatctgttgccaagctgaaaaaaaaaaaaaaaaaaaaaaaaaaaaaaaaaaaaaaaaaaaaaaaaaaacacgcgcgcggggggtttttgttggggggggggcgagaaaaaggggggagtgtgaggagagggaggcgcgccgcgcgggggcgcgcccacgggtgtgtgtttctccgcgcgcccacctttttttgtgtgtgtacaccagagcgggggatagaatcatggcgcggcggctccccccacactatagaggagggggcgcggctatatataatcttcataataagaacgccgggtgatataccgccgcgtcttttatgatacctgccgcgcagaaaaacaggatccaccacaagagccagagacagagcacacaagcaaccagcgaacacacgacggaccggataaccacggtgtcatatacaccagataatga

SEQ ID NO: 328559 - DNA, 2729 bp, Homo sapiens
cgggcagtgacgcgacggcgggccgcgcggcgcatttccgcctctggcgaatggctcgtctgtagtgcacgccgcgggcccagctgcgaccccggccccgcccccgggaccccggccatggacgaactgttccccctcatcttcccggcagagccagcccaggcctctggcccctatgtggagatcattgagcagcccaagcagcggggcatgcgcttccgctacaagtgcgaggggcgctccgcgggcagcatcccaggcgagaggagcacagataccaccaagacccaccccaccatcaagatcaatggctacacaggaccagggacagtgcgcatctccctggtcaccaaggaccctcctcaccggcctcacccccacgagcttgtaggaaaggactgccgggatggcttctatgaggctgagctctgcccggaccgctgcatccacagtttccagaacctgggaatccagtgtgtgaagaagcgggacctggagcaggctatcagtcagcgcatccagaccaacaacaaccccttccaagttcctatagaagagcagcgtggggactacgacctgaatgctgtgcggctctgcttccaggtgacagtgcgggacccatcaggcaggcccctccgcctgccgcctgtcctttctcatcccatctttgacaatcgtgcccccaacactgccgagctcaagatctgccgagtgaaccgaaactctggcagctgcctcggtggggatgagatcttcctactgtgtgacaaggtgcagaaagaggacattgaggtgtatttcacgggaccaggctgggaggcccgaggctccttttcgcaagctgatgtgcaccgacaagtggccattgtgttccggacccctccctacgcagaccccagcctgcaggctcctgtgcgtgtctccatgcagctgcggcggccttccgaccgggagctcagtgagcccatggaattccagtacctgccagatacagacgatcgtcaccggattgaggagaaacgtaaaaggacatatgagaccttcaagagcatcatgaagaagagtcctttcagcggacccaccgacccccggcctccacctcgacgcattgctgtgccttcccgcagctcagcttctgtccccaagccagcaccccagccctatccctttacgtcatccctgagcaccatcaactatgatgagtttcccaccatggtgtttccttctgggcagatcagccaggcctcggccttggccccggcccctccccaagtcctgccccaggctccagcccctgcccctgctccagccatggtatcagctctggcccaggccccagcccctgtcccagtcctagccccaggccctcctcaggctgtggccccacctgcccccaagcccacccaggctggggaaggaacgctgtcagaggccctgctgcagctgcagtttgatgatgaagacctgggggccttgcttggcaacagcacagacccagctgtgttcacagacctggcatccgtcgacaactccgagtttcagcagctgctgaaccagggcatacctgtggccccccacacaactgagcccatgctgatggagtaccctgaggctataactcgcctagtgacaggggcccagaggccccccgacccagctcctgctccactgggggccccggggctccccaatggcctcctttcaggagatgaagacttctcctccattgcggacatggacttctcagccctgctgagtcagatcagctcctaagggggtgacgcctgccctccccagagcactgggttgcaggggattgaagccctccaaaagcacttacggattctggtggggtgtgttccaactgcccccaactttgtggatgtcttccttggaggggggagccatattttattcttttattgtcagtatctgtatctctctctctttttggaggtgcttaagcagaagcattaacttctctggaaaggggggagctggggaaactcaaacttttcccctgtcctgatggtcagctcccttctctgtagggaactctggggtcccccatccccatcctccagcttctggtactctcctagagacagaagcaggctggaggtaaggcctttgagcccacaaagccttatcaagtgtcttccatcatggattcattacagcttaatcaaaataacgccccagataccagcccctgtatggcactggcattgtccctgtgcctaacaccagcgtttgaggggctggccttcctgccctacagaggtctctgccggctctttccttgctcaaccatggctgaaggaaaccagtgcaacagcactggctctctccaggatccagaaggggtttggtctgggacttccttgctctccctcttctcaagtgccttaatagtagggtaagttgttaagagtgggggagagcaggctggcagctctccagtcaggaggcatagtttttactgaacaatcaaagcacttggactcttgctctttctactctgaactaataaatctgttgccaagctgaaaaaaaaaaaaaaaaaaaaaaaaaaaaaaaaaaaaaaaaaaaaaaaaaaacatataaaaccattaaatcaatacaaaattttaactcatccaaaataaaacatgttcccaaattttattcccattatactttttttgccctttctgctcaccaactatttgtccttttcctcttttggc

SEQ ID NO: 328560 - DNA, 2522 bp, Homo sapiens
cgggcagtgacgcgacggcgggccgcgcggcgcatttccgcctctggcgaatggctcgtctgtagtgcacgccgcgggcccagctgcgaccccggccccgcccccgggaccccggccatggacgagccagcccaggcctctggcccctatgtggagatcattgagcagcccaagcagcggggcatgcgcttccgctacaagtgcgaggggcgctccgcgggcagcatcccaggcgagaggagcacagataccaccaagacccaccccaccatcaagatcaatggctacacaggaccagggacagtgcgcatctccctggtcaccaaggaccctcctcaccggcctcacccccacgagcttgtaggaaaggactgccgggatggcttctatgaggctgagctctgcccggaccgctgcatccacagtttccagaacctgggaatccagtgtgtgaagaagcgggacctggagcaggctatcagtcagcgcatccagaccaacaacaaccccttccaagttcctatagaagagcagcgtggggactacgacctgaatgctgtgcggctctgcttccaggtgacagtgcgggacccatcaggcaggcccctccgcctgccgcctgtcctttctcatcccatctttgacaatcgtgcccccaacactgccgagctcaagatctgccgagtgaaccgaaactctggcagctgcctcggtggggatgagatcttcctactgtgtgacaaggtgcagaaagaggacattgaggtgtatttcacgggaccaggctgggaggcccgaggctccttttcgcaagctgatgtgcaccgacaagtggccattgtgttccggacccctccctacgcagaccccagcctgcaggctcctgtgcgtgtctccatgcagctgcggcggccttccgaccgggagctcagtgagcccatggaattccagtacctgccagatacagacgatcgtcaccggattgaggagaaacgtaaaaggacatatgagaccttcaagagcatcatgaagaagagtcctttcagcggacccaccgacccccggcctccacctcgacgcattgctgtgccttcccgcagctcagcttctgtccccaagccagcaccccagccctatccctttacgtcatccctgagcaccatcaactatgatgagtttcccaccatggtgtttccttctgggcagatcagccaggcctcggccttggccccggcccctccccaagtcctgccccaggctccagcccctgcccctgctccagccatggtatcagctctggcccaggccccagcccctgtcccagtcctagccccaggccctcctcaggctgtggccccacctgcccccaagcccacccaggctggggaaggaacgctgtcagaggccctgctgcagctgcagtttgatgatgaagacctgggggccttgcttggcaacagcacagacccagctgtgttcacagacctggcatccgtcgacaactccgagtttcagcagctgctgaaccagggcatacctgtggccccccacacaactgagcccatgctgatggagtaccctgaggctataactcgcctagtgacaggggcccagaggccccccgacccagctcctgctccactgggggccccggggctccccaatggcctcctttcaggagatgaagacttctcctccattgcggacatggacttctcagccctgctgagtcagatcagctcctaagggggtgacgcctgccctccccagagcactgggttgcaggggattgaagccctccaaaagcacttacggattctggtggggtgtgttccaactgcccccaactttgtggatgtcttccttggaggggggagccatattttattcttttattgtcagtatctgtatctctctctctttttggaggtgcttaagcagaagcattaacttctctggaaaggggggagctggggaaactcaaacttttcccctgtcctgatggtcagctcccttctctgtagggaactctggggtcccccatccccatcctccagcttctggtactctcctagagacagaagcaggctggaggtaaggcctttgagcccacaaagccttatcaagtgtcttccatcatggattcattacagcttaatcaaaataacgccccagataccagcccctgtatggcactggcattgtccctgtgcctaacaccagcgtttgaggggctggccttcctgccctacagaggtctctgccggctctttccttgctcaaccatggctgaaggaaaccagtgcaacagcactggctctctccaggatccagaaggggtttggtctgggacttccttgctctccctcttctcaagtgccttaatagtagggtaagttgttaagagtgggggagagcaggctggcagctctccagtcaggaggcatagtttttactgaacaatcaaagcacttggactcttgctctttctactctgaactaataaatctgttgccaagctg

SEQ ID NO: 328561 - DNA, 2451 bp, Homo sapiens
cgggcagtgacgcgacggcgggccgcgcggcgcatttccgcctctggcgaatggctcgtctgtagtgcacgccgcgggcccagctgcgaccccggccccgcccccgggaccccggccatggacgaactgttccccctcatcttcccggcagagcatcccaggcgagaggagcacagataccaccaagacccaccccaccatcaagatcaatggctacacaggaccagggacagtgcgcatctccctggtcaccaaggaccctcctcaccggcctcacccccacgagcttgtaggaaaggactgccgggatggcttctatgaggctgagctctgcccggaccgctgcatccacagtttccagaacctgggaatccagtgtgtgaagaagcgggacctggagcaggctatcagtcagcgcatccagaccaacaacaaccccttccaagttcctatagaagagcagcgtggggactacgacctgaatgctgtgcggctctgcttccaggtgacagtgcgggacccatcaggcaggcccctccgcctgccgcctgtcctttctcatcccatctttgacaatcgtgcccccaacactgccgagctcaagatctgccgagtgaaccgaaactctggcagctgcctcggtggggatgagatcttcctactgtgtgacaaggtgcagaaagaggacattgaggtgtatttcacgggaccaggctgggaggcccgaggctccttttcgcaagctgatgtgcaccgacaagtggccattgtgttccggacccctccctacgcagaccccagcctgcaggctcctgtgcgtgtctccatgcagctgcggcggccttccgaccgggagctcagtgagcccatggaattccagtacctgccagatacagacgatcgtcaccggattgaggagaaacgtaaaaggacatatgagaccttcaagagcatcatgaagaagagtcctttcagcggacccaccgacccccggcctccacctcgacgcattgctgtgccttcccgcagctcagcttctgtccccaagccagcaccccagccctatccctttacgtcatccctgagcaccatcaactatgatgagtttcccaccatggtgtttccttctgggcagatcagccaggcctcggccttggccccggcccctccccaagtcctgccccaggctccagcccctgcccctgctccagccatggtatcagctctggcccaggccccagcccctgtcccagtcctagccccaggccctcctcaggctgtggccccacctgcccccaagcccacccaggctggggaaggaacgctgtcagaggccctgctgcagctgcagtttgatgatgaagacctgggggccttgcttggcaacagcacagacccagctgtgttcacagacctggcatccgtcgacaactccgagtttcagcagctgctgaaccagggcatacctgtggccccccacacaactgagcccatgctgatggagtaccctgaggctataactcgcctagtgacaggggcccagaggccccccgacccagctcctgctccactgggggccccggggctccccaatggcctcctttcaggagatgaagacttctcctccattgcggacatggacttctcagccctgctgagtcagatcagctcctaagggggtgacgcctgccctccccagagcactgggttgcaggggattgaagccctccaaaagcacttacggattctggtggggtgtgttccaactgcccccaactttgtggatgtcttccttggaggggggagccatattttattcttttattgtcagtatctgtatctctctctctttttggaggtgcttaagcagaagcattaacttctctggaaaggggggagctggggaaactcaaacttttcccctgtcctgatggtcagctcccttctctgtagggaactctggggtcccccatccccatcctccagcttctggtactctcctagagacagaagcaggctggaggtaaggcctttgagcccacaaagccttatcaagtgtcttccatcatggattcattacagcttaatcaaaataacgccccagataccagcccctgtatggcactggcattgtccctgtgcctaacaccagcgtttgaggggctggccttcctgccctacagaggtctctgccggctctttccttgctcaaccatggctgaaggaaaccagtgcaacagcactggctctctccaggatccagaaggggtttggtctgggacttccttgctctccctcttctcaagtgccttaatagtagggtaagttgttaagagtgggggagagcaggctggcagctctccagtcaggaggcatagtttttactgaacaatcaaagcacttggactcttgctctttctactctgaactaataaatctgttgccaagctg

SEQ ID NO: 328562 - DNA, 2281 bp, Homo sapiens
gcttggctgagtaccaaggggcgaagctaccatcaatcaatggctacacaggaccagggacagtgcgcatctccctggtcaccaaggaccctcctcaccggcctcacccccacgagcttgtaggaaaggactgccgggatggcttctatgaggctgagctctgcccggaccgctgcatccacagtttccagaacctgggaatccagtgtgtgaagaagcgggacctggagcaggctatcagtcagcgcatccagaccaacaacaaccccttccaagttcctatagaagagcagcgtggggactacgacctgaatgctgtgcggctctgcttccaggtgacagtgcgggacccatcaggcaggcccctccgcctgccgcctgtcctttctcatcccatctttgacaatcgtgcccccaacactgccgagctcaagatctgccgagtgaaccgaaactctggcagctgcctcggtggggatgagatcttcctactgtgtgacaaggtgcagaaagaggacattgaggtgtatttcacgggaccaggctgggaggcccgaggctccttttcgcaagctgatgtgcaccgacaagtggccattgtgttccggacccctccctacgcagaccccagcctgcaggctcctgtgcgtgtctccatgcagctgcggcggccttccgaccgggagctcagtgagcccatggaattccagtacctgccagatacagacgatcgtcaccggattgaggagaaacgtaaaaggacatatgagaccttcaagagcatcatgaagaagagtcctttcagcggacccaccgacccccggcctccacctcgacgcattgctgtgccttcccgcagctcagcttctgtccccaagccagcaccccagccctatccctttacgtcatccctgagcaccatcaactatgatgagtttcccaccatggtgtttccttctgggcagatcagccaggcctcggccttggccccggcccctccccaagtcctgccccaggctccagcccctgcccctgctccagccatggtatcagctctggcccaggccccagcccctgtcccagtcctagccccaggccctcctcaggctgtggccccacctgcccccaagcccacccaggctggggaaggaacgctgtcagaggccctgctgcagctgcagtttgatgatgaagacctgggggccttgcttggcaacagcacagacccagctgtgttcacagacctggcatccgtcgacaactccgagtttcagcagctgctgaaccagggcatacctgtggccccccacacaactgagcccatgctgatggagtaccctgaggctataactcgcctagtgacaggggcccagaggccccccgacccagctcctgctccactgggggccccggggctccccaatggcctcctttcaggagatgaagacttctcctccattgcggacatggacttctcagccctgctgagtcagatcagctcctaagggggtgacgcctgccctccccagagcactgggttgcaggggattgaagccctccaaaagcacttacggattctggtggggtgtgttccaactgcccccaactttgtggatgtcttccttggaggggggagccatattttattcttttattgtcagtatctgtatctctctctctttttggaggtgcttaagcagaagcattaacttctctggaaaggggggagctggggaaactcaaacttttcccctgtcctgatggtcagctcccttctctgtagggaactctggggtcccccatccccatcctccagcttctggtactctcctagagacagaagcaggctggaggtaaggcctttgagcccacaaagccttatcaagtgtcttccatcatggattcattacagcttaatcaaaataacgccccagataccagcccctgtatggcactggcattgtccctgtgcctaacaccagcgtttgaggggctggccttcctgccctacagaggtctctgccggctctttccttgctcaaccatggctgaaggaaaccagtgcaacagcactggctctctccaggatccagaaggggtttggtctgggacttccttgctctccctcttctcaagtgccttaatagtagggtaagttgttaagagtgggggagagcaggctggcagctctccagtcaggaggcatagtttttactgaacaatcaaagcacttggactcttgctctttctactctgaactaataaatctgttgccaagctg

SEQ ID NO: 328563 - DNA, 2317 bp, Homo sapiens
ctgtgagatgatgataggcacggtggatgagatgggcacggaggtcttgtcagctgagtgaagggacagggttcgttgcagcacagtaggaagccactggagagggttaggcatggagcgatgatctaggggtgggcagagtaggaaggagcaggctgggcaaggcaggaaggtctgggctctgtgagagacagtgggacagacgactgggggcgctcagtttccagaacctgggaatccagtgtgtgaagaagcgggacctggagcaggctatcagtcagcgcatccagaccaacaacaaccccttccaagttcctatagaagagcagcgtggggactacgacctgaatgctgtgcggctctgcttccaggtgacagtgcgggacccatcaggcaggcccctccgcctgccgcctgtcctttctcatcccatctttgacaatcgtgcccccaacactgccgagctcaagatctgccgagtgaaccgaaactctggcagctgcctcggtggggatgagatcttcctactgtgtgacaaggtgcagaaagaggacattgaggtgtatttcacgggaccaggctgggaggcccgaggctccttttcgcaagctgatgtgcaccgacaagtggccattgtgttccggacccctccctacgcagaccccagcctgcaggctcctgtgcgtgtctccatgcagctgcggcggccttccgaccgggagctcagtgagcccatggaattccagtacctgccagatacagacgatcgtcaccggattgaggagaaacgtaaaaggacatatgagaccttcaagagcatcatgaagaagagtcctttcagcggacccaccgacccccggcctccacctcgacgcattgctgtgccttcccgcagctcagcttctgtccccaagccagcaccccagccctatccctttacgtcatccctgagcaccatcaactatgatgagtttcccaccatggtgtttccttctgggcagatcagccaggcctcggccttggccccggcccctccccaagtcctgccccaggctccagcccctgcccctgctccagccatggtatcagctctggcccaggccccagcccctgtcccagtcctagccccaggccctcctcaggctgtggccccacctgcccccaagcccacccaggctggggaaggaacgctgtcagaggccctgctgcagctgcagtttgatgatgaagacctgggggccttgcttggcaacagcacagacccagctgtgttcacagacctggcatccgtcgacaactccgagtttcagcagctgctgaaccagggcatacctgtggccccccacacaactgagcccatgctgatggagtaccctgaggctataactcgcctagtgacaggggcccagaggccccccgacccagctcctgctccactgggggccccggggctccccaatggcctcctttcaggagatgaagacttctcctccattgcggacatggacttctcagccctgctgagtcagatcagctcctaagggggtgacgcctgccctccccagagcactgggttgcaggggattgaagccctccaaaagcacttacggattctggtggggtgtgttccaactgcccccaactttgtggatgtcttccttggaggggggagccatattttattcttttattgtcagtatctgtatctctctctctttttggaggtgcttaagcagaagcattaacttctctggaaaggggggagctggggaaactcaaacttttcccctgtcctgatggtcagctcccttctctgtagggaactctggggtcccccatccccatcctccagcttctggtactctcctagagacagaagcaggctggaggtaaggcctttgagcccacaaagccttatcaagtgtcttccatcatggattcattacagcttaatcaaaataacgccccagataccagcccctgtatggcactggcattgtccctgtgcctaacaccagcgtttgaggggctggccttcctgccctacagaggtctctgccggctctttccttgctcaaccatggctgaaggaaaccagtgcaacagcactggctctctccaggatccagaaggggtttggtctgggacttccttgctctccctcttctcaagtgccttaatagtagggtaagttgttaagagtgggggagagcaggctggcagctctccagtcaggaggcatagtttttactgaacaatcaaagcacttggactcttgctctttctactctgaactaataaatctgttgccaagctg

SEQ ID NO: 328564 - DNA, 2643 bp, Homo sapiens
ctgtgagatgatgataggcacggtggatgagatgggcacggaggtcttgtcagctgagtgaagggacagggttcgttgcagcacagtaggaagccactggagagggttaggcatggagcgatgatctaggggtgggcagagtaggaaggagcaggctgggcaaggcaggaaggtctgggctctgtgagagacagtgggacagacgactgggggcgctcagtttccagaacctgggaatccagtgtgtgaagaagcgggacctggagcaggctatcagtcagcgcatccagaccaacaacaaccccttccaaggtgagggcaaacctgcctgccacacccgcaccctctgtcaccctccccagcccgcctttcctgcatctccctcactggccaagacacagtaaagctggaatcttggtgcccattcagtactctcccactttaccactgggaaactgagtcccaggaggggacatgacattcaggccacagtggagtcagtgctgggttctgcctcctctaggacttgtgtttcacacacgcaccagcggccctcccagcgcagagctccctgcccccactgatagcacctatatccccacttcccctgctctcctgatcgcctgttttcttggcagttcctatagaagagcagcgtggggactacgacctgaatgctgtgcggctctgcttccaggtgacagtgcgggacccatcaggcaggcccctccgcctgccgcctgtcctttctcatcccatctttgacaatcgtgcccccaacactgccgagctcaagatctgccgagtgaaccgaaactctggcagctgcctcggtggggatgagatcttcctactgtgtgacaaggtgcagaaagaggacattgaggtgtatttcacgggaccaggctgggaggcccgaggctccttttcgcaagctgatgtgcaccgacaagtggccattgtgttccggacccctccctacgcagaccccagcctgcaggctcctgtgcgtgtctccatgcagctgcggcggccttccgaccgggagctcagtgagcccatggaattccagtacctgccagatacagacgatcgtcaccggattgaggagaaacgtaaaaggacatatgagaccttcaagagcatcatgaagaagagtcctttcagcggacccaccgacccccggcctccacctcgacgcattgctgtgccttcccgcagctcagcttctgtccccaagccagcaccccagccctatccctttacgtcatccctgagcaccatcaactatgatgagtttcccaccatggtgtttccttctgggcagatcagccaggcctcggccttggccccggcccctccccaagtcctgccccaggctccagcccctgcccctgctccagccatggtatcagctctggcccaggccccagcccctgtcccagtcctagccccaggccctcctcaggctgtggccccacctgcccccaagcccacccaggctggggaaggaacgctgtcagaggccctgctgcagctgcagtttgatgatgaagacctgggggccttgcttggcaacagcacagacccagctgtgttcacagacctggcatccgtcgacaactccgagtttcagcagctgctgaaccagggcatacctgtggccccccacacaactgagcccatgctgatggagtaccctgaggctataactcgcctagtgacaggggcccagaggccccccgacccagctcctgctccactgggggccccggggctccccaatggcctcctttcaggagatgaagacttctcctccattgcggacatggacttctcagccctgctgagtcagatcagctcctaagggggtgacgcctgccctccccagagcactgggttgcaggggattgaagccctccaaaagcacttacggattctggtggggtgtgttccaactgcccccaactttgtggatgtcttccttggaggggggagccatattttattcttttattgtcagtatctgtatctctctctctttttggaggtgcttaagcagaagcattaacttctctggaaaggggggagctggggaaactcaaacttttcccctgtcctgatggtcagctcccttctctgtagggaactctggggtcccccatccccatcctccagcttctggtactctcctagagacagaagcaggctggaggtaaggcctttgagcccacaaagccttatcaagtgtcttccatcatggattcattacagcttaatcaaaataacgccccagataccagcccctgtatggcactggcattgtccctgtgcctaacaccagcgtttgaggggctggccttcctgccctacagaggtctctgccggctctttccttgctcaaccatggctgaaggaaaccagtgcaacagcactggctctctccaggatccagaaggggtttggtctgggacttccttgctctccctcttctcaagtgccttaatagtagggtaagttgttaagagtgggggagagcaggctggcagctctccagtcaggaggcatagtttttactgaacaatcaaagcacttggactcttgctctttctactctgaactaataaatctgttgccaagctg

SEQ ID NO: 328565 - DNA, 2535 bp, Homo sapiens
ctgtgagatgatgataggcacggtggatgagatgggcacggaggtcttgtcagctgagtgaagggacagggttcgttgcagcacagtaggaagccactggagagggttaggcatggagcgatgatctaggggtgggcagagtaggaaggagcaggctgggcaaggcaggaaggtctgggctctgtgagagacagtgggacagacgactgggggcgctcagtttccagaacctgggaatccagtgtgtgaagaagcgggacctggagcaggctatcagtcagcgcatccagaccaacaacaaccccttccaagttcctatagaagagcagcgtggggactacgacctgaatgctgtgcggctctgcttccaggtgacagtgcgggacccatcaggcaggcccctccgcctgccgcctgtcctttctcatcccatctttgacaatcgtgcccccaacactgccgagctcaagatctgccgagtgaaccgaaactctggcagctgcctcggtggggatgagatcttcctactgtgtgacaaggtgcagaaaggtatacatcaggaggcaggggtgggctcttgggagcaaggggtgaagctgagcagagaagtggagtgtcaggtaactggctttggatacttcctcctgtgcctcgggggcctcaggtgggccgaagggtgatgtatcagaagacaagcatcagaagttgagggggagaccatggagggttagacacactgacccacactgccaccgcatctcctgcagaggacattgaggtgtatttcacgggaccaggctgggaggcccgaggctccttttcgcaagctgatgtgcaccgacaagtggccattgtgttccggacccctccctacgcagaccccagcctgcaggctcctgtgcgtgtctccatgcagctgcggcggccttccgaccgggagctcagtgagcccatggaattccagtacctgccagatacagacgatcgtcaccggattgaggagaaacgtaaaaggacatatgagaccttcaagagcatcatgaagaagagtcctttcagcggacccaccgacccccggcctccacctcgacgcattgctgtgccttcccgcagctcagcttctgtccccaagccagcaccccagccctatccctttacgtcatccctgagcaccatcaactatgatgagtttcccaccatggtgtttccttctgggcagatcagccaggcctcggccttggccccggcccctccccaagtcctgccccaggctccagcccctgcccctgctccagccatggtatcagctctggcccaggccccagcccctgtcccagtcctagccccaggccctcctcaggctgtggccccacctgcccccaagcccacccaggctggggaaggaacgctgtcagaggccctgctgcagctgcagtttgatgatgaagacctgggggccttgcttggcaacagcacagacccagctgtgttcacagacctggcatccgtcgacaactccgagtttcagcagctgctgaaccagggcatacctgtggccccccacacaactgagcccatgctgatggagtaccctgaggctataactcgcctagtgacaggggcccagaggccccccgacccagctcctgctccactgggggccccggggctccccaatggcctcctttcaggagatgaagacttctcctccattgcggacatggacttctcagccctgctgagtcagatcagctcctaagggggtgacgcctgccctccccagagcactgggttgcaggggattgaagccctccaaaagcacttacggattctggtggggtgtgttccaactgcccccaactttgtggatgtcttccttggaggggggagccatattttattcttttattgtcagtatctgtatctctctctctttttggaggtgcttaagcagaagcattaacttctctggaaaggggggagctggggaaactcaaacttttcccctgtcctgatggtcagctcccttctctgtagggaactctggggtcccccatccccatcctccagcttctggtactctcctagagacagaagcaggctggaggtaaggcctttgagcccacaaagccttatcaagtgtcttccatcatggattcattacagcttaatcaaaataacgccccagataccagcccctgtatggcactggcattgtccctgtgcctaacaccagcgtttgaggggctggccttcctgccctacagaggtctctgccggctctttccttgctcaaccatggctgaaggaaaccagtgcaacagcactggctctctccaggatccagaaggggtttggtctgggacttccttgctctccctcttctcaagtgccttaatagtagggtaagttgttaagagtgggggagagcaggctggcagctctccagtcaggaggcatagtttttactgaacaatcaaagcacttggactcttgctctttctactctgaactaataaatctgttgccaagctg

SEQ ID NO: 328566 - DNA, 1803 bp, Homo sapiens
cgggcagtgacgcgacggcgggccgcgcggcgcatttccgcctctggcgaatggctcgtctgtagtgcacgccgcgggcccagctgcgaccccggccccgcccccgggaccccggccatggacgaactgttccccctcatcttcccggcagagccagcccaggcctctggcccctatgtggagatcattgagcagcccaagcagcggggcatgcgcttccgctacaagtgcgaggggcgctccgcgggcagcatcccaggcgagaggagcacagataccaccaagacccaccccaccatcaagatcaatggctacacaggaccagggacagtgcgcatctccctggtcaccaaggaccctcctcaccggccttccgaccgggagctcagtgagcccatggaattccagtacctgccagatacagacgatcgtcaccggattgaggagaaacgtaaaaggacatatgagaccttcaagagcatcatgaagaagagtcctttcagcggacccaccgacccccggcctccacctcgacgcattgctgtgccttcccgcagctcagcttctgtccccaagccaggcccaggccccagcccctgtcccagtcctagccccaggccctcctcaggctgtggccccacctgcccccaagcccacccaggctggggaaggaacgctgtcagaggccctgctgcagctgcagtttgatgatgaagacctgggggccttgcttggcaacagcacagacccagctgtgttcacagacctggcatccgtcgacaactccgagtttcagcagctgctgaaccagggcatacctgtggccccccacacaactgagcccatgctgatggagtaccctgaggctataactcgcctagtgacaggggcccagaggccccccgacccagctcctgctccactgggggccccggggctccccaatggcctcctttcaggagatgaagacttctcctccattgcggacatggacttctcagccctgctgagtcagatcagctcctaagggggtgacgcctgccctccccagagcactgggttgcaggggattgaagccctccaaaagcacttacggattctggtggggtgtgttccaactgcccccaactttgtggatgtcttccttggaggggggagccatattttattcttttattgtcagtatctgtatctctctctctttttggaggtgcttaagcagaagcattaacttctctggaaaggggggagctggggaaactcaaacttttcccctgtcctgatggtcagctcccttctctgtagggaactctggggtcccccatccccatcctccagcttctggtactctcctagagacagaagcaggctggaggtaaggcctttgagcccacaaagccttatcaagtgtcttccatcatggattcattacagcttaatcaaaataacgccccagataccagcccctgtatggcactggcattgtccctgtgcctaacaccagcgtttgaggggctggccttcctgccctacagaggtctctgccggctctttccttgctcaaccatggctgaaggaaaccagtgcaacagcactggctctctccaggatccagaaggggtttggtctgggacttccttgctctccctcttctcaagtgccttaatagtagggtaagttgttaagagtgggggagagcaggctggcagctctccagtcaggaggcatagtttttactgaacaatcaaagcacttggactcttgctctttctactctgaactaataaatctgttgccaagctg

SEQ ID NO: 328567 - DNA, 1990 bp, Homo sapiens
ctgtgagatgatgataggcacggtggatgagatgggcacggaggtcttgtcagctgagtgaagggacagggttcgttgcagcacagtaggaagccactggagagggttaggcatggagcgatgatctaggggtgggcagagtaggaaggagcaggctgggcaaggcaggaaggtctgggctctgtgagagacagtgggacagacgactgggggcgctcagtttccagaacctgggaatccagtgtgtgaagaagcgggacctggagcaggctatcagtcagcgcatccagaccaacaacaaccccttccaagttcctatagaagagcagcgtggggactacgacctgaatgctgtgcgtgtctccatgcagctgcggcggccttccgaccgggagctcagtgagcccatggaattccagtacctgccagatacagacgatcgtcaccggattgaggagaaacgtaaaaggacatatgagaccttcaagagcatcatgaagaagagtcctttcagcggacccaccgacccccggcctccacctcgacgcattgctgtgccttcccgcagctcagcttctgtccccaagccagcaccccagccctatccctttacgtcatccctgagcaccatcaactatgatgagtttcccaccatggtgtttccttctgggcagatcagccaggcctcggccttggccccggcccctccccaagtcctgccccaggctccagcccctgcccctgctccagccatggtatcagctctggcccaggccccagcccctgtcccagtcctagccccaggccctcctcaggctgtggccccacctgcccccaagcccacccaggctggggaaggaacgctgtcagaggccctgctgcagctgcagtttgatgatgaagacctgggggccttgcttggcaacagcacagacccagctgtgttcacagacctggcatccgtcgacaactccgagtttcagcagctgctgaaccagggcatacctgtggccccccacacaactgagcccatgctgatggagtaccctgaggctataactcgcctagtgacaggggcccagaggccccccgacccagctcctgctccactgggggccccggggctccccaatggcctcctttcaggagatgaagacttctcctccattgcggacatggacttctcagccctgctgagtcagatcagctcctaagggggtgacgcctgccctccccagagcactgggttgcaggggattgaagccctccaaaagcacttacggattctggtggggtgtgttccaactgcccccaactttgtggatgtcttccttggaggggggagccatattttattcttttattgtcagtatctgtatctctctctctttttggaggtgcttaagcagaagcattaacttctctggaaaggggggagctggggaaactcaaacttttcccctgtcctgatggtcagctcccttctctgtagggaactctggggtcccccatccccatcctccagcttctggtactctcctagagacagaagcaggctggaggtaaggcctttgagcccacaaagccttatcaagtgtcttccatcatggattcattacagcttaatcaaaataacgccccagataccagcccctgtatggcactggcattgtccctgtgcctaacaccagcgtttgaggggctggccttcctgccctacagaggtctctgccggctctttccttgctcaaccatggctgaaggaaaccagtgcaacagcactggctctctccaggatccagaaggggtttggtctgggacttccttgctctccctcttctcaagtgccttaatagtagggtaagttgttaagagtgggggagagcaggctggcagctctccagtcaggaggcatagtttttactgaacaatcaaagcacttggactcttgctctttctactctgaactaataaatctgttgccaagctg

SEQ ID NO: 328568 - DNA, 1381 bp, Homo sapiens
cgggcagtgacgcgacggcgggccgcgcggcgcatttccgcctctggcgaatggctcgtctgtagtgcacgccgcgggcccagctgcgaccccggccccgcccccgggaccccggccatggacgaactgttccccctcatcttcccggcagagccagcccaggcctctggcccctatgtggagatcattgagcagcccaagcagcggggcatgcgcttccgctacaagtgcgaggggcgctccgcgggcagcatcccaggcgagaggagcacagataccaccaagacccaccccaccatcaagatcaatggctacacaggaccagggacagtgcgcatctccctggtcaccaaggaccctcctcaccggcctcacccccacgagcttgtaggaaaggactgccgggatggcttctatgaggctgagctctgcccggaccgctgcatccacagtttccagaacctgggaatccagtgtgtgaagaagcgggacctggagcaggctatcagtcagcgcatccagaccaacaacaaccccttccaagttcctatagaagagcagcgtggggactacgacctgaatgctgtgcggctctgcttccaggtgacagtgcgggacccatcaggcaggcccctccgcctgccgcctgtcctttctcatcccatctttgacaatcgtgcccccaacactgccgagctcaagatctgccgagtgaaccgaaactctggcagctgcctcggtggggatgagatcttcctactgtgtgacaaggtgcagaaagaggacattgaggtgtatttcacgggaccaggctgggaggcccgaggctccttttcgcaagctgatgtgcaccgacaagtggccattgtgttccggacccctccctacgcagaccccagcctgcaggctcctgtgcgtgtctccatgcagctgcggcggccttccgaccgggagctcagtgagcccatggaattccagtacctgccagatacagacgatcgtcaccggattgaggagaaacgtaaaaggacatatgagaccttcaagagcatcatgaagaagagtcctttcagcggacccaccgacccccggcctccacctcgacgcattgctgtgccttcccgcagctcagcttctgtccccaagccaggtaaggatttccttttgtcccactggaacgacaggttcagctctgttcagctgaggagcagtggagatgaagactcttgggccccattacagacctactgaatcagaggctttgaaaggatggcgcaggaaccagcgacttcctgggatgctaatgcacactgaagcctgggaaccaccgtgccacttaaattctatattgggtatcttgggaatcagaagttaaaaatgc

SEQ ID NO: 328569 - DNA, 1159 bp, Homo sapiens
cgggcagtgacgcgacggcgggccgcgcggcgcatttccgcctctggcgaatggctcgtctgtagtgcacgccgcgggcccagctgcgaccccggccccgcccccgggaccccggccatggacgaactgttccccctcatcttcccggcagagccagcccaggcctctggcccctatgtggagatcattgagcagcccaagcagcggggcatgcgcttccgctacaagtgcgaggggcgctccgcgggcagcatcccaggcgagaggagcacagataccaccaagacccaccccaccatcaagatcaatggctacacaggaccagggacagtgcgcatctccctggtcaccaaggaccctcctcaccggcctcacccccacgagcttgtaggaaaggactgccgggatggcttctatgaggctgagctctgcccggaccgctgcatccacagtttccagaacctgggaatccagtgtgtgaagaagcgggacctggagcaggctatcagtcagcgcatccagaccaacaacaaccccttccaagttcctatagaagagcagcgtggggactacgacctgaatgctgtgcggctctgcttccaggtgacagtgcgggacccatcaggcaggcccctccgcctgccgcctgtcctttctcatcccatctttgacaatcgtgcccccaacactgccgagctcaagatctgccgagtgaaccgaaactctggcagctgcctcggtggggatgagatcttcctactgtgtgacaaggtgcagaaagaggacattgaggtgtatttcacgggaccaggctgggaggcccgaggctccttttcgcaagctgatgtgcaccgacaagtggccattgtgttccggacccctccctacgcagaccccagcctgcaggctcctgtgcgtgtctccatgcagctgcggcggccttccgaccgggagctcagtgagcccatggaattccagtacctgccagatacagacgatcgtcaccggattgaggagaaacgtaaaaggacatatgagaccttcaagagcatcatgaagaagagtcctttcagcggaaccacctgtccaacctgtggtacctcactattgtcgcaaccgcaatagcattcaagctcacgccgtgtccgctctccccgtg

SEQ ID NO: 328570 - DNA, 472 bp, Homo sapiens
aatcaaaataacgccccagataccagcccctgtatggcactggcattgtccctgtgcctaacaccagcgtttgaggggctggccttcctgccctacagaggtctctgccggctctttccttgctcaaccatggctgaaggaaaccagtgcaacagcactggctctctccaggatccagaaggggtttggtctgggacttccttgctctccctcttctcaagtgccttaatagtagggtaagttgttaagagtgggggagagcaggctggcagctctccagtcaggaggcatagtttttactgaacaatcaaagcacttggactcttgctctttctactctgaactaataaatctgttgccaagctgctagagatccgctttttttcagcaaacactgagcacacattttgctagtcacatcaggccagacattggtggtagagagctgggtgaatgcgtgcactgtcctctg

SEQ ID NO: 328571 - DNA, 386 bp, Homo sapiens
gtgttccaactgcccccaactttgtggatgtcttccttggaggggggagccatattttattcttttattgtcagtatctgtatctctctctctttttggaggtgcttaagcagaagcattaacttctctggaaaggggggagctggggaaactcaaacttttcccctgtcctgatggtcagctcccttctctgtagggaactctggggtcccccatccccatcctccagcttctggtactctcctagagacagaagcaggctggaggtaaggcctttgagcccacaaagccttatcaagtgtcttccatcatggattcattacagcttaatcaaaataacgccccagataccagcccctgtatggcactggcattgtccctgtgcc

SEQ ID NO: 328572 - DNA, 2431 bp, Homo sapiens
ggcacgaggcggggccgggtcgcagctgggcccgcggcatggacgaactgttccccctcatcttcccggcagagcagcccaagcagcggggcatgcgcttccgctacaagtgcgaggggcgctccgcgggcagcatcccaggcgagaggagcacagataccaccaagacccaccccaccatcaagatcaatggctacacaggaccagggacagtgcgcatctccctggtcaccaaggaccctcctcaccggcctcacccccacgagcttgtaggaaaggactgccgggatggcttctatgaggctgagctctgcccggaccgctgcatccacagtttccagaacctgggaatccagtgtgtgaagaagcgggacctggagcaggctatcagtcagcgcatccagaccaacaacaaccccttccaagttcctatagaagagcagcgtggggactacgacctgaatgctgtgcggctctgcttccaggtgacagtgcgggacccatcaggcaggcccctccgcctgccgcctgtcctttctcatcccatctttgacaatcgtgcccccaacactgccgagctcaagatctgccgagtgaaccgaaactctggcagctgcctcggtggggatgagatcttcctactgtgtgacaaggtgcagaaagaggacattgaggtgtatttcacgggaccaggctgggaggcccgaggctccttttcgcaagctgatgtgcaccgacaagtggccattgtgttccggacccctccctacgcagaccccagcctgcaggctcctgtgcgtgtctccatgcagctgcggcggccttccgaccgggagctcagtgagcccatggaattccagtacctgccagatacagacgatcgtcaccggattgaggagaaacgtaaaaggacatatgagaccttcaagagcatcatgaagaagagtcctttcagcggacccaccgacccccggcctccacctcgacgcattgctgtgccttcccgcagctcagcttctgtccccaagccagcaccccagccctatccctttacgtcatccctgagcaccatcaactatgatgagtttcccaccatggtgtttccttctgggcagatcagccaggcctcggccttggccccggcccctccccaagtcctgccccaggctccagcccctgcccctgctccagccatggtatcagctctggcccaggccccagcccctgtcccagtcctagccccaggccctcctcaggctgtggccccacctgcccccaagcccacccaggctggggaaggaacgctgtcagaggccctgctgcagctgcagtttgatgatgaagacctgggggccttgcttggcaacagcacagacccagctgtgttcacagacctggcatccgtcgacaactccgagtttcagcagctgctgaaccagggcatacctgtggccccccacacaactgagcccatgctgatggagtaccctgaggctataactcgcctagtgacaggggcccagaggccccccgacccagctcctgctccactgggggccccggggctccccaatggcctcctttcaggagatgaagacttctcctccattgcggacatggacttctcagccctgctgagtcagatcagctcctaagggggtgacgcctgccctccccagagcactgggttgcaggggattgaagccctccaaaagcacttacggattctggtggggtgtgttccaactgcccccaactttgtggatgtcttccttggaggggggagccatattttattcttttattgtcagtatctgtatctctctctctttttggaggtgcttaagcagaagcattaacttctctggaaaggggggagctggggaaactcaaacttttcccctgtcctgatggtcagctcccttctctgtagggaactctggggtcccccatccccatcctccagcttctggtactctcctagagacagaagcaggctggaggtaaggcctttgagcccacaaagccttatcaagtgtcttccatcatggattcattacagcttaatcaaaataacgccccagataccagcccctgtatggcactggcattgtccctgtgcctaacaccagcgtttgaggggctggccttcctgccctacagaggtctctgccggctctttccttgctcaaccatggctgaaggaaaccagtgcaacagcactggctctctccaggatccagaaggggtttggtctgggacttccttgctctccctcttctcaagtgccttaatagtagggtaagttgttaagagtgggggagagcaggctggcagctctccagtcaggaggcatagtttttactgaacaatcaaagcacttggactcttgctctttctactctgaactaataaatctgttgccaagctg

SEQ ID NO: 328573 - DNA, 2180 bp, Homo sapiens
cgggcagtgacgcgacggcgggccgcgcggcgcatttccgcctctggcgaatggctcgtctgtagtgcacgccgcgggcccagctgcgaccccggccccgcccccgggaccccggccatggacgaactgttccccctcatcttcccggcagagccagcccaggcctctggcccctatgtggagatcattgagcagcccaagcagcggggcatgcgcttccgctacaagtgcgaggggcgctccgcgggcagcatcccaggcgagaggagcacagataccaccaagacccaccccaccatcaagatcaatggctacacaggaccagggacagtgcgcatctccctggtcaccaaggaccctcctcaccggcctcacccccacgagcttgtaggaaaggactgccgggatggcttctatgaggctgagctctgcccggaccgctgcatccacagtttccagaacctgggaatccagtgtgtgaagaagcgggacctggagcaggctatcagtcagcgcatccagaccaacaacaaccccttccaagttcctatagaagagcagcgtggggactacgacctgaatgctgtgcggctctgcttccaggtgacagtgcgggacccatcaggcaggcccctccgcctgccgcctgtcctttctcatcccatctttgacaatcgtgcccccaacactgccgagctcaagatctgccgagtgaaccgaaactctggcagctgcctcggtggggatgagatcttcctactgtgtgacaaggtgcagaaagcaccccagccctatccctttacgtcatccctgagcaccatcaactatgatgagtttcccaccatggtgtttccttctgggcagatcagccaggcctcggccttggccccggcccctccccaagtcctgccccaggctccagcccctgcccctgctccagccatggtatcagctctggcccaggccccagcccctgtcccagtcctagccccaggccctcctcaggctgtggccccacctgcccccaagcccacccaggctggggaaggaacgctgtcagaggccctgctgcagctgcagtttgatgatgaagacctgggggccttgcttggcaacagcacagacccagctgtgttcacagacctggcatccgtcgacaactccgagtttcagcagctgctgaaccagggcatacctgtggccccccacacaactgagcccatgctgatggagtaccctgaggctataactcgcctagtgacaggggcccagaggccccccgacccagctcctgctccactgggggccccggggctccccaatggcctcctttcaggagatgaagacttctcctccattgcggacatggacttctcagccctgctgagtcagatcagctcctaagggggtgacgcctgccctccccagagcactgggttgcaggggattgaagccctccaaaagcacttacggattctggtggggtgtgttccaactgcccccaactttgtggatgtcttccttggaggggggagccatattttattcttttattgtcagtatctgtatctctctctctttttggaggtgcttaagcagaagcattaacttctctggaaaggggggagctggggaaactcaaacttttcccctgtcctgatggtcagctcccttctctgtagggaactctggggtcccccatccccatcctccagcttctggtactctcctagagacagaagcaggctggaggtaaggcctttgagcccacaaagccttatcaagtgtcttccatcatggattcattacagcttaatcaaaataacgccccagataccagcccctgtatggcactggcattgtccctgtgcctaacaccagcgtttgaggggctggccttcctgccctacagaggtctctgccggctctttccttgctcaaccatggctgaaggaaaccagtgcaacagcactggctctctccaggatccagaaggggtttggtctgggacttccttgctctccctcttctcaagtgccttaatagtagggtaagttgttaagagtgggggagagcaggctggcagctctccagtcaggaggcatagtttttactgaacaatcaaagcacttggactcttgctctttctactctgaactaataaatctgttgccaagctg

SEQ ID NO: 328574 - DNA, 884 bp, Homo sapiens
cgggcagtgacgcgacggcgggccgcgcggcgcatttccgcctctggcgaatggctcgtctgtagtgcacgccgcgggcccagctgcgaccccggccccgcccccgggaccccggccatggacgaactgttccccctcatcttcccggcagatcaatggctacacaggaccagggacagtgcgcatctccctggtcaccaaggaccctcctcaccggcctcacccccacgagcttgtaggaaaggactgccgggatggcttctatgaggctgagctctgcccggaccgctgcatccacagtttccagaacctgggaatccagtgtgtgaagaagcgggacctggagcaggctatcagtcagcgcatccagaccaacaacaaccccttccaagttcctatagaagagcagcgtggggactacgacctgaatgctgtgcggctctgcttccaggtgacagtgcgggacccatcaggcaggcccctccgcctgccgcctgtcctttctcatcccatctttgacaatcgtgcccccaacactgccgagctcaagatctgccgagtgaaccgaaactctggcagctgcctcggtggggatgagatcttcctactgtgtgacaaggtgcagaaagaggacattgaggtgtatttcacgggaccaggctgggaggcccgaggctccttttcgcaagctgatgtgcaccgacaagtggccattgtgttccggacccctccctacgcagaccccagcctgcaggctcctgtgcgtgtctccatgcagctgcggcggccttccgaccgggagctcagtgagcccatggaattccagtacctgccagatacagacgatcgtcctgcctgaatggatcctctagaacagccacacc

SEQ ID NO: 328575 - DNA, 2549 bp, Homo sapiens
cgggcagtgacgcgacggcgggccgcgcggcgcatttccgcctctggcgaatggctcgtctgtagtgcacgccgcgggcccagctgcgaccccggccccgcccccgggaccccggccatggacgaactgttccccctcatcttcccggcagagccagcccaggcctctggcccctatgtggagatcattgagcagcccaagcagcggggcatgcgcttccgctacaagtgcgaggggcgctccgcgggcagcatcccaggcgagaggagcacagataccaccaagacccaccccaccatcaagatcaatggctacacaggaccagggacagtgcgcatctccctggtcaccaaggaccctcctcaccggcctcacccccacgagcttgtaggaaaggactgccgggatggcttctatgaggctgagctctgcccggaccgctgcatccacagtttccagaacctgggaatccagtgtgtgaagaagcgggacctggagcaggctatcagtcagcgcatccagaccaacaacaaccccttccaagttcctatagaagagcagcgtggggactacgacctgaatgctgtgcggctctgcttccaggtgacagtgcgggacccatcaggcaggcccctccgcctgccgcctgtcctttctcatcccatctttgacaatcgtgcccccaacactgccgagctcaagatctgccgagtgaaccgaaactctggcagctgcctcggtggggatgagatcttcctactgtgtgacaaggtgcagaaagaggacattgaggtgtatttcacgggaccaggctgggaggcccgaggctccttttcgcaagctgatgtgcaccgacaagtggccattgtgttccggacccctccctacgcagaccccagcctgcaggctcctgtgcgtgtctccatgcagctgcggcggccttccgaccgggagctcagtgagcccatggaattccagtacctgccagatacagacgatcgtcaccggattgaggagaaacgtaaaaggacatatgagaccttcaagagcatcatgaagaagagtcctttcagcggacccaccgacccccggcctccacctcgacgcattgctgtgccttcccgcagctcagcttctgtccccaagccagcaccccagccctatccctttacgtcatccctgagcaccatcaactatgatgagtttcccaccatggtgtttccttctgggcagatcagccaggcctcggccttggccccggcccctccccaagtcctgccccaggctccagcccctgcccctgctccagccatggtatcagctctggcccaggccccagcccctgtcccagtcctagccccaggccctcctcaggctgtggccccacctgcccccaagcccacccaggctggggaaggaacgctgtcagaggccctgctgcagctgcagtttgatgatgaagacctgggggccttgcttggcaacagcacagacccagctgtgttcacagacctggcatccgtcgacaactccgagtttcagcagctgctgaaccagggcatacctgtggccccccacacaactgagcccatgctgatggagtaccctgaggctataactcgcctagtgacaggggcccagaggccccccgacccagctcctgctccactgggggccccggggctccccaatggcctcctttcaggagatgaagacttctcctccattgcggacatggacttctcagccctgctgagtcagatcagctcctaagggggtgacgcctgccctccccagagcactgggttgcaggggattgaagccctccaaaagcacttacggattctggtggggtgtgttccaactgcccccaactttgtggatgtcttccttggaggggggagccatattttattcttttattgtcagtatctgtatctctctctctttttggaggtgcttaagcagaagcattaacttctctggaaaggggggagctggggaaactcaaacttttcccctgtcctgatggtcagctcccttctctgtagggaactctggggtcccccatccccatcctccagcttctggtactctcctagagacagaagcaggctggaggtaaggcctttgagcccacaaagccttatcaagtgtcttccatcatggattcattacagcttaatcaaaataacgccccagataccagcccctgtatggcactggcattgtccctgtgcctaacaccagcgtttgaggggctggccttcctgccctacagaggtctctgccggctctttccttgctcaaccatggctgaaggaaaccagtgcaacagcactggctctctccaggatccagaaggggtttggtctgggacttccttgctctccctcttctcaagtgccttaatagtagggtaagttgttaagagtgggggagagcaggctggcagctctccagtcaggaggcatagtttttactgaacaatcaaagcacttggactcttgctctttctactctgaactaataaatctgttgccaagctg

SEQ ID NO: 328576 - DNA, 2767 bp, Homo sapiens
cgggcagtgacgcgacggcgggccgcgcggcgcatttccgcctctggcgaatggctcgtctgtagtgcacgccgcgggcccagctgcgaccccggccccgcccccgggaccccggccatggacgaactgttccccctcatcttcccggcagagccagcccaggcctctggcccctatgtggagatcattgagcagcccaagcagcggggcatgcgcttccgctacaagtgcgaggggcgctccgcgggcagcatcccaggcgagaggagcacagataccaccaagacccaccccaccatcaagatcaatggctacacaggaccagggacagtgcgcatctccctggtcaccaaggaccctcctcaccggcctcacccccacgagcttgtaggaaaggactgccgggatggcttctatgaggctgagctctgcccggaccgctgcatccacagtttccagaacctgggaatccagtgtgtgaagaagcgggacctggagcaggctatcagtcagcgcatccagaccaacaacaaccccttccaagttcctatagaagagcagcgtggggactacgacctgaatgctgtgcggctctgcttccaggtgacagtgcgggacccatcaggcaggcccctccgcctgccgcctgtcctttctcatcccatctttgacaatcgtgcccccaacactgccgagctcaagatctgccgagtgaaccgaaactctggcagctgcctcggtggggatgagatcttcctactgtgtgacaaggtgcagaaaggtatacatcaggaggcaggggtgggctcttgggagcaaggggtgaagctgagcagagaagtggagtgtcaggtaactggctttggatacttcctcctgtgcctcgggggcctcaggtgggccgaagggtgatgtatcagaagacaagcatcagaagttgagggggagaccatggagggttagacacactgacccacactgccaccgcatctcctgcagaggacattgaggtgtatttcacgggaccaggctgggaggcccgaggctccttttcgcaagctgatgtgcaccgacaagtggccattgtgttccggacccctccctacgcagaccccagcctgcaggctcctgtgcgtgtctccatgcagctgcggcggccttccgaccgggagctcagtgagcccatggaattccagtacctgccagatacagacgatcgtcaccggattgaggagaaacgtaaaaggacatatgagaccttcaagagcatcatgaagaagagtcctttcagcggacccaccgacccccggcctccacctcgacgcattgctgtgccttcccgcagctcagcttctgtccccaagccagcaccccagccctatccctttacgtcatccctgagcaccatcaactatgatgagtttcccaccatggtgtttccttctgggcagatcagccaggcctcggccttggccccggcccctccccaagtcctgccccaggctccagcccctgcccctgctccagccatggtatcagctctggcccaggccccagcccctgtcccagtcctagccccaggccctcctcaggctgtggccccacctgcccccaagcccacccaggctggggaaggaacgctgtcagaggccctgctgcagctgcagtttgatgatgaagacctgggggccttgcttggcaacagcacagacccagctgtgttcacagacctggcatccgtcgacaactccgagtttcagcagctgctgaaccagggcatacctgtggccccccacacaactgagcccatgctgatggagtaccctgaggctataactcgcctagtgacaggggcccagaggccccccgacccagctcctgctccactgggggccccggggctccccaatggcctcctttcaggagatgaagacttctcctccattgcggacatggacttctcagccctgctgagtcagatcagctcctaagggggtgacgcctgccctccccagagcactgggttgcaggggattgaagccctccaaaagcacttacggattctggtggggtgtgttccaactgcccccaactttgtggatgtcttccttggaggggggagccatattttattcttttattgtcagtatctgtatctctctctctttttggaggtgcttaagcagaagcattaacttctctggaaaggggggagctggggaaactcaaacttttcccctgtcctgatggtcagctcccttctctgtagggaactctggggtcccccatccccatcctccagcttctggtactctcctagagacagaagcaggctggaggtaaggcctttgagcccacaaagccttatcaagtgtcttccatcatggattcattacagcttaatcaaaataacgccccagataccagcccctgtatggcactggcattgtccctgtgcctaacaccagcgtttgaggggctggccttcctgccctacagaggtctctgccggctctttccttgctcaaccatggctgaaggaaaccagtgcaacagcactggctctctccaggatccagaaggggtttggtctgggacttccttgctctccctcttctcaagtgccttaatagtagggtaagttgttaagagtgggggagagcaggctggcagctctccagtcaggaggcatagtttttactgaacaatcaaagcacttggactcttgctctttctactctgaactaataaatctgttgccaagctg

SEQ ID NO: 328577 - DNA, 2589 bp, Homo sapiens
cgggcagtgacgcgacggcgggccgcgcggcgcatttccgcctctggcgaatggctcgtctgtagtgcacgccgcgggcccagctgcgaccccggccccgcccccgggaccccggccatggacgaactgttccccctcatcttcccggcagagccagcccaggcctctggcccctatgtggagatcattgagcagcccaagcagcggggcatgcgcttccgctacaagtgcgaggggcgctccgcgggcagcatcccaggcgagaggagcacagataccaccaagacccaccccaccatcaagatcaatggctacacaggaccagggacagtgcgcatctccctggtcaccaaggaccctcctcaccggcctcacccccacgagcttgtaggaaaggactgccgggatggcttctatgaggctgagctctgcccggaccgctgcatccacagtttccagaacctgggaatccagtgtgtgaagaagcgggacctggagcaggctatcagtcagcgcatccagaccaacaacaaccccttccaagttcctatagaagagcagcgtggggactacgacctgaatgctgtgcggctctgcttccaggtgacagtgcgggacccatcaggcaggcccctccgcctgccgcctgtcctttctcatcccatctttgacaatcgtgcccccaacactgccgagctcaagatctgccgagtgaaccgaaactctggcagctgcctcggtggggatgagatcttcctactgtgtgacaaggtgcagaaagaggacattgaggtgtatttcacgggaccaggctgggaggcccgaggctccttttcgcaagctgatgtgcaccgacaagtggccattgtgttccggacccctccctacgcagaccccagcctgcaggctcctgtgcgtgtctccatgcagctgcggcggccttccgaccgggagctcagtgagcccatggaattccagtacctgccagatacagacgatcgtcaccggattgaggagaaacgtaaaaggacatatgagaccttcaagagcatcatgaagaagagtcctttcagcggacccaccgacccccggcctccacctcgacgcattgctgtgccttcccgcagctcagcttctgtccccaagccagcaccccagccctatccctttacgtcatccctgagcaccatcaactatgatgagtttcccaccatggtgtttccttctgggcagatcagccaggcctcggccttggccccggcccctccccaagtcctgccccaggctccagcccctgcccctgctccagccatggtatcagctctggcccaggccccagcccctgtcccagtcctagccccaggccctcctcaggctgtggccccacctgcccccaagcccacccaggctggggaaggaacgctgtcagaggccctgctgcagctgcagtttgatgatgaagacctgggggccttgcttggcaacagcacagacccagctgtgttcacagacctggcatccgtcgacaactccgagtttcagcagctgctgaaccagggcatacctgtggccccccacacaactgagcccatgctgatggagtaccctgaggctataactcgcctagtgacaggggcccagaggccccccgacccagctcctgctccactgggggccccggggctccccaatggcctcctttcaggagatgaagacttctcctccattgcggacatggacttctcagccctgctgagtcagatcagctcctaagggggtgacgcctgccctccccagagcactgggttgcaggggattgaagccctccaaaagcacttacggattctggtggggtgtgttccaactgcccccaactttgtggatgtcttccttggaggggggagccatattttattcttttattgtcagtatctgtatctctctctctttttggaggtgcttaagcagaagcattaacttctctggaaaggggggagctggggaaactcaaacttttcccctgtcctgatggtcagctcccttctctgtagggaactctggggtcccccatccccatcctccagcttctggtactctcctagagacagaagcaggctggaggtaaggcctttgagcccacaaagccttatcaagtgtcttccatcatggattcattacagcttaatcaaaataacgccccagataccagcccctgtatggcactggcattgtccctgtgcctaacaccagcgtttgaggggctggccttcctgccctacagaggtctctgccggctctttccttgctcaaccatggctgaaggaaaccagtgcaacagcactggctctctccaggatccagaaggggtttggtctgggacttccttgctctccctcttctcaagtgccttaatagtagggtaagttgttaagagtgggggagagcaggctggcagctctccagtcaggaggcatagtttttactgaacaatcaaagcacttggactcttgctctttctactctgaactaataaatctgttgccaagctgaataaaaaaaaaataattatatctttgactgtcgtatcga

SEQ ID NO: 328578 - DNA, 2550 bp, Homo sapiens
cgccggggccgcacggctgtgcggagccgcacgcgccgcgtttccgccccattcccgtcgacggagctgcgcagggagcggtcggcctgccggatggtggcgcggggcggggcaggcggggagggaactgttccccctcatcttcccggcagagccagcccaggcctctggcccctatgtggagatcattgagcagcccaagcagcggggcatgcgcttccgctacaagtgcgaggggcgctccgcgggcagcatcccaggcgagaggagcacagataccaccaagacccaccccaccatcaagatcaatggctacacaggaccagggacagtgcgcatctccctggtcaccaaggaccctcctcaccggcctcacccccacgagcttgtaggaaaggactgccgggatggcttctatgaggctgagctctgcccggaccgctgcatccacagtttccagaacctgggaatccagtgtgtgaagaagcgggacctggagcaggctatcagtcagcgcatccagaccaacaacaaccccttccaagttcctatagaagagcagcgtggggactacgacctgaatgctgtgcggctctgcttccaggtgacagtgcgggacccatcaggcaggcccctccgcctgccgcctgtcctttctcatcccatctttgacaatcgtgcccccaacactgccgagctcaagatctgccgagtgaaccgaaactctggcagctgcctcggtggggatgagatcttcctactgtgtgacaaggtgcagaaagaggacattgaggtgtatttcacgggaccaggctgggaggcccgaggctccttttcgcaagctgatgtgcaccgacaagtggccattgtgttccggacccctccctacgcagaccccagcctgcaggctcctgtgcgtgtctccatgcagctgcggcggccttccgaccgggagctcagtgagcccatggaattccagtacctgccagatacagacgatcgtcaccggattgaggagaaacgtaaaaggacatatgagaccttcaagagcatcatgaagaagagtcctttcagcggacccaccgacccccggcctccacctcgacgcattgctgtgccttcccgcagctcagcttctgtccccaagccagcaccccagccctatccctttacgtcatccctgagcaccatcaactatgatgagtttcccaccatggtgtttccttctgggcagatcagccaggcctcggccttggccccggcccctccccaagtcctgccccaggctccagcccctgcccctgctccagccatggtatcagctctggcccaggccccagcccctgtcccagtcctagccccaggccctcctcaggctgtggccccacctgcccccaagcccacccaggctggggaaggaacgctgtcagaggccctgctgcagctgcagtttgatgatgaagacctgggggccttgcttggcaacagcacagacccagctgtgttcacagacctggcatccgtcgacaactccgagtttcagcagctgctgaaccagggcatacctgtggccccccacacaactgagcccatgctgatggagtaccctgaggctataactcgcctagtgacaggggcccagaggccccccgacccagctcctgctccactgggggccccggggctccccaatggcctcctttcaggagatgaagacttctcctccattgcggacatggacttctcagccctgctgagtcagatcagctcctaagggggtgacgcctgccctccccagagcactgggttgcaggggattgaagccctccaaaagcacttacggattctggtggggtgtgttccaactgcccccaactttgtggatgtcttccttggaggggggagccatattttattcttttattgtcagtatctgtatctctctctctttttggaggtgcttaagcagaagcattaacttctctggaaaggggggagctggggaaactcaaacttttcccctgtcctgatggtcagctcccttctctgtagggaactctggggtcccccatccccatcctccagcttctggtactctcctagagacagaagcaggctggaggtaaggcctttgagcccacaaagccttatcaagtgtcttccatcatggattcattacagcttaatcaaaataacgccccagataccagcccctgtatggcactggcattgtccctgtgcctaacaccagcgtttgaggggctggccttcctgccctacagaggtctctgccggctctttccttgctcaaccatggctgaaggaaaccagtgcaacagcactggctctctccaggatccagaaggggtttggtctgggacttccttgctctccctcttctcaagtgccttaatagtagggtaagttgttaagagtgggggagagcaggctggcagctctccagtcaggaggcatagtttttactgaacaatcaaagcacttggactcttgctctttctactctgaactaataaatctgttgccaagctg

SEQ ID NO: 328579 - DNA, 2397 bp, Homo sapiens
cgggcagtgacgcgacggcgggccgcgcggcgcatttccgcctctggcgaatggctcgtctgtagtgcacgccgcgggcccagctgcgaccccggccccgcccccgggaccccggccatggacgaactgttccccctcatcttcccggcagatcaatggctacacaggaccagggacagtgcgcatctccctggtcaccaaggaccctcctcaccggcctcacccccacgagcttgtaggaaaggactgccgggatggcttctatgaggctgagctctgcccggaccgctgcatccacagtttccagaacctgggaatccagtgtgtgaagaagcgggacctggagcaggctatcagtcagcgcatccagaccaacaacaaccccttccaagttcctatagaagagcagcgtggggactacgacctgaatgctgtgcggctctgcttccaggtgacagtgcgggacccatcaggcaggcccctccgcctgccgcctgtcctttctcatcccatctttgacaatcgtgcccccaacactgccgagctcaagatctgccgagtgaaccgaaactctggcagctgcctcggtggggatgagatcttcctactgtgtgacaaggtgcagaaagaggacattgaggtgtatttcacgggaccaggctgggaggcccgaggctccttttcgcaagctgatgtgcaccgacaagtggccattgtgttccggacccctccctacgcagaccccagcctgcaggctcctgtgcgtgtctccatgcagctgcggcggccttccgaccgggagctcagtgagcccatggaattccagtacctgccagatacagacgatcgtcaccggattgaggagaaacgtaaaaggacatatgagaccttcaagagcatcatgaagaagagtcctttcagcggacccaccgacccccggcctccacctcgacgcattgctgtgccttcccgcagctcagcttctgtccccaagccagcaccccagccctatccctttacgtcatccctgagcaccatcaactatgatgagtttcccaccatggtgtttccttctgggcagatcagccaggcctcggccttggccccggcccctccccaagtcctgccccaggctccagcccctgcccctgctccagccatggtatcagctctggcccaggccccagcccctgtcccagtcctagccccaggccctcctcaggctgtggccccacctgcccccaagcccacccaggctggggaaggaacgctgtcagaggccctgctgcagctgcagtttgatgatgaagacctgggggccttgcttggcaacagcacagacccagctgtgttcacagacctggcatccgtcgacaactccgagtttcagcagctgctgaaccagggcatacctgtggccccccacacaactgagcccatgctgatggagtaccctgaggctataactcgcctagtgacaggggcccagaggccccccgacccagctcctgctccactgggggccccggggctccccaatggcctcctttcaggagatgaagacttctcctccattgcggacatggacttctcagccctgctgagtcagatcagctcctaagggggtgacgcctgccctccccagagcactgggttgcaggggattgaagccctccaaaagcacttacggattctggtggggtgtgttccaactgcccccaactttgtggatgtcttccttggaggggggagccatattttattcttttattgtcagtatctgtatctctctctctttttggaggtgcttaagcagaagcattaacttctctggaaaggggggagctggggaaactcaaacttttcccctgtcctgatggtcagctcccttctctgtagggaactctggggtcccccatccccatcctccagcttctggtactctcctagagacagaagcaggctggaggtaaggcctttgagcccacaaagccttatcaagtgtcttccatcatggattcattacagcttaatcaaaataacgccccagataccagcccctgtatggcactggcattgtccctgtgcctaacaccagcgtttgaggggctggccttcctgccctacagaggtctctgccggctctttccttgctcaaccatggctgaaggaaaccagtgcaacagcactggctctctccaggatccagaaggggtttggtctgggacttccttgctctccctcttctcaagtgccttaatagtagggtaagttgttaagagtgggggagagcaggctggcagctctccagtcaggaggcatagtttttactgaacaatcaaagcacttggactcttgctctttctactctgaactaataaatctgttgccaagctg

SEQ ID NO: 328580 - DNA, 2404 bp, Homo sapiens
tgggggttcgattgtcaaagatgggagcaggctatcagtcagcgcatccagaccaacaacaaccccttccaaggtgagggcaaacctgcctgccacacccgcaccctctgtcaccctccccagcccgcctttcctgcatctccctcactggccaagacacagtaaagctggaatcttggtgcccattcagtactctcccactttaccactgggaaactgagtcccaggaggggacatgacattcaggccacagtggagtcagtgctgggttctgcctcctctaggacttgtgtttcacacacgcaccagcggccctcccagcgcagagctccctgcccccactgatagcacctatatccccacttcccctgctctcctgatcgcctgttttcttggcagttcctatagaagagcagcgtggggactacgacctgaatgctgtgcggctctgcttccaggtgacagtgcgggacccatcaggcaggcccctccgcctgccgcctgtcctttctcatcccatctttgacaatcgtgcccccaacactgccgagctcaagatctgccgagtgaaccgaaactctggcagctgcctcggtggggatgagatcttcctactgtgtgacaaggtgcagaaagaggacattgaggtgtatttcacgggaccaggctgggaggcccgaggctccttttcgcaagctgatgtgcaccgacaagtggccattgtgttccggacccctccctacgcagaccccagcctgcaggctcctgtgcgtgtctccatgcagctgcggcggccttccgaccgggagctcagtgagcccatggaattccagtacctgccagatacagacgatcgtcaccggattgaggagaaacgtaaaaggacatatgagaccttcaagagcatcatgaagaagagtcctttcagcggacccaccgacccccggcctccacctcgacgcattgctgtgccttcccgcagctcagcttctgtccccaagccagcaccccagccctatccctttacgtcatccctgagcaccatcaactatgatgagtttcccaccatggtgtttccttctgggcagatcagccaggcctcggccttggccccggcccctccccaagtcctgccccaggctccagcccctgcccctgctccagccatggtatcagctctggcccaggccccagcccctgtcccagtcctagccccaggccctcctcaggctgtggccccacctgcccccaagcccacccaggctggggaaggaacgctgtcagaggccctgctgcagctgcagtttgatgatgaagacctgggggccttgcttggcaacagcacagacccagctgtgttcacagacctggcatccgtcgacaactccgagtttcagcagctgctgaaccagggcatacctgtggccccccacacaactgagcccatgctgatggagtaccctgaggctataactcgcctagtgacaggggcccagaggccccccgacccagctcctgctccactgggggccccggggctccccaatggcctcctttcaggagatgaagacttctcctccattgcggacatggacttctcagccctgctgagtcagatcagctcctaagggggtgacgcctgccctccccagagcactgggttgcaggggattgaagccctccaaaagcacttacggattctggtggggtgtgttccaactgcccccaactttgtggatgtcttccttggaggggggagccatattttattcttttattgtcagtatctgtatctctctctctttttggaggtgcttaagcagaagcattaacttctctggaaaggggggagctggggaaactcaaacttttcccctgtcctgatggtcagctcccttctctgtagggaactctggggtcccccatccccatcctccagcttctggtactctcctagagacagaagcaggctggaggtaaggcctttgagcccacaaagccttatcaagtgtcttccatcatggattcattacagcttaatcaaaataacgccccagataccagcccctgtatggcactggcattgtccctgtgcctaacaccagcgtttgaggggctggccttcctgccctacagaggtctctgccggctctttccttgctcaaccatggctgaaggaaaccagtgcaacagcactggctctctccaggatccagaaggggtttggtctgggacttccttgctctccctcttctcaagtgccttaatagtagggtaagttgttaagagtgggggagagcaggctggcagctctccagtcaggaggcatagtttttactgaacaatcaaagcacttggactcttgctctttctactctgaactaataaatctgttgccaagctg

SEQ ID NO: 328581 - DNA, 2231 bp, Homo sapiens
cgggcagtgacgcgacggcgggccgcgcggcgcatttccgcctctggcgaatggctcgtctgtagtgcacgccgcgggcccagctgcgaccccggccccgcccccgggaccccggccatggacgaactgttccccctcatcttcccggcagagccagcccaggcctctggcccctatgtggagatcattgagcagcccaagcagcggggcatgcgcttccgctacaagtgcgaggggcgctccgcgggcagcatcccaggcgagaggagcacagataccaccaagacccaccccaccatcaagatcaatggctacacaggaccagggacagtgcgcatctccctggtcaccaaggaccctcctcaccggcctcacccccacgagcttgtaggaaaggactgccgggatggcttctatgaggctgagctctgcccggaccgctgcatccacagtttccagaacctgggaatccagtgtgtgaagaagcgggacctggagcaggctatcagtcagcgcatccagaccaacaacaaccccttccaagttcctatagaagagcagcgtggggactacgacctgaatgctgtgcggctctgcttccaggtgacagtgcgggacccatcaggcaggcccctccgcctgccgcctgtcctttctcatcccatctttgacaatcacgatcgtcaccggattgaggagaaacgtaaaaggacatatgagaccttcaagagcatcatgaagaagagtcctttcagcggacccaccgacccccggcctccacctcgacgcattgctgtgccttcccgcagctcagcttctgtccccaagccagcaccccagccctatccctttacgtcatccctgagcaccatcaactatgatgagtttcccaccatggtgtttccttctgggcagatcagccaggcctcggccttggccccggcccctccccaagtcctgccccaggctccagcccctgcccctgctccagccatggtatcagctctggcccaggccccagcccctgtcccagtcctagccccaggccctcctcaggctgtggccccacctgcccccaagcccacccaggctggggaaggaacgctgtcagaggccctgctgcagctgcagtttgatgatgaagacctgggggccttgcttggcaacagcacagacccagctgtgttcacagacctggcatccgtcgacaactccgagtttcagcagctgctgaaccagggcatacctgtggccccccacacaactgagcccatgctgatggagtaccctgaggctataactcgcctagtgacaggggcccagaggccccccgacccagctcctgctccactgggggccccggggctccccaatggcctcctttcaggagatgaagacttctcctccattgcggacatggacttctcagccctgctgagtcagatcagctcctaagggggtgacgcctgccctccccagagcactgggttgcaggggattgaagccctccaaaagcacttacggattctggtggggtgtgttccaactgcccccaactttgtggatgtcttccttggaggggggagccatattttattcttttattgtcagtatctgtatctctctctctttttggaggtgcttaagcagaagcattaacttctctggaaaggggggagctggggaaactcaaacttttcccctgtcctgatggtcagctcccttctctgtagggaactctggggtcccccatccccatcctccagcttctggtactctcctagagacagaagcaggctggaggtaaggcctttgagcccacaaagccttatcaagtgtcttccatcatggattcattacagcttaatcaaaataacgccccagataccagcccctgtatggcactggcattgtccctgtgcctaacaccagcgtttgaggggctggccttcctgccctacagaggtctctgccggctctttccttgctcaaccatggctgaaggaaaccagtgcaacagcactggctctctccaggatccagaaggggtttggtctgggacttccttgctctccctcttctcaagtgccttaatagtagggtaagttgttaagagtgggggagagcaggctggcagctctccagtcaggaggcatagtttttactgaacaatcaaagcacttggactcttgctctttctactctgaactaataaatctgttgccaagctg

SEQ ID NO: 328582 - DNA, 1979 bp, Homo sapiens
cgggcagtgacgcgacggcgggccgcgcggcgcatttccgcctctggcgaatggctcgtctgtagtgcacgccgcgggcccagctgcgaccccggccccgcccccgggaccccggccatggacgaactgttccccctcatcttcccggcagagccagcccaggcctctggcccctatgtggagatcattgagcagcccaagcagcggggcatgcgcttccgctacaagtgcgaggggcgctccgcgggcagcatcccaggcgagaggagcacagataccaccaagacccaccccaccatcaagatcaatggctacacaggaccagggacagtgcgcatctccctggtcaccaaggaccctcctcaccggccttccgaccgggagctcagtgagcccatggaattccagtacctgccagatacagacgatcgtcaccggattgaggagaaacgtaaaaggacatatgagaccttcaagagcatcatgaagaagagtcctttcagcggacccaccgacccccggcctccacctcgacgcattgctgtgccttcccgcagctcagcttctgtccccaagccagcaccccagccctatccctttacgtcatccctgagcaccatcaactatgatgagtttcccaccatggtgtttccttctgggcagatcagccaggcctcggccttggccccggcccctccccaagtcctgccccaggctccagcccctgcccctgctccagccatggtatcagctctggcccaggccccagcccctgtcccagtcctagccccaggccctcctcaggctgtggccccacctgcccccaagcccacccaggctggggaaggaacgctgtcagaggccctgctgcagctgcagtttgatgatgaagacctgggggccttgcttggcaacagcacagacccagctgtgttcacagacctggcatccgtcgacaactccgagtttcagcagctgctgaaccagggcatacctgtggccccccacacaactgagcccatgctgatggagtaccctgaggctataactcgcctagtgacaggggcccagaggccccccgacccagctcctgctccactgggggccccggggctccccaatggcctcctttcaggagatgaagacttctcctccattgcggacatggacttctcagccctgctgagtcagatcagctcctaagggggtgacgcctgccctccccagagcactgggttgcaggggattgaagccctccaaaagcacttacggattctggtggggtgtgttccaactgcccccaactttgtggatgtcttccttggaggggggagccatattttattcttttattgtcagtatctgtatctctctctctttttggaggtgcttaagcagaagcattaacttctctggaaaggggggagctggggaaactcaaacttttcccctgtcctgatggtcagctcccttctctgtagggaactctggggtcccccatccccatcctccagcttctggtactctcctagagacagaagcaggctggaggtaaggcctttgagcccacaaagccttatcaagtgtcttccatcatggattcattacagcttaatcaaaataacgccccagataccagcccctgtatggcactggcattgtccctgtgcctaacaccagcgtttgaggggctggccttcctgccctacagaggtctctgccggctctttccttgctcaaccatggctgaaggaaaccagtgcaacagcactggctctctccaggatccagaaggggtttggtctgggacttccttgctctccctcttctcaagtgccttaatagtagggtaagttgttaagagtgggggagagcaggctggcagctctccagtcaggaggcatagtttttactgaacaatcaaagcacttggactcttgctctttctactctgaactaataaatctgttgccaagctg

SEQ ID NO: 328583 - DNA, 2137 bp, Homo sapiens
agatggcggatggtcagggaatgcaggagaaagaacctagtttttgagggatgatgaggttgtctttgaattgatggaattgaagtgctttggagctactgaaataccactgtaattagaaagacagttctgaaagctctgactaaaatatgaaaccattagagataagaataagagtctctgctgaagtcttaaggcagttgtgcctcagctgccccagagtgccaagaaattctcgccaggcctgggtggaggctgacaatgagccaggatgtgagcagtgcaggaaggtgtgagctggaggctggggccccccaggtctcctctttgcccagagcatggcccctgtactcggcctcaccatgtggtcttagaggggcagattcagccaacagaggcctccaaaagctgtgggattctcagaactgctgagtgtcacacatcccttctcattggcagagaaggttgggagaatgggtcttgggaaagcctggctcctccccttcctcctgagggacctttgagagcgtcggggacccacctgaggagagcaagtcccacttctcccccttactttcccagacgatcgtcaccggattgaggagaaacgtaaaaggacatatgagaccttcaagagcatcatgaagaagagtcctttcagcggacccaccgacccccggcctccacctcgacgcattgctgtgccttcccgcagctcagcttctgtccccaagccagcaccccagccctatccctttacgtcatccctgagcaccatcaactatgatgagtttcccaccatggtgtttccttctgggcagatcagccaggcctcggccttggccccggcccctccccaagtcctgccccaggctccagcccctgcccctgctccagccatggtatcagctctggcccaggccccagcccctgtcccagtcctagccccaggccctcctcaggctgtggccccacctgcccccaagcccacccaggctggggaaggaacgctgtcagaggccctgctgcagctgcagtttgatgatgaagacctgggggccttgcttggcaacagcacagacccagctgtgttcacagacctggcatccgtcgacaactccgagtttcagcagctgctgaaccagggcatacctgtggccccccacacaactgagcccatgctgatggagtaccctgaggctataactcgcctagtgacaggggcccagaggccccccgacccagctcctgctccactgggggccccggggctccccaatggcctcctttcaggagatgaagacttctcctccattgcggacatggacttctcagccctgctgagtcagatcagctcctaagggggtgacgcctgccctccccagagcactgggttgcaggggattgaagccctccaaaagcacttacggattctggtggggtgtgttccaactgcccccaactttgtggatgtcttccttggaggggggagccatattttattcttttattgtcagtatctgtatctctctctctttttggaggtgcttaagcagaagcattaacttctctggaaaggggggagctggggaaactcaaacttttcccctgtcctgatggtcagctcccttctctgtagggaactctggggtcccccatccccatcctccagcttctggtactctcctagagacagaagcaggctggaggtaaggcctttgagcccacaaagccttatcaagtgtcttccatcatggattcattacagcttaatcaaaataacgccccagataccagcccctgtatggcactggcattgtccctgtgcctaacaccagcgtttgaggggctggccttcctgccctacagaggtctctgccggctctttccttgctcaaccatggctgaaggaaaccagtgcaacagcactggctctctccaggatccagaaggggtttggtctgggacttccttgctctccctcttctcaagtgccttaatagtagggtaagttgttaagagtgggggagagcaggctggcagctctccagtcaggaggcatagtttttactgaacaatcaaagcacttggactcttgctctttctactctgaactaataaatctgttgccaagctg

SEQ ID NO: 328584 - DNA, 1210 bp, Homo sapiens
  misc_feature (1183)..(1183): n is a, c, g, or t
  misc_feature (1197)..(1197): n is a, c, g, or t
  misc_feature (1205)..(1205): n is a, c, g, or t
cgggcagtgacgcgacggcgggccgcgcggcgcatttccgcctctggcgaatggctcgtctgtagtgcacgccgcgggcccagctgcgaccccggccccgcccccgggaccccggccatggacgaactgttccccctcatcttcccggcagagccagcccaggcctctggcccctatgtggagatcattgagcagcccaagcagcggggcatgcgcttccgctacaagtgcgaggggcgctccgcgggcagcatcccaggcgagaggagcacagataccaccaagacccaccccaccatcaagatcaatggctacacaggaccagggacagtgcgcatctccctggtcaccaaggaccctcctcaccggcctcacccccacgagcttgtaggaaaggactgccgggatggcttctatgaggctgagctctgcccggaccgctgcatccacagtttccagaacctgggaatccagtgtgtgaagaagcgggacctggagcaggctatcagtcagcgcatccagaccaacaacaaccccttccaagttcctatagaagagcagcgtggggactacgacctgaatgctgtgcggctctgcttccaggtgacagtgcgggacccatcaggcaggcccctccgcctgccgcctgtcctttctcatcccatctttgacaatcgtgcccccaacactgccgagctcaagatctgccgagtgaaccgaaactctggcagctgcctcggtggggatgagatcttcctactgtgtgacaaggtgcagaaagaggacattgaggtgtatttcacgggaccaggctgggaggcccgaggctccttttcgcaagctgatgtgcaccgacaagtggccattgtgttccggacccctccctacgcagaccccagcctgcaggctcctgtgcgtgtctccatgcagctgcggcggccttccgaccgggagctcagtgagcccatggaattccagtacctgccagatacagacgatcgtcaccggattgaggagaaacgtaaaaggacatatgagaccttcaagagcatcatgaagaagagtcctttcagcggacccaccgacccccggcctccacctcgacgcattgctgtgccttcccgcagctcagcttctgtccccaagccagcaccccagccctcatccgcttatccaatggggnaccgagcggaattngtaacggnttaaa

SEQ ID NO: 328585 - DNA, 1036 bp, Homo sapiens
cgggcagtgacgcgacggcgggccgcgcggcgcatttccgcctctggcgaatggctcgtctgtagtgcacgccgcgggcccagctgcgaccccggccccgcccccgggaccccggccatggacgaactgttccccctcatcttcccggcagagccagcccaggcctctggcccctatgtggagatcattgagcagcccaagcagcggggcatgcgcttccgctacaagtgcgaggggcgctccgcgggcagcatcccaggcgagaggagcacagataccaccaagacccaccccaccatcaagatcaatggctacacaggaccagggacagtgcgcatctccctggtcaccaaggaccctcctcaccggcctcacccccacgagcttgtaggaaaggactgccgggatggcttctatgaggctgagctctgcccggaccgctgcatccacagtttccagaacctgggaatccagtgtgtgaagaagcgggacctggagcaggctatcagtcagcgcatccagaccaacaacaaccccttccaagttcctatagaagagcagcgtggggactacgacctgaatgctgtgcggctctgcttccaggtgacagtgcgggacccatcaggcaggcccctccgcctgccgcctgtcctttctcatcccatctttgacaatcgtgcccccaacactgccgagctcaagatctgccgagtgaaccgaaactctggcagctgcctcggtggggatgagatcttcctactgtgtgacaaggtgcagaaagaggacattgaggtgtatttcacgggaccaggctgggaggcccgaggctccttttcgcaagctgatgtgcaccgacaagtggccattgtgttccggacccctccctacgcagaccccagcctgcaggctcctgtgcgtgtctccatgcagctgcggcggccttccgaccgggagctcagtgagcccatggaattccagtacctgccagatacagacgatcgtcctgcctgaatggatcctctagaacagccacacc

SEQ ID NO: 328586 - DNA, 519 bp, Homo sapiens
acgtgatctatttttcagaacagcaagtggatgggaaagaaccttgacaacacaaaactcatttactaatggactggttttgggtttctcttctctgagtccgcaaatctctctgcctgagccccaggcctattcagacctcgcggggagcggcgtcccccaggagcagttacgcgatctattggattaagcgggaggaaaaatgttggccggcccagtcacagcctccgaggaagagcacctcttttctgcccgggttcccgcaatcacaccttctacacgtcgtcttcccagatgacggcaatgtagtacgtcctggttccttttgaagacagataaaaagaaatgggcaggtaggtctggaggaagccgggaaaaaaaggtggtcctatttgtgtctaattgccatctctgctgtcatcctctgtaaatttatacctgcccttatttgtgcaggctatgcctcatttccttatacaaaattgttaattacaaagcacaccccatactcaaaaaaaa

SEQ ID NO: 328587 - DNA, 2748 bp, Homo sapiens
aaccaagttccccggcaactagcagcatccaccgggcgggaggtcggaggcagcaaggccttaaaggctactgagtgcgccggccgttccgtgtccagaacctcccctactcctccgccttctcttccttggccgcccaccgccaagttccgactccggttttcgcctttgcaaagcctaaggaggaggttaggaacagccgcgcccccctccctgcggccgccgccccctgcctctcggctctgctccctgccgcgtgcgcctgggccgtgcgccccggcaggccccagccatgtcgatgctgccgtcgtttggctttacgcaggagcaagtggcgtgcgtgtgcgaggttctgcagcaaggcggaaacctggagcgcctgggcaggttcctgtggtcactgcccgcctgcgaccacctgcacaagaacgagagcgtactcaaggccaaggcggtggtcgccttccaccgcggcaacttccgtgagctctacaagatcctggagagccaccagttctcgcctcacaaccaccccaaactgcagcaactgtggctgaaggcgcattacgtggaggccgagaagctgcgcggccgacccctgggcgccgtgggcaaatatcgggtgcgccgaaaatttccactgccgcgcaccatctgggacggcgaggagaccagctactgcttcaaggagaagtcgaggggtgtcctgcgggagtggtacgcgcacaatccctacccatcgccgcgtgagaagcgggagctggccgaggccaccggcctcaccaccacccaggtcagcaactggtttaagaaccggaggcaaagagaccgggccgcggaggccaaggaaagggagaacaccgaaaacaataactcctcctccaacaagcagaaccaactctctcctctggaagggggcaagccgctcatgtccagctcagaagaggaattctcacctccccaaagtccagaccagaactcggtccttctgctgcagggcaatatgggccacgccaggagctcaaactattctctcccgggcttaacagcctcgcagcccagtcacggcctgcagacccaccagcatcagctccaagactctctgctcggccccctcacctccagtctggtggacttggggtcctaagtggggagggactggggcctcgaagggattcctggagcagcaaccactgcagcgactagggacacttgtaaatagaaatcaggaacatttttgcagcttgtttctggagttgtttgcgcataaaggaatggtggactttcacaaatatctttttaaaaatcaaaaccaacagcgatctcaagcttaatctcctcttctctccaactctttccacttttgcattttccttcccaatgcagagatcagggaaaaaaaaaaaaaaaaacccaaacaaacaaaagcacccaggcccccagtctgagttctggggcaattgatacgcctgtttcagcaggctttcttttttttcaatgaaggggaattgcaaatcaactggattttcattattcccttttaatttatatatggagaaatgtgaagagggaaaggaaatggaaagagaaagagaaagggagataaaaatagtgaaaataagagcctccaggctcagcaagaactgattacattcttaaggtgaacaggaaaaatacaatctataactttctttgatgaggaaaaattaagtttacatttttcatatttagtgttaaacaatttaatgtagattaaaataaaagaccagtattaggaggaaaaaacaagtgcctaaatgtcttaatgctctctatgtgagacagaaatagacgtgaccattagtaatgcaactatttttgtcaaatttagtgggattttttggttgttgtttgttttcttgggtttttttttttaaatgacaaactctaaaaatgtaccaatgtgaaaaaacactttcctgaatgccattactcatgccctcaaagctttcatatctgtagcctactcctgtaaagggtttctcctgtttctagtttctagtttgcaaaggtatgccaacgaatctggcaacctggtatttgttactaaaacagcatgtgttttcaggtttcttttctattgtacctaaagcagtctaaattaaaacttagtagaacaccaggagtatgattctgtttctgaaaggtgagtggtgtattgctgtcattgggccctatttttttttttaaatatatttttctttcttacttaatggtggctgtgaattgcagggtactttgaaggccatcatctgaaccaagagtagtaactagattaattatatgacagaaagagtgaatttagccttggggtatttattaacttctattatttagatatgcaattttgtttaccactatctcttcacagcattcatatgttaactaagctcttttgtgttaacaagtttatgacaagactgtgaaagtaaaaataatttatctgcttgaagacaaaaaagggaaggagaacaaggatagaaacattgtgaattaatttgtacaaatagaaagcagaccagcaggacaggagctcttttgcagtgctgccggatggtgtctagaaaaatcccagtaatcatgtaggctccatattatttttgcctggggcaaaatgatgtatcttctgtatttagcttttaaaattagtgaaacaaatggcattatttattaaaattctactcaggataacaaaaaattggcttgctt

SEQ ID NO: 328588 - DNA, 2689 bp, Homo sapiens
aaccaagttccccggcaactagcagcatccaccgggcgggaggtcggaggcagcaaggccttaaaggctactgagtgcgccggccgttccgtgtccagaacctcccctactcctccgccttctcttccttggccgcccaccgccaagttccgactccggttttcgcctttgcaaagcctaaggaggaggttaggaacagccgcgcccccctccctgcggccgccgccccctgcctctcggctctgctccctgccgcgtgcgcctgggccgtgcgccccggcaggccccagccatgtcgatgctgccgtcgtttggctttacgcaggagcaagtggcgtgcgtgtgcgaggttctgcagcaaggcggaaacctggagcgcctgggcaggttcctgtggtcactgcccgcctgcgaccacctgcacaagaacgagagcgtactcaaggccaaggcggtggtcgccttccaccgcggcaacttccgtgagctctacaagatcctggagagccaccagttctcgcctcacaaccaccccaaactgcagcaactgtggctgaaggcgcattacgtggaggccgagaagctgcgcggccgacccctgggcgccgtgggcaaatatcgggtgcgccgaaaatttccactgccgcgcaccatctgggacggcgaggagaccagctactgcttcaaggagaagtcgaggggtgtcctgcgggagtggtacgcgcacaatccctacccatcgccgcgtgagaagcgggagctggccgaggccaccggcctcaccaccacccagggagaacaccgaaaacaataactcctcctccaacaagcagaaccaactctctcctctggaagggggcaagccgctcatgtccagctcagaagaggaattctcacctccccaaagtccagaccagaactcggtccttctgctgcagggcaatatgggccacgccaggagctcaaactattctctcccgggcttaacagcctcgcagcccagtcacggcctgcagacccaccagcatcagctccaagactctctgctcggccccctcacctccagtctggtggacttggggtcctaagtggggagggactggggcctcgaagggattcctggagcagcaaccactgcagcgactagggacacttgtaaatagaaatcaggaacatttttgcagcttgtttctggagttgtttgcgcataaaggaatggtggactttcacaaatatctttttaaaaatcaaaaccaacagcgatctcaagcttaatctcctcttctctccaactctttccacttttgcattttccttcccaatgcagagatcagggaaaaaaaaaaaaaaaaacccaaacaaacaaaagcacccaggcccccagtctgagttctggggcaattgatacgcctgtttcagcaggctttcttttttttcaatgaaggggaattgcaaatcaactggattttcattattcccttttaatttatatatggagaaatgtgaagagggaaaggaaatggaaagagaaagagaaagggagataaaaatagtgaaaataagagcctccaggctcagcaagaactgattacattcttaaggtgaacaggaaaaatacaatctataactttctttgatgaggaaaaattaagtttacatttttcatatttagtgttaaacaatttaatgtagattaaaataaaagaccagtattaggaggaaaaaacaagtgcctaaatgtcttaatgctctctatgtgagacagaaatagacgtgaccattagtaatgcaactatttttgtcaaatttagtgggattttttggttgttgtttgttttcttgggtttttttttttaaatgacaaactctaaaaatgtaccaatgtgaaaaaacactttcctgaatgccattactcatgccctcaaagctttcatatctgtagcctactcctgtaaagggtttctcctgtttctagtttctagtttgcaaaggtatgccaacgaatctggcaacctggtatttgttactaaaacagcatgtgttttcaggtttcttttctattgtacctaaagcagtctaaattaaaacttagtagaacaccaggagtatgattctgtttctgaaaggtgagtggtgtattgctgtcattgggccctatttttttttttaaatatatttttctttcttacttaatggtggctgtgaattgcagggtactttgaaggccatcatctgaaccaagagtagtaactagattaattatatgacagaaagagtgaatttagccttggggtatttattaacttctattatttagatatgcaattttgtttaccactatctcttcacagcattcatatgttaactaagctcttttgtgttaacaagtttatgacaagactgtgaaagtaaaaataatttatctgcttgaagacaaaaaagggaaggagaacaaggatagaaacattgtgaattaatttgtacaaatagaaagcagaccagcaggacaggagctcttttgcagtgctgccggatggtgtctagaaaaatcccagtaatcatgtaggctccatattatttttgcctggggcaaaatgatgtatcttctgtatttagcttttaaaattagtgaaacaaatggcattatttattaaaattctactcaggataacaaaaaattggcttgctt

SEQ ID NO: 328589 - DNA, 3093 bp, Homo sapiens
acgtgatctatttttcagaacagcaagtggatgggaaagaaccttgacaacacaaaactcatttactaatggactggttttgggtttctcttctctgagtccgcaaatctctctgcctgagccccaggcctattcagacctcgcggggagcggcgtcccccaggagcaggtgggctgctgctccggcgccacgccggccatcggagccggagttcccaagggtcgagggcacccggagtttccgactaagcagaggaaaaagaattttggcacttcagccggatttggggagtctccgcactgccccagagcgatgacacgaatttattgaagaaacacctctctatgccctccctttccaaatatttgtaggtagagtagaatcctcaccgtcgttctggatggtgaaagaattccaagaaagcggcccgggagcccctaactatcttgctacaagccagaagggaaacaagtgggtcccagctaggggtgtttgcatcaaggcctgtcaacccagccgagaaaccctagcaacagctaatgctgtcccactgaatgctttttcatcgactaaagcgcacgcggccgttacctgcacagaggaggcactggagagccgaaacctggcatcgggcgctccttgccagcggtgttccctcccgagccgcgctgcagcgagggcagcagccggctggctagagttgctcatttcctttaaatctccaacgcatctctgcttttcgtgcgatttgcattgacagcaaaggttttatgttacgagaacaactcaaacctttctgtgtgcgatttaaaatggatcatttagtttaggtggtttgtaaattcatgtcattttacctctttcagcggttttcagtgaaaggttccattttgggaaaccttatatatccgagccaataattaacatttataacaattggttcccctaaccgagggatcgaaatagcaggtagactccttggtataaagcgcatagcactttccctttccagttacgcgatctattggattaagcgggaggaaaaatgttggccggcccagtcacagcctccgaggaagagcacctcttttctgcccgggttcccgcaatcacaccttctacacgtcgtcttcccagatgacggcaatgtagtacgtcctggttccttttgaagacagataaaaagaaatgggcagggagaacaccgaaaacaataactcctcctccaacaagcagaaccaactctctcctctggaagggggcaagccgctcatgtccagctcagaagaggaattctcacctccccaaagtccagaccagaactcggtccttctgctgcagggcaatatgggccacgccaggagctcaaactattctctcccgggcttaacagcctcgcagcccagtcacggcctgcagacccaccagcatcagctccaagactctctgctcggccccctcacctccagtctggtggacttggggtcctaagtggggagggactggggcctcgaagggattcctggagcagcaaccactgcagcgactagggacacttgtaaatagaaatcaggaacatttttgcagcttgtttctggagttgtttgcgcataaaggaatggtggactttcacaaatatctttttaaaaatcaaaaccaacagcgatctcaagcttaatctcctcttctctccaactctttccacttttgcattttccttcccaatgcagagatcagggaaaaaaaaaaaaaaaaacccaaacaaacaaaagcacccaggcccccagtctgagttctggggcaattgatacgcctgtttcagcaggctttcttttttttcaatgaaggggaattgcaaatcaactggattttcattattcccttttaatttatatatggagaaatgtgaagagggaaaggaaatggaaagagaaagagaaagggagataaaaatagtgaaaataagagcctccaggctcagcaagaactgattacattcttaaggtgaacaggaaaaatacaatctataactttctttgatgaggaaaaattaagtttacatttttcatatttagtgttaaacaatttaatgtagattaaaataaaagaccagtattaggaggaaaaaacaagtgcctaaatgtcttaatgctctctatgtgagacagaaatagacgtgaccattagtaatgcaactatttttgtcaaatttagtgggattttttggttgttgtttgttttcttgggtttttttttttaaatgacaaactctaaaaatgtaccaatgtgaaaaaacactttcctgaatgccattactcatgccctcaaagctttcatatctgtagcctactcctgtaaagggtttctcctgtttctagtttctagtttgcaaaggtatgccaacgaatctggcaacctggtatttgttactaaaacagcatgtgttttcaggtttcttttctattgtacctaaagcagtctaaattaaaacttagtagaacaccaggagtatgattctgtttctgaaaggtgagtggtgtattgctgtcattgggccctatttttttttttaaatatatttttctttcttacttaatggtggctgtgaattgcagggtactttgaaggccatcatctgaaccaagagtagtaactagattaattatatgacagaaagagtgaatttagccttggggtatttattaacttctattatttagatatgcaattttgtttaccactatctcttcacagcattcatatgttaactaagctcttttgtgttaacaagtttatgacaagactgtgaaagtaaaaataatttatctgcttgaagacaaaaaagggaaggagaacaaggatagaaacattgtgaattaatttgtacaaatagaaagcagaccagcaggacaggagctcttttgcagtgctgccggatggtgtctagaaaaatcccagtaatcatgtaggctccatattatttttgcctggggcaaaatgatgtatcttctgtatttagcttttaaaattagtgaaacaaatggcattatttattaaaattctactcaggataacaaaaaattggcttgctt

SEQ ID NO: 328590 - DNA, 2249 bp, Homo sapiens
acgtgatctatttttcagaacagcaagtggatgggaaagaaccttgacaacacaaaactcatttactaatggactggttttgggtttctcttctctgagtccgcaaatctctctgcctgagccccaggcctattcagacctcgcggggagcggcgtcccccaggagcagttacgcgatctattggattaagcgggaggaaaaatgttggccggcccagtcacagcctccgaggaagagcacctcttttctgcccgggttcccgcaatcacaccttctacacgtcgtcttcccagatgacggcaatgtagtacgtcctggttccttttgaagacagataaaaagaaatgggcagggagaacaccgaaaacaataactcctcctccaacaagcagaaccaactctctcctctggaagggggcaagccgctcatgtccagctcagaagaggaattctcacctccccaaagtccagaccagaactcggtccttctgctgcagggcaatatgggccacgccaggagctcaaactattctctcccgggcttaacagcctcgcagcccagtcacggcctgcagacccaccagcatcagctccaagactctctgctcggccccctcacctccagtctggtggacttggggtcctaagtggggagggactggggcctcgaagggattcctggagcagcaaccactgcagcgactagggacacttgtaaatagaaatcaggaacatttttgcagcttgtttctggagttgtttgcgcataaaggaatggtggactttcacaaatatctttttaaaaatcaaaaccaacagcgatctcaagcttaatctcctcttctctccaactctttccacttttgcattttccttcccaatgcagagatcagggaaaaaaaaaaaaaaaaacccaaacaaacaaaagcacccaggcccccagtctgagttctggggcaattgatacgcctgtttcagcaggctttcttttttttcaatgaaggggaattgcaaatcaactggattttcattattcccttttaatttatatatggagaaatgtgaagagggaaaggaaatggaaagagaaagagaaagggagataaaaatagtgaaaataagagcctccaggctcagcaagaactgattacattcttaaggtgaacaggaaaaatacaatctataactttctttgatgaggaaaaattaagtttacatttttcatatttagtgttaaacaatttaatgtagattaaaataaaagaccagtattaggaggaaaaaacaagtgcctaaatgtcttaatgctctctatgtgagacagaaatagacgtgaccattagtaatgcaactatttttgtcaaatttagtgggattttttggttgttgtttgttttcttgggtttttttttttaaatgacaaactctaaaaatgtaccaatgtgaaaaaacactttcctgaatgccattactcatgccctcaaagctttcatatctgtagcctactcctgtaaagggtttctcctgtttctagtttctagtttgcaaaggtatgccaacgaatctggcaacctggtatttgttactaaaacagcatgtgttttcaggtttcttttctattgtacctaaagcagtctaaattaaaacttagtagaacaccaggagtatgattctgtttctgaaaggtgagtggtgtattgctgtcattgggccctatttttttttttaaatatatttttctttcttacttaatggtggctgtgaattgcagggtactttgaaggccatcatctgaaccaagagtagtaactagattaattatatgacagaaagagtgaatttagccttggggtatttattaacttctattatttagatatgcaattttgtttaccactatctcttcacagcattcatatgttaactaagctcttttgtgttaacaagtttatgacaagactgtgaaagtaaaaataatttatctgcttgaagacaaaaaagggaaggagaacaaggatagaaacattgtgaattaatttgtacaaatagaaagcagaccagcaggacaggagctcttttgcagtgctgccggatggtgtctagaaaaatcccagtaatcatgtaggctccatattatttttgcctggggcaaaatgatgtatcttctgtatttagcttttaaaattagtgaaacaaatggcattatttattaaaattctactcaggataacaaaaaattggcttgctt

SEQ ID NO: 328591 - DNA, 2161 bp, Homo sapiens
aaccaagttccccggcaactagcagcatccaccgggcgggaggtcggaggcagcaaggccttaaaggctactgagtgcgccggccgttccgtgtccagaacctcccctactcctccgccttctcttccttggccgcccaccgccaagttccgactccggttttcgcctttgcaaagcctaaggaggaggttaggaacagccgcgcccccctccctgcggccgccgccccctgcctctcggctctgctccctgccgcgtgcgcctgggccgtgcgccccggcaggccccagccatgtcgatgctgccgtcgtttggctttacgcaggagcaagtggcgtgcgtgtgcgaggttctgcagcaaggcggaaacctggagcgcctgggcaggttcctgtggtcactgcccgcctgcgaccacctgcacaagaacgagagcgtactcaaggccaaggcggtggtcgccttccaccgcggcaacttccgtgagctctacaagatcctggagagccaccagttctcgcctcacaaccaccccaaactgcagcaactgtggctgaaggcgcattacgtggaggccgagaagctgcgcggccgacccctgggcgccgtgggcaaatatcgggtgcgccgaaaatttccactgccgcgcaccatctgggacggcgaggagaccagctactgcttcaaggagaagtcgaggggtgtcctgcgggagtggtacgcgcacaatccctacccatcgccgcgtgagaagcgggagctggccgaggccaccggcctcaccaccacccaggtcagcaactggtttaagaaccggaggcaaagagaccgggccgcggaggccaaggaaagggagaacaccgaaaacaataactcctcctccaacaagcagaaccaactctctcctctggaagggggcaagccgctcatgtccagctcagaagaggaattctcacctccccaaagtccagaccagaactcggtccttctgctgcagggcaatatgggccacgccaggagctcaaactattctctcccgggcttaacagcctcgcagcccagtcacggcctgcagacccaccagcatcagctccaagactctctgctcggccccctcacctccagtctggtggacttggggtcctaagtggggagggactggggcctcgaagggattcctggagcagcaaccactgcagcgactagggacacttgtaaatagaaatcaggaacatttttgcagcttgtttctggagttgtttgcgcataaaggaatggtggactttcacaaatatctttttaaaaatcaaaaccaacagcgatctcaagcttaatctcctcttctctccaactctttccacttttgcattttccttcccaatgcagagatcagggaaaaaaaaaaaaaaaaacccaaacaaacaaaagcacccaggcccccagtctgagttctggggcaattgatacgcctgtttcagcaggctttcttttttttcaatgaaggggaattgcaaatcaactggattttcattattcccttttaatttatatatggagaaatgtgaagagggaaaggaaatggaaagagaaagagaaagggagataaaaatagtgaaaataagagcctccaggctcagcaagaactgattacattcttaaggtgaacaggaaaaatacaatctataactttctttgatgaggaaaaattaagtttacatttttcatatttagtgttaaacaatttaatgtagattaaaataaaagaccagtattaggaggaaaaaacaagtgcctaaatgtcttaatgctctctatgtgagacagaaatagacgtgaccattagtaatgcaactatttttgtcaaatttagtgggattttttggttgttgtttgttttcttgggtttttttttttaaatgacaaactctaaaaatgtaccaatgtgaaaaaacactttcctgaatgccattactcatgccctcaaagctttcatatctgtagcctactcctgtaaagggtttctcctgtttctagtttctagtttgcaaaggtatgccaacgaatctggcaacctggtatttgttactaaaacagcatgtgttttcaggtttcttttctattgtacctaaagcagtctaaattaaaacttagtagaacacca

SEQ ID NO: 328592 - DNA, 1363 bp, Homo sapiens
acgtgatctatttttcagaacagcaagtggatgggaaagaaccttgacaacacaaaactcatttactaatggactggttttgggtttctcttctctgagtccgcaaatctctctgcctgagccccaggcctattcagacctcgcggggagcggcgtcccccaggagcaggtgggctgctgctccggcgccacgccggccatcggagccggagttcccaagggtcgagggcacccggagtttccgactaagcagaggaaaaagaattttggcacttcagccggatttggggagtctccgcactgccccagagcgatgacacgaatttattgaagaaacacctctctatgccctccctttccaaatatttgtaggtagagtagaatcctcaccgtcgttctggatggtgaaagaattccaagaaagcggcccgggagcccctaactatcttgctacaagccagaagggaaacaagtgggtcccagctaggggtgtttgcatcaaggcctgtcaacccagccgagaaaccctagcaacagctaatgctgtcccactgaatgctttttcatcgactaaagcgcacgcggccgttacctgcacagaggaggcactggagagccgaaacctggcatcgggcgctccttgccagcggtgttccctcccgagccgcgctgcagcgagggcagcagccggctggctagagttgctcatttcctttaaatctccaacgcatctctgcttttcgtgcgatttgcattgacagcaaaggttttatgttacgagaacaactcaaacctttctgtgtgcgatttaaaatggatcatttagtttaggtggtttgtaaattcatgtcattttacctctttcagcggttttcagtgaaaggttccattttgggaaaccttatatatccgagccaataattaacatttataacaattggttcccctaaccgagggatcgaaatagcaggtagactccttggtataaagcgcatagcactttccctttccagttacgcgatctattggattaagcgggaggaaaaatgttggccggcccagtcacagcctccgaggaagagcacctcttttctgcccgggttcccgcaatcacaccttctacacgtcgtcttcccagatgacggcaatgtagtacgtcctggttccttttgaagacagataaaaagaaatgggcaggtaggtctggaggaagccgggaaaaaaaggtggtcctatttgtgtctaattgccatctctgctgtcatcctctgtaaatttatacctgcccttatttgtgcaggctatgcctcatttccttatacaaaattgttaattacaaagcacaccccatactcaaaaaaaa

SEQ ID NO: 328593 - DNA, 438 bp, Homo sapiens
cctacctagaagacttaggaatgtgggtccccagcgccgccatctgagactccagagtcgaggctcctagcatcccctacgtagaacactgagaaattccgactgcgggaccccagtctccgagagaccccagattctattcctggagcctgagagcccgaagttcacgcccctgagtctgggctccgcacctccctggggaccgcgtcggggtcgcgcaggagccgggctgcctcgagccggggctggaggctccccgggaggactctgctgggccgctcagccatgcctgagggagcccaaggactgagcctctccaaacctagcccaagcctcgggtgtggccgaagaggtgaagtgtgtgactgtggcaccgtgtgtgagactcggacaggtgagcctagaggcaggggcggcggagcctgtggggcttttatt

SEQ ID NO: 328594 - DNA, 381 bp, Homo sapiens
gaatatgaaaaagtaaaaaaaaaaggtatccaatagactccaacgaaatgagtcagttacgtaaaaaaacaagattaatgacaatcaagaaacataccccatccctccctcactggactctccggggtcttagtactatgatacttcagagacaattccatgctgatacgggggagatcaattttggggctctgggataagtctgtcccacatctgtctgatttcccttggcatccttcccgtcagttcctcttgaatatcccagttcttgtacccactcacatacctcagatcccttcactcctccccgcagtttgcagcatgggtcacagtgagaccctgtctcaaataaataaataaaaattttaagagaaaaaaaaa

SEQ ID NO: 328595 - DNA, 5193 bp, Homo sapiens
gcgtgcctggtggctgcctgacaggaactagggaagcactgggcggagggcccaggcactgggggtcgcgagatggtggaggaagctattgtgtccatgacagcggttgcctggtacatcaacgacatgaagcgcaagcaggagcatgcagcgcgcctccaggaagtgcagcggcggctgggtggctggaccggaccagagctcagtgcttttggggaactggtgttggagggcgcgttccgaggaggcggagggggtggcccccggctacgagggggtgagcggctgctcttcctgttctctcggatgctgctggtggccaagcgcagggggctggagtacacctacaaaggccacatcttctgctgcaacctgagcgtgagcgagagtccccgagaccctctagggttcaaggtgtctgatctgaccattcccaagcacagacacctgctccaggccaagaaccaagaagagaagaggctgtggattcactgtctccagcgcctcttctttgagaaccaccctgcctccatccctgccaaggcaaagcaagttctccttgaaaacagcctgcattgtgcccccaaaagtaagcctgtcctagagcccctgacacccccacttgggtctcctcgacctcgagatgctagaagttttacccctgggcgaaggaacacagctccatctcctgggccctctgtgattcgccgaggccgcaggcagtctgagccggtgaaggacccttatgtcatgttcccacagaacgctaagcctggattcaagcacgctggcagcgaaggggaactctaccctccagaatctcagccaccagtttcaggctctgcaccccctgaggacctggaggatgctggacccccaacactggacccctctgggacctcaatcactgaagaaatcctggaactgctgaatcagcgaggccttcgagatccagggccgtccacccatgacattcccaagttccccggagactcccaggtgcctggcgacagcgaaaccctcacattccaagccctgcccagccgggactcttcagaagaggaggaggaggaagaggaagggctggagatggatgaacgggggccttccccactccacgtcctggaagggctcgaaagttccattgcagctgaaatgcccagcattccctgccttaccaaaattcctgacgtgcccaaccttcctgaaattcccagccgctgtgaaattcccgaaggttctcgccttcctagtctctctgacatttccgatgtttttgagatgccctgccttccagccatacctagtgtccccaacacccccagtctgtctagcactcccaccctctcctgtgactcctggctccaagggcctctgcaggaaccagctgaggctccagccaccaggagagaactgttttctgggagcaatcctgggaaactgggagagccgccttcaggaggcaaggcagggccagaggaggatgaagaaggggtatcattcacagacttccagccccaggatgtcacccaacatcagggattcccagatgagctggcattccgctcttgctcagaaatccggagcgcctggcaggcattggaacagggacagctggcccggccaggcttcccagagccactgctgatcctggaggattcggatctgggtggagacagcgggagcgggaaggcaggagccccgagttcagaaaggacggcgtcccgagtgcgagagctggcccggctttacagcgagcggatccagcagatgcagcgggcggagactcgggcatcagccaatgccccgcgccgccggcctcgggttctggcccaaccccagccatccccctgtctgccccaggagcaggcagagccagggctcctgcctgcctttggacacgtgctggtatgtgagctggccttcccactgacatgtgcccaggagtctgtccccctgggtcctgctgtctgggttcaagctgccatacctttgtcaaagcagggaggcagcccggatggccagggtctacatgtttccaatttgcctaagcaagaccttccgggcatccacgtttcagctgctacccttttgcctgagcaaggaggttcccggcatgtccaggctccagccgccacacctttgcccaagcaagaaggccccctgcacctccaggtgccggctcttacaactttctctgatcaaggccacccagaaatccaagttccagccaccactcctttgcctgagcatagaagtcacatggttataccagctccatccaccgccttttgtcctgagcagggacactgtgcggacatccacgttcccaccactccagctttgcccaaggagatttgttctgatttcacagtttcagtcaccacccctgtgcccaagcaagaaggtcacctagacagcgagagcccaaccaatatcccactgacaaagcaaggaggttccagggatgttcagggcccagaccctgtctgcagtcaacccatccagcctttgtcttggcatggaagcagcctggatccccagggcccaggcgacaccctaccacccttgccatgtcacctcccagaccttcagattccaggtacctcacctttgcctgcacatggaagccacctggaccatcggatcccagccaacgccccactgtctttgtcccaggagctcccagacactcaggttccagctaccacacctttgcccctgccacaagtcctcacagacatctgggtccaagccctcccaacttcacccaagcagggaagcctcccagacatccagggtccagcggctgcacctccacttccggagccaagccttacagatacacaggtccaaaaactcacaccttcgttggagcagaagagcctcatagatgcccatgttccagctgccacacctttacctgagagaggaggctctctagacattcagggcctctcacccaccccagttcagaccaccatggttttgtccaaaccaggaggctccttagcctctcacgttgccaggttggagtcttcagacttgacgccacctcatagtcccccaccttccagccgtcagctcctgggccccaatgcagctgccctctccagatacctggcagcctcatatatcagccagagcctggctcggcggcaggggcctgggggaggggcccccgcagcctcccggggctcctggtcctctgctcccacgtcacgggcatcttcgccgcccccccagccccagccaccacctcccccagccaggcggctcagctatgccacgacggttaacatccacgtgggcgggggtgggcggctgcggccagccaaggcccaggtccggttgaaccaccctgctctcttggcctccacacaggaatctatgggccttcacagggcccagggggctcctgatgcccccttccacatgtgagccaggacatgaggcttccctgaagcaaggatttcagccagatgccatagaccctcagaacttgacctggaagtccagacactgaacgcaggcctcaaaactgctgcggccttccaactcctggtatctgcatcggcgaatggcccttcttgccttgatccacagggatggggaagggaggaatgtcattaatgttttgttaatactgattctttcatgcaatgatgtgtattttcccattctggaggctgtgggagatgacaagacaatgaatgggaaggtctgacacagaacaaatcagcggttctgaaagcttggggaatctcagactcctttgagaattattggaaaatggacccactataacttggcgtgtgtgtgaactgcttgatgcccatccaggaaagccaagttaagaagctttgcttcaagtagacactagaaatccattcccttggcaatttatacagttcacgtctcccaccatccgttcatctcacccaccctgccatctctccacctatccatctggctattgctccatctagctttcccgctccatctacccatcttccaatccatcatctcacgtatctgccttgcttatccaactgtctgccttattcacccacccatccctttatcattctaaccccatctggcattccatccctccatttatccatcttcccacttacccatcttctccatccagcactccgttcatcagtccgtctctccctccatatttccatctgtccattcatccactcattttgccatccatacatattcacccagccatctcccaatccatcgacataccccatccctccctcactggactctccggggtcttagtactatgatacttcagagacaattccatgctgatacgggggagatcaattttggggctctgggataagtctgtcccacatctgtctgatttcccttggcatccttcccgtcagttcctcttgaatatcccagttcttgtacccactcacatacctcagatcccttcactcctccccgcagtttgcagcctctacaattcatccacatgctccctcccccagcaaaataattcaggtcgtggagacaaaaggcttttatgttaggttctgtctgcccccttgttccagcagtggtatgcccagtgagaggcacaatttaaacggtttctttggtgatgatattagctactttcatcaaatacttagcctcttgtgctttagcacattatttatgtaagctcccctaggattctctgaagcaccctggtgtcctggctgtgaattcaagtcccatctttacttatttggtgtgggtcctccctctgagccggttttctcatctacaaaatgaagacaacagtacttccctcctgggatcattgaaagatttagggagcatatccttccacttcccaaacatatttgaacctctgacttggcagtgaaccgagattgcgccactagactccaagccctggagagacggaggccagcaagctggtcctccacacaacctacccatggaacctacccttcaattaaccaccacgcccgcaccccccaacgcacccccccagctcagacgcaccgccccacaccacaacgcggcacccagcccccacgcgcacaattccccactccccccgcgcgcccagccacacacaccggcccacccccgcccgacacaccaggccgaccgacgggggccccccacacgcgggggcaccacagg

SEQ ID NO: 328596 - DNA, 4550 bp, Homo sapiens
gcgtgcctggtggctgcctgacaggaactagggaagcactgggcggagggcccaggcactgggggtcgcgagatggtggaggaagctattgtgtccatgacagcggttgcctggtacatcaacgacatgaagcgcaagcaggagcatgcagcgcgcctccaggaagtgcagcggcggctgggtggctggaccggaccagagctcagtgcttttggggaactggtgttggagggcgcgttccgaggaggcggagggggtggcccccggctacgagggggtgagcggctgctcttcctgttctctcggatgctgctggtggccaagcgcagggggctggagtacacctacaaaggccacatcttctgctgcaacctgagcgtgagcgagagtccccgagaccctctagggttcaaggtgtctgatctgaccattcccaagcacagacacctgctccaggccaagaaccaagaagagaagaggctgtggattcactgtctccagcgcctcttctttgagaaccaccctgcctccatccctgccaaggcaaagcaagttctccttgaaaacagcctgcattgtgcccccaaaagtaagcctgtcctagagcccctgacacccccacttgggtctcctcgacctcgagatgctagaagttttacccctgggcgaaggaacacagctccatctcctgggccctctgtgattcgccgaggccgcaggcagtctgagccggtgaaggacccttatgtcatgttcccacagaacgctaagcctggattcaagcacgctggcagcgaaggggaactctaccctccagaatctcagccaccagtttcaggctctgcaccccctgaggacctggaggatgctggacccccaacactggacccctctgggacctcaatcactgaagaaatcctggaactgctgaatcagcgaggccttcgagatccagggccgtccacccatgacattcccaagttccccggagactcccaggtgcctggcgacagcgaaaccctcacattccaagccctgcccagccgggactcttcagaagaggaggaggaggaagaggaagggctggagatggatgaacgggggccttccccactccacgtcctggaagggctcgaaagttccattgcagctgaaatgcccagcattccctgccttaccaaaattcctgacgtgcccaaccttcctgaaattcccagccgctgtgaaattcccgaaggttctcgccttcctagtctctctgacatttccgatgtttttgagatgccctgccttccagccatacctagtgtccccaacacccccagtctgtctagcactcccaccctctcctgtgactcctggctccaagggcctctgcaggaaccagctgaggctccagccaccaggagagaactgttttctgggagcaatcctgggaaactgggagagccgccttcaggaggcaaggcagggccagaggaggatgaagaaggggtatcattcacagacttccagccccaggatgtcacccaacatcagggattcccagatgagctggcattccgctcttgctcagaaatccggagcgcctggcaggcattggaacagggacagctggcccggccaggcttcccagagccactgctgatcctggaggattcggatctgggtggagacagcgggagcgggaaggcaggagccccgagttcagaaaggacggcgtcccgagtgcgagagctggcccggctttacagcgagcggatccagcagatgcagcgggcggagactcgggcatcagccaatgccccgcgccgccggcctcgggttctggcccaaccccagccatccccctgtctgccccaggagcaggcagagccagggctcctgcctgcctttggacacgtgctggtatgtgagctggccttcccactgacatgtgcccaggagtctgtccccctgggtcctgctgtctgggttcaagctgccatacctttgtcaaagcagggaggcagcccggatggccagggtctacatgtttccaatttgcctaagcaagaccttccgggcatccacgtttcagctgctacccttttgcctgagcaaggaggttcccggcatgtccaggctccagccgccacacctttgcccaagcaagaaggccccctgcacctccaggtgccggctcttacaactttctctgatcaaggccacccagaaatccaagttccagccaccactcctttgcctgagcatagaagtcacatggttataccagctccatccaccgccttttgtcctgagcagggacactgtgcggacatccacgttcccaccactccagctttgcccaaggagatttgttctgatttcacagtttcagtcaccacccctgtgcccaagcaagaaggtcacctagacagcgagagcccaaccaatatcccactgacaaagcaaggaggttccagggatgttcagggcccagaccctgtctgcagtcaacccatccagcctttgtcttggcatggaagcagcctggatccccagggcccaggcgacaccctaccacccttgccatgtcacctcccagaccttcagattccaggtacctcacctttgcctgcacatggaagccacctggaccatcggatcccagccaacgccccactgtctttgtcccaggagctcccagacactcaggttccagctaccacacctttgcccctgccacaagtcctcacagacatctgggtccaagccctcccaacttcacccaagcagggaagcctcccagacatccagggtccagcggctgcacctccacttccggagccaagccttacagatacacaggtccaaaaactcacaccttcgttggagcagaagagcctcatagatgcccatgttccagctgccacacctttacctgagagaggaggctctctagacattcagggcctctcacccaccccagttcagaccaccatggttttgtccaaaccaggaggctccttagcctctcacgttgccaggttggagtcttcagacttgacgccacctcatagtcccccaccttccagccgtcagctcctgggccccaatgcagctgccctctccagatacctggcagcctcatatatcagccagagcctggctcggcggcaggggcctgggggaggggcccccgcagcctcccggggctcctggtcctctgctcccacgtcacgggcatcttcgccgcccccccagccccagccaccacctcccccagccaggcggctcagctatgccacgacggttaacatccacgtgggcgggggtgggcggctgcggccagccaaggcccaggtccggttgaaccaccctgctctcttggcctccacacaggaatctatgggccttcacagggcccagggggctcctgatgcccccttccacatgtgagccaggacatgaggcttccctgaagcaaggatttcagccagatgccatagaccctcagaacttgacctggaagtccagacactgaacgcaggcctcaaaactgctgcggccttccaactcctggtatctgcatcggcgaatggcccttcttgccttgatccacagggatggggaagggaggaatgtcattaatgttttgttaatactgattctttcatgcaatgatgtgtattttcccattctggaggctgtgggagatgacaagacaatgaatgggaaggtctgacacagaacaaatcagcggttctgaaagcttggggaatctcagactcctttgagaattattggaaaatggacccactataacttggcgtgtgtgtgaactgcttgatgcccatccaggaaagccaagttaagaagctttgcttcaagtagacactagaaatccattcccttggcaatttatacagttcacgtctcccaccatccgttcatctcacccaccctgccatctctccacctatccatctggctattgctccatctagctttcccgctccatctacccatcttccaatccatcatctcacgtatctgccttgcttatccaactgtctgccttattcacccacccatccctttatcattctaaccccatctggcattccatccctccatttatccatcttcccacttacccatcttctccatccagcactccgttcatcagtccgtctctccctccatatttccatctgtccattcatccactcattttgccatccatacatattcacccagccatctcccaatccatcgacataccccatccctccctcactggactctccggggtcttagtactatgatacttcagagacaattccatgctgatacgggggagatcaattttggggctctgggataagtctgtcccacatctgtctgatttcccttggcatccttcccgtcagttcctcttgaatatcccagttcttgtacccactcacatacctcagatcccttcactcctccccgcagtttgcagcatgggtcacagtgagaccctgtctcaaataaataaataaaaattttaagagaaaaaaaaa

SEQ ID NO: 328597 - DNA, 4838 bp, Homo sapiens
gcgtgcctggtggctgcctgacaggaactagggaagcactgggcggagggcccaggcactgggggtcgcgagatggtggaggaagctattgtgtccatgacagcggttgcctggtacatcaacgacatgaagcgcaagcaggagcatgcagcgcgcctccaggaagtgcagcggcggctgggtggctggaccggaccagagctcagtgcttttggggaactggtgttggagggcgcgttccgaggaggcggagggggtggcccccggctacgagggggtgagcggctgctcttcctgttctctcggatgctgctggtggccaagcgcagggggctggagtacacctacaaaggccacatcttctgctgcaacctgagcgtgagcgagagtccccgagaccctctagggttcaaggtgtctgatctgaccattcccaagcacagacacctgctccaggccaagaaccaagaagagaagaggctgtggattcactgtctccagcgcctcttctttgagaaccaccctgcctccatccctgccaaggcaaagcaagttctccttgaaaacagcctgcattgtgcccccaaaagtaagcctgtcctagagcccctgacacccccacttgggtctcctcgacctcgagatgctagaagttttacccctgggcgaaggaacacagctccatctcctgggccctctgtgattcgccgaggccgcaggcagtctgagccggtgaaggacccttatgtcatgttcccacagaacgctaagcctggattcaagcacgctggcagcgaaggggaactctaccctccagaatctcagccaccagtttcaggctctgcaccccctgaggacctggaggatgctggacccccaacactggacccctctgggacctcaatcactgaagaaatcctggaactgctgaatcagcgaggccttcgagatccagggccgtccacccatgacattcccaagttccccggagactcccaggtgcctggcgacagcgaaaccctcacattccaagccctgcccagccgggactcttcagaagaggaggaggaggaagaggaagggctggagatggatgaacgggggccttccccactccacgtcctggaagggctcgaaagttccattgcagctgaaatgcccagcattccctgccttaccaaaattcctgacgtgcccaaccttcctgaaattcccagccgctgtgaaattcccgaaggttctcgccttcctagtctctctgacatttccgatgtttttgagatgccctgccttccagccatacctagtgtccccaacacccccagtctgtctagcactcccaccctctcctgtgactcctggctccaagggcctctgcaggaaccagctgaggctccagccaccaggagagaactgttttctgggagcaatcctgggaaactgggagagccgccttcaggaggcaaggcagggccagaggaggatgaagaaggggtatcattcacagacttccagccccaggatgtcacccaacatcagggattcccagatgagctggcattccgctcttgctcagaaatccggagcgcctggcaggcattggaacagggacagctggcccggccaggcttcccagagccactgctgatcctggaggattcggatctgggtggagacagcgggagcgggaaggcaggagccccgagttcagaaaggacggcgtcccgagtgcgagagctggcccggctttacagcgagcggatccagcagatgcagcgggcggagactcgggcatcagccaatgccccgcgccgccggcctcgggttctggcccaaccccagccatccccctgtctgccccaggagcaggcagagccagggctcctgcctgcctttggacacgtgctggtatgtgagctggccttcccactgacatgtgcccaggagtctgtccccctgggtcctgctgtctgggttcaagctgccatacctttgtcaaagcagggaggcagcccggatggccagggtctacatgtttccaatttgcctaagcaagaccttccgggcatccacgtttcagctgctacccttttgcctgagcaaggaggttcccggcatgtccaggctccagccgccacacctttgcccaagcaagaaggccccctgcacctccaggtgccggctcttacaactttctctgatcaaggccacccagaaatccaagttccagccaccactcctttgcctgagcatagaagtcacatggttataccagctccatccaccgccttttgtcctgagcagggacactgtgcggacatccacgttcccaccactccagctttgcccaaggagatttgttctgatttcacagtttcagtcaccacccctgtgcccaagcaagaaggtcacctagacagcgagagcccaaccaatatcccactgacaaagcaaggaggttccagggatgttcagggcccagaccctgtctgcagtcaacccatccagcctttgtcttggcatggaagcagcctggatccccagggcccaggcgacaccctaccacccttgccatgtcacctcccagaccttcagattccaggtacctcacctttgcctgcacatggaagccacctggaccatcggatcccagccaacgccccactgtctttgtcccaggagctcccagacactcaggttccagctaccacacctttgcccctgccacaagtcctcacagacatctgggtccaagccctcccaacttcacccaagcagggaagcctcccagacatccagggtccagcggctgcacctccacttccggagccaagccttacagatacacaggtccaaaaactcacaccttcgttggagcagaagagcctcatagatgcccatgttccagctgccacacctttacctgagagaggaggctctctagacattcagggcctctcacccaccccagttcagaccaccatggttttgtccaaaccaggaggctccttagcctctcacgttgccaggaatctatgggccttcacagggcccagggggctcctgatgcccccttccacatgtgagccaggacatgaggcttccctgaagcaaggatttcagccagatgccatagaccctcagaacttgacctggaagtccagacactgaacgcaggcctcaaaactgctgcggccttccaactcctggtatctgcatcggcgaatggcccttcttgccttgatccacagggatggggaagggaggaatgtcattaatgttttgttaatactgattctttcatgcaatgatgtgtattttcccattctggaggctgtgggagatgacaagacaatgaatgggaaggtctgacacagaacaaatcagcggttctgaaagcttggggaatctcagactcctttgagaattattggaaaatggacccactataacttggcgtgtgtgtgaactgcttgatgcccatccaggaaagccaagttaagaagctttgcttcaagtagacactagaaatccattcccttggcaatttatacagttcacgtctcccaccatccgttcatctcacccaccctgccatctctccacctatccatctggctattgctccatctagctttcccgctccatctacccatcttccaatccatcatctcacgtatctgccttgcttatccaactgtctgccttattcacccacccatccctttatcattctaaccccatctggcattccatccctccatttatccatcttcccacttacccatcttctccatccagcactccgttcatcagtccgtctctccctccatatttccatctgtccattcatccactcattttgccatccatacatattcacccagccatctcccaatccatcgacataccccatccctccctcactggactctccggggtcttagtactatgatacttcagagacaattccatgctgatacgggggagatcaattttggggctctgggataagtctgtcccacatctgtctgatttcccttggcatccttcccgtcagttcctcttgaatatcccagttcttgtacccactcacatacctcagatcccttcactcctccccgcagtttgcagcctctacaattcatccacatgctccctcccccagcaaaataattcaggtcgtggagacaaaaggcttttatgttaggttctgtctgcccccttgttccagcagtggtatgcccagtgagaggcacaatttaaacggtttctttggtgatgatattagctactttcatcaaatacttagcctcttgtgctttagcacattatttatgtaagctcccctaggattctctgaagcaccctggtgtcctggctgtgaattcaagtcccatctttacttatttggtgtgggtcctccctctgagccggttttctcatctacaaaatgaagacaacagtacttccctcctgggatcattgaaagatttagggagcatatccttccacttcccaaacatatttgaacctctgacttggcagtgaaccgagattgcgccactagactccaagccctggagagacggaggccagcaagctggtcctccacacaacctacccatggaacctacccttcaattaaccaccacgcccgcaccccccaacgcacccccccagctcagacgcaccgccccacaccacaacgcggcacccagcccccacgcgcacaattccccactccccccgcgcgcccagccacacacaccggcccacccccgcccgacacaccaggccgaccgacgggggccccccacacgcgggggcaccacagg

SEQ ID NO: 328598 - DNA, 3620 bp, Homo sapiens
aaacgttcccaggatccctaagcctccggccccagacaaacgggactcgcagcttctgcgcctcctgctccgctcactcttctttgtctcagcctttccatctttttcgccaggactctgctgggccgctcagccatgcctgagggagcccaaggactgagcctctccaaacctagcccaagcctcgggtgtggccgaagaggtgaagtgtgtgactgtggcaccgtgtgtgagactcggacagctcctgcagcccccaccatggcctccccccgaggttctgggagctccacatccctgagcacagtgggctctgagggggatccagcccctgggcccactccagcctgctcagcctccaggccagagccccttccagggcccccatccgcctacatctctctccggtggggatcccaggttcagccagaccctcaaggctggagcgtgtggcccgggagatcgtggagacagaacgggcctatgtcagggacctccgcagcatcgtggaggactacctgggccctctgctggacggcggggtcctggggctgagcgtggagcaggtgggcacgctgtttgccaacattgaggacatctacgagttcagcagcgagctcctggaggacttggagaacagcagcagcgccgggggtattgccgagtgcttcgtgcagaggagcgaggattttgacatctacacattgtactgcatgaactacccgagctccctggccctgctccgggagctgtcgttgtctccgccagcagccctgtggctgcaggagcgccaggcccagcttcgccactcgctgcccctgcagagcttcctgctgaaacctgtccagcgcattctcaagtaccatctgctgctgcaggaactagggaagcactgggcggagggcccaggcactgggggtcgcgagatggtggaggaagctattgtgtccatgacagcggttgcctggtacatcaacgacatgaagcgcaagcaggagcatgcagcgcgcctccaggaagtgcagcggcggctgggtggctggaccggaccagagctcagtgcttttggggaactggtgttggagggcgcgttccgaggaggcggagggggtggcccccggctacgagggggtgagcggctgctcttcctgttctctcggatgctgctggtggccaagcgcagggggctggagtacacctacaaaggccacatcttctgctgcaacctgagcgtgagcgagagtccccgagaccctctagggttcaaggtgtctgatctgaccattcccaagcacagacacctgctccaggccaagaaccaagaagagaagaggctgtggattcactgtctccagcgcctcttctttgagaaccaccctgcctccatccctgccaaggcaaagcaagttctccttgaaaacagcctgcattgtgcccccaaaagtaagcctgtcctagagcccctgacacccccacttgggtctcctcgacctcgagatgctagaagttttacccctgggcgaaggaacacagctccatctcctgggccctctgtgattcgccgaggccgcaggcagtctgagccggtgaaggacccttatgtcatgttcccacagaacgctaagcctggattcaagcacgctggcagcgaaggggaactctaccctccagaatctcagccaccagtttcaggctctgcaccccctgaggacctggaggatgctggacccccaacactggacccctctgggacctcaatcactgaagaaatcctggaactgctgaatcagcgaggccttcgagatccaggggaatctatgggccttcacagggcccagggggctcctgatgcccccttccacatgtgagccaggacatgaggcttccctgaagcaaggatttcagccagatgccatagaccctcagaacttgacctggaagtccagacactgaacgcaggcctcaaaactgctgcggccttccaactcctggtatctgcatcggcgaatggcccttcttgccttgatccacagggatggggaagggaggaatgtcattaatgttttgttaatactgattctttcatgcaatgatgtgtattttcccattctggaggctgtgggagatgacaagacaatgaatgggaaggtctgacacagaacaaatcagcggttctgaaagcttggggaatctcagactcctttgagaattattggaaaatggacccactataacttggcgtgtgtgtgaactgcttgatgcccatccaggaaagccaagttaagaagctttgcttcaagtagacactagaaatccattcccttggcaatttatacagttcacgtctcccaccatccgttcatctcacccaccctgccatctctccacctatccatctggctattgctccatctagctttcccgctccatctacccatcttccaatccatcatctcacgtatctgccttgcttatccaactgtctgccttattcacccacccatccctttatcattctaaccccatctggcattccatccctccatttatccatcttcccacttacccatcttctccatccagcactccgttcatcagtccgtctctccctccatatttccatctgtccattcatccactcattttgccatccatacatattcacccagccatctcccaatccatcgacataccccatccctccctcactggactctccggggtcttagtactatgatacttcagagacaattccatgctgatacgggggagatcaattttggggctctgggataagtctgtcccacatctgtctgatttcccttggcatccttcccgtcagttcctcttgaatatcccagttcttgtacccactcacatacctcagatcccttcactcctccccgcagtttgcagcctctacaattcatccacatgctccctcccccagcaaaataattcaggtcgtggagacaaaaggcttttatgttaggttctgtctgcccccttgttccagcagtggtatgcccagtgagaggcacaatttaaacggtttctttggtgatgatattagctactttcatcaaatacttagcctcttgtgctttagcacattatttatgtaagctcccctaggattctctgaagcaccctggtgtcctggctgtgaattcaagtcccatctttacttatttggtgtgggtcctccctctgagccggttttctcatctacaaaatgaagacaacagtacttccctcctgggatcattgaaagatttagggagcatatccttccacttcccaaacatatttgaacctctgacttggcagtgaaccgagattgcgccactagactccaagccctggagagacggaggccagcaagctggtcctccacacaacctacccatggaacctacccttcaattaaccaccacgcccgcaccccccaacgcacccccccagctcagacgcaccgccccacaccacaacgcggcacccagcccccacgcgcacaattccccactccccccgcgcgcccagccacacacaccggcccacccccgcccgacacaccaggccgaccgacgggggccccccacacgcgggggcaccacagg

SEQ ID NO: 328599 - DNA, 3357 bp, Homo sapiens
cgctggagtagtggtcctgactcgatcctcttttcgcattcagggctcctgcctgcctttggacacgtgctggtatgtgagctggccttcccactgacatgtgcccaggagtctgtccccctgggtcctgctgtctgggttcaagctgccatacctttgtcaaagcagggaggcagcccggatggccagggtctacatgtttccaatttgcctaagcaagaccttccgggcatccacgtttcagctgctacccttttgcctgagcaaggaggttcccggcatgtccaggctccagccgccacacctttgcccaagcaagaaggccccctgcacctccaggtgccggctcttacaactttctctgatcaaggccacccagaaatccaagttccagccaccactcctttgcctgagcatagaagtcacatggttataccagctccatccaccgccttttgtcctgagcagggacactgtgcggacatccacgttcccaccactccagctttgcccaaggagatttgttctgatttcacagtttcagtcaccacccctgtgcccaagcaagaaggtcacctagacagcgagagcccaaccaatatcccactgacaaagcaaggaggttccagggatgttcagggcccagaccctgtctgcagtcaacccatccagcctttgtcttggcatggaagcagcctggatccccagggcccaggcgacaccctaccacccttgccatgtcacctcccagaccttcagattccaggtacctcacctttgcctgcacatggaagccacctggaccatcggatcccagccaacgccccactgtctttgtcccaggagctcccagacactcaggttccagctaccacacctttgcccctgccacaagtcctcacagacatctgggtccaagccctcccaacttcacccaagcagggaagcctcccagacatccagggtccagcggctgcacctccacttccggagccaagccttacagatacacaggtccaaaaactcacaccttcgttggagcagaagagcctcatagatgcccatgttccagctgccacacctttacctgagagaggaggctctctagacattcagggcctctcacccaccccagttcagaccaccatggttttgtccaaaccaggaggctccttagcctctcacgttgccaggttggagtcttcagacttgacgccacctcatagtcccccaccttccagccgtcagctcctgggccccaatgcagctgccctctccagatacctggcagcctcatatatcagccagagcctggctcggcggcaggggcctgggggaggggcccccgcagcctcccggggctcctggtcctctgctcccacgtcacgggcatcttcgccgcccccccagccccagccaccacctcccccagccaggcggctcagctatgccacgacggttaacatccacgtgggcgggggtgggcggctgcggccagccaaggcccaggtccggttgaaccaccctgctctcttggcctccacacaggaatctatgggccttcacagggcccagggggctcctgatgcccccttccacatgtgagccaggacatgaggcttccctgaagcaaggatttcagccagatgccatagaccctcagaacttgacctggaagtccagacactgaacgcaggcctcaaaactgctgcggccttccaactcctggtatctgcatcggcgaatggcccttcttgccttgatccacagggatggggaagggaggaatgtcattaatgttttgttaatactgattctttcatgcaatgatgtgtattttcccattctggaggctgtgggagatgacaagacaatgaatgggaaggtctgacacagaacaaatcagcggttctgaaagcttggggaatctcagactcctttgagaattattggaaaatggacccactataacttggcgtgtgtgtgaactgcttgatgcccatccaggaaagccaagttaagaagctttgcttcaagtagacactagaaatccattcccttggcaatttatacagttcacgtctcccaccatccgttcatctcacccaccctgccatctctccacctatccatctggctattgctccatctagctttcccgctccatctacccatcttccaatccatcatctcacgtatctgccttgcttatccaactgtctgccttattcacccacccatccctttatcattctaaccccatctggcattccatccctccatttatccatcttcccacttacccatcttctccatccagcactccgttcatcagtccgtctctccctccatatttccatctgtccattcatccactcattttgccatccatacatattcacccagccatctcccaatccatcgacataccccatccctccctcactggactctccggggtcttagtactatgatacttcagagacaattccatgctgatacgggggagatcaattttggggctctgggataagtctgtcccacatctgtctgatttcccttggcatccttcccgtcagttcctcttgaatatcccagttcttgtacccactcacatacctcagatcccttcactcctccccgcagtttgcagcctctacaattcatccacatgctccctcccccagcaaaataattcaggtcgtggagacaaaaggcttttatgttaggttctgtctgcccccttgttccagcagtggtatgcccagtgagaggcacaatttaaacggtttctttggtgatgatattagctactttcatcaaatacttagcctcttgtgctttagcacattatttatgtaagctcccctaggattctctgaagcaccctggtgtcctggctgtgaattcaagtcccatctttacttatttggtgtgggtcctccctctgagccggttttctcatctacaaaatgaagacaacagtacttccctcctgggatcattgaaagatttagggagcatatccttccacttcccaaacatatttgaacctctgacttggcagtgaaccgagattgcgccactagactccaagccctggagagacggaggccagcaagctggtcctccacacaacctacccatggaacctacccttcaattaaccaccacgcccgcaccccccaacgcacccccccagctcagacgcaccgccccacaccacaacgcggcacccagcccccacgcgcacaattccccactccccccgcgcgcccagccacacacaccggcccacccccgcccgacacaccaggccgaccgacgggggccccccacacgcgggggcaccacagg

SEQ ID NO: 328600 - DNA, 1680 bp, Homo sapiens
caggagtggaaggccgcagcagtttgaggcctgcgttcaggtctggacttccaggtcaagttctgagggtctatggcatctggctgaaatccttgcttcagggaagccgaatgtcattaatgttttgttaatactgattctttcatgcaatgatgtgtattttcccattctggaggctgtgggagatgacaagacaatgaatgggaaggtctgacacagaacaaatcagcggttctgaaagcttggggaatctcagactcctttgagaattattggaaaatggacccactataacttggcgtgtgtgtgaactgcttgatgcccatccaggaaagccaagttaagaagctttgcttcaagtagacactagaaatccattcccttggcaatttatacagttcacgtctcccaccatccgttcatctcacccaccctgccatctctccacctatccatctggctattgctccatctagctttcccgctccatctacccatcttccaatccatcatctcacgtatctgccttgcttatccaactgtctgccttattcacccacccatccctttatcattctaaccccatctggcattccatccctccatttatccatcttcccacttacccatcttctccatccagcactccgttcatcagtccgtctctccctccatatttccatctgtccattcatccactcattttgccatccatacatattcacccagccatctcccaatccatcgacataccccatccctccctcactggactctccggggtcttagtactatgatacttcagagacaattccatgctgatacgggggagatcaattttggggctctgggataagtctgtcccacatctgtctgatttcccttggcatccttcccgtcagttcctcttgaatatcccagttcttgtacccactcacatacctcagatcccttcactcctccccgcagtttgcagcctctacaattcatccacatgctccctcccccagcaaaataattcaggtcgtggagacaaaaggcttttatgttaggttctgtctgcccccttgttccagcagtggtatgcccagtgagaggcacaatttaaacggtttctttggtgatgatattagctactttcatcaaatacttagcctcttgtgctttagcacattatttatgtaagctcccctaggattctctgaagcaccctggtgtcctggctgtgaattcaagtcccatctttacttatttggtgtgggtcctccctctgagccggttttctcatctacaaaatgaagacaacagtacttccctcctgggatcattgaaagatttagggagcatatccttccacttcccaaacatatttgaacctctgacttggcagtgaaccgagattgcgccactagactccaagccctggagagacggaggccagcaagctggtcctccacacaacctacccatggaacctacccttcaattaaccaccacgcccgcaccccccaacgcacccccccagctcagacgcaccgccccacaccacaacgcggcacccagcccccacgcgcacaattccccactccccccgcgcgcccagccacacacaccggcccacccccgcccgacacaccaggccgaccgacgggggccccccacacgcgggggcaccacagg

SEQ ID NO: 328601 - DNA, 1521 bp, Homo sapiens
gcgtgcctggtggctgcctgacaggaactagggaagcactgggcggagggcccaggcactgggggtcgcgagatggtggaggaagctattgtgtccatgacagcggttgcctggtacatcaacgacatgaagcgcaagcaggagcatgcagcgcgcctccaggaagtgcagcggcggctgggtggctggaccggaccagagctcagtgcttttggggaactggtgttggagggcgcgttccgaggaggcggagggggtggcccccggctacgagggggtgagcggctgctcttcctgttctctcggatgctgctggtggccaagcgcagggggctggagtacacctacaaaggccacatcttctgctgcaacctgagcgtgagcgagagtccccgagaccctctagggttcaaggtgtctgatctgaccattcccaagcacagacacctgctccaggccaagaaccaagaagagaagaggctgtggattcactgtctccagcgcctcttctttgagaaccaccctgcctccatccctgccaaggcaaagcaagttctccttgaaaacagcctgcattgtgcccccaaaagtaagcctgtcctagagcccctgacacccccacttgggtctcctcgacctcgagatgctagaagttttacccctgggcgaaggaacacagctccatctcctgggccctctgtgattcgccgaggccgcaggcagtctgagccggtgaaggacccttatgtcatgttcccacagaacgctaagcctggattcaagcacgctggcagcgaaggggaactctaccctccagaatctcagccaccagtttcaggctctgcaccccctgaggacctggaggatgctggacccccaacactggacccctctgggacctcaatcactgaagaaatcctggaactgctgaatcagcgaggccttcgagatccagggccgtccacccatgacattcccaagttccccggagactcccaggtgcctggcgacagcgaaaccctcacattccaagccctgcccagccgggactcttcagaagaggaggaggaggaagaggaagggctggagatggatgaacgggggccttccccactccacgtcctggaagggctcgaaagttccattgcagctgaaatgcccagcattccctgccttaccaaaattcctgacgtgcccaaccttcctgaaattcccagccgctgtgaaattcccgaaggttctcgccttcctagtctctctgacatttccgatgtttttgagatgccctgccttccagccatacctagtgtccccaacacccccagtctgtctagcactcccaccctctcctgtgactcctggctccaagggcctctttggggttagggatgcaagagggaattattgacttcctttcatattgtggatggaggagttcccatattggaaggaatggtataagctggagacaggcggtctctgattgtggaattgattccatttctctgctggggaaagcta

SEQ ID NO: 328602 - DNA, 354 bp, Homo sapiens
gtcatgttcccacagaacgctaagcctggatgccccggttcagcctggtccatccctgtctgtcgcccggtgggatgtctggggcgggttggggaggggtggttgcttcagctcatcagttatgggggaatcactctttttcccttacatctcactaatgcttctctctctctcatctctccatccttagctaagcctggattcaaggtaagagatatctcgagatagggtctgggcaccttgacttctgggtctgatggagaagggagcttgagttccaaaatcctgggtctgaatgagaaggggattggggccagacagagtaactcatgcctgtaatctcagtattttggg

SEQ ID NO: 328603 - DNA, 357 bp, Homo sapiens
tatgtaagctcccctaggattctctgaagcaccctggtgtcctggctgtgaattcaagtcccatctttacttatttggtgtgggtcctccctctgagccggttttctcatctacaaaatgaagacaacagtacttccctcctgggatcattgaaagatttagggagcatatccttccacttcccaaacatatttgaacctctgacttgcttaggagcatcattcaaatcacagatcccccagtatctagtcccaacctattgaatcaggatccccagggaaggaggagcttgggaatctgatttttttttttttttttagataaagtctcactctgtcacccaggcttgagtgcagt

SEQ ID NO: 328604 - DNA, 292 bp, Homo sapiens
tccgggtacgtggttggcagaggtggtccccgctggagtagtggtcctgactcgatcctcttttcgcattcagggctcctgcctgcctttggacacgtgctggtatgtgagctggccttcccactgacatgtgcccaggagtctgtccccctgggtcctgctgtctgggttcaagctgccatacctttgtcaaagcagggaggcagcccggatggccagggtctacatgtttccaatttgcctaagcaagaccttccgggcatccacgtttcagctgctacccttttgcctg

SEQ ID NO: 328605 - DNA, 6197 bp, Homo sapiens
cctacctagaagacttaggaatgtgggtccccagcgccgccatctgagactccagagtcgaggctcctagcatcccctacgtagaacactgagaaattccgactgcgggaccccagtctccgagagaccccagattctattcctggagcctgagagcccgaagttcacgcccctgagtctgggctccgcacctccctggggaccgcgtcggggtcgcgcaggagccgggctgcctcgagccggggctggaggctccccgggaggactctgctgggccgctcagccatgcctgagggagcccaaggactgagcctctccaaacctagcccaagcctcgggtgtggccgaagaggtgaagtgtgtgactgtggcaccgtgtgtgagactcggacagctcctgcagcccccaccatggcctccccccgaggttctgggagctccacatccctgagcacagtgggctctgagggggatccagcccctgggcccactccagcctgctcagcctccaggccagagccccttccagggcccccatccgcctacatctctctccggtggggatcccaggttcagccagaccctcaaggctggagcgtgtggcccgggagatcgtggagacagaacgggcctatgtcagggacctccgcagcatcgtggaggactacctgggccctctgctggacggcggggtcctggggctgagcgtggagcaggtgggcacgctgtttgccaacattgaggacatctacgagttcagcagcgagctcctggaggacttggagaacagcagcagcgccgggggtattgccgagtgcttcgtgcagaggagcgaggattttgacatctacacattgtactgcatgaactacccgagctccctggccctgctccgggagctgtcgttgtctccgccagcagccctgtggctgcaggagcgccaggcccagcttcgccactcgctgcccctgcagagcttcctgctgaaacctgtccagcgcattctcaagtaccatctgctgctgcaggaactagggaagcactgggcggagggcccaggcactgggggtcgcgagatggtggaggaagctattgtgtccatgacagcggttgcctggtacatcaacgacatgaagcgcaagcaggagcatgcagcgcgcctccaggaagtgcagcggcggctgggtggctggaccggaccagagctcagtgcttttggggaactggtgttggagggcgcgttccgaggaggcggagggggtggcccccggctacgagggggtgagcggctgctcttcctgttctctcggatgctgctggtggccaagcgcagggggctggagtacacctacaaaggccacatcttctgctgcaacctgagcgtgagcgagagtccccgagaccctctagggttcaaggtgtctgatctgaccattcccaagcacagacacctgctccaggccaagaaccaagaagagaagaggctgtggattcactgtctccagcgcctcttctttgagaaccaccctgcctccatccctgccaaggcaaagcaagttctccttgaaaacagcctgcattgtgcccccaaaagtaagcctgtcctagagcccctgacacccccacttgggtctcctcgacctcgagatgctagaagttttacccctgggcgaaggaacacagctccatctcctgggccctctgtgattcgccgaggccgcaggcagtctgagccggtgaaggacccttatgtcatgttcccacagaacgctaagcctggattcaagcacgctggcagcgaaggggaactctaccctccagaatctcagccaccagtttcaggctctgcaccccctgaggacctggaggatgctggacccccaacactggacccctctgggacctcaatcactgaagaaatcctggaactgctgaatcagcgaggccttcgagatccagggccgtccacccatgacattcccaagttccccggagactcccaggtgcctggcgacagcgaaaccctcacattccaagccctgcccagccgggactcttcagaagaggaggaggaggaagaggaagggctggagatggatgaacgggggccttccccactccacgtcctggaagggctcgaaagttccattgcagctgaaatgcccagcattccctgccttaccaaaattcctgacgtgcccaaccttcctgaaattcccagccgctgtgaaattcccgaaggttctcgccttcctagtctctctgacatttccgatgtttttgagatgccctgccttccagccatacctagtgtccccaacacccccagtctgtctagcactcccaccctctcctgtgactcctggctccaagggcctctgcaggaaccagctgaggctccagccaccaggagagaactgttttctgggagcaatcctgggaaactgggagagccgccttcaggaggcaaggcagggccagaggaggatgaagaaggggtatcattcacagacttccagccccaggatgtcacccaacatcagggattcccagatgagctggcattccgctcttgctcagaaatccggagcgcctggcaggcattggaacagggacagctggcccggccaggcttcccagagccactgctgatcctggaggattcggatctgggtggagacagcgggagcgggaaggcaggagccccgagttcagaaaggacggcgtcccgagtgcgagagctggcccggctttacagcgagcggatccagcagatgcagcgggcggagactcgggcatcagccaatgccccgcgccgccggcctcgggttctggcccaaccccagccatccccctgtctgccccaggagcaggcagagccagggctcctgcctgcctttggacacgtgctggtatgtgagctggccttcccactgacatgtgcccaggagtctgtccccctgggtcctgctgtctgggttcaagctgccatacctttgtcaaagcagggaggcagcccggatggccagggtctacatgtttccaatttgcctaagcaagaccttccgggcatccacgtttcagctgctacccttttgcctgagcaaggaggttcccggcatgtccaggctccagccgccacacctttgcccaagcaagaaggccccctgcacctccaggtgccggctcttacaactttctctgatcaaggccacccagaaatccaagttccagccaccactcctttgcctgagcatagaagtcacatggttataccagctccatccaccgccttttgtcctgagcagggacactgtgcggacatccacgttcccaccactccagctttgcccaaggagatttgttctgatttcacagtttcagtcaccacccctgtgcccaagcaagaaggtcacctagacagcgagagcccaaccaatatcccactgacaaagcaaggaggttccagggatgttcagggcccagaccctgtctgcagtcaacccatccagcctttgtcttggcatggaagcagcctggatccccagggcccaggcgacaccctaccacccttgccatgtcacctcccagaccttcagattccaggtacctcacctttgcctgcacatggaagccacctggaccatcggatcccagccaacgccccactgtctttgtcccaggagctcccagacactcaggttccagctaccacacctttgcccctgccacaagtcctcacagacatctgggtccaagccctcccaacttcacccaagcagggaagcctcccagacatccagggtccagcggctgcacctccacttccggagccaagccttacagatacacaggtccaaaaactcacaccttcgttggagcagaagagcctcatagatgcccatgttccagctgccacacctttacctgagagaggaggctctctagacattcagggcctctcacccaccccagttcagaccaccatggttttgtccaaaccaggaggctccttagcctctcacgttgccaggttggagtcttcagacttgacgccacctcatagtcccccaccttccagccgtcagctcctgggccccaatgcagctgccctctccagatacctggcagcctcatatatcagccagagcctggctcggcggcaggggcctgggggaggggcccccgcagcctcccggggctcctggtcctctgctcccacgtcacgggcatcttcgccgcccccccagccccagccaccacctcccccagccaggcggctcagctatgccacgacggttaacatccacgtgggcgggggtgggcggctgcggccagccaaggcccaggtccggttgaaccaccctgctctcttggcctccacacaggaatctatgggccttcacagggcccagggggctcctgatgcccccttccacatgtgagccaggacatgaggcttccctgaagcaaggatttcagccagatgccatagaccctcagaacttgacctggaagtccagacactgaacgcaggcctcaaaactgctgcggccttccaactcctggtatctgcatcggcgaatggcccttcttgccttgatccacagggatggggaagggaggaatgtcattaatgttttgttaatactgattctttcatgcaatgatgtgtattttcccattctggaggctgtgggagatgacaagacaatgaatgggaaggtctgacacagaacaaatcagcggttctgaaagcttggggaatctcagactcctttgagaattattggaaaatggacccactataacttggcgtgtgtgtgaactgcttgatgcccatccaggaaagccaagttaagaagctttgcttcaagtagacactagaaatccattcccttggcaatttatacagttcacgtctcccaccatccgttcatctcacccaccctgccatctctccacctatccatctggctattgctccatctagctttcccgctccatctacccatcttccaatccatcatctcacgtatctgccttgcttatccaactgtctgccttattcacccacccatccctttatcattctaaccccatctggcattccatccctccatttatccatcttcccacttacccatcttctccatccagcactccgttcatcagtccgtctctccctccatatttccatctgtccattcatccactcattttgccatccatacatattcacccagccatctcccaatccatcgacataccccatccctccctcactggactctccggggtcttagtactatgatacttcagagacaattccatgctgatacgggggagatcaattttggggctctgggataagtctgtcccacatctgtctgatttcccttggcatccttcccgtcagttcctcttgaatatcccagttcttgtacccactcacatacctcagatcccttcactcctccccgcagtttgcagcctctacaattcatccacatgctccctcccccagcaaaataattcaggtcgtggagacaaaaggcttttatgttaggttctgtctgcccccttgttccagcagtggtatgcccagtgagaggcacaatttaaacggtttctttggtgatgatattagctactttcatcaaatacttagcctcttgtgctttagcacattatttatgtaagctcccctaggattctctgaagcaccctggtgtcctggctgtgaattcaagtcccatctttacttatttggtgtgggtcctccctctgagccggttttctcatctacaaaatgaagacaacagtacttccctcctgggatcattgaaagatttagggagcatatccttccacttcccaaacatatttgaacctctgacttggcagtgaaccgagattgcgccactagactccaagccctggagagacggaggccagcaagctggtcctccacacaacctacccatggaacctacccttcaattaaccaccacgcccgcaccccccaacgcacccccccagctcagacgcaccgccccacaccacaacgcggcacccagcccccacgcgcacaattccccactccccccgcgcgcccagccacacacaccggcccacccccgcccgacacaccaggccgaccgacgggggccccccacacgcgggggcaccacagg

SEQ ID NO: 328606 - DNA, 4506 bp, Homo sapiens
tgggagctgggctcctgacatcactgtgtcctccccgcagagccggtgaaggacccttatgtcatgttcccacagaacgctaagcctggattcaagcacgctggcagcgaaggggaactctaccctccagaatctcagccaccagtttcaggctctgcaccccctgaggacctggaggatgctggacccccaacactggacccctctgggacctcaatcactgaagaaatcctggaactgctgaatcagcgaggccttcgagatccagggccgtccacccatgacattcccaagttccccggagactcccaggtgcctggcgacagcgaaaccctcacattccaagccctgcccagccgggactcttcagaagaggaggaggaggaagaggaagggctggagatggatgaacgggggccttccccactccacgtcctggaagggctcgaaagttccattgcagctgaaatgcccagcattccctgccttaccaaaattcctgacgtgcccaaccttcctgaaattcccagccgctgtgaaattcccgaaggttctcgccttcctagtctctctgacatttccgatgtttttgagatgccctgccttccagccatacctagtgtccccaacacccccagtctgtctagcactcccaccctctcctgtgactcctggctccaagggcctctgcaggaaccagctgaggctccagccaccaggagagaactgttttctgggagcaatcctgggaaactgggagagccgccttcaggaggcaaggcagggccagaggaggatgaagaaggggtatcattcacagacttccagccccaggatgtcacccaacatcagggattcccagatgagctggcattccgctcttgctcagaaatccggagcgcctggcaggcattggaacagggacagctggcccggccaggcttcccagagccactgctgatcctggaggattcggatctgggtggagacagcgggagcgggaaggcaggagccccgagttcagaaaggacggcgtcccgagtgcgagagctggcccggctttacagcgagcggatccagcagatgcagcgggcggagactcgggcatcagccaatgccccgcgccgccggcctcgggttctggcccaaccccagccatccccctgtctgccccaggagcaggcagagccagggctcctgcctgcctttggacacgtgctggtatgtgagctggccttcccactgacatgtgcccaggagtctgtccccctgggtcctgctgtctgggttcaagctgccatacctttgtcaaagcagggaggcagcccggatggccagggtctacatgtttccaatttgcctaagcaagaccttccgggcatccacgtttcagctgctacccttttgcctgagcaaggaggttcccggcatgtccaggctccagccgccacacctttgcccaagcaagaaggccccctgcacctccaggtgccggctcttacaactttctctgatcaaggccacccagaaatccaagttccagccaccactcctttgcctgagcatagaagtcacatggttataccagctccatccaccgccttttgtcctgagcagggacactgtgcggacatccacgttcccaccactccagctttgcccaaggagatttgttctgatttcacagtttcagtcaccacccctgtgcccaagcaagaaggtcacctagacagcgagagcccaaccaatatcccactgacaaagcaaggaggttccagggatgttcagggcccagaccctgtctgcagtcaacccatccagcctttgtcttggcatggaagcagcctggatccccagggcccaggcgacaccctaccacccttgccatgtcacctcccagaccttcagattccaggtacctcacctttgcctgcacatggaagccacctggaccatcggatcccagccaacgccccactgtctttgtcccaggagctcccagacactcaggttccagctaccacacctttgcccctgccacaagtcctcacagacatctgggtccaagccctcccaacttcacccaagcagggaagcctcccagacatccagggtccagcggctgcacctccacttccggagccaagccttacagatacacaggtccaaaaactcacaccttcgttggagcagaagagcctcatagatgcccatgttccagctgccacacctttacctgagagaggaggctctctagacattcagggcctctcacccaccccagttcagaccaccatggttttgtccaaaccaggaggctccttagcctctcacgttgccaggttggagtcttcagacttgacgccacctcatagtcccccaccttccagccgtcagctcctgggccccaatgcagctgccctctccagatacctggcagcctcatatatcagccagagcctggctcggcggcaggggcctgggggaggggcccccgcagcctcccggggctcctggtcctctgctcccacgtcacgggcatcttcgccgcccccccagccccagccaccacctcccccagccaggcggctcagctatgccacgacggttaacatccacgtgggcgggggtgggcggctgcggccagccaaggcccaggtccggttgaaccaccctgctctcttggcctccacacaggaatctatgggccttcacagggcccagggggctcctgatgcccccttccacatgtgagccaggacatgaggcttccctgaagcaaggatttcagccagatgccatagaccctcagaacttgacctggaagtccagacactgaacgcaggcctcaaaactgctgcggccttccaactcctggtatctgcatcggcgaatggcccttcttgccttgatccacagggatggggaagggaggaatgtcattaatgttttgttaatactgattctttcatgcaatgatgtgtattttcccattctggaggctgtgggagatgacaagacaatgaatgggaaggtctgacacagaacaaatcagcggttctgaaagcttggggaatctcagactcctttgagaattattggaaaatggacccactataacttggcgtgtgtgtgaactgcttgatgcccatccaggaaagccaagttaagaagctttgcttcaagtagacactagaaatccattcccttggcaatttatacagttcacgtctcccaccatccgttcatctcacccaccctgccatctctccacctatccatctggctattgctccatctagctttcccgctccatctacccatcttccaatccatcatctcacgtatctgccttgcttatccaactgtctgccttattcacccacccatccctttatcattctaaccccatctggcattccatccctccatttatccatcttcccacttacccatcttctccatccagcactccgttcatcagtccgtctctccctccatatttccatctgtccattcatccactcattttgccatccatacatattcacccagccatctcccaatccatcgacataccccatccctccctcactggactctccggggtcttagtactatgatacttcagagacaattccatgctgatacgggggagatcaattttggggctctgggataagtctgtcccacatctgtctgatttcccttggcatccttcccgtcagttcctcttgaatatcccagttcttgtacccactcacatacctcagatcccttcactcctccccgcagtttgcagcctctacaattcatccacatgctccctcccccagcaaaataattcaggtcgtggagacaaaaggcttttatgttaggttctgtctgcccccttgttccagcagtggtatgcccagtgagaggcacaatttaaacggtttctttggtgatgatattagctactttcatcaaatacttagcctcttgtgctttagcacattatttatgtaagctcccctaggattctctgaagcaccctggtgtcctggctgtgaattcaagtcccatctttacttatttggtgtgggtcctccctctgagccggttttctcatctacaaaatgaagacaacagtacttccctcctgggatcattgaaagatttagggagcatatccttccacttcccaaacatatttgaacctctgacttggcagtgaaccgagattgcgccactagactccaagccctggagagacggaggccagcaagctggtcctccacacaacctacccatggaacctacccttcaattaaccaccacgcccgcaccccccaacgcacccccccagctcagacgcaccgccccacaccacaacgcggcacccagcccccacgcgcacaattccccactccccccgcgcgcccagccacacacaccggcccacccccgcccgacacaccaggccgaccgacgggggccccccacacgcgggggcaccacagg

SEQ ID NO: 328607 - DNA, 4023 bp, Homo sapiens
gcgtgcctggtggctgcctgacaggaactagggaagcactgggcggagggcccaggcactgggggtcgcgagatggtggaggaagctattgtgtccatgacagcggttgcctggtacatcaacgacatgaagcgcaagcaggagcatgcagcgcgcctccaggaagtgcagcggcggctgggtggctggaccggaccagagctcagtgcttttggggaactggtgttggagggcgcgttccgaggaggcggagggggtggcccccggctacgagggggtgagcggctgctcttcctgttctctcggatgctgctggtggccaagcgcagggggctggagtacacctacaaaggccacatcttctgctgcaacctgagcgtgagcgagagtccccgagaccctctagggttcaaggtgtctgatctgaccattcccaagcacagacacctgctccaggccaagaaccaagaagagaagaggctgtggattcactgtctccagcgcctcttctttgagaaccaccctgcctccatccctgccaaggcaaagcaagttctccttgaaaacagcctgcattgtgcccccaaaagtaagcctgtcctagagcccctgacacccccacttgggtctcctcgacctcgagatgctagaagttttacccctgggcgaaggaacacagctccatctcctgggccctctgtgattcgccgaggccgcaggcagtctgagccggtgaaggacccttatgtcatgttcccacagaacgctaagcctggattcaagcacgctggcagcgaaggggaactctaccctccagaatctcagccaccagtttcaggctctgcaccccctgaggacctggaggatgctggacccccaacactggacccctctgggacctcaatcactgaagaaatcctggaactgctgaatcagcgaggccttcgagatccagggccgtccacccatgacattcccaagttccccggagactcccaggtgcctggcgacagcgaaaccctcacattccaagccctgcccagccgggactcttcagaagaggaggaggaggaagaggaagggctggagatggatgaacgggggccttccccactccacgtcctggaagggctcgaaagttccattgcagctgaaatgcccagcattccctgccttaccaaaattcctgacgtgcccaaccttcctgaaattcccagccgctgtgaaattcccgaaggttctcgccttcctagtctctctgacatttccgatgtttttgagatgccctgccttccagccatacctagtgtccccaacacccccagtctgtctagcactcccaccctctcctgtgactcctggctccaagggcctctgcaggaaccagctgaggctccagccaccaggagagaactgttttctgggagcaatcctgggaaactgggagagccgccttcaggaggcaaggcagggccagaggaggatgaagaaggggtatcattcacagacttccagccccaggatgtcacccaacatcagggattcccagatgagctggcattccgctcttgctcagaaatccggagcgcctggcaggcattggaacagggacacctcccagacatccagggtccagcggctgcacctccacttccggagccaagccttacagatacacaggtccaaaaactcacaccttcgttggagcagaagagcctcatagatgcccatgttccagctgccacacctttacctgagagaggaggctctctagacattcagggcctctcacccaccccagttcagaccaccatggttttgtccaaaccaggaggctccttagcctctcacgttgccaggttggagtcttcagacttgacgccacctcatagtcccccaccttccagccgtcagctcctgggccccaatgcagctgccctctccagatacctggcagcctcatatatcagccagagcctggctcggcggcaggggcctgggggaggggcccccgcagcctcccggggctcctggtcctctgctcccacgtcacgggcatcttcgccgcccccccagccccagccaccacctcccccagccaggcggctcagctatgccacgacggttaacatccacgtgggcgggggtgggcggctgcggccagccaaggcccaggtccggttgaaccaccctgctctcttggcctccacacaggaatctatgggccttcacagggcccagggggctcctgatgcccccttccacatgtgagccaggacatgaggcttccctgaagcaaggatttcagccagatgccatagaccctcagaacttgacctggaagtccagacactgaacgcaggcctcaaaactgctgcggccttccaactcctggtatctgcatcggcgaatggcccttcttgccttgatccacagggatggggaagggaggaatgtcattaatgttttgttaatactgattctttcatgcaatgatgtgtattttcccattctggaggctgtgggagatgacaagacaatgaatgggaaggtctgacacagaacaaatcagcggttctgaaagcttggggaatctcagactcctttgagaattattggaaaatggacccactataacttggcgtgtgtgtgaactgcttgatgcccatccaggaaagccaagttaagaagctttgcttcaagtagacactagaaatccattcccttggcaatttatacagttcacgtctcccaccatccgttcatctcacccaccctgccatctctccacctatccatctggctattgctccatctagctttcccgctccatctacccatcttccaatccatcatctcacgtatctgccttgcttatccaactgtctgccttattcacccacccatccctttatcattctaaccccatctggcattccatccctccatttatccatcttcccacttacccatcttctccatccagcactccgttcatcagtccgtctctccctccatatttccatctgtccattcatccactcattttgccatccatacatattcacccagccatctcccaatccatcgacataccccatccctccctcactggactctccggggtcttagtactatgatacttcagagacaattccatgctgatacgggggagatcaattttggggctctgggataagtctgtcccacatctgtctgatttcccttggcatccttcccgtcagttcctcttgaatatcccagttcttgtacccactcacatacctcagatcccttcactcctccccgcagtttgcagcctctacaattcatccacatgctccctcccccagcaaaataattcaggtcgtggagacaaaaggcttttatgttaggttctgtctgcccccttgttccagcagtggtatgcccagtgagaggcacaatttaaacggtttctttggtgatgatattagctactttcatcaaatacttagcctcttgtgctttagcacattatttatgtaagctcccctaggattctctgaagcaccctggtgtcctggctgtgaattcaagtcccatctttacttatttggtgtgggtcctccctctgagccggttttctcatctacaaaatgaagacaacagtacttccctcctgggatcattgaaagatttagggagcatatccttccacttcccaaacatatttgaacctctgacttggcagtgaaccgagattgcgccactagactccaagccctggagagacggaggccagcaagctggtcctccacacaacctacccatggaacctacccttcaattaaccaccacgcccgcaccccccaacgcacccccccagctcagacgcaccgccccacaccacaacgcggcacccagcccccacgcgcacaattccccactccccccgcgcgcccagccacacacaccggcccacccccgcccgacacaccaggccgaccgacgggggccccccacacgcgggggcaccacagg

SEQ ID NO: 328608 - DNA, 308 bp, Homo sapiens
ccagctaccatgctgatatgtttggcttgttctcctgtgcccactatagccgtccacccatgacattcccaagttccccggagactcccaggtgcctggcgacagcgaaaccctcacattccaagccctgcccagccgggactcttcagaagaggaggaggaggaagaggaagggctggagatggatgaacgggggccttccccactccacgtcctggaagggctcgaaagttccattgcagctgaaatgcccagcattccctgccttaccaaaattcctgacgtgcccaaccttcctgaaattccca

SEQ ID NO: 328609 - DNA, 621 bp, Homo sapiens
atagaaaagacaagagctcattcttcccctcagtgagctaatgaccaagttcaagaattgcaaataggattcatcttctaggccagttctgagcaattagagtgactccccatagtgttttgttgagaaggatttagaggcctaccttcagggatgcactatgtaattaatggtgcctgtcctgtgcaatggatgagagaatggtagcactgatgtcacgtgggaatgagtcctggttctcctggtccctttcctgcactacatggttattattatctctaaacattggtctaggccctatagactttgatttctagatctaatgcgtcaccaatcttataaagccttgggaaagccatattagtttaacataggggacatttggtgagccctgcccagtaacctgcattagacactgatgaaaaggaaagagaagtcaggcataggcactgtctttgaagctcatacatggagattcagatggacaaacaagaaaccataatgcaagtgtattacctcaagggtatggaccaagagttattgggaggtcaagccatggagtaagaagagaacagactttgcgtcagacgagcatgagtttgactgctaagccgtggcagg

SEQ ID NO: 328610 - DNA, 6698 bp, Homo sapiens
catttctgaacttgaaatccagttcagggagaagagaattcaaaattagaggagcttaaggggacacgggtcaacatctagctcgattcaggtgcattgagaagagtgagttcacatcggtgacccttaggacagtgagtggcagagccctgacgactgtggtgtcctctccacaaaaccctcaagggacttttgtcatcatgtgtgatgaatctttaaatatcgtctaattttcataagaatgaaaagaagttaacaggaaatagtaggctagggtttagttttaaaggcatgactgttatttacaaaggtgttaaatctgaggaaattgacaaatacagatttgtccattctagtggccaaacagtaacagtctaaaatgcagtcattttgaccctcccaagcaatttagtcatatgtgttgttttctcttttctgtttttacttcttagatttttaactaggttactgttggttcccattctgtcttttttgccagacttacatctggtgccagatacaatcagttggttaaattttgcttgcagttctgtgtattttttttcctctattatttatttttttaaaaaaaatagagatcctaaccttagatctttgatgtgaagctagcactgtctgtaatacttctaagagctgccactaaaataatacagcaatccgtggccaggggagcaccccctcctggttgggcccctcagttggagtctaagggttaatctctcatcttgctaagcagtattcaagtgccttgaacagtgtcccctcggcatggctccccttcagcaggctggcattccaagcagtggcccccgcaggcagccgacccccttcctcttcacgctctatgagtttaaaaagctgatttgtacctctcccctgggggaaacggttccatataaaacactaacacttaattacaagctccattatgccattttaaatggcttctttttgttaattggaggcattgttcataacttaaggcttttgccattaacttagctggctaagcagaggctcggggtaaaatcagtgtttgcatttagcctcttgacccggagttccggcccaagctcccttgtgatagccgagatggcaggtgtgtgagttctgtcctagacctgtgcccaactcacttccaccccagaggagtcttctgtcctcctccccaacccccgagctccctggtaacctcctcttgaacttctgtatcagtgaagacatctgtggtttctgctcaccagacctctctttagaaagggttatcagagccatggagcttagctcaattggattcttctagacgatcttaggaggcatcttggcatgaggcagcttctaagcgtctcctgggacaggattggggtgacagcccagggatgcatgcgtgggagaactctctgagaaatgccaggatcgtggctcacagggacccaccatcaaaacctgctactttgtgcaagtaattgaggcaaaagataccagtcgacagcctccctggggtagatcccttgtacctccaaagtacaaatacctccctgctcagtttccttcctgtcgccatctttgttttcttcccattgaaaaaccatcctgtctgatgtggacgttcaggtctgctggttggcggtccgggcccagagtgcagcagagctctgggttaaatattcctttctggccaccgcccaagcccaggtggccagctctcataccccatctccctccttggccagggccagcatcaggcgtgcagctcatgaccagtttacacaggctgcaaagagatcgctgtgggcctcggctgactactttaagattatgccacagccaggccctaaaaagagaggggaacaggagtccccaggtgagctctctgacgggcaggtgccttcccgactaaggttggactggatgactttgttcctcctgcatgcatgtcctttgatgcaagggtgatcaatgaactctgttgacattctatgcaatgtttttcattcctctgattttagcaaagcaaatcttactgaaaaatagcagagccaggggaacagacgcatgtccttctgggagtcacacataagcagagagattttgaactgaggggcgacagcctttgccttaaatgcagtatgacaggcgcttcttggcagaccagtaaaaacaaaagcccatagaccttactcatcccaaggccgacaagccagctgtacagggcgagatgtagcaacacggggcatgagcggtgggcgtgctgggctatttgctgtggtactttaggctggaggtttggctcctgtgctgccggtggggggccctgtccctccccagatgtcctccctcttcttcacactcctcattgtcccttctacctcactaacctgtcttctccatctgatgtcacccagaaccacaccccacagaactgtgaggcacgtgggctggagagagcagaaaagctgccagcgcagcagacacgaacatccctctgcctggtgggccggctttgtgtgtctctccttttgtgagcgcaacacggacaaacagctgtgctctgcaaggcacacggatgtttcccttccacctgttcccaaagctccagcagctgtttcttttgcaggcagggcgtggtctcggggctccgagggtcttgtctttggtccgccttcctttctgtccagtcctgctcagctgttaagatccatcatggccattatccttgtcccggactgccccaaagttcccagctggctttggggaacactgtagctcttgggtgtctcttgtctctggcatggttttagcgtcactgcgaacactcctttgcaaacatcaaacatctcaaagacggaaaaggatagatggcttcctccagcctacacgccccgtccacagtggcatcaccctcttatcccaaaagaatatgccagttcccatccagcaccgaagaaaatcagctcctggggctggtggttggaggtgggtctgtccactgtgggggccaaagtgttcccctgctggagacagtttgcaagtaagaacctaaggatggggacagcatcctgtgcttgggcattgaccagccaaagctcacatttagaaatccctcagtgcttctgtggtttcacctgggcatcgacgacattagggaagcctttgtgaccacaagggcagggcttgtgccctgagtggcgaggtggtgacctgaggccagtgtgatgtggttggatctcagcgtgtactgaatgccagtctggccggcacactcgaacgctaagagaatggtccaatttgatgatcttatttctatttcgatcaggttttgactttttgtagatgaaaactaccagggaaaaggggaagcaggtacccaataaagtttagaaagatccagtctgtgaaacccttagagatgggctgaaagttaagtccaccaacccttgggcttaatcaggacggaagaggagggggtgtggggggcagagcgtaaaacaagccccagccctactcccggccccccagcccagtcttcccaatcccagaggccccggcggcctgtgctcctcaccaccctggtcaggggaatagaaggaaatgcaatttccgcctgtctgcccgacttccaaaaactgcctcctcctgcccaggcctctcccaccaccaccttccctccaaagataaccgtgtccatgccatccgtggcatcatctcgagttttcatttttggatgaagtgacatttagctttaacaagacatttccaaagcgcctagtctcctccaaaatgctaactttaaaagttgggcattgtaggcgaaaaatcccaaaaaaaaaaaaagacaaaaaaaaaaggctggcgagagaaagacatttggctatgcataaatgtgcacttcccccatgcccccgttcttaaactcttaagatgcctttgagttgcttttcatgaatccttttagtttacccgataatgttaagaaagcattagtctacgttactgtaatttctgtagtgtttacgctttaatttctaccacaaaatatgctatatgctatgtatcaagctttctgtaatcagaaagaaaaggtgccttatatcccaatgtcacggctacatccctatggaaattaatcagaagcacagtgtgtacggaagcattgggacttctgctggtgaaacaagagaccattcagcaagacacattgaagtggcacggagctgcttttgttttataattcttttttccccccttttccttcttcttttttattattttattattttttttgtactttgctttaaacggaaagcacttaaatagatgactatgtgtaaaagctctgtgcaattgaaatcatttttcttcattttaaaaaaataacgtattgcacaccaaatgaactcaaagtaagctttagaccaggacgattcaggttatgaatgagtttgttcactgtagttccgtttgttcatgaaccgaagggaaaacaggcctccccgactccctccagtctcccagcctgcctcttggtgaccactgtgctgggcgtgcagggcccgcgggctctggccggagccgctggcctgacgaggcaggatagggagtatccgtgattcagaagctgagacccttccccagtgtctgaggccacagccatcccttccagcacttaatcttgtcttgttgaaatggactgactgctactgacctgccggcgtgcgtgagggtgattataaaaggatgtttccttgagaaaaaaaaaattatttctatcctcttctatttattattaggttaatcatttaagtacttatcaggagtgtattgttattttgtgttttgttgtcataaatgctttttgctgtcactctagtggttactatcctctgccttcctctcctcccctactcccccagagaaccaaggcgtctgggggattgactggggggcagagggggtttccccagcaaaatcaaacacctgtctccagagtagccactcaaaaactggtggtctctatgtgtctaactttttaaatgagagtgtttatgaacaaaaaaatttaccaacgtgtgagggagttgctgagttgaagaatgctcgcttgaggagcttcagaggaatcttagcaaagccaagttcagttccccaaagcctcctagagcctctggtaagacttctgggttcatgaagtttcggcgagccgtggtcagagagggcgcggtggcctggccaagactttacctccaagcgagagagtgatttcttccaaggcccgcacgggttgatacgttttggttggttttttgttgttgtttttcttgcgtacaaagttggtcaaaaccatctttcaaagcaacagtgttttgtagtaccaggctgtggcttgagggctcacctaggagatcataggcagagggcccctttcccctataggtggttcaacgtggaggaaggttgggtgtggagattgcttgctgtggccccaagctcagccagcaggacacccagttgttgccaatcaggtgtgaaggtgaggcgccctgccttgatcccatgggcccagcagaaggaaacttaccccaggccaaggcaagggccctgctcaccccaaggtaggctgggaagagcatctctttccatatcatcacctccccttctccaagattgccgggggccctgattttgttctctctttgaaagaaaccctccaccgaaacaatggtccccatctccccagaagcctttttttttttcatttttctctaattagtctatgcatttctctctctcaaaccatcttctgcctcttcccttgagaaaacgggcatctcacgtacccccatctgagacctcttggaaaaaaaaaatcccgtgtattctggagatgtgagaattcacccaaaattcttaaaacattggagaatagcttgttataaaataaaagtgggggtaaaaagaaggtggttttccccacatccctttgcattgaataagagacctagttctttgcgtttgtgcaataactctttgctgcttgccttgagagcgggtagcaccacgctcctgtccagactactaacagcacaagacgcactcacagggtggcggaatcttccggaaaactctctataagctcagctccccccaccccacccccactctagcgttttgtcacgtcttacattttagcagtattttatattttctgtaacgcaccaagtcttagatctttctagagcttgtttgttcatcctcacaatcacagatttttttctccaatcctcacagagacccaattgaccaaaaaagaaaaaaggaaaaaaaaaaagtcgtcttttttttttttttttgtacaaatcgctttgagatgcctctggtgtgttgctgtgtgacatctctctggtaacattttatttcttgctatttgtttttctacattaagagtcaaagttgacctggctggcgtgggggtgggggaggcacccgtcggccccttggtgttgtccctctgtctttggttagccatacgatgtttgttctcagcactgtacaacggtccctatataatacggagaagcaatatcactgtatgagactcacaccatgtattattattcactagcaccctaggtgtgataattgaagtaaatatcttttatacaaacacaaaaaaatgt

SEQ ID NO: 328611 - DNA, 6586 bp, Homo sapiens
catttctgaacttgaaatccagttcagggagaagagaattcaaaattagaggagcttaaggggacacgggtcaacatctagctcgattcaggtgcattgagaagagtgagttcacatcggtgacccttaggacagtgagtggcagagccctgacgactgtggtgtcctctccacaaaaccctcaagggacttttgtcatcatgtgtgatgaatctttaaatatcgtctaattttcataagaatgaaaagaagttaacaggaaatagtaggctagggtttagttttaaaggcatgactgttatttacaaaggtgttaaatctgaggaaattgacaaatacagatttgtccattctagtggccaaacagtaacagtctaaaatgcagtcattttgaccctcccaagcaatttagtcatatgtgttgttttctcttttctgtttttacttcttagatttttaactaggttactgttggttcccattctgtcttttttgccagacttacatctggtgccagatacaatcagttggttaaattttgcttgcagttctgtgtattttttttcctctattatttatttttttaaaaaaaatagagatcctaaccttagatctttgatgtgaagctagcactgtctgtaatacttctaagagctgccactaaaataatacagcaatccgtggccaggggagcaccccctcctggttgggcccctcagttggagtctaagggttaatctctcatcttgctaagcagtattcaagtgccttgaacagtgtcccctcggcatggctccccttcagcaggctggcattccaagcagtggcccccgcaggcagccgacccccttcctcttcacgctctatgagtttaaaaagctgatttgtacctctcccctgggggaaacggttccatataaaacactaacacttaattacaagctccattatgccattttaaatggcttctttttgttaattggaggcattgttcataacttaaggcttttgccattaacttagctggctaagcagaggctcggggtaaaatcagtgtttgcatttagcctcttgacccggagttccggcccaagctcccttgtgatagccgagatggcaggtgtgtgagttctgtcctagacctgtgcccaactcacttccaccccagaggagtcttctgtcctcctccccaacccccgagctccctggtaacctcctcttgaacttctgtatcagtgaagacatctgtggtttctgctcaccagacctctctttagaaagggttatcagagccatggagcttagctcaattggattcttctagacgatcttaggaggcatcttggcatgaggcagcttctaagcgtctcctgggacaggattggggtgacagcccagggatgcatgcgtgggagaactctctgagaaatgccaggatcgtggctcacagggacccaccatcaaaacctgctactttgtgcaagtaattgaggcaaaagataccagtcgacagcctccctggggtagatcccttgtacctccaaagtacaaatacctccctgctcagtttccttcctgtcgccatctttgttttcttcccattgaaaaaccatcctgtctgatgtggacgttcaggtctgctggttggcggtccgggcccagagtgcagcagagctctgggttaaatattcctttctggccaccgcccaagcccaggtggccagctctcataccccatctccctccttggccagggccagcatcaggcgtgcagctcatgaccagtttacacaggctgcaaagagatcgctgtgggcctcggctgactactttaagattatgccacagccaggccctaaaaagagaggggaacaggagtccccaggtgagctctctgacgggcaggtgccttcccgactaaggttggactggatgactttgttcctcctgcatgcatgtcctttgatgcaagggtgatcaatgaactctgttgacattctatgcaatgtttttcattcctctgattttagcaaagcaaatcttactgaaaaatagcagagccaggggaacagacgcatgtccttctgggagtcacacataagcagagagattttgaactgaggggcgacagcctttgccttaaatgcagtatgacaggcgcttcttggcagaccagtaaaaacaaaagcccatagaccttactcatcccaaggccgacaagccagctgtacagggcgagatgtagcaacacggggcatgagcggtgggcgtgctgggctatttgctgtggtactttaggctggaggtttggctcctgtgctgccggtggggggccctgtccctccccagatgtcctccctcttcttcacactcctcattgtcccttctacctcactaacctgtcttctccatctgatgtcacccagaaccacaccccacagaactgtgaggcacgtgggctggagagagcagaaaagctgccagcgcagcagacacgaacatccctctgcctggtgggccggctttgtgtgtctctccttttgtgagcgcaacacggacaaacagctgtgctctgcaaggcacacggatgtttcccttccacctgttcccaaagctccagcagctgtttcttttgcaggcagggcgtggtctcggggctccgagggtcttgtctttggtccgccttcctttctgtccagtcctgctcagctgttaagatccatcatggccattatccttgtcccggactgccccaaagttcccagctggctttggggaacactgtagctcttgggtgtctcttgtctctggcatggttttagcgtcactgcgaacactcctttgcaaacatcaaacatctcaaagacggaaaaggatagatggcttcctccagcctacacgccccgtccacagtggcatcaccctcttatcccaaaagaatatgccagttcccatccagcaccgaagaaaatcagctcctggggctggtggttggaggtgggtctgtccactgtgggggccaaagtgttcccctgctggagacagtttgcaagtaagaacctaaggatggggacagcatcctgtgcttgggcattgaccagccaaagctcacatttagaaatccctcagtgcttctgtggtttcacctgggcatcgacgacattagggaagcctttgtgaccacaagggcagggcttgtgccctgagtggcgaggtggtgacctgaggccagtgtgatgtggttggatctcagcgtgtactgaatgccagtctggccggcacactcgaacgctaagagaatggtccaatttgatgatcttatttctatttcgatcaggttttgactttttgtagatgaaaactaccagggaaaaggggaagcaggtacccaataaagtttagaaagatccagtctgtgaaacccttagagatgggctgaaagttaagtccaccaacccttgggcttaatcaggacggaagaggagggggtgtggggggcagagcgtaaaacaagccccagccctactcccggccccccagcccagtcttcccaatcccagaggccccggcggcctgtgctcctcaccaccctggtcaggggaatagaaggaaatgcaatttccgcctgtctgcccgacttccaaaaactgcctcctcctgcccaggcctctcccaccaccaccttccctccaaagataaccgtgtccatgccatccgtggcatcatctcgagttttcatttttggatgaagtgacatttagctttaacaagacatttccaaagcgcctagtctcctccaaaatgctaactttaaaagttgggcattgtaggcgaaaaatcccaaaaaaaaaaaaagacaaaaaaaaaaggctggcgagagaaagacatttggctatgcataaatgtgcacttcccccatgcccccgttcttaaactcttaagatgcctttgagttgcttttcatgaatccttttagtttacccgataatgttaagaaagcattagtctacgttactgtaatttctgtagtgtttacgctttaatttctaccacaaaatatgctatatgctatgtatcaagctttctgtaatcagaaagaaaaggtgccttatatcccaatgtcacggctacatccctatggaaattaatcagaagcacagtgtgtacggaagcattgggacttctgctggtgaaacaagagaccattcagcaagacacattgaagtggcacggagctgcttttgttttataattcttttttccccccttttccttcttcttttttattattttattattttttttgtactttgctttaaacggaaagcacttaaatagatgactatgtgtaaaagctctgtgcaattgaaatcatttttcttcattttaaaaaaataacgtattgcacaccaaatgaactcaaagtaagctttagaccaggacgattcaggttatgaatgagtttgttcactgtagttccgtttgttcatgaaccgaagggaaaacaggcctccccgactccctccagtctcccagcctgcctcttggtgaccactgtgctgggcgtgcagggcccgcgggctctggccggagccgctggcctgacgaggcaggatagggagtatccgtgattcagaagctgagacccttccccagtgtctgaggccacagccatcccttccagcacttaatcttgtcttgttgaaatggactgactgctactgacctgccggcgtgcgtgagggtgattataaaaggatgtttccttgagaaaaaaaaaattatttctatcctcttctatttattattaggttaatcatttaagtacttatcaggagtgtattgttattttgtgttttgttgtcataaatgctttttgctgtcactctagtggttactatcctctgccttcctctcctcccctactcccccagagaaccaaggcgtctgggggattgactggggggcagagggggtttccccagcaaaatcaaacacctgtctccagagtagccactcaaaaactggtggtctctatgtgtctaactttttaaatgagagtgtttatgaacaaaaaaatttaccaacgtgtgagggagttgctgagttgaagaatgctcgcttgaggagcttcagaggaatcttagcaaagccaagttcagttccccaaagcctcctagagcctctggtaagacttctgggttcatgaagtttcggcgagccgtggtcagagagggcgcggtggcctggccaagactttacctccaagcgagagagtgatttcttccaaggcccgcacgggttgatacgttttggttggttttttgttgttgtttttcttgcgtacaaagttggtcaaaaccatctttcaaagcaacagtgttttgtagtaccagctcagccagcaggacacccagttgttgccaatcaggtgtgaaggtgaggcgccctgccttgatcccatgggcccagcagaaggaaacttaccccaggccaaggcaagggccctgctcaccccaaggtaggctgggaagagcatctctttccatatcatcacctccccttctccaagattgccgggggccctgattttgttctctctttgaaagaaaccctccaccgaaacaatggtccccatctccccagaagcctttttttttttcatttttctctaattagtctatgcatttctctctctcaaaccatcttctgcctcttcccttgagaaaacgggcatctcacgtacccccatctgagacctcttggaaaaaaaaaatcccgtgtattctggagatgtgagaattcacccaaaattcttaaaacattggagaatagcttgttataaaataaaagtgggggtaaaaagaaggtggttttccccacatccctttgcattgaataagagacctagttctttgcgtttgtgcaataactctttgctgcttgccttgagagcgggtagcaccacgctcctgtccagactactaacagcacaagacgcactcacagggtggcggaatcttccggaaaactctctataagctcagctccccccaccccacccccactctagcgttttgtcacgtcttacattttagcagtattttatattttctgtaacgcaccaagtcttagatctttctagagcttgtttgttcatcctcacaatcacagatttttttctccaatcctcacagagacccaattgaccaaaaaagaaaaaaggaaaaaaaaaaagtcgtcttttttttttttttttgtacaaatcgctttgagatgcctctggtgtgttgctgtgtgacatctctctggtaacattttatttcttgctatttgtttttctacattaagagtcaaagttgacctggctggcgtgggggtgggggaggcacccgtcggccccttggtgttgtccctctgtctttggttagccatacgatgtttgttctcagcactgtacaacggtccctatataatacggagaagcaatatcactgtatgagactcacaccatgtattattattcactagcaccctaggtgtgataattgaagtaaatatcttttatacaaacacaaaaaaatgt

SEQ ID NO: 328612 - DNA, 5104 bp, Homo sapiens
catttctgaacttgaaatccagttcagggagaagagaattcaaaattagaggagcttaaggggacacgggtcaacatctagctcgattcaggtgcattgagaagagtgagttcacatcggtgacccttaggacagtgagtggcagagccctgacgactgtggtgtcctctccacaaaaccctcaagggacttttgtcatcatgtgtgatgaatctttaaatatcgtctaattttcataagaatgaaaagaagttaacaggaaatagtaggctagggtttagttttaaaggcatgactgttatttacaaaggtgttaaatctgaggaaattgacaaatacagatttgtccattctagtggccaaacagtaacagtctaaaatgcagtcattttgaccctcccaagcaatttagtcatatgtgttgttttctcttttctgtttttacttcttagatttttaactaggttactgttggttcccattctgtcttttttgccagacttacatctggtgccagatacaatcagttggttaaattttgcttgcagttctgtgtattttttttcctctattatttatttttttaaaaaaaatagagatcctaaccttagatctttgatgtgaagctagcactgtctgtaatacttctaagagctgccactaaaataatacagcaatccgtggccaggggagcaccccctcctggttgggcccctcagttggagtctaagggttaatctctcatcttgctaagcagtattcaagtgccttgaacagtgtcccctcggcatggctccccttcagcaggctggcattccaagcagtggcccccgcaggcagccgacccccttcctcttcacgctctatgagtttaaaaagctgatttgtacctctcccctgggggaaacggttccatataaaacactaacacttaattacaagctccattatgccattttaaatggcttctttttgttaattggaggcattgttcataacttaaggcttttgccattaacttagctggctaagcagaggctcggggtaaaatcagtgtttgcatttagcctcttgacccggagttccggcccaagctcccttgtgatagccgagatggcaggtgtgtgagttctgtcctagacctgtgcccaactcacttccaccccagaggagtcttctgtcctcctccccaacccccgagctccctggtaacctcctcttgaacttctgtatcagtgaagacatctgtggtttctgctcaccagacctctctttagaaagggttatcagagccatggagcttagctcaattggattcttctagacgatcttaggaggcatcttggcatgaggcagcttctaagcgtctcctgggacaggattggggtgacagcccagggatgcatgcgtgggagaactctctgagaaatgccaggatcgtggctcacagggacccaccatcaaaacctgctactttgtgcaagtaattgaggcaaaagataccagtcgacagcctccctggggtagatcccttgtacctccaaagtacaaatacctccctgctcagtttccttcctgtcgccatctttgttttcttcccattgaaaaaccatcctgtctgatgtggacgttcaggtctgctggttggcggtccgggcccagagtgcagcagagctctgggttaaatattcctttctggccaccgcccaagcccaggtggccagctctcataccccatctccctccttggccagggccagcatcaggcgtgcagctcatgaccagtttacacaggctgcaaagagatcgctgtgggcctcggctgactactttaagattatgccacagccaggccctaaaaagagaggggaacaggagtccccaggtgagctctctgacgggcaggtgccttcccgactaaggttggactggatgactttgttcctcctgcatgcatgtcctttgatgcaagggtgatcaatgaactctgttgacattctatgcaatgtttttcattcctctgattttagcaaagcaaatcttactgaaaaatagcagagccaggggaacagacgcatgtccttctgggagtcacacataagcagagagattttgaactgaggtggcatcatctcgagttttcatttttggatgaagtgacatttagctttaacaagacatttccaaagcgcctagtctcctccaaaatgctaactttaaaagttgggcattgtaggcgaaaaatcccaaaaaaaaaaaaagacaaaaaaaaaaggctggcgagagaaagacatttggctatgcataaatgtgcacttcccccatgcccccgttcttaaactcttaagatgcctttgagttgcttttcatgaatccttttagtttacccgataatgttaagaaagcattagtctacgttactgtaatttctgtagtgtttacgctttaatttctaccacaaaatatgctatatgctatgtatcaagctttctgtaatcagaaagaaaaggtgccttatatcccaatgtcacggctacatccctatggaaattaatcagaagcacagtgtgtacggaagcattgggacttctgctggtgaaacaagagaccattcagcaagacacattgaagtggcacggagctgcttttgttttataattcttttttccccccttttccttcttcttttttattattttattattttttttgtactttgctttaaacggaaagcacttaaatagatgactatgtgtaaaagctctgtgcaattgaaatcatttttcttcattttaaaaaaataacgtattgcacaccaaatgaactcaaagtaagctttagaccaggacgattcaggttatgaatgagtttgttcactgtagttccgtttgttcatgaaccgaagggaaaacaggcctccccgactccctccagtctcccagcctgcctcttggtgaccactgtgctgggcgtgcagggcccgcgggctctggccggagccgctggcctgacgaggcaggatagggagtatccgtgattcagaagctgagacccttccccagtgtctgaggccacagccatcccttccagcacttaatcttgtcttgttgaaatggactgactgctactgacctgccggcgtgcgtgagggtgattataaaaggatgtttccttgagaaaaaaaaaattatttctatcctcttctatttattattaggttaatcatttaagtacttatcaggagtgtattgttattttgtgttttgttgtcataaatgctttttgctgtcactctagtggttactatcctctgccttcctctcctcccctactcccccagagaaccaaggcgtctgggggattgactggggggcagagggggtttccccagcaaaatcaaacacctgtctccagagtagccactcaaaaactggtggtctctatgtgtctaactttttaaatgagagtgtttatgaacaaaaaaatttaccaacgtgtgagggagttgctgagttgaagaatgctcgcttgaggagcttcagaggaatcttagcaaagccaagttcagttccccaaagcctcctagagcctctggtaagacttctgggttcatgaagtttcggcgagccgtggtcagagagggcgcggtggcctggccaagactttacctccaagcgagagagtgatttcttccaaggcccgcacgggttgatacgttttggttggttttttgttgttgtttttcttgcgtacaaagttggtcaaaaccatctttcaaagcaacagtgttttgtagtaccaggctgtggcttgagggctcacctaggagatcataggcagagggcccctttcccctataggtggttcaacgtggaggaaggttgggtgtggagattgcttgctgtggccccaagctcagccagcaggacacccagttgttgccaatcaggtgtgaaggtgaggcgccctgccttgatcccatgggcccagcagaaggaaacttaccccaggccaaggcaagggccctgctcaccccaaggtaggctgggaagagcatctctttccatatcatcacctccccttctccaagattgccgggggccctgattttgttctctctttgaaagaaaccctccaccgaaacaatggtccccatctccccagaagcctttttttttttcatttttctctaattagtctatgcatttctctctctcaaaccatcttctgcctcttcccttgagaaaacgggcatctcacgtacccccatctgagacctcttggaaaaaaaaaatcccgtgtattctggagatgtgagaattcacccaaaattcttaaaacattggagaatagcttgttataaaataaaagtgggggtaaaaagaaggtggttttccccacatccctttgcattgaataagagacctagttctttgcgtttgtgcaataactctttgctgcttgccttgagagcgggtagcaccacgctcctgtccagactactaacagcacaagacgcactcacagggtggcggaatcttccggaaaactctctataagctcagctccccccaccccacccccactctagcgttttgtcacgtcttacattttagcagtattttatattttctgtaacgcaccaagtcttagatctttctagagcttgtttgttcatcctcacaatcacagatttttttctccaatcctcacagagacccaattgaccaaaaaagaaaaaaggaaaaaaaaaaagtcgtcttttttttttttttttgtacaaatcgctttgagatgcctctggtgtgttgctgtgtgacatctctctggtaacattttatttcttgctatttgtttttctacattaagagtcaaagttgacctggctggcgtgggggtgggggaggcacccgtcggccccttggtgttgtccctctgtctttggttagccatacgatgtttgttctcagcactgtacaacggtccctatataatacggagaagcaatatcactgtatgagactcacaccatgtattattattcactagcaccctaggtgtgataattgaagtaaatatcttttatacaaacacaaaaaaatgt

SEQ ID NO: 328613 - DNA, 4794 bp, Homo sapiens
catttctgaacttgaaatccagttcagggagaagagaattcaaaattagaggagcttaaggggacacgggtcaacatctagctcgattcaggtgcattgagaagagtgagttcacatcggtgacccttaggacagtgagtggcagagccctgacgactgtggtgtcctctccacaaaaccctcaagggacttttgtcatcatgtgtgatgaatctttaaatatcgtctaattttcataagaatgaaaagaagttaacaggaaatagtaggctagggtttagttttaaaggcatgactgttatttacaaaggtgttaaatctgaggaaattgacaaatacagatttgtccattctagtggccaaacagtaacagtctaaaatgcagtcattttgaccctcccaagcaatttagtcatatgtgttgttttctcttttctgtttttacttcttagatttttaactaggttactgttggttcccattctgtcttttttgccagacttacatctggtgccagatacaatcagttggttaaattttgcttgcagttctgtgtattttttttcctctattatttatttttttaaaaaaaatagagatcctaaccttagatctttgatgtgaagctagcactgtctgtaatacttctaagagctgccactaaaataatacagcaatccgtggccaggggagcaccccctcctggttgggcccctcagttggagtctaagggttaatctctcatcttgctaagcagtattcaagtgccttgaacagtgtcccctcggcatggctccccttcagcaggctggcattccaagcagtggcccccgcaggcagccgacccccttcctcttcacgctctatgagtttaaaaagctgatttgtacctctcccctgggggaaacggttccatataaaacactaacacttaattacaagctccattatgccattttaaatggcttctttttgttaattggaggcattgttcataacttaaggcttttgccattaacttagctggctaagcagaggctcggggtaaaatcagtgtttgcatttagcctcttgacccggagttccggcccaagctcccttgtgatagccgagatggcaggtgtgtgagttctgtcctagacctgtgcccaactcacttccaccccagaggagtcttctgtcctcctccccaacccccgagctccctggtaacctcctcttgaacttctgtatcagtgaagacatctgtggtttctgctcaccagacctctctttagaaagggttatcagagccatggagcttagctcaattggattcttctagacgatcttaggaggcatcttggcatgaggcagcttctaagcgtctcctgggacaggattggggtgacagcccagggatgcatgcgtgggagaactctctgagaaatgccaggatcgtggctcacagggacccaccatcaaaacctgctactttgtgcaagtaattgaggcaaaagataccagtcgacagcctccctggggtagatcccttgtacctccaaagtacaaatacctccctgctcagtttccttcctgtcgccatctttgttttcttcccattgaaaaaccatcctgtctgatgtggacgttcaggtctgctggttggcggtccgggcccagagtgcagcagagctctgggttaaatattcctttctggccaccgcccaagcccaggtggccagctctcataccccatctccctccttggccagggccagcatcaggcgtgcagctcatgaccagtttacacaggctgcaaagagatcgctgtgggcctcggctgactactttaagattatgccacagccaggccctaaaaagagaggggaacaggagtccccaggtgagctctctgacgggcaggtgccttcccgactaaggttggactggatgactttgttcctcctgcatgcatgtcctttgatgcaagggtgatcaatgaactctgttgacattctatgcaatgtttttcattcctctgattttagcaaagcaaatcttactgaaaaatagcagagccaggggaacagacgcatgtccttctgggagtcacacataagcagagagattttgaactgaggggcgacagcctttgccttaaatgcagtatgacaggcgcttcttggcagaccagtaaaaacaaaagcccatagaccttactcatcccaaggccgacaagccagctgtacagggcgagatgtagcaacacggggcatgagcggtgggcgtgctgggctatttgctgtggtactttaggctggaggtttggctcctgtgctgccggtggggggccctgtccctccccagatgtcctccctcttcttcacactcctcattgtcccttctacctcactaacctgtcttctccatctgatgtcacccagaaccacaccccacagaactgtgaggcacgtgggctggagagagcagaaaagctgccagcgcagcagacacgaacatccctctgcctggtgggccggctttgtgtgtctctccttttgtgagcgcaacacggacaaacagctgtgctctgcaaggcacacggatgtttcccttccacctgttcccaaagctccagcagctgtttcttttgcaggcagggcgtggtctcggggctccgagggtcttgtctttggtccgccttcctttctgtccagtcctgctcagctgttaagatccatcatggccattatccttgtcccggactgccccaaagttcccagctggctttggggaacactgtagctcttgggtgtctcttgtctctggcatggttttagcgtcactgcgaacactcctttgcaaacatcaaacatctcaaagacggaaaaggatagatggcttcctccagcctacacgccccgtccacagtggcatcaccctcttatcccaaaagaatatgccagttcccatccagcaccgaagaaaatcagctcctggggctggtggttggaggtgggtctgtccactgtgggggccaaagtgttcccctgctggagacagtttgcaagtaagaacctaaggatggggacagcatcctgtgcttgggcattgaccagccaaagctcacatttagaaatccctcagtgcttctgtggtttcacctgggcatcgacgacattagggaagcctttgtgaccacaagggcagggcttgtgccctgagtggcgaggtggtgacctgaggccagtgtgatgtggttggatctcagcgtgtactgaatgccagtctggccggcacactcgaacgctaagagaatggtccaatttgatgatcttatttctatttcgatcaggttttgactttttgtagatgaaaactaccagggaaaaggggaagcaggtacccaataaagtttagaaagatccagtctgtgaaacccttagagatgggctgaaagttaagtccaccaacccttgggcttaatcaggacggaagaggagggggtgtggggggcagagcgtaaaacaagccccagccctactcccggccccccagcccagtcttcccaatcccagaggccccggcggcctgtgctcctcaccaccctggtcaggggaatagaaggaaatgcaatttccgcctgtctgcccgacttccaaaaactgcctcctcctgcccaggcctctcccaccaccaccttccctccaaagataaccgtgtccatgccatccgtggcatcatctcgagttttcatttttggatgaagtgacatttagctttaacaagacatttccaaagcgcctagtctcctccaaaatgctaactttaaaagttgggcattgtaggcgaaaaatcccaaaaaaaaaaaaagacaaaaaaaaaaggctggcgagagaaagacatttggctatgcataaatgtgcacttcccccatgcccccgttcttaaactcttaagatgcctttgagttgcttttcatgaatccttttagtttacccgataatgttaagaaagcattagtctacgttactgtaatttctgtagtgtttacgctttaatttctaccacaaaatatgctatatgctatgtatcaagctttctgtaatcagaaagaaaaggtgccttatatcccaatgtcacggctacatccctatggaaattaatcagaagcacagtgtgtacggaagcattgggacttctgctggtgaaacaagagaccattcagcaagacacattgaagtggcacggagctgcttttgttttataattcttttttccccccttttccttcttcttttttattattttattattttttttgtactttgctttaaacggaaagcacttaaatagatgactatgtgtaaaagctctgtgcaattgaaatcatttttcttcattttaaaaaaataacgtattgcacaccaaatgaactcaaagtaagctttagaccaggacgattcaggttatgaatgagtttgttcactgtagttccgtttgttcatgaaccgaagggaaaacaggcctccccgactccctccagtctcccagcctgcctcttggtgaccactgtgctgggcgtgcagggcccgcgggctctggccggagccgctggcctgacgaggcaggatagggagtatccgtgattcagaagctgagacccttccccagtgtctgaggccacagccatcccttccagcacttaatcttgtcttgttgaaatggactgactgctactgacctgccggcgtgcgtgagggtgattataaaaggatgtttccttgagaaaaaaaaaattatttctatcct

SEQ ID NO: 328614 - DNA, 3177 bp, Homo sapiens
tccaaaaaaaaaactagaaattaatgaattgaatattaaaaactaataagataaaaaaagtaaaatcaatatataacataaaactaaaacaaaataaaaacaaaagcataaataaagtcaaggaaaaacattagaaggataaataactctcccaccaccaccttccctccaaagataaccgtgtccatgccatccgtggcatcatctcgagttttcatttttggatgaagtgacatttagctttaacaagacatttccaaagcgcctagtctcctccaaaatgctaactttaaaagttgggcattgtaggcgaaaaatcccaaaaaaaaaaaaagacaaaaaaaaaaggctggcgagagaaagacatttggctatgcataaatgtgcacttcccccatgcccccgttcttaaactcttaagatgcctttgagttgcttttcatgaatccttttagtttacccgataatgttaagaaagcattagtctacgttactgtaatttctgtagtgtttacgctttaatttctaccacaaaatatgctatatgctatgtatcaagctttctgtaatcagaaagaaaaggtgccttatatcccaatgtcacggctacatccctatggaaattaatcagaagcacagtgtgtacggaagcattgggacttctgctggtgaaacaagagaccattcagcaagacacattgaagtggcacggagctgcttttgttttataattcttttttccccccttttccttcttcttttttattattttattattttttttgtactttgctttaaacggaaagcacttaaatagatgactatgtgtaaaagctctgtgcaattgaaatcatttttcttcattttaaaaaaataacgtattgcacaccaaatgaactcaaagtaagctttagaccaggacgattcaggttatgaatgagtttgttcactgtagttccgtttgttcatgaaccgaagggaaaacaggcctccccgactccctccagtctcccagcctgcctcttggtgaccactgtgctgggcgtgcagggcccgcgggctctggccggagccgctggcctgacgaggcaggatagggagtatccgtgattcagaagctgagacccttccccagtgtctgaggccacagccatcccttccagcacttaatcttgtcttgttgaaatggactgactgctactgacctgccggcgtgcgtgagggtgattataaaaggatgtttccttgagaaaaaaaaaattatttctatcctcttctatttattattaggttaatcatttaagtacttatcaggagtgtattgttattttgtgttttgttgtcataaatgctttttgctgtcactctagtggttactatcctctgccttcctctcctcccctactcccccagagaaccaaggcgtctgggggattgactggggggcagagggggtttccccagcaaaatcaaacacctgtctccagagtagccactcaaaaactggtggtctctatgtgtctaactttttaaatgagagtgtttatgaacaaaaaaatttaccaacgtgtgagggagttgctgagttgaagaatgctcgcttgaggagcttcagaggaatcttagcaaagccaagttcagttccccaaagcctcctagagcctctggtaagacttctgggttcatgaagtttcggcgagccgtggtcagagagggcgcggtggcctggccaagactttacctccaagcgagagagtgatttcttccaaggcccgcacgggttgatacgttttggttggttttttgttgttgtttttcttgcgtacaaagttggtcaaaaccatctttcaaagcaacagtgttttgtagtaccaggctgtggcttgagggctcacctaggagatcataggcagagggcccctttcccctataggtggttcaacgtggaggaaggttgggtgtggagattgcttgctgtggccccaagctcagccagcaggacacccagttgttgccaatcaggtgtgaaggtgaggcgccctgccttgatcccatgggcccagcagaaggaaacttaccccaggccaaggcaagggccctgctcaccccaaggtaggctgggaagagcatctctttccatatcatcacctccccttctccaagattgccgggggccctgattttgttctctctttgaaagaaaccctccaccgaaacaatggtccccatctccccagaagcctttttttttttcatttttctctaattagtctatgcatttctctctctcaaaccatcttctgcctcttcccttgagaaaacgggcatctcacgtacccccatctgagacctcttggaaaaaaaaaatcccgtgtattctggagatgtgagaattcacccaaaattcttaaaacattggagaatagcttgttataaaataaaagtgggggtaaaaagaaggtggttttccccacatccctttgcattgaataagagacctagttctttgcgtttgtgcaataactctttgctgcttgccttgagagcgggtagcaccacgctcctgtccagactactaacagcacaagacgcactcacagggtggcggaatcttccggaaaactctctataagctcagctccccccaccccacccccactctagcgttttgtcacgtcttacattttagcagtattttatattttctgtaacgcaccaagtcttagatctttctagagcttgtttgttcatcctcacaatcacagatttttttctccaatcctcacagagacccaattgaccaaaaaagaaaaaaggaaaaaaaaaaagtcgtcttttttttttttttttgtacaaatcgctttgagatgcctctggtgtgttgctgtgtgacatctctctggtaacattttatttcttgctatttgtttttctacattaagagtcaaagttgacctggctggcgtgggggtgggggaggcacccgtcggccccttggtgttgtccctctgtctttggttagccatacgatgtttgttctcagcactgtacaacggtccctatataatacggagaagcaatatcactgtatgagactcacaccatgtattattattcactagcaccctaggtgtgataattgaagtaaatatcttttatacaaacacaaaaaaatgt

SEQ ID NO: 328615 - DNA, 363 bp, Homo sapiens
tcaggaggtgatttgagctgttgatctggatttgggactcctcaggacaatctgtgaacaatgatgagagagagcaccaaggaccaaggtctgaacttgggagctagggcccatgtccacagggtgaactggaaggaagataaggagacagcaaggaatgcttgccaagaaaccaggagaccaggaaagagtagtttccaagagatgggggaagcccacactgttgcagggaggtcctgcataaagtctgaaacgggtctatttaattcgcccttggaggctgggcatggtgtctcacacctgtaatcccagcactttgggaggccaaggcgggtggatgacctgaggtcaagagtttgagaa

SEQ ID NO: 328616 - DNA, 293 bp, Homo sapiens
cttcaaagtgcctgtgtagaaaggaaatatgagacaaggtggtttgttttacttttctgtcaaatttcttctttagtagtttccaaaataaattcccaataataacagggcttttaacaagaaggtccattactaagagcaacctgcggtagaccgtcgtatgtctcacaactttacattctacacattccaataatcaagtcacatcaactctaattctctttcttgttcaggaacctgtactaccacttaacattctaaaacctgccacacccaatagtcaaacataatca

SEQ ID NO: 328617 - DNA, 353 bp, Homo sapiens
aagggggcgcggccgggacaagctgggggccggttatccagccagaccccacgctgaccatgcgtcaggggcctagaggtggagttcttagctatccttggctttcagagccagcctggctctgccccctcccccatgggctgtgtcctaaggcccatttgagaagctgaggctagttccagaaaacctctcctgacccctgcctgttggcaggcccactccccagccccagccccttccatggtactgtagcaggggaattccctccccctccttgtgccttctttgtatataggcttctcacggcgaccaataaacagctcccagtttgtagtttgtatgcagctgcatct

SEQ ID NO: 328618 - DNA, 561 bp, Homo sapiens
actctagaggatacccttcgattgtgggatcagagtgactgtggccagccagggccctgcaggcagagttctggtaaggtgggtgctcagtgttggctcctccacctctacccggctctcccctcatctccagagctgggaggaaagaagagggcagcaggggggtccacggcgcgtgtgtgctggggcctgcacacatgtcccttcctgtggctgtgtgtccctcgctctctgcactcctggggagggggtgagtatcctgtgctctcccaaacccccgcacggcctgagttctctgactcatccacttcctccgcatgcctacactgggtgctcagccttcgtgggaacaagccgagggagccgagggaactgcaaggaggagaaagggcagagagggccccaggcagctcagcgctggctggcgctccttcctgggaggctgactgccggaagaaggcccagccctgttgaccccggttcacccagctctggtctgggggctaatcaaatgtgtcacctcctgcccacattctatagtggcagctcctgagttctcca

SEQ ID NO: 328619 - DNA, 3974 bp, Homo sapiens
acatcagtcggtaccagatcccctttcatccaccagaacactgtgtacttcggcgcccccggtgcctacaactggaaaggaaacagctacatgattcagcgcaaggagtgggacttatctgagtatagttacaaggacccagaggaccaaggaaacctctatattgggtacacgatgcaggtaggcagcttcatcctgcaccccaaaaacatcaccattgtgacaggtgccccacggcaccgacatatgggcgcggtgttcttgctgagccaggaggcaggcggagacctgcggaggaggcaggtgctggagggctcgcaggtgggcgcctattttggcagcgccattgccctggcagacctgaacaatgatgggtggcaggacctcctggtgggcgccccctactacttcgagaggaaagaggaagtagggggtgccatctatgtcttcatgaaccaggcgggaacctccttccctgctcacccctcactccttcttcatggccccagtggctctgcctttggtttatctgtggccagcattggtgacatcaaccaggatggatttcaggatattgctgtgggagctccgtttgaaggcttgggcaaagtgtacatctatcacagtagctctaaggggctccttagacagccccagcaggtaatccatggagagaagctgggactgcctgggttggccaccttcggctattccctcagtgggcagatggatgtggatgagaacttctacccagaccttctagtgggaagcctgtcagaccacattgtgctgctgcgggcccggcccgtcatcaacatcgtccacaagaccttggtgcccaggccagctgtgctggaccctgcactttgcacggccacctcttgtgtgcaagtggagctgtgctttgcttacaaccagagtgccgggaaccccaactacaggcgaaacatcaccctggcctacactctggaggctgacagggaccgccggccgccccggctccgctttgccggcagtgagtccgctgtcttccacggcttcttctccatgcccgagatgcgctgccagaagctggagctgctcctgatggacaacctccgtgacaaactccgccccatcatcatctccatgaactactctttacctttgcggatgcccgatcgcccccggctggggctgcggtccctggacgcctacccgatcctcaaccaggcacaggctctggagaaccacactgaggtccagttccagaaggagtgcgggcctgacaacaagtgtgagagcaacttgcagatgcgggcagccttcgtgtcagagcagcagcagaagctgagcaggctccagtacagcagagacgtccggaaattgctcctgagcatcaacgtgacgaacacccggacctcggagcgctccggggaggacgcccacgaggcgctgctcaccctggtggtgcctcccgccctgctgctgtcctcagtgcgcccccccggggcctgccaagctaatgagaccatcttttgcgagctggggaaccccttcaaacggaaccagaggatggagctgctcatcgcctttgaggtcatcggggtgaccctgcacacaagggaccttcaggtgcagctgcagctctccacgtcgagtcaccaggacaacctgtggcccatgatcctcactctgctggtggactatacactccagacctcgcttagcatggtaaatcaccggctacaaagcttctttggggggacagtgatgggtgagtctggcatgaaaactgtggaggatgtaggaagccccctcaagtatgaattccaggtgggcccaatgggggaggggctggtgggcctggggaccctggtcctaggtctggagtggccctacgaagtcagcaatggcaagtggctgctgtatcccacggagatcaccgtccatggcaatgggtcctggccctgccgaccacctggagaccttatcaaccctctcaacctcactctttctgaccctggggacaggccatcatccccacagcgcaggcggcgacagctggatccagggggaggccagggccccccacctgtcactctggctgctgccaaaaaagccaagtctgagactgtgctgacctgtgccacagggcgtgcccactgtgtgtggctagagtgccccatccctgatgcccccgttgtcaccaacgtgactgtgaaggcacgagtgtggaacagcaccttcatcgaggattacagagactttgaccgagtccgggtaaatggctgggctaccctattcctccgaaccagcatccccaccatcaacatggagaacaagaccacgtggttctctgtggacattgactcggagctggtggaggagctgccggccgaaatcgagctgtggctggtgctggtggccgtgggtgcagggctgctgctgctggggctgatcatcctcctgctgtggaagtgcggcttcttcaagcgagcccgcactcgcgccctgtatgaagctaagaggcagaaggcggagatgaagagccagccgtcagagacagagaggctgaccgacgactactgagggggcagccccccgcccccggcccacctggtgtgacttctttaagcggacccgctattatcagatcatgcccaagtaccacgcagtgcggatccgggaggaggagcgctacccacctccagggagcaccctgcccaccaagaagcactgggtgaccagctggcagactcgggaccaatactactgacgtcctccctgatcccaccccctcctcccccagtgtcccctttcttcctatttatcataagttatgcctctgacagtccacaggggccaccacctttggctggtagcagcaggctcaggcacatacacctcgtcaagagcatgcacatgctgtctggccctggggatcttcccacaggagggccagcgctgtggaccttacaacgccgagtgcactgcattcctgtgccctagatgcacgtggggcccactgctcgtggactgtgctggtgcatcacggatggtgcatgggctcgccgtgtctcagcctctgccagcgccaaaacaagccaaagagcctcccaccagagccgggaggaaaaggcccctgcaatgtggtgacacctccccctttcacactggatccatcttgagccacagtcactggattgactttgctgtcaaaactactgacagggagcagcccccgggccgctggctggtgggcccccaatgacacccatgccagagaggtggggatcctgcctaaggttgtctacgggggcacttggaggacctggcgtgctcagacccaacagcaaaggaactagaaagaaggacccagaacggcttgctttcctgcatctctgtgaagcctctctccttggccacagactgaactcgcagggagtgcagcaggaaggaacaaagacaggcaaacggcaacgtagcctgggctcactgtgctggggcacggcgggatcctccacagagaggaggggaccaattctggacagacagatgttgggaggatacagaggagatgccacttctcactcaccactaccagccagcctcagaaggccccagagagaccctgcaagaccacggagggagcgacacttgaatgtagaataggcagggggccctgccccaccccatccagccagaccccacgctgaccatgcgtcaggggcctagaggtggagttcttagctatccttggctttcagagccagcctggctctgccccctcccccatgggctgtgtcctaaggcccatttgagaagctgaggctagttccagaaaacctctcctgacccctgcctgttggcaggcccactccccagccccagccccttccatggtactgtagcaggggaattccctccccctccttgtgccttctttgtatataggcttctcacggcgaccaataaacagctcccagtttgta

SEQ ID NO: 328620 - DNA, 4622 bp, Homo sapiens
aagggggcgcggccgggacaagctgggggccggttgcccggggcagggacggcggcgacccggccgctggggaggcaggaagatagacccacggatcttaggaagggatccgagagcgcagctgtgaaactggctggggctgggggcacgaaaccgatcagcgctacggagcgcagcggccggcgggttccagtgtcctccggcggcgcggggagcaggtgaacaggtcctcacgcccagctccgccccctcacgcgctctcgccgggaccccgcttccgctggcagccatgggccccggccccagccgcgcgccccgcgccccacgcctgatgctctgtgcgctcgccttgatggtggcggccggcggctgcgtcgtctccgccttcaacctggatacccgattcctggtagtgaaggaggccgggaacccgggcagcctcttcggctactcggtcgccctccatcggcagacagagcggcagcagcgctacctgctcctggctggtgccccccgggagctcgctgtgcccgatggctacaccaaccggactggtgctgtgtacctgtgcccactcactgcccacaaggatgactgtgagcggatgaacatcacagtgaaaaatgaccctggccatcacattattgaggacatgtggcttggagtgactgtggccagccagggccctgcaggcagagttctggtctgtgcccaccgctacacccaggtgctgtggtcagggtcagaagaccagcggcgcatggtgggcaagtgctacgtgcgaggcaatgacctagagctggactccagtgatgactggcagacctaccacaacgagatgtgcaatagcaacacagactacctggagacgggcatgtgccagctgggcaccagcggtggcttcacccagaacactgtgtacttcggcgcccccggtgcctacaactggaaaggaaacagctacatgattcagcgcaaggagtgggacttatctgagtatagttacaaggacccagaggaccaaggaaacctctatattgggtacacgatgcaggtaggcagcttcatcctgcaccccaaaaacatcaccattgtgacaggtgccccacggcaccgacatatgggcgcggtgttcttgctgagccaggaggcaggcggagacctgcggaggaggcaggtgctggagggctcgcaggtgggcgcctattttggcagcgccattgccctggcagacctgaacaatgatgggtggcaggacctcctggtgggcgccccctactacttcgagaggaaagaggaagtagggggtgccatctatgtcttcatgaaccaggcgggaacctccttccctgctcacccctcactccttcttcatggccccagtggctctgcctttggtttatctgtggccagcattggtgacatcaaccaggatggatttcaggggcccggcccgtcatcaacatcgtccacaagaccttggtgcccaggccagctgtgctggaccctgcactttgcacggccacctcttgtgtgcaagtggagctgtgctttgcttacaaccagagtgccgggaaccccaactacaggcgaaacatcaccctggcctacactctggaggctgacagggaccgccggccgccccggctccgctttgccggcagtgagtccgctgtcttccacggcttcttctccatgcccgagatgcgctgccagaagctggagctgctcctgatggacaacctccgtgacaaactccgccccatcatcatctccatgaactactctttacctttgcggatgcccgatcgcccccggctggggctgcggtccctggacgcctacccgatcctcaaccaggcacaggctctggagaaccacactgaggtccagttccagaaggagtgcgggcctgacaacaagtgtgagagcaacttgcagatgcgggcagccttcgtgtcagagcagcagcagaagctgagcaggctccagtacagcagagacgtccggaaattgctcctgagcatcaacgtgacgaacacccggacctcggagcgctccggggaggacgcccacgaggcgctgctcaccctggtggtgcctcccgccctgctgctgtcctcagtgcgcccccccggggcctgccaagctaatgagaccatcttttgcgagctggggaaccccttcaaacggaaccagaggatggagctgctcatcgcctttgaggtcatcggggtgaccctgcacacaagggaccttcaggtgcagctgcagctctccacgtcgagtcaccaggacaacctgtggcccatgatcctcactctgctggtggactatacactccagacctcgcttagcatggtaaatcaccggctacaaagcttctttggggggacagtgatgggtgagtctggcatgaaaactgtggaggatgtaggaagccccctcaagtatgaattccaggtgggcccaatgggggaggggctggtgggcctggggaccctggtcctaggtctggagtggccctacgaagtcagcaatggcaagtggctgctgtatcccacggagatcaccgtccatggcaatgggtcctggccctgccgaccacctggagaccttatcaaccctctcaacctcactctttctgaccctggggacaggccatcatccccacagcgcaggcggcgacagctggatccagggggaggccagggccccccacctgtcactctggctgctgccaaaaaagccaagtctgagactgtgctgacctgtgccacagggcgtgcccactgtgtgtggctagagtgccccatccctgatgcccccgttgtcaccaacgtgactgtgaaggcacgagtgtggaacagcaccttcatcgaggattacagagactttgaccgagtccgggtaaatggctgggctaccctattcctccgaaccagcatccccaccatcaacatggagaacaagaccacgtggttctctgtggacattgactcggagctggtggaggagctgccggccgaaatcgagctgtggctggtgctggtggccgtgggtgcagggctgctgctgctggggctgatcatcctcctgctgtggaagtgcggcttcttcaagcgagcccgcactcgcgccctgtatgaagctaagaggcagaaggcggagatgaagagccagccgtcagagacagagaggctgaccgacgactactgagggggcagccccccgcccccggcccacctggtgtgacttctttaagcggacccgctattatcagatcatgcccaagtaccacgcagtgcggatccgggaggaggagcgctacccacctccagggagcaccctgcccaccaagaagcactgggtgaccagctggcagactcgggaccaatactactgacgtcctccctgatcccaccccctcctcccccagtgtcccctttcttcctatttatcataagttatgcctctgacagtccacaggggccaccacctttggctggtagcagcaggctcaggcacatacacctcgtcaagagcatgcacatgctgtctggccctggggatcttcccacaggagggccagcgctgtggaccttacaacgccgagtgcactgcattcctgtgccctagatgcacgtggggcccactgctcgtggactgtgctggtgcatcacggatggtgcatgggctcgccgtgtctcagcctctgccagcgccaaaacaagccaaagagcctcccaccagagccgggaggaaaaggcccctgcaatgtggtgacacctccccctttcacactggatccatcttgagccacagtcactggattgactttgctgtcaaaactactgacagggagcagcccccgggccgctggctggtgggcccccaatgacacccatgccagagaggtggggatcctgcctaaggttgtctacgggggcacttggaggacctggcgtgctcagacccaacagcaaaggaactagaaagaaggacccagaacggcttgctttcctgcatctctgtgaagcctctctccttggccacagactgaactcgcagggagtgcagcaggaaggaacaaagacaggcaaacggcaacgtagcctgggctcactgtgctggggcacggcgggatcctccacagagaggaggggaccaattctggacagacagatgttgggaggatacagaggagatgccacttctcactcaccactaccagccagcctcagaaggccccagagagaccctgcaagaccacggagggagcgacacttgaatgtagaataggcagggggccctgccccaccccatccagccagaccccacgctgaccatgcgtcaggggcctagaggtggagttcttagctatccttggctttcagagccagcctggctctgccccctcccccatgggctgtgtcctaaggcccatttgagaagctgaggctagttccagaaaacctctcctgacccctgcctgttggcaggcccactccccagccccagccccttccatggtactgtagcaggggaattccctccccctccttgtgccttctttgtatataggcttctcacggcgaccaataaacagctcccagtttgta

SEQ ID NO: 328621 - DNA, 4443 bp, Homo sapiens
aagggggcgcggccgggacaagctgggggccggttgcccggggcagggacggcggcgacccggccgctggggaggcaggaagatagacccacggatcttaggaagggatccgagagcgcagctgtgaaactggctggggctgggggcacgaaaccgatcagcgctacggagcgcagcggccggcgggttccagtgtcctccggcggcgcggggagcaggtgaacaggtcctcacgcccagctccgccccctcacgcgctctcgccgggaccccgcttccgctggcagccatgggccccggccccagccgcgcgccccgcgccccacgcctgatgctctgtgcgctcgccttgatggtggcggccggcggctgcgtcgtctccgccttcaacctggatacccgattcctggtagtgaaggaggccgggaacccgggcagcctcttcggctactcggtcgccctccatcggcagacagagcggcagcagcgctacctgctcctggctggtgccccccgggagctcgctgtgcccgatggctacaccaaccggactggtgctgtgtacctgtgcccactcactgcccacaaggatgactgtgagcggatgaacatcacagtgaaaaatgaccctggccatcacattattgaggacatgtggcttggagtgactgtggccagccagggccctgcaggcagagttctggtctgtgcccaccgctacacccaggtgctgtggtcagggtcagaagaccagcggcgcatggtgggcaagtgctacgtgcgaggcaatgacctagagctggactccagtgatgactggcagacctaccacaacgagatgtgcaatagcaacacagactacctggagacgggcatgtgccagctgggcaccagcggtggcttcacccagaacactgtgtacttcggcgcccccggtgcctacaactggaaaggaaacagctacatgattcagcgcaaggagtgggacttatctgagtatagttacaaggacccagaggaccaaggaaacctctatattgatattgctgtgggagctccgtttgaaggcttgggcaaagtgtacatctatcacagtagctctaaggggctccttagacagccccagcaggtaatccatggagagaagctgggactgcctgggttggccaccttcggctattccctcagtgggcagatggatgtggatgagaacttctacccagaccttctagtgggaagcctgtcagaccacattgtgctgctgcgggcccggcccgtcatcaacatcgtccacaagaccttggtgcccaggccagctgtgctggaccctgcactttgcacggccacctcttgtgtgcaagtggagctgtgctttgcttacaaccagagtgccgggaaccccaactacaggcgaaacatcaccctggcctacactctggaggctgacagggaccgccggccgccccggctccgctttgccggcagtgagtccgctgtcttccacggcttcttctccatgcccgagatgcgctgccagaagctggagctgctcctgatggacaacctccgtgacaaactccgccccatcatcatctccatgaactactctttacctttgcggatgcccgatcgcccccggctggggctgcggtccctggacgcctacccgatcctcaaccaggcacaggctctggagaaccacactgaggtccagttccagaaggagtgcgggcctgacaacaagtgtgagagcaacttgcagatgcgggcagccttcgtgtcagagcagcagcagaagctgagcaggctccagtacagcagagacgtccggaaattgctcctgagcatcaacgtgacgaacacccggacctcggagcgctccggggaggacgcccacgaggcgctgctcaccctggtggtgcctcccgccctgctgctgtcctcagtgcgcccccccggggcctgccaagctaatgagaccatcttttgcgagctggggaaccccttcaaacggaaccagaggatggagctgctcatcgcctttgaggtcatcggggtgaccctgcacacaagggaccttcaggtgcagctgcagctctccacgtcgagtcaccaggacaacctgtggcccatgatcctcactctgctggtggactatacactccagacctcgcttagcatggtaaatcaccggctacaaagcttctttggggggacagtgatgggtgagtctggcatgaaaactgtggaggatgtaggaagccccctcaagtatgaattccaggtgggcccaatgggggaggggctggtgggcctggggaccctggtcctaggtctggagtggccctacgaagtcagcaatggcaagtggctgctgtatcccacggagatcaccgtccatggcaatgggtcctggccctgccgaccacctggagaccttatcaaccctctcaacctcactctttctgaccctggggacaggccatcatccccacagcgcaggcggcgacagctggatccagggggaggccagggccccccacctgtcactctggctgctgccaaaaaagccaagtctgagactgtgctgacctgtgccacagggcgtgcccactgtgtgtggctagagtgccccatccctgatgcccccgttgtcaccaacgtgactgtgaaggcacgagtgtggaacagcaccttcatcgaggattacagagactttgaccgagtccgggtaaatggctgggctaccctattcctccgaaccagcatccccaccatcaacatggagaacaagaccacgtggttctctgtggacattgactcggagctggtggaggagctgccggccgaaatcgagctgtggctggtgctggtggccgtgggtgcagggctgctgctgctggggctgatcatcctcctgctgtggaagtgcggcttcttcaagcgagcccgcactcgcgccctgtatgaagctaagaggcagaaggcggagatgaagagccagccgtcagagacagagaggctgaccgacgactactgagggggcagccccccgcccccggcccacctggtgtgacttctttaagcggacccgctattatcagatcatgcccaagtaccacgcagtgcggatccgggaggaggagcgctacccacctccagggagcaccctgcccaccaagaagcactgggtgaccagctggcagactcgggaccaatactactgacgtcctccctgatcccaccccctcctcccccagtgtcccctttcttcctatttatcataagttatgcctctgacagtccacaggggccaccacctttggctggtagcagcaggctcaggcacatacacctcgtcaagagcatgcacatgctgtctggccctggggatcttcccacaggagggccagcgctgtggaccttacaacgccgagtgcactgcattcctgtgccctagatgcacgtggggcccactgctcgtggactgtgctggtgcatcacggatggtgcatgggctcgccgtgtctcagcctctgccagcgccaaaacaagccaaagagcctcccaccagagccgggaggaaaaggcccctgcaatgtggtgacacctccccctttcacactggatccatcttgagccacagtcactggattgactttgctgtcaaaactactgacagggagcagcccccgggccgctggctggtgggcccccaatgacacccatgccagagaggtggggatcctgcctaaggttgtctacgggggcacttggaggacctggcgtgctcagacccaacagcaaaggaactagaaagaaggacccagaacggcttgctttcctgcatctctgtgaagcctctctccttggccacagactgaactcgcagggagtgcagcaggaaggaacaaagacaggcaaacggcaacgtagcctgggctcactgtgctggggcacggcgggatcctccacagagaggaggggaccaattctggacagacagatgttgggaggatacagaggagatgccacttctcactcaccactaccagccagcctcagaaggccccagagagaccctgcaagaccacggagggagcgacacttgaatgtagaataggcagggggccctgccccaccccatccagccagaccccacgctgaccatgcgtcaggggcctagaggtggagttcttagctatccttggctttcagagccagcctggctctgccccctcccccatgggctgtgtcctaaggcccatttgagaagctgaggctagttccagaaaacctctcctgacccctgcctgttggcaggcccactccccagccccagccccttccatggtactgtagcaggggaattccctccccctccttgtgccttctttgtatataggcttctcacggcgaccaataaacagctcccagtttgta

SEQ ID NO: 328622 - DNA, 3163 bp, Homo sapiens
agaaagttccggctagtagggctgctgtgatcggccgagggctggaccctgcactttgcacgggcacctcttgtgtgcaagtggagctgtgctttgcttacaaccagagtgccgggaaccccaactacaggcgaaacatcaccctggcctacactctggaggctgacagggaccgccggccgccccggctccgctttgccggcagtgagtccgctgtcttccacggcttcttctccatgcccgagatgcgctgccagaagctggagctgctcctgatggacaacctccgtgacaaactccgccccatcatcatctccatgaactactctttacctttgcggatgcccgatcgcccccggctggggctgcggtccctggacgcctacccgatcctcaaccaggcacaggctctggagaaccacactgaggtccagttccagaaggagtgcgggcctgacaacaagtgtgagagcaacttgcagatgcgggcagccttcgtgtcagagcagcagcagaagctgagcaggctccagtacagcagagacgtccggaaattgctcctgagcatcaacgtgacgaacacccggacctcggagcgctccggggaggacgcccacgaggcgctgctcaccctggtggtgcctcccgccctgctgctgtcctcagtgcgcccccccggggcctgccaagctaatgagaccatcttttgcgagctggggaaccccttcaaacggaaccagaggatggagctgctcatcgcctttgaggtcatcggggtgaccctgcacacaagggaccttcaggtgcagctgcagctctccacgtcgagtcaccaggacaacctgtggcccatgatcctcactctgctggtggactatacactccagacctcgcttagcatggtaaatcaccggctacaaagcttctttggggggacagtgatgggtgagtctggcatgaaaactgtggaggatgtaggaagccccctcaagtatgaattccaggtgggcccaatgggggaggggctggtgggcctggggaccctggtcctaggtctggagtggccctacgaagtcagcaatggcaagtggctgctgtatcccacggagatcaccgtccatggcaatgggtcctggccctgccgaccacctggagaccttatcaaccctctcaacctcactctttctgaccctggggacaggccatcatccccacagcgcaggcggcgacagctggatccagggggaggccagggccccccacctgtcactctggctgctgccaaaaaagccaagtctgagactgtgctgacctgtgccacagggcgtgcccactgtgtgtggctagagtgccccatccctgatgcccccgttgtcaccaacgtgactgtgaaggcacgagtgtggaacagcaccttcatcgaggattacagagactttgaccgagtccgggtaaatggctgggctaccctattcctccgaaccagcatccccaccatcaacatggagaacaagaccacgtggttctctgtggacattgactcggagctggtggaggagctgccggccgaaatcgagctgtggctggtgctggtggccgtgggtgcagggctgctgctgctggggctgatcatcctcctgctgtggaagtgcggcttcttcaagcgagcccgcactcgcgccctgtatgaagctaagaggcagaaggcggagatgaagagccagccgtcagagacagagaggctgaccgacgactactgagggggcagccccccgcccccggcccacctggtgtgacttctttaagcggacccgctattatcagatcatgcccaagtaccacgcagtgcggatccgggaggaggagcgctacccacctccagggagcaccctgcccaccaagaagcactgggtgaccagctggcagactcgggaccaatactactgacgtcctccctgatcccaccccctcctcccccagtgtcccctttcttcctatttatcataagttatgcctctgacagtccacaggggccaccacctttggctggtagcagcaggctcaggcacatacacctcgtcaagagcatgcacatgctgtctggccctggggatcttcccacaggagggccagcgctgtggaccttacaacgccgagtgcactgcattcctgtgccctagatgcacgtggggcccactgctcgtggactgtgctggtgcatcacggatggtgcatgggctcgccgtgtctcagcctctgccagcgccaaaacaagccaaagagcctcccaccagagccgggaggaaaaggcccctgcaatgtggtgacacctccccctttcacactggatccatcttgagccacagtcactggattgactttgctgtcaaaactactgacagggagcagcccccgggccgctggctggtgggcccccaatgacacccatgccagagaggtggggatcctgcctaaggttgtctacgggggcacttggaggacctggcgtgctcagacccaacagcaaaggaactagaaagaaggacccagaacggcttgctttcctgcatctctgtgaagcctctctccttggccacagactgaactcgcagggagtgcagcaggaaggaacaaagacaggcaaacggcaacgtagcctgggctcactgtgctggggcacggcgggatcctccacagagaggaggggaccaattctggacagacagatgttgggaggatacagaggagatgccacttctcactcaccactaccagccagcctcagaaggccccagagagaccctgcaagaccacggagggagcgacacttgaatgtagaataggcagggggccctgccccaccccatccagccagaccccacgctgaccatgcgtcaggggcctagaggtggagttcttagctatccttggctttcagagccagcctggctctgccccctcccccatgggctgtgtcctaaggcccatttgagaagctgaggctagttccagaaaacctctcctgacccctgcctgttggcaggcccactccccagccccagccccttccatggtactgtagcaggggaattccctccccctccttgtgccttctttgtatataggcttctcacggcgaccaataaacagctcccagtttgta

SEQ ID NO: 328623 - DNA, 4868 bp, Homo sapiens
aagggggcgcggccgggacaagctgggggccggttgcccggggcagggacggcggcgacccggccgctggggaggcaggaagatagacccacggatcttaggaagggatccgagagcgcagctgtgaaactggctggggctgggggcacgaaaccgatcagcgctacggagcgcagcggccggcgggttccagtgtcctccggcggcgcggggagcaggtgaacaggtcctcacgcccagctccgccccctcacgcgctctcgccgggaccccgcttccgctggcagccatgggccccggccccagccgcgcgccccgcgccccacgcctgatgctctgtgcgctcgccttgatggtggcggccggcggctgcgtcgtctccgccttcaacctggatacccgattcctggtagtgaaggaggccgggaacccgggcagcctcttcggctactcggtcgccctccatcggcagacagagcggcagcagcgctacctgctcctggctggtgccccccgggagctcgctgtgcccgatggctacaccaaccggactggtgctgtgtacctgtgcccactcactgcccacaaggatgactgtgagcggatgaacatcacagtgaaaaatgaccctggccatcacattattgaggacatgtggcttggagtgactgtggccagccagggccctgcaggcagagttctggtctgtgcccaccgctacacccaggtgctgtggtcagggtcagaagaccagcggcgcatggtgggcaagtgctacgtgcgaggcaatgacctagagctggactccagtgatgactggcagacctaccacaacgagatgtgcaatagcaacacagactacctggagacgggcatgtgccagctgggcaccagcggtggcttcacccagaacactgtgtacttcggcgcccccggtgcctacaactggaaaggaaacagctacatgattcagcgcaaggagtgggacttatctgagtatagttacaaggacccagaggaccaaggaaacctctatattgggtacacgatgcaggtaggcagcttcatcctgcaccccaaaaacatcaccattgtgacaggtgccccacggcaccgacatatgggcgcggtgttcttgctgagccaggaggcaggcggagacctgcggaggaggcaggtgctggagggctcgcaggtgggcgcctattttggcagcgccattgccctggcagacctgaacaatgatgggtggcaggacctcctggtgggcgccccctactacttcgagaggaaagaggaagtagggggtgccatctatgtcttcatgaaccaggcgggaacctccttccctgctcacccctcactccttcttcatggccccagtggctctgcctttggtttatctgtggccagcattggtgacatcaaccaggatggatttcaggatattgctgtgggagctccgtttgaaggcttgggcaaagtgtacatctatcacagtagctctaaggggctccttagacagccccagcaggtaatccatggagagaagctgggactgcctgggttggccaccttcggctattccctcagtgggcagatggatgtggatgagaacttctacccagaccttctagtgggaagcctgtcagaccacattgtgctgctgcgggcccggcccgtcatcaacatcgtccacaagaccttggtgcccaggccagctgtgctggaccctgcactttgcacggccacctcttgtgtgcaagtggagctgtgctttgcttacaaccagagtgccgggaaccccaactacaggcgaaacatcaccctggcctacactctggaggctgacagggaccgccggccgccccggctccgctttgccggcagtgagtccgctgtcttccacggcttcttctccatgcccgagatgcgctgccagaagctggagctgctcctgatggacaacctccgtgacaaactccgccccatcatcatctccatgaactactctttacctttgcggatgcccgatcgcccccggctggggctgcggtccctggacgcctacccgatcctcaaccaggcacaggctctggagaaccacactgaggtccagttccagaaggagtgcgggcctgacaacaagtgtgagagcaacttgcagatgcgggcagccttcgtgtcagagcagcagcagaagctgagcaggctccagtacagcagagacgtccggaaattgctcctgagcatcaacgtgacgaacacccggacctcggagcgctccggggaggacgcccacgaggcgctgctcaccctggtggtgcctcccgccctgctgctgtcctcagtgcgcccccccggggcctgccaagctaatgagaccatcttttgcgagctggggaaccccttcaaacggaaccagaggatggagctgctcatcgcctttgaggtcatcggggtgaccctgcacacaagggaccttcaggtgcagctgcagctctccacgtcgagtcaccaggacaacctgtggcccatgatcctcactctgctggtggactatacactccagacctcgcttagcatggtaaatcaccggctacaaagcttctttggggggacagtgatgggtgagtctggcatgaaaactgtggaggatgtaggaagccccctcaagtatgaattccaggtgggcccaatgggggaggggctggtgggcctggggaccctggtcctaggtctggagtggccctacgaagtcagcaatggcaagtggctgctgtatcccacggagatcaccgtccatggcaatgggtcctggccctgccgaccacctggagaccttatcaaccctctcaacctcactctttctgaccctggggacaggccatcatccccacagcgcaggcggcgacagctggatccagggggaggccagggccccccacctgtcactctggctgctgccaaaaaagccaagtctgagactgtgctgacctgtgccacagggcgtgcccactgtgtgtggctagagtgccccatccctgatgcccccgttgtcaccaacgtgactgtgaaggcacgagtgtggaacagcaccttcatcgaggattacagagactttgaccgagtccgggtaaatggctgggctaccctattcctccgaaccagcatccccaccatcaacatggagaacaagaccacgtggttctctgtggacattgactcggagctggtggaggagctgccggccgaaatcgagctgtggctggtgctggtggccgtgggtgcagggctgctgctgctggggctgatcatcctcctgctgtggaagtgcggcttcttcaagcgagcccgcactcgcgccctgtatgaagctaagaggcagaaggcggagatgaagagccagccgtcagagacagagaggctgaccgacgactactgagggggcagccccccgcccccggcccacctggtgtgacttctttaagcggacccgctattatcagatcatgcccaagtaccacgcagtgcggatccgggaggaggagcgctacccacctccagggagcaccctgcccaccaagaagcactgggtgaccagctggcagactcgggaccaatactactgacgtcctccctgatcccaccccctcctcccccagtgtcccctttcttcctatttatcataagttatgcctctgacagtccacaggggccaccacctttggctggtagcagcaggctcaggcacatacacctcgtcaagagcatgcacatgctgtctggccctggggatcttcccacaggagggccagcgctgtggaccttacaacgccgagtgcactgcattcctgtgccctagatgcacgtggggcccactgctcgtggactgtgctggtgcatcacggatggtgcatgggctcgccgtgtctcagcctctgccagcgccaaaacaagccaaagagcctcccaccagagccgggaggaaaaggcccctgcaatgtggtgacacctccccctttcacactggatccatcttgagccacagtcactggattgactttgctgtcaaaactactgacagggagcagcccccgggccgctggctggtgggcccccaatgacacccatgccagagaggtggggatcctgcctaaggttgtctacgggggcacttggaggacctggcgtgctcagacccaacagcaaaggaactagaaagaaggacccagaacggcttgctttcctgcatctctgtgaagcctctctccttggccacagactgaactcgcagggagtgcagcaggaaggaacaaagacaggcaaacggcaacgtagcctgggctcactgtgctggggcacggcgggatcctccacagagaggaggggaccaattctggacagacagatgttgggaggatacagaggagatgccacttctcactcaccactaccagccagcctcagaaggccccagagagaccctgcaagaccacggagggagcgacacttgaatgtagaataggcagggggccctgccccaccccatccagccagaccccacgctgaccatgcgtcaggggcctagaggtggagttcttagctatccttggctttcagagccagcctggctctgccccctcccccatgggctgtgtcctaaggcccatttgagaagctgaggctagttccagaaaacctctcctgacccctgcctgttggcaggcccactccccagccccagccccttccatggtactgtagcaggggaattccctccccctccttgtgccttctttgtatataggcttctcacggcgaccaataaacagctcccagtttgtagtttgtatgcagctgcatct

SEQ ID NO: 328624 - DNA, 4706 bp, Homo sapiens
aagggggcgcggccgggacaagctgggggccggttgcccggggcagggacggcggcgacccggccgctggggaggcaggaagatagacccacggatcttaggaagggatccgagagcgcagctgtgaaactggctggggctgggggcacgaaaccgatcagcgctacggagcgcagcggccggcgggttccagtgtcctccggcggcgcggggagcaggtgaacaggtcctcacgcccagctccgccccctcacgcgctctcgccgggaccccgcttccgctggcagccatgggccccggccccagccgcgcgccccgcgccccacgcctgatgctctgtgcgctcgccttgatggtggcggccggcggctgcgtcgtctccgccttcaacctggatacccgattcctggtagtgaaggaggccgggaacccgggcagcctcttcggctactcggtcgccctccatcggcagacagagcggcagcagcgctacctgctcctggctggtgccccccgggagctcgctgtgcccgatggctacaccaaccggactggtgctgtgtacctgtgcccactcactgcccacaaggatgactgtgagcggatgaacatcacagtgaaaaatgaccctggccatcacattattgaggacatgtggcttggagtgactgtggccagccagggccctgcaggcagagttctggtctgtgcccaccgctacacccaggtgctgtggtcagggtcagaagaccagcggcgcatggtgggcaagtgctacgtgcgaggcaatgacctagagctggactccagtgatgactggcagacctaccacaacgagatgtgcaatagcaacacagactacctggagacgggcatgtgccagctgggcaccagcggtggcttcacccagaacactgtgtacttcggcgcccccggtgcctacaactggaaaggaaacagctacatgattcagcgcaaggagtgggacttatctgagtatagttacaaggacccagaggaccaaggaaacctctatattgggtacacgatgcaggtaggcagcttcatcctgcaccccaaaaacatcaccattgtgacaggtgccccacggcaccgacatatgggcgcggtgttcttgctgagccaggaggcaggcggagacctgcggaggaggcaggtgctggagggctcgcaggtgggcgcctattttggcagcgccattgccctggcagacctgaacaatgatgggtggcaggacctcctggtgggcgccccctactacttcgagaggaaagaggaagtagggggtgccatctatgtcttcatgaaccaggcgggaacctccttccctgctcacccctcactccttcttcatggccccagtggctctgcctttggtttatctgtggccagcattggtgacatcaaccaggatggatttcaggatattgctgtgggagctccgtttgaaggcttgggcaaagtgtacatctatcacagtagctctaaggggctccttagacagccccagcaggtaatccatggagagaagctgggactgcctgggttggccaccttcggctattccctcagtgggcagatggatgtggatgagaacttctacccagaccttctagtgggaagcctgtcagaccacattgtgctgctgcgggcccggcccgtcatcaacatcgtccacaagaccttggtgcccaggccagctgtgctggaccctgcactttgcacggccacctcttgtgtgcaagtggagctgtgctttgcttacaaccagagtgccgggaaccccaactacaggcgaaacatcaccctggcctacactctggaggctgacagggaccgccggccgccccggctccgctttgccggcagtgagtccgctgtcttccacggcttcttctccatgcccgagatgcgctgccagaagctggagctgctcctgatggacaacctccgtgacaaactccgccccatcatcatctccatgaactactctttacctttgcggatgcccgatcgcccccggctggggctgcggtccctggacgcctacccgatcctcaaccaggcacaggctctggagaaccacactgaggtccagttccagaaggagtgcgggcctgacaacaagtgtgagagcaacttgcagatgcgggcagccttcgtgtcagagcagcagcagaagctgagcaggctccagtacagcagagacgtccggaaattgctcctgagcatcaacgtgacgaacacccggacctcggagcgctccggggaggacgcccacgaggcgctgctcaccctggtggtgcctcccgccctgctgctgtcctcagtgcgcccccccggggcctgccaagctaatgagaccatcttttgcgagctggggaaccccttcaaacggaaccagaggatggagctgctcatcgcctttgaggtcatcggggtgaccctgcacacaagggaccttcaggtgcagctgcagctctccacgtcgagtcaccaggacaacctgtggcccatgatcctcactctgctggtggactatacactccagacctcgcttagcatggtaaatcaccggctacaaagcttctttggggggacagtgatgggtgagtctggcatgaaaactgtggaggatgtaggaagccccctcaagtatgaattccaggtgggcccaatgggggaggggctggtgggcctggggaccctggtcctaggtctggagtggccctacgaagtcagcaatggcaagtggctgctgtatcccacggagatcaccgtccatggcaatgggtcctggccctgccgaccacctggagaccttatcaaccctctcaacctcactctttctgaccctggggacaggccatcatccccacagcgcaggcggcgacagctggatccagggggaggccagggccccccacctgtcactctggctgctgccaaaaaagccaagtctgagactgtgctgacctgtgccacagggcgtgcccactgtgtgtggctagagtgccccatccctgatgcccccgttgtcaccaacgtgactgtgaaggcacgagtgtggaacagcaccttcatcgaggattacagagactttgaccgagtccgggtaaatggctgggctaccctattcctccgaaccagcatccccaccatcaacatggagaacaagaccacgtggttctctgtggacattgactcggagctggtggaggagctgccggccgaaatcgagctgtggctggtgctggtggccgtgggtgcagggctgctgctgctggggctgatcatcctcctgctgtggaagtgtgacttctttaagcggacccgctattatcagatcatgcccaagtaccacgcagtgcggatccgggaggaggagcgctacccacctccagggagcaccctgcccaccaagaagcactgggtgaccagctggcagactcgggaccaatactactgacgtcctccctgatcccaccccctcctcccccagtgtcccctttcttcctatttatcataagttatgcctctgacagtccacaggggccaccacctttggctggtagcagcaggctcaggcacatacacctcgtcaagagcatgcacatgctgtctggccctggggatcttcccacaggagggccagcgctgtggaccttacaacgccgagtgcactgcattcctgtgccctagatgcacgtggggcccactgctcgtggactgtgctggtgcatcacggatggtgcatgggctcgccgtgtctcagcctctgccagcgccaaaacaagccaaagagcctcccaccagagccgggaggaaaaggcccctgcaatgtggtgacacctccccctttcacactggatccatcttgagccacagtcactggattgactttgctgtcaaaactactgacagggagcagcccccgggccgctggctggtgggcccccaatgacacccatgccagagaggtggggatcctgcctaaggttgtctacgggggcacttggaggacctggcgtgctcagacccaacagcaaaggaactagaaagaaggacccagaacggcttgctttcctgcatctctgtgaagcctctctccttggccacagactgaactcgcagggagtgcagcaggaaggaacaaagacaggcaaacggcaacgtagcctgggctcactgtgctggggcacggcgggatcctccacagagaggaggggaccaattctggacagacagatgttgggaggatacagaggagatgccacttctcactcaccactaccagccagcctcagaaggccccagagagaccctgcaagaccacggagggagcgacacttgaatgtagaataggcagggggccctgccccaccccatccagccagaccccacgctgaccatgcgtcaggggcctagaggtggagttcttagctatccttggctttcagagccagcctggctctgccccctcccccatgggctgtgtcctaaggcccatttgagaagctgaggctagttccagaaaacctctcctgacccctgcctgttggcaggcccactccccagccccagccccttccatggtactgtagcaggggaattccctccccctccttgtgccttctttgtatataggcttctcacggcgaccaataaacagctcccagtttgta

SEQ ID NO: 328625 - DNA, 2532 bp, Homo sapiens
actggaaaggtagaataggcaggggccctgccccacccatccacccggggcctgccaagctaatgagaccatcttttgcgagctggggaaccccttcaaacggaaccagaggatggagctgctcatcgcctttgaggtcatcggggtgaccctgcacacaagggaccttcaggtgcagctgcagctctccacgtcgagtcaccaggacaacctgtggcccatgatcctcactctgctggtggactatacactccagacctcgcttagcatggtaaatcaccggctacaaagcttctttggggggacagtgatgggtgagtctggcatgaaaactgtggaggatgtaggaagccccctcaagtatgaattccaggtgggcccaatgggggaggggctggtgggcctggggaccctggtcctaggtctggagtggccctacgaagtcagcaatggcaagtggctgctgtatcccacggagatcaccgtccatggcaatgggtcctggccctgccgaccacctggagaccttatcaaccctctcaacctcactctttctgaccctggggacaggccatcatccccacagcgcaggcggcgacagctggatccagggggaggccagggccccccacctgtcactctggctgctgccaaaaaagccaagtctgagactgtgctgacctgtgccacagggcgtgcccactgtgtgtggctagagtgccccatccctgatgcccccgttgtcaccaacgtgactgtgaaggcacgagtgtggaacagcaccttcatcgaggattacagagactttgaccgagtccgggtaaatggctgggctaccctattcctccgaaccagcatccccaccatcaacatggagaacaagaccacgtggttctctgtggacattgactcggagctggtggaggagctgccggccgaaatcgagctgtggctggtgctggtggccgtgggtgcagggctgctgctgctggggctgatcatcctcctgctgtggaagtgcggcttcttcaagcgagcccgcactcgcgccctgtatgaagctaagaggcagaaggcggagatgaagagccagccgtcagagacagagaggctgaccgacgactactgagggggcagccccccgcccccggcccacctggtgtgacttctttaagcggacccgctattatcagatcatgcccaagtaccacgcagtgcggatccgggaggaggagcgctacccacctccagggagcaccctgcccaccaagaagcactgggtgaccagctggcagactcgggaccaatactactgacgtcctccctgatcccaccccctcctcccccagtgtcccctttcttcctatttatcataagttatgcctctgacagtccacaggggccaccacctttggctggtagcagcaggctcaggcacatacacctcgtcaagagcatgcacatgctgtctggccctggggatcttcccacaggagggccagcgctgtggaccttacaacgccgagtgcactgcattcctgtgccctagatgcacgtggggcccactgctcgtggactgtgctggtgcatcacggatggtgcatgggctcgccgtgtctcagcctctgccagcgccaaaacaagccaaagagcctcccaccagagccgggaggaaaaggcccctgcaatgtggtgacacctccccctttcacactggatccatcttgagccacagtcactggattgactttgctgtcaaaactactgacagggagcagcccccgggccgctggctggtgggcccccaatgacacccatgccagagaggtggggatcctgcctaaggttgtctacgggggcacttggaggacctggcgtgctcagacccaacagcaaaggaactagaaagaaggacccagaacggcttgctttcctgcatctctgtgaagcctctctccttggccacagactgaactcgcagggagtgcagcaggaaggaacaaagacaggcaaacggcaacgtagcctgggctcactgtgctggggcacggcgggatcctccacagagaggaggggaccaattctggacagacagatgttgggaggatacagaggagatgccacttctcactcaccactaccagccagcctcagaaggccccagagagaccctgcaagaccacggagggagcgacacttgaatgtagaataggcagggggccctgccccaccccatccagccagaccccacgctgaccatgcgtcaggggcctagaggtggagttcttagctatccttggctttcagagccagcctggctctgccccctcccccatgggctgtgtcctaaggcccatttgagaagctgaggctagttccagaaaacctctcctgacccctgcctgttggcaggcccactccccagccccagccccttccatggtactgtagcaggggaattccctccccctccttgtgccttctttgtatataggcttctcacggcgaccaataaacagctcccagtttgta

SEQ ID NO: 328626 - DNA, 4420 bp, Homo sapiens
aagggggcgcggccgggacaagctgggggccggttgcccggggcagggacggcggcgacccggccgctggggaggcaggaagatagacccacggatcttaggaagggatccgagagcgcagctgtgaaactggctggggctgggggcacgaaaccgatcagcgctacggagcgcagcggccggcgggttccagtgtcctccggcggcgcggggagcaggtgaacaggtcctcacgcccagctccgccccctcacgcgctctcgccgggaccccgcttccgctggcagccatgggccccggccccagccgcgcgccccgcgccccacgcctgatgctctgtgcgctcgccttgatggtggcggccggcggctgcgtcgtctccgccttcaacctggatacccgattcctggtagtgaaggaggccgggaacccgggcagcctcttcggctactcggtcgccctccatcggcagacagagcggcagcagcgctacctgctcctggctggtgccccccgggagctcgctgtgcccgatggctacaccaaccggactggtgctgtgtacctgtgcccactcactgcccacaaggatgactgtgagcggatgaacatcacagtgaaaaatgaccctggccatcacattattgaggacatgtggcttggagtgactgtggccagccagggccctgcaggcagagttctggtctgtgcccaccgctacacccaggtgctgtggtcagggtcagaagaccagcggcgcatggtgggcaagtgctacgtgcgaggcaatgacctagagctggactccagtgatgactggcagacctaccacaacgagatgtgcaatagcaacacagactacctggagacgggcatgtgccagctgggcaccagcggtggcttcacccagaacactgtgtacttcggcgcccccggtgcctacaactggaaaggaaacagctacatgattcagcgcaaggagtgggacttatctgagtatagttacaaggacccagaggaccaaggaaacctctatattgggtacacgatgcaggtaggcagcttcatcctgcaccccaaaaacatcaccattgtgacaggtgccccacggcaccgacatatgggcgcggtgttcttgctgagccaggaggcaggcggagacctgcggaggaggcaggtgctggagggctcgcaggtgggcgcctattttggcagcgccattgccctggcagacctgaacaatgatgggtggcaggacctcctggtgggcgccccctactacttcgagaggaaagaggaagtagggggtgccatctatgtcttcatgaaccaggcgggaacctccttccctgctcacccctcactccttcttcatggccccagtggctctgcctttggtttatctgtggccagcattggtgacatcaaccaggatggatttcaggatattgctgtgggagctccgtttgaaggcttgggcaaagtgtacatctatcacagtagctctaaggggctccttagacagccccagcaggtaatccatggagagaagctgggactgcctgggttggccaccttcggctattccctcagtgggcagatggatgtggatgagaacttctacccagaccttctagtgggaagcctgtcagaccacattgtgctgctgcgggcccggcccgtcatcaacatcgtccacaagaccttggtgcccaggccagctgtgctggaccctgcactttgcacggccacctcttgtgtgcaagtggagctgtgctttgcttacaaccagagtgccgggaaccccaactacaggcgaaacatcaccctggcctacactctggaggctgacagggaccgccggccgccccggctccgctttgccggcagtgagtccgctgtcttccacggcttcttctccatgcccgagatgcgctgccagaagctggagctgctcctgatggacaacctccgtgacaaactccgccccatcatcatctccatgaactactctttacctttgcggatgcccgatcgcccccggctggggctgcggtccctggacgcctacccgatcctcaaccaggcacaggctctggagaaccacactgaggtccagttccagaaggagtgcgggcctgacaacaagtgtgagagcaacttgcagatgcgggcagccttcgtgtcagagcagcagcagaagctgagcaggctccagtacagcagagacgtccggaaattgctcctgagcatcaacgtgacgaacacccggacctcggagcgctccggggaggacgcccacgaggcgctgctcaccctggtggtgcctcccgccctgctgctgtcctcagtgcgcccccccggggcctgccaagctaatgagaccatcttttgcgagctggggaaccccttcaaacggaaccagaggatggagctgctcatcgcctttgaggtcatcggggtgaccctgcacacaagggaccttcaggtgcagctgcagctctccacgtcgagtcaccaggacaacctgtggcccatgatcctcactctgctggtggactatacactccagacctcgcttagcatggtaaatcaccggctacaaagcttctttggggggacagtgatgggtgagtctggcatgaaaactgtggaggatgtaggaagccccctcaagtatgaattccaggtgggcccaatgggggaggggctggtgggcctggggaccctggtcctaggtctggagtggccctacgaagtcagcaatggcaagtggctgctgtatcccacggagatcaccgtccatggcaatgggtcctggccctgccgaccacctggagaccttatcaaccctctcaacctcactctttctgaccctggggacaggccatcatccccacagcgcaggcggcgacagctggatccagggggaggccagggccccccacctgtcactctggctgctgccaaaaaagccaagtctgagactgtgctgacctgtgccacagggcgtgcccactgtgtgtggctagagtgccccatccctgatgcccccgttgtcaccaacgtgactgtgaaggcacgagtgtggaacagcaccttcatcgaggattacagagactttgaccgagtccgggtaaatggctgggctaccctattcctccgaaccagcatccccaccatcaacatggagaacaagaccacgtggttctctgtggacattgactcggagctggtggaggagctgccggccgaaatcgagctgtggctggtgctggtggccgtgggtgcagggctgctgctgctggggctgatcatcctcctgctgtggaagtgcggcttcttcaagcgagcccgcactcgcgccctgtatgaagctaagaggcagaaggcggagatgaagagccagccgtcagagacagagaggctgaccgacgactactgagggggcagccccccgcccccggcccacctggtgtgacttctttaagcggacccgctattatcagatcatgcccaacgccaaaacaagccaaagagcctcccaccagagccgggaggaaaaggcccctgcaatgtggtgacacctccccctttcacactggatccatcttgagccacagtcactggattgactttgctgtcaaaactactgacagggagcagcccccgggccgctggctggtgggcccccaatgacacccatgccagagaggtggggatcctgcctaaggttgtctacgggggcacttggaggacctggcgtgctcagacccaacagcaaaggaactagaaagaaggacccagaacggcttgctttcctgcatctctgtgaagcctctctccttggccacagactgaactcgcagggagtgcagcaggaaggaacaaagacaggcaaacggcaacgtagcctgggctcactgtgctggggcacggcgggatcctccacagagaggaggggaccaattctggacagacagatgttgggaggatacagaggagatgccacttctcactcaccactaccagccagcctcagaaggccccagagagaccctgcaagaccacggagggagcgacacttgaatgtagaataggcagggggccctgccccaccccatccagccagaccccacgctgaccatgcgtcaggggcctagaggtggagttcttagctatccttggctttcagagccagcctggctctgccccctcccccatgggctgtgtcctaaggcccatttgagaagctgaggctagttccagaaaacctctcctgacccctgcctgttggcaggcccactccccagccccagccccttccatggtactgtagcaggggaattccctccccctccttgtgccttctttgtatataggcttctcacggcgaccaataaacagctcccagtttgta

SEQ ID NO: 328627 - DNA, 2011 bp, Homo sapiens
aatagctaggtacgaggctggttcatcgccgagacgaccctggggacaggccatcatccccacagcgcaggcggcgacagctggatccagggggaggccagggccccccacctgtcactctggctgctgccaaaaaagccaagtctgagactgtgctgacctgtgccacagggcgtgcccactgtgtgtggctagagtgccccatccctgatgcccccgttgtcaccaacgtgactgtgaaggcacgagtgtggaacagcaccttcatcgaggattacagagactttgaccgagtccgggtaaatggctgggctaccctattcctccgaaccagcatccccaccatcaacatggagaacaagaccacgtggttctctgtggacattgactcggagctggtggaggagctgccggccgaaatcgagctgtggctggtgctggtggccgtgggtgcagggctgctgctgctggggctgatcatcctcctgctgtggaagtgcggcttcttcaagcgagcccgcactcgcgccctgtatgaagctaagaggcagaaggcggagatgaagagccagccgtcagagacagagaggctgaccgacgactactgagggggcagccccccgcccccggcccacctggtgtgacttctttaagcggacccgctattatcagatcatgcccaagtaccacgcagtgcggatccgggaggaggagcgctacccacctccagggagcaccctgcccaccaagaagcactgggtgaccagctggcagactcgggaccaatactactgacgtcctccctgatcccaccccctcctcccccagtgtcccctttcttcctatttatcataagttatgcctctgacagtccacaggggccaccacctttggctggtagcagcaggctcaggcacatacacctcgtcaagagcatgcacatgctgtctggccctggggatcttcccacaggagggccagcgctgtggaccttacaacgccgagtgcactgcattcctgtgccctagatgcacgtggggcccactgctcgtggactgtgctggtgcatcacggatggtgcatgggctcgccgtgtctcagcctctgccagcgccaaaacaagccaaagagcctcccaccagagccgggaggaaaaggcccctgcaatgtggtgacacctccccctttcacactggatccatcttgagccacagtcactggattgactttgctgtcaaaactactgacagggagcagcccccgggccgctggctggtgggcccccaatgacacccatgccagagaggtggggatcctgcctaaggttgtctacgggggcacttggaggacctggcgtgctcagacccaacagcaaaggaactagaaagaaggacccagaacggcttgctttcctgcatctctgtgaagcctctctccttggccacagactgaactcgcagggagtgcagcaggaaggaacaaagacaggcaaacggcaacgtagcctgggctcactgtgctggggcacggcgggatcctccacagagaggaggggaccaattctggacagacagatgttgggaggatacagaggagatgccacttctcactcaccactaccagccagcctcagaaggccccagagagaccctgcaagaccacggagggagcgacacttgaatgtagaataggcagggggccctgccccaccccatccagccagaccccacgctgaccatgcgtcaggggcctagaggtggagttcttagctatccttggctttcagagccagcctggctctgccccctcccccatgggctgtgtcctaaggcccatttgagaagctgaggctagttccagaaaacctctcctgacccctgcctgttggcaggcccactccccagccccagccccttccatggtactgtagcaggggaattccctccccctccttgtgccttctttgtatataggcttctcacggcgaccaataaacagctcccagtttgta

SEQ ID NO: 328628 - DNA, 5344 bp, Homo sapiens
  misc_feature (5344)..(5344): n is a, c, g, or t
aagggggcgcggccgggacaagctgggggccggttgcccggggcagggacggcggcgacccggccgctggggaggcaggaagatagacccacggatcttaggaagggatccgagagcgcagctgtgaaactggctggggctgggggcacgaaaccgatcagcgctacggagcgcagcggccggcgggttccagtgtcctccggcggcgcggggagcaggtgaacaggtcctcacgcccagctccgccccctcacgcgctctcgccgggaccccgcttccgctggcagccatgggccccggccccagccgcgcgccccgcgccccacgcctgatgctctgtgcgctcgccttgatggtggcggccggcggctgcgtcgtctccgccttcaacctggatacccgattcctggtagtgaaggaggccgggaacccgggcagcctcttcggctactcggtcgccctccatcggcagacagagcggcagcagcgctacctgctcctggctggtgccccccgggagctcgctgtgcccgatggctacaccaaccggactggtgctgtgtacctgtgcccactcactgcccacaaggatgactgtgagcggatgaacatcacagtgaaaaatgaccctggccatcacattattgaggacatgtggcttggagtgactgtggccagccagggccctgcaggcagagttctggtctgtgcccaccgctacacccaggtgctgtggtcagggtcagaagaccagcggcgcatggtgggcaagtgctacgtgcgaggcaatgacctagagctggactccagtgatgactggcagacctaccacaacgagatgtgcaatagcaacacagactacctggagacgggcatgtgccagctgggcaccagcggtggcttcacccagaacactgtgtacttcggcgcccccggtgcctacaactggaaaggaaacagctacatgattcagcgcaaggagtgggacttatctgagtatagttacaaggacccagaggaccaaggaaacctctatattgggtacacgatgcaggtaggcagcttcatcctgcaccccaaaaacatcaccattgtgacaggtgccccacggcaccgacatatgggcgcggtgttcttgctgagccaggaggcaggcggagacctgcggaggaggcaggtgctggagggctcgcaggtgggcgcctattttggcagcgccattgccctggcagacctgaacaatgatgggtggcaggacctcctggtgggcgccccctactacttcgagaggaaagaggaagtagggggtgccatctatgtcttcatgaaccaggcgggaacctccttccctgctcacccctcactccttcttcatggccccagtggctctgcctttggtttatctgtggccagcattggtgacatcaaccaggatggatttcaggatattgctgtgggagctccgtttgaaggcttgggcaaagtgtacatctatcacagtagctctaaggggctccttagacagccccagcaggtaatccatggagagaagctgggactgcctgggttggccaccttcggctattccctcagtgggcagatggatgtggatgagaacttctacccagaccttctagtgggaagcctgtcagaccacattgtgctgctgcgggcccggcccgtcatcaacatcgtccacaagaccttggtgcccaggccagctgtgctggaccctgcactttgcacggccacctcttgtgtgcaagtggagctgtgctttgcttacaaccagagtgccgggaaccccaactacaggcgaaacatcaccctggcctacactctggaggctgacagggaccgccggccgccccggctccgctttgccggcagtgagtccgctgtcttccacggcttcttctccatgcccgagatgcgctgccagaagctggagctgctcctgatggacaacctccgtgacaaactccgccccatcatcatctccatgaactactctttacctttgcggatgcccgatcgcccccggctggggctgcggtccctggacgcctacccgatcctcaaccaggcacaggctctggagaaccacactgaggtccagttccagaaggagtgcgggcctgacaacaagtgtgagagcaacttgcagatgcgggcagccttcgtgtcagagcagcagcagaagctgagcaggctccagtacagcagagacgtccggaaattgctcctgagcatcaacgtgacgaacacccggacctcggagcgctccggggaggacgcccacgaggcgctgctcaccctggtggtgcctcccgccctgctgctgtcctcagtgcgcccccccggggcctgccaagctaatgagaccatcttttgcgagctggggaaccccttcaaacggaaccagaggatggagctgctcatcgcctttgaggtcatcggggtgaccctgcacacaagggaccttcaggtgcagctgcagctctccacgtcgagtcaccaggacaacctgtggcccatgatcctcactctgctggtggactatacactccagacctcgcttagcatggtaaatcaccggctacaaagcttctttggggggacagtgatgggtgagtctggcatgaaaactgtggaggatgtaggaagccccctcaagtatgaattccaggtgggcccaatgggggaggggctggtgggcctggggaccctggtcctaggtctggagtggccctacgaagtcagcaatggcaagtggctgctgtatcccacggagatcaccgtccatggcaatgggtcctggccctgccgaccacctggagaccttatcaaccctctcaacctcactctttctgaccctggggacaggccatcatccccacagcgcaggcggcgacagctggatccagggggaggccagggccccccacctgtcactctggctgctgccaaaaaagccaagtctgagactgtgctgacctgtgccacagggcgtgcccactgtgtgtggctagagtgccccatccctgatgcccccgttgtcaccaacgtgactgtgaaggcacgagtgtggaacagcaccttcatcgaggattacagagactttgaccgagtccgggtaaatggctgggctaccctattcctccgaaccagcatccccaccatcaacatggagaacaagaccacgtggttctctgtggacattgactcggagctggtggaggagctgccggccgaaatcgagctgtggctggtgctggtggccgtgggtgcagggctgctgctgctggggctgatcatcctcctgctgtggaagtgcggcttcttcaagcgagcccgcactcgcgccctgtatgaagctaagaggcagaaggcggagatgaagagccagccgtcagagacagagaggctgaccgacgactactgagggggcagccccccgcccccggcccacctggtgtgacttctttaagcggacccgctattatcagatcatgcccaagtaccacgcagtgcggatccgggaggaggagcgctacccacctccagggagcaccctgcccaccaagaagcactgggtgaccagctggcagactcgggaccaatactactgacgtcctccctgatcccaccccctcctcccccagtgtcccctttcttcctatttatcataagttatgcctctgacagtccacaggggccaccacctttggctggtagcagcaggctcaggcacatacacctcgtcaagagcatgcacatgctgtctggccctggggatcttcccacaggagggccagcgctgtggaccttacaacgccgagtgcactgcattcctgtgccctagatgcacgtggggcccactgctcgtggactgtgctggtgcatcacggatggtgcatgggctcgccgtgtctcagcctctgccagcgccaaaacaagccaaagagcctcccaccagagccgggaggaaaaggcccctgcaatgtggtgacacctccccctttcacactggatccatcttgagccacagtcactggattgactttgctgtcaaaactactgacagggagcagcccccgggccgctggctggtgggcccccaatgacacccatgccagagaggtggggatcctgcctaaggttgtctacgggggcacttggaggacctggcgtgctcagacccaacagcaaaggaactagaaagaaggacccagaacggcttgctttcctgcatctctgtgaagcctctctccttggccacagactgaactcgcagggagtgcagcaggaaggaacaaagacaggcaaacggcaacgtagcctgggctcactgtgctggggcacggcgggatcctccacagagaggaggggaccaattctggacagacagatgttgggaggatacagaggaccctgcaagaccacggagggagcgacacttgaatgtagaataggcagggggccctgccccaccccatccagccagaccccacgctgaccatgcgtcaggggcctagaggtggagttcttagctatccttggctttcagagccagcctggctctgccccctcccccatgggctgtgtcctaaggcccatttgagaagctgaggctagttccagaaaacctctcctgacccctgcctgttggcaggcccactccccagccccagccccttccatggtactgtagcaggggaattccctccccctccttgtgccttctttgtatataggcttctcacggcgaccaataaacagctcccagtttgtaaaaaaaaaaaaaagaaaaaaaaaaaaaaaaaaaaggggggaataatgggggggggggaaaaaggggtacaggaaggggccaggggcccaaggggatcccggaccccagattccgtggccaagggggcaaacagacgggaacccaaaaggagacccgaaaaatcagaaagcccgggtaccggatagaagcggcggagaacaaagcaaccgcacgccaaagcccagacaccgacggccaccaaagggactcaacacagcaacagacgacacagactgcatcagaagaggcaatagccgaggagcgcagacgacaacgccgcgacacaccaaaacaaacaccaaaccacaaatacacagcaataaaccaagcacaaaaaagagagcagcgcacaacgaacagccagagagggacgcaccgcagcagagcgcagaacgagagcagggcacaacagagaaaaagagaaaccgcagacgagaaaaaaagaaagagagaaaagagcaaagaagaagaggaaaaggaacacgcagccacacaacgaaagcagaaaan

SEQ ID NO: 328629 - DNA, 4649 bp, Homo sapiens
aagggggcgcggccgggacaagctgggggccggttgcccggggcagggacggcggcgacccggccgctggggaggcaggaagatagacccacggatcttaggaagggatccgagagcgcagctgtgaaactggctggggctgggggcacgaaaccgatcagcgctacggagcgcagcggccggcgggttccagtgtcctccggcggcgcggggagcaggtgaacaggtcctcacgcccagctccgccccctcacgcgctctcgccgggaccccgcttccgctggcagccatgggccccggccccagccgcgcgccccgcgccccacgcctgatgctctgtgcgctcgccttgatggtggcggccggcggctgcgtcgtctccgccttcaacctggatacccgattcctggtagtgaaggaggccgggaacccgggcagcctcttcggctactcggtcgccctccatcggcagacagagcggcagcagcgctacctgctcctggctggtgccccccgggagctcgctgtgcccgatggctacaccaaccggactggtgctgtgtacctgtgcccactcactgcccacaaggatgactgtgagcggatgaacatcacagtgaaaaatgaccctggccatcacattattgaggacatgtggcttggagtgactgtggccagccagggccctgcaggcagagttctggtctgtgcccaccgctacacccaggtgctgtggtcagggtcagaagaccagcggcgcatggtgggcaagtgctacgtgcgaggcaatgacctagagctggactccagtgatgactggcagacctaccacaacgagatgtgcaatagcaacacagactacctggagacgggcatgtgccagctgggcaccagcggtggcttcacccagaacactgtgtacttcggcgcccccggtgcctacaactggaaaggaaacagctacatgattcagcgcaaggagtgggacttatctgagtatagttacaaggacccagaggaccaaggaaacctctatattgggtacacgatgcaggtaggcagcttcatcctgcaccccaaaaacatcaccattgtgacaggtgccccacggcaccgacatatgggcgcggtgttcttgctgagccaggaggcaggcggagacctgcggaggaggcaggtgctggagggctcgcaggtgggcgcctattttggcagcgccattgccctggcagacctgaacaatgatgggtggcaggacctcctggtgggcgccccctactacttcgagaggaaagaggaagtagggggtgccatctatgtcttcatgaaccaggcgggaacctccttccctgctcacccctcactccttcttcatggccccagtggctctgcctttggtttatctgtggccagcattggtgacatcaaccaggatggatttcaggatattgctgtgggagctccgtttgaaggcttgggcaaagtgtacatctatcacagtagctctaaggggctccttagacagccccagcaggtaatccatggagagaagctgggactgcctgggttggccaccttcggctattccctcagtgggcagatggatgtggatgagaacttctacccagaccttctagtgggaagcctgtcagaccacattgtgctgctgcgggcccggcccgtcatcaacatcgtccacaagaccttggtgcccaggccagctgtgctggaccctgcactttgcacggccacctcttgtgtgcaagtggagctgtgctttgcttacaaccagagtgccgggaaccccaactacaggcgaaacatcaccctggcctacactctggaggctgacagggaccgccggccgccccggctccgctttgccggcagtgagtccgctgtcttccacggcttcttctccatgcccgagatgcgctgccagaagctggagctgctcctgatggacaacctccgtgacaaactccgccccatcatcatctccatgaactactctttacctttgcggatgcccgatcgcccccggctggggctgcggtccctggacgcctacccgatcctcaaccaggcacaggctctggagaaccacactgaggtccagttccagaaggagtgcgggcctgacaacaagtgtgagagcaacttgcagatgcgggcagccttcgtgtcagagcagcagcagaagctgagcaggctccagtacagcagagacgtccggaaattgctcctgagcatcaacgtgacgaacacccggacctcggagcgctccggggaggacgcccacgaggcgctgctcaccctggtggtgcctcccgccctgctgctgtcctcagtgcgcccccccggggcctgccaagctaatgagaccatcttttgcgagctggggaaccccttcaaacggaaccagaggatggagctgctcatcgcctttgaggtcatcggggtgaccctgcacacaagggaccttcaggtgcagctgcagctctccacgtcgagtcaccaggacaacctgtggcccatgatcctcactctgctggtggactatacactccagacctcgcttagcatggtaaatcaccggctacaaagcttctttggggggacagtgatgggtgagtctggcatgaaaactgtggaggatgtaggaagccccctcaagtatgaattccaggtgggcccaatgggggaggggctggtgggcctggggaccctggtcctaggtctggagtggccctacgaagtcagcaatggcaagtggctgctgtatcccacggagatcaccgtccatggcaatgggtcctggccctgccgaccacctggagaccttatcaaccctctcaacctcactctttctgaccctggggacaggccatcatccccacagcgcaggcggcgacagctggatccagggggaggccagggccccccacctgtcactctggctgctgccaaaaaagccaagtctgagactgtgctgacctgtgccacagggcgtgcccactgtgtgtggctagagtgccccatccctgatgcccccgttgtcaccaacgtgactgtgaaggcacgagtgtggaacagcaccttcatcgaggattacagagactttgaccgagtccgggtaaatggctgggctaccctattcctccgaaccagcatccccaccatcaacatggagaacaagaccacgtggttctctgtggacattgactcggagctggtggaggagctgccggccgaaatcgagctgtggctggtgctggtggccgtgggtgcagggctgctgctgctggggctgatcatcctcctgctgtggaagtgcggcttcttcaagcgagcccgcactcgcgccctgtatgaagctaagaggcagaaggcggagatgaagagccagccgtcagagacagagaggctgaccgacgactactgagggggcagccccccgcccccggcccacctggtgtgacttctttaagcggacccgctattatcagatcatgcccaagtaccacgcagtgcggatccgggaggaggagcgctacccacctccagggagcaccctgcccaccaagaagcactgggtgaccagctggcagactcgggaccaatactactgacgtcctccctgatcccaccccctcctcccccagtgtcccctttcttcctatttatcataagttatgcctctgacagtccacaggggccaccacctttggctggtagcagcaggctcaggcacatacacctcgtcaagagcatgcacatgctgtctggccctggggatcttcccacaggagggccagcgctgtggaccttacaacgccgagtgcactgcattcctgtgccctagatgcacgtggggcccactgctcgtggactgtgctggtgcatcacggatggtgcatgggctcgccgtgtctcagcctctgccagcgccaaaacaagccaaagagcctcccaccagagccgggaggaaaaggcccctgcaatgtggtgacacctccccctttcacactggatccatcttgagccacagtcactggattgactttgctgtcaaaactactgacagggagcagcccccgggccgctggctggtgggcccccaatgacacccatgccagagaggtggggatcctgcctaaggttgtctacgggggcacttggaggacctggcgtgctcagacccaacagcaaaggaactagaaagaaggacccagaacggcttgctttcctgcatctctgtgaagcctctctccttggccacagactgaactcgcagggagtgcagcaggaaggaacaaagacaggcaaacggcaacgtagcctgggctcactgtgctggggcacggcgggatcctccacagagaggaggggaccaattctggacagacagatgttgggaggatacagaggagatgccacttctcactcaccactaccagccagcctcagaaggccccagagagtgagcaagccaggccggcttgctcaggtctcctcgcttgctcaggtctcctggcttcctcaggtctgcctgcatttcttcaatcatgaattctgagtcctttgcttctttaaaacttgctccacacagtgtagtcaagccgactctccagacctggcaagccagg

SEQ ID NO: 328630 - DNA, 1303 bp, Homo sapiens
aagggggcgcggccgggacaagctgggggccggttgcccggggcagggacggcggcgacccggccgctggggaggcaggaagatagacccacggatcttaggaagggatccgagagcgcagctgtgaaactggctggggctgggggcacgaaaccgatcagcgctacggagcgcagcggccggcgggttccagtgtcctccggcggcgcggggagcaggtgaacaggtcctcacgcccagctccgccccctcacgcgctctcgccgggaccccgcttccgctggcagccatgggccccggccccagccgcgcgccccgcgccccacgcctgatgctctgtgcgctcgccttgatggtggcggccggcggctgcgtcgtctccgccttcaacctggatacccgattcctggtagtgaaggaggccgggaacccgggcagcctcttcggctactcggtcgccctccatcggcagacagagcggcagcagcgctacctgctcctggctggtgccccccgggagctcgtgtcaaaactactgacagggagcagcccccgggccgctggctggtgggcccccaatgacacccatgccagagaggtggggatcctgcctaaggttgtctacgggggcacttggaggacctggcgtgctcagacccaacagcaaaggaactagaaagaaggacccagaacggcttgctttcctgcatctctgtgaagcctctctccttggccacagactgaactcgcagggagtgcagcaggaaggaacaaagacaggcaaacggcaacgtagcctgggctcactgtgctggggcacggcgggatcctccacagagaggaggggaccaattctggacagacagatgttgggaggatacagaggagatgccacttctcactcaccactaccagccagcctcagaaggccccagagagaccctgcaagaccacggagggagcgacacttgaatgtagaataggcagggggccctgccccaccccatccagccagaccccacgctgaccatgcgtcaggggcctagaggtggagttcttagctatccttggctttcagagccagcctggctctgccccctcccccatgggctgtgtcctaaggcccatttgagaagctgaggctagttccagaaaacctctcctgacccctgcctgttggcaggcccactccccagccccagccccttccatggtactgtagcaggggaattccctccccctccttgtgccttctttgtatataggcttctcacggcgaccaataaacagctcccagtttgta

SEQ ID NO: 328631 - DNA, 3311 bp, Homo sapiens
aagggggcgcggccgggacaagctgggggccggttgcccggggcagggacggcggcgacccggccgctggggaggcaggaagatagacccacggatcttaggaagggatccgagagcgcagctgtgaaactggctggggctgggggcacgaaaccgatcagcgctacggagcgcagcggccggcgggttccagtgtcctccggcggcgcggggagcaggtgaacaggtcctcacgcccagctccgccccctcacgcgctctcgccgggaccccgcttccgctggcagccatgggccccggccccagccgcgcgccccgcgccccacgcctgatgctctgtgcgctcgccttgatggtggcggccggcggctgcgtcgtctccgccttcaacctggatacccgattcctggtagtgaaggaggccgggaacccgggcagcctcttcggctactcggtcgccctccatcggcagacagagcggcagcagcgctacctgctcctggctggtgccccccgggagctcgctgtgcccgatggctacaccaaccggactggtgctgtgtacctgtgcccactcactgcccacaaggatgactgtgagcggatgaacatcacagtgaaaaatgaccctggccatcacattattgaggacatgtggcttggagtgactgtggccagccagggccctgcaggcagagttctggtctgtgcccaccgctacacccaggtgctgtggtcagggtcagaagaccagcggcgcatggtgggcaagtgctacgtgcgaggcaatgacctagagctggactccagtgatgactggcagacctaccacaacgagatgtgcaatagcaacacagactacctggagacgggcatgtgccagctgggcaccagcggtggcttcacccagaacactgtgtacttcggcgcccccggtgcctacaactggaaaggaaacagctacatgattcagcgcaaggagtgggacttatctgagtatagttacaaggacccagaggaccaaggaaacctctatattgggtacacgatgcaggtaggcagcttcatcctgcaccccaaaaacatcaccattgtgacaggtgccccacggcaccgacatatgggcgcggtgttcttgctgagccaggaggcaggcggagacctgcggaggaggcaggtgctggagggctcgcaggtgggcgcctattttggcagcgccattgccctggcagacctgaacaatgatgggtggcaggacctcctggtgggcgccccctactacttcgagaggaaagaggaagtagggggtgccatctatgtcttcatgaaccaggcgggaacctccttccctgctcacccctcactccttcttcatggccccagtggctctgcctttggtttatctgtggccagcattggtgacatcaaccaggatggatttcaggatattgctgtgggagctccgtttgaaggcttgggcaaagtgtacatctatcacagtagctctaaggggctccttagacagccccagcaggtaatccatggagagaagctgggactgcctgggttggccaccttcggctattccctcagtgggcagatggatgtggatgagaacttctacccagaccttctagtgggaagcctgtcagaccacattgtgctgctgcgggcccggcccgtcatcaacatcgtccacaagaccttggtgcccaggccagctgtgctggaccctgcactttgcacggccacctcttgtgtgcaagtggagctgtgctttgcttacaaccagagtgccgggaaccccaactacaggcgaaacatcaccctggcctacactctggaggctgacagggaccgccggccgccccggctccgctttgccggcagtgagtccgctgtcttccacggcttcttctccatgcccgagatgcgctgccagaagctggagctgctcctgatggacaacctccgtgacaaactccgccccatcatcatctccatgaactactctttacctttgcggatgcccgatcgcccccggctggggctgcggtccctggacgcctacccgatcctcaaccaggcacaggctctggagaaccacactgaggtccagttccagaaggagtgcgggcctgacaacaagtgtgagagcaacttgcagatgcgggcagccttcgtgtcagagcagcagcagaagctgagcaggctccagtacagcagagacgtccggaaattgctcctgagcatcaacgtgacgaacacccggacctcggagcgctccggggaggacgcccacgaggcgctgctcaccctggtggtgcctcccgccctgctgctgtcctcagtgcgcccccccggggcctgccaagctaatgagaccatcttttgcgagctggggaaccccttcaaacggaaccagaggatggagctgctcatcgcctttgaggtcatcggggtgaccctgcacacaagggaccttcaggtgcagctgcagctctccacgtcgagtcaccaggacaacctgtggcccatgatcctcactctgctggtggactatacactccagacctcgcttagcatggtaaatcaccggctacaaagcttctttggggggacagtgatgggtgagtctggcatgaaaactgtggaggatgtaggaagccccctcaagtatgaattccaggtgggcccaatgggggaggggctggtgggcctggggaccctggtcctaggtctggagtggccctacgaagtcagcaatggcaagtggctgctgtatcccacggagatcaccgtccatggcaatgggtcctggccctgccgaccacctggagaccttatcaaccctctcaacctcactctttctgaccctggggacaggccatcatccccacagcgcaggcggcgacagctggatccagggggaggccagggccccccacctgtcactctggctgctgccaaaaaagccaagtctgagactgtgctgacctgtgccacagggcgtgcccactgtgtgtggctagagtgccccatccctgatgcccccgttgtcaccaacgtgactgtgaaggcacgagtgtggaacagcaccttcatcgaggattacagagactttgaccgagtccgggtaaatggctgggctaccctattcctccgaaccagcatccccaccatcaacatggagaacaagaccacgtggttctctgtggacattgactcggagctggtggaggaggaatagggtagcccagccagttacccggactcgttcaaagtctctgtatcctcccttagccatgctg

SEQ ID NO: 328632 - DNA, 2987 bp, Homo sapiens
aagggggcgcggccgggacaagctgggggccggttgcccggggcagggacggcggcgacccggccgctggggaggcaggaagatagacccacggatcttaggaagggatccgagagcgcagctgtgaaactggctggggctgggggcacgaaaccgatcagcgctacggagcgcagcggccggcgggttccagtgtcctccggcggcgcggggagcaggtgaacaggtcctcacgcccagctccgccccctcacgcgctctcgccgggaccccgcttccgctggcagccatgggccccggccccagccgcgcgccccgcgccccacgcctgatgctctgtgcgctcgccttgatggtggcggccggcggctgcgtcgtctccgccttcaacctggatacccgattcctggtagtgaaggaggccgggaacccgggcagcctcttcggctactcggtcgccctccatcggcagacagagcggcagcagcgctacctgctcctggctggtgccccccgggagctcgctgtgcccgatggctacaccaaccggactggtgctgtgtacctgtgcccactcactgcccacaaggatgactgtgagcggatgaacatcacagtgaaaaatgaccctggccatcacattattgaggacatgtggcttggagtgactgtggccagccagggccctgcaggcagagttctggtctgtgcccaccgctacacccaggtgctgtggtcagggtcagaagaccagcggcgcatggtgggcaagtgctacgtgcgaggcaatgacctagagctggactccagtgatgactggcagacctaccacaacgagatgtgcaatagcaacacagactacctggagacgggcatgtgccagctgggcaccagcggtggcttcacccagaacactgtgtacttcggcgcccccggtgcctacaactggaaaggaaacagctacatgattcagcgcaaggagtgggacttatctgagtatagttacaaggacccagaggaccaaggaaacctctatattgggtacacgatgcaggtaggcagcttcatcctgcaccccaaaaacatcaccattgtgacaggtgccccacggcaccgacatatgggcgcggtgttcttgctgagccaggaggcaggcggagacctgcggaggaggcaggtgctggagggctcgcaggtgggcgcctattttggcagcgccattgccctggcagacctgaacaatgatgggtggcaggacctcctggtgggcgccccctactacttcgagaggaaagaggaagtagggggtgccatctatgtcttcatgaaccaggcgggaacctccttccctgctcacccctcactccttcttcatggccccagtggctctgcctttggtttatctgtggccagcattggtgacatcaaccaggatggatttcaggatattgctgtgggagctccgtttgaaggcttgggcaaagtgtacatctatcacagtagctctaaggggctccttagacagccccagcaggtaatccatggagagaagctgggactgcctgggttggccaccttcggctattccctcagtgggcagatggatgtggatgagaacttctacccagaccttctagtgggaagcctgtcagaccacattgtgctgctgcgggcccggcccgtcatcaacatcgtccacaagaccttggtgcccaggccagctgtgctggaccctgcactttgcacggccacctcttgtgtgcaagtggagctgtgctttgcttacaaccagagtgccgggaaccccaactacaggcgaaacatcaccctggcctacactctggaggctgacagggaccgccggccgccccggctccgctttgccggcagtgagtccgctgtcttccacggcttcttctccatgcccgagatgcgctgccagaagctggagctgctcctgatggacaacctccgtgacaaactccgccccatcatcatctccatgaactactctttacctttgcggatgcccgatcgcccccggctggggctgcggtccctggacgcctacccgatcctcaaccaggcacaggctctggagaaccacactgaggtccagttccagaaggagtgcgggcctgacaacaagtgtgagagcaacttgcagatgcgggcagccttcgtgtcagagcagcagcagaagctgagcaggctccagtacagcagagacgtccggaaattgctcctgagcatcaacgtgacgaacacccggacctcggagcgctccggggaggacgcccacgaggcgctgctcaccctggtggtgcctcccgccctgctgctgtcctcagtgcgcccccccggggcctgccaagctaatgagaccatcttttgcgagctggggaaccccttcaaacggaaccagaggatggagctgctcatcgcctttgaggtcatcggggtgaccctgcacacaagggaccttcaggtgcagctgcagctctccacgtcgagtcaccaggacaacctgtggcccatgatcctcactctgctggtggactatacactccagacctcgcttagcatggtaaatcaccggctacaaagcttctttggggggacagtgatgggtgagtctggcatgaaaactgtggaggatgtaggaagccccctcaagtatgaattccagatccagccagaccccacgctgaccatgcgtcaggggcctagaggtggagttcttagctatccttggctttcagagccagcctggctctgccccctcccccatgggctgtgtcctaaggcccatttgagaagctgaggctagttccagaaaacctctcctgacccctgcctgttggcaggcccactccccagccccagccccttccatggtactgtagcaggggaattccctccccctccttgtgccttctttgtatataggcttctcacggcgaccaataaacagctcccagtttgta

SEQ ID NO: 328633 - DNA, 1034 bp, Homo sapiens
aagggggcgcggccgggacaagctgggggccggttgcccggggcagggacggcggcgacccggccgctggggaggcaggaagatagacccacggatcttaggaagggatccgagagcgcagctgtgaaactggctggggctgggggcacgaaaccgatcagcgctacggagcgcagcggccggcgggttccagtgtcctccggcggcgcggggagcaggtgaacaggtcctcacgcccagctccgccccctcacgcgctctcgccgggaccccgcttccgctggcagccatgggccccggccccagccgcgcgccccgcgccccacgcctgatgctctgtgcgctcgccttgatggtggcggccggcggctgcgtcgtctccgccttcaacctggatacccgattcctggtagtgaaggaggccgggaacccgggcagcctcttcggctactcggtcgccctccatcggcagacagagcggcagcagcgctacctgctcctggctggtgccccccgggagctcgctgtgcccgatggctacaccaaccggactggtgctgtgtacctgtgcccactcactgcccacaaggatgactatgaccctggccatcacattattgaggacatgtggcttggagtgactgtggccagccagggccctgcaggcagagttctggtctgtgcccaccgctacacccaggtgctgtggtcagggtcagaagaccagcggcgcatggtgggcaagtgctacgtgcgaggcaatgacctagagctggactccagtgatgactggcagacctaccacaacgagatgtgcaatagcaacacagactacctggagacgggcatgtgccagctgggcaccagcggtggcttcacccagaacactgtgtacttcggcgcccccggtgcctacaactggaaaggtggggaccatggggccatgggggaagaaaggaagagcagagaccacccacccctagttagccacggggacagctggcctagaccatccacactagaaacaggacctc

SEQ ID NO: 328634 - DNA, 379 bp, Homo sapiens
tgagtacagtagtggtagcccatcaagtggtagaggggaagggggcttagtccctggtggaaaggtgaggccagagtgcagttgtgactaatggcatttagttaaactagcacacacggattggccggcacctgtatgccaggccctgttccaagctcccaagatgcaaagttcttgacttcaggatgctcacagtccagtgtccaggcagaactgggccatggctgctggccatctggagtctactttcttgccctacttggaatagtgggatagaacatcatggtggggggcaagagagggaatagggagatgggtccagagtagaaagagacgaagttgactgggaccttggttgaacatcttccctctatcccag

SEQ ID NO: 328635 - DNA, 155 bp, Homo sapiens
atccccaccatcaacatggagaacaagaccacgtgggtgagtgcgcatgttcactaggacagcagtctccagccagagcttgagagtacagggcatcttttaagaggacactgacgcacttcagccatatggttctcaatcttggccacacggta

SEQ ID NO: 328636 - DNA, 102 bp, Homo sapiens
ggggcggggctcttggctgagtcctgggctcctgctctcaggctccagtacagcagagacgtccggaaattgctcctgagcatcaacgtgacgaacacccgg

SEQ ID NO: 328637 - DNA, 272 bp, Homo sapiens
gttggccaccttcggctattccctcagtgggcagatggatgtggatgagaacttctacccagaccttctagtgggaagcctgtcagaccacattgtgctgctgcggtgagccaggaggccagtgaataagggtctttctcttcttcatctttgtctgcacagattcccatctgtgtccatgtttgcgctagctccttggaagcctgggccccaactctggcctggggcaggcaggaggcactgatatctgtctggctctgttgtctctgcag

SEQ ID NO: 328638 - DNA, 520 bp, Homo sapiens
tgggtcagaggtctggcaggggggtaccgcagagagaatggcctggaggagatagaaggcttgttcacacggcttctagtcgcttcttgtccagctgggaagagggtgccctagaggagagtggggctggatgggattggtagagctcagaataatgacgagctggagaaggggagttgggagggctgccctgtgggtggagggcccaagcgggacccactcctgccctctggagactttgggcactgaagtatgggtgaggtgctctgattcatgatccttccggtgcccacagatgaccctggccatcacattattgaggacatgtggcttggagtgactgtggccagccagggccctgcaggcagagttctggtaaggtgggtgctcagtgttggctcctccacctctacccggctctcccctcatctccagagctgggaggaaagaagagggcagcaggggggtccacggcgcgtgtgtgctggggcctgcacacatgtcccttcctgtggctgtg

SEQ ID NO: 328639 - DNA, 4848 bp, Homo sapiens
aagggggcgcggccgggacaagctgggggccggttgcccggggcagggacggcggcgacccggccgctggggaggcaggaagatagacccacggatcttaggaagggatccgagagcgcagctgtgaaactggctggggctgggggcacgaaaccgatcagcgctacggagcgcagcggccggcgggttccagtgtcctccggcggcgcggggagcaggtgaacaggtcctcacgcccagctccgccccctcacgcgctctcgccgggaccccgcttccgctggcagccatgggccccggccccagccgcgcgccccgcgccccacgcctgatgctctgtgcgctcgccttgatggtggcggccggcggctgcgtcgtctccgccttcaacctggatacccgattcctggtagtgaaggaggccgggaacccgggcagcctcttcggctactcggtcgccctccatcggcagacagagcggcagcagcgctacctgctcctggctggtgccccccgggagctcgctgtgcccgatggctacaccaaccggactggtgctgtgtacctgtgcccactcactgcccacaaggatgactgtgagcggatgaacatcacagtgaaaaatgaccctggccatcacattattgaggacatgtggcttggagtgactgtggccagccagggccctgcaggcagagttctggtctgtgcccaccgctacacccaggtgctgtggtcagggtcagaagaccagcggcgcatggtgggcaagtgctacgtgcgaggcaatgacctagagctggactccagtgatgactggcagacctaccacaacgagatgtgcaatagcaacacagactacctggagacgggcatgtgccagctgggcaccagcggtggcttcacccagaacactgtgtacttcggcgcccccggtgcctacaactggaaaggaaacagctacatgattcagcgcaaggagtgggacttatctgagtatagttacaaggacccagaggaccaaggaaacctctatattgggtacacgatgcaggtaggcagcttcatcctgcaccccaaaaacatcaccattgtgacaggtgccccacggcaccgacatatgggcgcggtgttcttgctgagccaggaggcaggcggagacctgcggaggaggcaggtgctggagggctcgcaggtgggcgcctattttggcagcgccattgccctggcagacctgaacaatgatgggtggcaggacctcctggtgggcgccccctactacttcgagaggaaagaggaagtagggggtgccatctatgtcttcatgaaccaggcgggaacctccttccctgctcacccctcactccttcttcatggccccagtggctctgcctttggtttatctgtggccagcattggtgacatcaaccaggatggatttcaggatattgctgtgggagctccgtttgaaggcttgggcaaagtgtacatctatcacagtagctctaaggggctccttagacagccccagcaggtaatccatggagagaagctgggactgcctgggttggccaccttcggctattccctcagtgggcagatggatgtggatgagaacttctacccagaccttctagtgggaagcctgtcagaccacattgtgctgctgcgggcccggcccgtcatcaacatcgtccacaagaccttggtgcccaggccagctgtgctggaccctgcactttgcacggccacctcttgtgtgcaagtggagctgtgctttgcttacaaccagagtgccgggaaccccaactacaggcgaaacatcaccctggcctacactctggaggctgacagggaccgccggccgccccggctccgctttgccggcagtgagtccgctgtcttccacggcttcttctccatgcccgagatgcgctgccagaagctggagctgctcctgatggacaacctccgtgacaaactccgccccatcatcatctccatgaactactctttacctttgcggatgcccgatcgcccccggctggggctgcggtccctggacgcctacccgatcctcaaccaggcacaggctctggagaaccacactgaggtccagttccagaaggagtgcgggcctgacaacaagtgtgagagcaacttgcagatgcgggcagccttcgtgtcagagcagcagcagaagctgagcaggctccagtacagcagagacgtccggaaattgctcctgagcatcaacgtgacgaacacccggacctcggagcgctccggggaggacgcccacgaggcgctgctcaccctggtggtgcctcccgccctgctgctgtcctcagtgcgcccccccggggcctgccaagctaatgagaccatcttttgcgagctggggaaccccttcaaacggaaccagaggatggagctgctcatcgcctttgaggtcatcggggtgaccctgcacacaagggaccttcaggtgcagctgcagctctccacgtcgagtcaccaggacaacctgtggcccatgatcctcactctgctggtggactatacactccagacctcgcttagcatggtaaatcaccggctacaaagcttctttggggggacagtgatgggtgagtctggcatgaaaactgtggaggatgtaggaagccccctcaagtatgaattccaggtgggcccaatgggggaggggctggtgggcctggggaccctggtcctaggtctggagtggccctacgaagtcagcaatggcaagtggctgctgtatcccacggagatcaccgtccatggcaatgggtcctggccctgccgaccacctggagaccttatcaaccctctcaacctcactctttctgaccctggggacaggccatcatccccacagcgcaggcggcgacagctggatccagggggaggccagggccccccacctgtcactctggctgctgccaaaaaagccaagtctgagactgtgctgacctgtgccacagggcgtgcccactgtgtgtggctagagtgccccatccctgatgcccccgttgtcaccaacgtgactgtgaaggcacgagtgtggaacagcaccttcatcgaggattacagagactttgaccgagtccgggtaaatggctgggctaccctattcctccgaaccagcatccccaccatcaacatggagaacaagaccacgtggttctctgtggacattgactcggagctggtggaggagctgccggccgaaatcgagctgtggctggtgctggtggccgtgggtgcagggctgctgctgctggggctgatcatcctcctgctgtggaagtgcggcttcttcaagcgagcccgcactcgcgccctgtatgaagctaagaggcagaaggcggagatgaagagccagccgtcagagacagagaggctgaccgacgactactgagggggcagccccccgcccccggcccacctggtgtgacttctttaagcggacccgctattatcagatcatgcccaagtaccacgcagtgcggatccgggaggaggagcgctacccacctccagggagcaccctgcccaccaagaagcactgggtgaccagctggcagactcgggaccaatactactgacgtcctccctgatcccaccccctcctcccccagtgtcccctttcttcctatttatcataagttatgcctctgacagtccacaggggccaccacctttggctggtagcagcaggctcaggcacatacacctcgtcaagagcatgcacatgctgtctggccctggggatcttcccacaggagggccagcgctgtggaccttacaacgccgagtgcactgcattcctgtgccctagatgcacgtggggcccactgctcgtggactgtgctggtgcatcacggatggtgcatgggctcgccgtgtctcagcctctgccagcgccaaaacaagccaaagagcctcccaccagagccgggaggaaaaggcccctgcaatgtggtgacacctccccctttcacactggatccatcttgagccacagtcactggattgactttgctgtcaaaactactgacagggagcagcccccgggccgctggctggtgggcccccaatgacacccatgccagagaggtggggatcctgcctaaggttgtctacgggggcacttggaggacctggcgtgctcagacccaacagcaaaggaactagaaagaaggacccagaacggcttgctttcctgcatctctgtgaagcctctctccttggccacagactgaactcgcagggagtgcagcaggaaggaacaaagacaggcaaacggcaacgtagcctgggctcactgtgctggggcacggcgggatcctccacagagaggaggggaccaattctggacagacagatgttgggaggatacagaggagatgccacttctcactcaccactaccagccagcctcagaaggccccagagagaccctgcaagaccacggagggagcgacacttgaatgtagaataggcagggggccctgccccaccccatccagccagaccccacgctgaccatgcgtcaggggcctagaggtggagttcttagctatccttggctttcagagccagcctggctctgccccctcccccatgggctgtgtcctaaggcccatttgagaagctgaggctagttccagaaaacctctcctgacccctgcctgttggcaggcccactccccagccccagccccttccatggtactgtagcaggggaattccctccccctccttgtgccttctttgtatataggcttctcacggcgaccaataaacagctcccagtttgta

SEQ ID NO: 328640 - DNA, 3605 bp, Homo sapiens
cctcagaaaatgcagctcaaagcgacgttgagtctgggaaactgatcattaagaagtccaaggatggttctgaggacaagttctacagccacaagaaactccttccctgctcacccctcactccttcttcatggccccagtggctctgcctttggtttatctgtggccagcattggtgacatcaaccaggatggatttcaggatattgctgtgggagctccgtttgaaggcttgggcaaagtgtacatctatcacagtagctctaaggggctccttagacagccccagcaggtaatccatggagagaagctgggactgcctgggttggccaccttcggctattccctcagtgggcagatggatgtggatgagaacttctacccagaccttctagtgggaagcctgtcagaccacattgtgctgctgcgggcccggcccgtcatcaacatcgtccacaagaccttggtgcccaggccagctgtgctggaccctgcactttgcacggccacctcttgtgtgcaagtggagctgtgctttgcttacaaccagagtgccgggaaccccaactacaggcgaaacatcaccctggcctacactctggaggctgacagggaccgccggccgccccggctccgctttgccggcagtgagtccgctgtcttccacggcttcttctccatgcccgagatgcgctgccagaagctggagctgctcctgatggacaacctccgtgacaaactccgccccatcatcatctccatgaactactctttacctttgcggatgcccgatcgcccccggctggggctgcggtccctggacgcctacccgatcctcaaccaggcacaggctctggagaaccacactgaggtccagttccagaaggagtgcgggcctgacaacaagtgtgagagcaacttgcagatgcgggcagccttcgtgtcagagcagcagcagaagctgagcaggctccagtacagcagagacgtccggaaattgctcctgagcatcaacgtgacgaacacccggacctcggagcgctccggggaggacgcccacgaggcgctgctcaccctggtggtgcctcccgccctgctgctgtcctcagtgcgcccccccggggcctgccaagctaatgagaccatcttttgcgagctggggaaccccttcaaacggaaccagaggatggagctgctcatcgcctttgaggtcatcggggtgaccctgcacacaagggaccttcaggtgcagctgcagctctccacgtcgagtcaccaggacaacctgtggcccatgatcctcactctgctggtggactatacactccagacctcgcttagcatggtaaatcaccggctacaaagcttctttggggggacagtgatgggtgagtctggcatgaaaactgtggaggatgtaggaagccccctcaagtatgaattccaggtgggcccaatgggggaggggctggtgggcctggggaccctggtcctaggtctggagtggccctacgaagtcagcaatggcaagtggctgctgtatcccacggagatcaccgtccatggcaatgggtcctggccctgccgaccacctggagaccttatcaaccctctcaacctcactctttctgaccctggggacaggccatcatccccacagcgcaggcggcgacagctggatccagggggaggccagggccccccacctgtcactctggctgctgccaaaaaagccaagtctgagactgtgctgacctgtgccacagggcgtgcccactgtgtgtggctagagtgccccatccctgatgcccccgttgtcaccaacgtgactgtgaaggcacgagtgtggaacagcaccttcatcgaggattacagagactttgaccgagtccgggtaaatggctgggctaccctattcctccgaaccagcatccccaccatcaacatggagaacaagaccacgtggttctctgtggacattgactcggagctggtggaggagctgccggccgaaatcgagctgtggctggtgctggtggccgtgggtgcagggctgctgctgctggggctgatcatcctcctgctgtggaagtgcggcttcttcaagcgagcccgcactcgcgccctgtatgaagctaagaggcagaaggcggagatgaagagccagccgtcagagacagagaggctgaccgacgactactgagggggcagccccccgcccccggcccacctggtgtgacttctttaagcggacccgctattatcagatcatgcccaagtaccacgcagtgcggatccgggaggaggagcgctacccacctccagggagcaccctgcccaccaagaagcactgggtgaccagctggcagactcgggaccaatactactgacgtcctccctgatcccaccccctcctcccccagtgtcccctttcttcctatttatcataagttatgcctctgacagtccacaggggccaccacctttggctggtagcagcaggctcaggcacatacacctcgtcaagagcatgcacatgctgtctggccctggggatcttcccacaggagggccagcgctgtggaccttacaacgccgagtgcactgcattcctgtgccctagatgcacgtggggcccactgctcgtggactgtgctggtgcatcacggatggtgcatgggctcgccgtgtctcagcctctgccagcgccaaaacaagccaaagagcctcccaccagagccgggaggaaaaggcccctgcaatgtggtgacacctccccctttcacactggatccatcttgagccacagtcactggattgactttgctgtcaaaactactgacagggagcagcccccgggccgctggctggtgggcccccaatgacacccatgccagagaggtggggatcctgcctaaggttgtctacgggggcacttggaggacctggcgtgctcagacccaacagcaaaggaactagaaagaaggacccagaacggcttgctttcctgcatctctgtgaagcctctctccttggccacagactgaactcgcagggagtgcagcaggaaggaacaaagacaggcaaacggcaacgtagcctgggctcactgtgctggggcacggcgggatcctccacagagaggaggggaccaattctggacagacagatgttgggaggatacagaggagatgccacttctcactcaccactaccagccagcctcagaaggccccagagagaccctgcaagaccacggagggagcgacacttgaatgtagaataggcagggggccctgccccaccccatccagccagaccccacgctgaccatgcgtcaggggcctagaggtggagttcttagctatccttggctttcagagccagcctggctctgccccctcccccatgggctgtgtcctaaggcccatttgagaagctgaggctagttccagaaaacctctcctgacccctgcctgttggcaggcccactccccagccccagccccttccatggtactgtagcaggggaattccctccccctccttgtgccttctttgtatataggcttctcacggcgaccaataaacagctcccagtttgta

SEQ ID NO: 328641 - DNA, 4844 bp, Homo sapiens
aagggggcgcggccgggacaagctgggggccggttgcccggggcagggacggcggcgacccggccgctggggaggcaggaagatagacccacggatcttaggaagggatccgagagcgcagctgtgaaactggctggggctgggggcacgaaaccgatcagcgctacggagcgcagcggccggcgggttccagtgtcctccggcggcgcggggagcaggtgaacaggtcctcacgcccagctccgccccctcacgcgctctcgccgggaccccgcttccgctggcagccatgggccccggccccagccgcgcgccccgcgccccacgcctgatgctctgtgcgctcgccttgatggtggcggccggcggctgcgtcgtctccgccttcaacctggatacccgattcctggtagtgaaggaggccgggaacccgggcagcctcttcggctactcggtcgccctccatcggcagacagagcggcagcagcgctacctgctcctggctggtgccccccgggagctcgctgtgcccgatggctacaccaaccggactggtgctgtgtacctgtgcccactcactgcccacaaggatgactgtgagcggatgaacatcacagtgaaaaatgaccctggccatcacattattgaggacatgtggcttggagtgactgtggccagccagggccctgcaggcagagttctggtctgtgcccaccgctacacccaggtgctgtggtcagggtcagaagaccagcggcgcatggtgggcaagtgctacgtgcgaggcaatgacctagagctggactccagtgatgactggcagacctaccacaacgagatgtgcaatagcaacacagactacctggagacgggcatgtgccagctgggcaccagcggtggcttcacccagaacactgtgtacttcggcgcccccggtgcctacaactggaaaggaaacagctacatgattcagcgcaaggagtgggacttatctgagtatagttacaaggacccagaggaccaaggaaacctctatattgggtacacgatgcaggtaggcagcttcatcctgcaccccaaaaacatcaccattgtgacaggtgccccacggcaccgacatatgggcgcggtgttcttgctgagccaggaggcaggcggagacctgcggaggaggcaggtgctggagggctcgcaggtgggcgcctattttggcagcgccattgccctggcagacctgaacaatgatgggtggcaggacctcctggtgggcgccccctactacttcgagaggaaagaggaagtagggggtgccatctatgtcttcatgaaccaggcgggaacctccttccctgctcacccctcactccttcttcatggccccagtggctctgcctttggtttatctgtggccagcattggtgacatcaaccaggatggatttcaggatattgctgtgggagctccgtttgaaggcttgggcaaagtgtacatctatcacagtagctctaaggggctccttagacagccccagcaggtaatccatggagagaagctgggactgcctgggttggccaccttcggctattccctcagtgggcagatggatgtggatgagaacttctacccagaccttctagtgggaagcctgtcagaccacattgtgctgctgcgggcccggcccgtcatcaacatcgtccacaagaccttggtgcccaggccagctgtgctggaccctgcactttgcacggccacctcttgtgggcaagtgactgtgctttggcttacacccgagtgccgggaccccatctacggccgaacatcaccctggcctacactctggaggctgacagggaccgccggccgccccggctccgctttgccggcagtgagtccgctgtcttccacggcttcttctccatgcccgagatgcgctgccagaagctggagctgctcctgatggacaacctccgtgacaaactccgccccatcatcatctccatgaactactctttacctttgcggatgcccgatcgcccccggctggggctgcggtccctggacgcctacccgatcctcaaccaggcacaggctctggagaaccacactgaggtccagttccagaaggagtgcgggcctgacaacaagtgtgagagcaacttgcagatgcgggcagccttcgtgtcagagcagcagcagaagctgagcaggctccagtacagcagagacgtccggaaattgctcctgagcatcaacgtgacgaacacccggacctcggagcgctccggggaggacgcccacgaggcgctgctcaccctggtggtgcctcccgccctgctgctgtcctcagtgcgcccccccggggcctgccaagctaatgagaccatcttttgcgagctggggaaccccttcaaacggaaccagaggatggagctgctcatcgcctttgaggtcatcggggtgaccctgcacacaagggaccttcaggtgcagctgcagctctccacgtcgagtcaccaggacaacctgtggcccatgatcctcactctgctggtggactatacactccagacctcgcttagcatggtaaatcaccggctacaaagcttctttggggggacagtgatgggtgagtctggcatgaaaactgtggaggatgtaggaagccccctcaagtatgaattccaggtgggcccaatgggggaggggctggtgggcctggggaccctggtcctaggtctggagtggccctacgaagtcagcaatggcaagtggctgctgtatcccacggagatcaccgtccatggcaatgggtcctggccctgccgaccacctggagaccttatcaaccctctcaacctcactctttctgaccctggggacaggccatcatccccacagcgcaggcggcgacagctggatccagggggaggccagggccccccacctgtcactctggctgctgccaaaaaagccaagtctgagactgtgctgacctgtgccacagggcgtgcccactgtgtgtggctagagtgccccatccctgatgcccccgttgtcaccaacgtgactgtgaaggcacgagtgtggaacagcaccttcatcgaggattacagagactttgaccgagtccgggtaaatggctgggctaccctattcctccgaaccagcatccccaccatcaacatggagaacaagaccacgtggttctctgtggacattgactcggagctggtggaggagctgccggccgaaatcgagctgtggctggtgctggtggccgtgggtgcagggctgctgctgctggggctgatcatcctcctgctgtggaagtgcggcttcttcaagcgagcccgcactcgcgccctgtatgaagctaagaggcagaaggcggagatgaagagccagccgtcagagacagagaggctgaccgacgactactgagggggcagccccccgcccccggcccacctggtgtgacttctttaagcggacccgctattatcagatcatgcccaagtaccacgcagtgcggatccgggaggaggagcgctacccacctccagggagcaccctgcccaccaagaagcactgggtgaccagctggcagactcgggaccaatactactgacgtcctccctgatcccaccccctcctcccccagtgtcccctttcttcctatttatcataagttatgcctctgacagtccacaggggccaccacctttggctggtagcagcaggctcaggcacatacacctcgtcaagagcatgcacatgctgtctggccctggggatcttcccacaggagggccagcgctgtggaccttacaacgccgagtgcactgcattcctgtgccctagatgcacgtggggcccactgctcgtggactgtgctggtgcatcacggatggtgcatgggctcgccgtgtctcagcctctgccagcgccaaaacaagccaaagagcctcccaccagagccgggaggaaaaggcccctgcaatgtggtgacacctccccctttcacactggatccatcttgagccacagtcactggattgactttgctgtcaaaactactgacagggagcagcccccgggccgctggctggtgggcccccaatgacacccatgccagagaggtggggatcctgcctaaggttgtctacgggggcacttggaggacctggcgtgctcagacccaacagcaaaggaactagaaagaaggacccagaacggcttgctttcctgcatctctgtgaagcctctctccttggccacagactgaactcgcagggagtgcagcaggaaggaacaaagacaggcaaacggcaacgtagcctgggctcactgtgctggggcacggcgggatcctccacagagaggaggggaccaattctggacagacagatgttgggaggatacagaggagatgccacttctcactcaccactaccagccagcctcagaaggccccagagagaccctgcaagaccacggagggagcgacacttgaatgtagaataggcagggggccctgccccaccccatccagccagaccccacgctgaccatgcgtcaggggcctagaggtggagttcttagctatccttggctttcagagccagcctggctctgccccctcccccatgggctgtgtcctaaggcccatttgagaagctgaggctagttccagaaaacctctcctgacccctgcctgttggcaggcccactccccagccccagccccttccatggtactgtagcaggggaattccctccccctccttgtgccttctttgtatataggcttctcacggcgaccaataaacagctcccagtttgta

SEQ ID NO: 328642 - DNA, 4890 bp, Homo sapiens
  misc_feature (4850)..(4850): n is a, c, g, or t
aagggggcgcggccgggacaagctgggggccggttgcccggggcagggacggcggcgacccggccgctggggaggcaggaagatagacccacggatcttaggaagggatccgagagcgcagctgtgaaactggctggggctgggggcacgaaaccgatcagcgctacggagcgcagcggccggcgggttccagtgtcctccggcggcgcggggagcaggtgaacaggtcctcacgcccagctccgccccctcacgcgctctcgccgggaccccgcttccgctggcagccatgggccccggccccagccgcgcgccccgcgccccacgcctgatgctctgtgcgctcgccttgatggtggcggccggcggctgcgtcgtctccgccttcaacctggatacccgattcctggtagtgaaggaggccgggaacccgggcagcctcttcggctactcggtcgccctccatcggcagacagagcggcagcagcgctacctgctcctggctggtgccccccgggagctcgctgtgcccgatggctacaccaaccggactggtgctgtgtacctgtgcccactcactgcccacaaggatgactgtgagcggatgaacatcacagtgaaaaatgaccctggccatcacattattgaggacatgtggcttggagtgactgtggccagccagggccctgcaggcagagttctggtctgtgcccaccgctacacccaggtgctgtggtcagggtcagaagaccagcggcgcatggtgggcaagtgctacgtgcgaggcaatgacctagagctggactccagtgatgactggcagacctaccacaacgagatgtgcaatagcaacacagactacctggagacgggcatgtgccagctgggcaccagcggtggcttcacccagaacactgtgtacttcggcgcccccggtgcctacaactggaaaggaaacagctacatgattcagcgcaaggagtgggacttatctgagtatagttacaaggacccagaggaccaaggaaacctctatattgggtacacgatgcaggtaggcagcttcatcctgcaccccaaaaacatcaccattgtgacaggtgccccacggcaccgacatatgggcgcggtgttcttgctgagccaggaggcaggcggagacctgcggaggaggcaggtgctggagggctcgcaggtgggcgcctattttggcagcgccattgccctggcagacctgaacaatgatgggtggcaggacctcctggtgggcgccccctactacttcgagaggaaagaggaagtagggggtgccatctatgtcttcatgaaccaggcgggaacctccttccctgctcacccctcactccttcttcatggccccagtggctctgcctttggtttatctgtggccagcattggtgacatcaaccaggatggatttcaggatattgctgtgggagctccgtttgaaggcttgggcaaagtgtacatctatcacagtagctctaaggggctccttagacagccccagcaggtaatccatggagagaagctgggactgcctgggttggccaccttcggctattccctcagtgggcagatggatgtggatgagaacttctacccagaccttctagtgggaagcctgtcagaccacattgtgctgctgcgggcccggcccgtcatcaacatcgtccacaagaccttggtgcccaggccagctgtgctggaccctgcactttgcacggccacctcttgtgtgcaagtggagctgtgctttgcttacaaccagagtgccgggaaccccaactacaggcgaaacatcaccctggcctacactctggaggctgacagggaccgccggccgccccggctccgctttgccggcagtgagtccgctgtcttccacggcttcttctccatgcccgagatgcgctgccagaagctggagctgctcctgatggacaacctccgtgacaaactccgccccatcatcatctccatgaactactctttacctttgcggatgcccgatcgcccccggctggggctgcggtccctggacgcctacccgatcctcaaccaggcacaggctctggagaaccacactgaggtccagttccagaaggagtgcgggcctgacaacaagtgtgagagcaacttgcagatgcgggcagccttcgtgtcagagcagcagcagaagctgagcaggctccagtacagcagagacgtccggaaattgctcctgagcatcaacgtgacgaacacccggacctcggagcgctccggggaggacgcccacgaggcgctgctcaccctggtggtgcctcccgccctgctgctgtcctcagtgcgcccccccggggcctgccaagctaatgagaccatcttttgcgagctggggaaccccttcaaacggaaccagaggatggagctgctcatcgcctttgaggtcatcggggtgaccctgcacacaagggaccttcaggtgcagctgcagctctccacgtcgagtcaccaggacaacctgtggcccatgatcctcactctgctggtggactatacactccagacctcgcttagcatggtaaatcaccggctacaaagcttctttggggggacagtgatgggtgagtctggcatgaaaactgtggaggatgtaggaagccccctcaagtatgaattccaggtgggcccaatgggggaggggctggtgggcctggggaccctggtcctaggtctggagtggccctacgaagtcagcaatggcaagtggctgctgtatcccacggagatcaccgtccatggcaatgggtcctggccctgccgaccacctggagaccttatcaaccctctcaacctcactctttctgaccctggggacaggccatcatccccacagcgcaggcggcgacagctggatccagggggaggccagggccccccacctgtcactctggctgctgccaaaaaagccaagtctgagactgtgctgacctgtgccacagggcgtgcccactgtgtgtggctagagtgccccatccctgatgcccccgttgtcaccaacgtgactgtgaaggcacgagtgtggaacagcaccttcatcgaggattacagagactttgaccgagtccgggtaaatggctgggctaccctattcctccgaaccagcatccccaccatcaacatggagaacaagaccacgtggttctctgtggacattgactcggagctggtggaggagctgccggccgaaatcgagctgtggctggtgctggtggccgtgggtgcagggctgctgctgctggggctgatcatcctcctgctgtggaagtgcggcttcttcaagcgagcccgcactcgcgccctgtatgaagctaagaggcagaaggcggagatgaagagccagccgtcagagacagagaggctgaccgacgactactgagggggcagccccccgcccccggcccacctggtgtgacttctttaagcggacccgctattatcagatcatgcccaagtaccacgcagtgcggatccgggaggaggagcgctacccacctccagggagcaccctgcccaccaagaagcactgggtgaccagctggcagactcgggaccaatactactgacgtcctccctgatcccaccccctcctcccccagtgtcccctttcttcctatttatcataagttatgcctctgacagtccacaggggccaccacctttggctggtagcagcaggctcaggcacatacacctcgtcaagagcatgcacatgctgtctggccctggggatcttcccacaggagggccagcgctgtggaccttacaacgccgagtgcactgcattcctgtgccctagatgcacgtggggcccactgctcgtggactgtgctggtgcatcacggatggtgcatgggctcgccgtgtctcagcctctgccagcgccaaaacaagccaaagagcctcccaccagagccgggaggaaaaggcccctgcaatgtggtgacacctccccctttcacactggatccatcttgagccacagtcactggattgactttgctgtcaaaactactgacagggagcagcccccgggccgctggctggtgggcccccaatgacacccatgccagagaggtggggatcctgcctaaggttgtctacgggggcacttggaggacctggcgtgctcagacccaacagcaaaggaactagaaagaaggacccagaacggcttgctttcctgcatctctgtgaagcctctctccttggccacagactgaactcgcagggagtgcagcaggaaggaacaaagacaggcaaacggcaacgtagcctgggctcactgtgctggggcacggcgggatcctccacagagaggaggggaccaattctggacagacagatgttgggaggatacagaggagatgccacttctcactcaccactaccagccagcctcagaaggccccagagagaccctgcaagaccacggagggagcgacacttgaatgtagaataggcagggggccctgccccaccccatccagccagaccccacgctgaccatgcgtcaggggcctagaggtggagttcttagctatccttggctttcagagccagcctggctctgccccctcccccatgggctgtgtcctaaggcccatttgagaagctgaggctagttccagaaaacctctcctgacccctgcctgttggcaggcccactccccagccccagccccttccatggtactgtagcaggggaattccctccccctccttgtgccttctttgtatataggcttctcacggcgaccaataaacagctcccagtttgtaanaacaacacaaacggaggggcgctctatgatataccttcgg

SEQ ID NO: 328643 - DNA, 4813 bp, Homo sapiens
aagggggcgcggccgggacaagctgggggccggttgcccggggcagggacggcggcgacccggccgctggggaggcaggaagatagacccacggatcttaggaagggatccgagagcgcagctgtgaaactggctggggctgggggcacgaaaccgatcagcgctacggagcgcagcggccggcgggttccagtgtcctccggcggcgcggggagcaggtgaacaggtcctcacgcccagctccgccccctcacgcgctctcgccgggaccccgcttccgctggcagccatgggccccggccccagccgcgcgccccgcgccccacgcctgatgctctgtgcgctcgccttgatggtggcggccggcggctgcgtcgtctccgccttcaacctggatacccgattcctggtagtgaaggaggccgggaacccgggcagcctcttcggctactcggtcgccctccatcggcagacagagcggcagcagcgctacctgctcctggctggtgccccccgggagctcgctgtgcccgatggctacaccaaccggactggtgctgtgtacctgtgcccactcactgcccacaaggatgactgtgagcggatgaacatcacagtgaaaaatgaccctggccatcacattattgaggacatgtggcttggagtgactgtggccagccagggccctgcaggcagagttctggtctgtgcccaccgctacacccaggtgctgtggtcagggtcagaagaccagcggcgcatggtgggcaagtgctacgtgcgaggcaatgacctagagctggactccagtgatgactggcagacctaccacaacgagatgtgcaatagcaacacagactacctggagacgggcatgtgccagctgggcaccagcggtggcttcacccagaacactgtgtacttcggcgcccccggtgcctacaactggaaaggaaacagctacatgattcagcgcaaggagtgggacttatctgagtatagttacaaggacccagaggaccaaggaaacctctatattgggtacacgatgcaggtaggcagcttcatcctgcaccccaaaaacatcaccattgtgacaggtgccccacggcaccgacatatgggcgcggtgttcttgctgagccaggaggcaggcggagacctgcggaggaggcaggtgctggagggctcgcaggtgggcgcctattttggcagcgccattgccctggcagacctgaacaatgatgggtggcaggacctcctggtgggcgccccctactacttcgagaggaaagaggaagtagggggtgccatctatgtcttcatgaaccaggcgggaacctccttccctgctcacccctcactccttcttcatggccccagtggctctgcctttggtttatctgtggccagcattggtgacatcaaccaggatggatttcaggatattgctgtgggagctccgtttgaaggcttgggcaaagtgtacatctatcacagtagctctaaggggctccttagacagccccagcaggtaatccatggagagaagctgggactgcctgggttggccaccttcggctattccctcagtgggcagatggatgtggatgagaacttctacccagaccttctagtgggaagcctgtcagaccacattgtgctgctgcgggcccggcccgtcatcaacatcgtccacaagaccttggtgcccaggccagctgtgctggaccctgcactttgcacggccacctcttgtgtgcaagtggagctgtgctttgcttacaaccagagtgccgggaaccccaactacaggcgaaacatcaccctggcctacactctggaggctgacagggaccgccggccgccccggctccgctttgccggcagtgagtccgctgtcttccacggcttcttctccatgcccgagatgcgctgccagaagctggagctgctcctgatggacaacctccgtgacaaactccgccccatcatcatctccatgaactactctttacctttgcggatgcccgatcgcccccggctggggctgcggtccctggacgcctacccgatcctcaaccaggcacaggctctggagaaccacactgaggtccagttccagaaggagtgcgggcctgacaacaagtgtgagagcaacttgcagatgcgggcagccttcgtgtcagagcagcagcagaagctgagcaggctccagtacagcagagacgtccggaaattgctcctgagcatcaacgtgacgaacacccggacctcggagcgctccggggaggacgcccacgaggcgctgctcaccctggtggtgcctcccgccctgctgctgtcctcagtgcgcccccccggggcctgccaagctaatgagaccatcttttgcgagctggggaaccccttcaaacggaaccagaggatggagctgctcatcgcctttgaggtcatcggggtgaccctgcacacaagggaccttcaggtgcagctgcagctctccacgtcgagtcaccaggacaacctgtggcccatgatcctcactctgctggtggactatacactccagacctcgcttagcatggtaaatcaccggctacaaagcttctttggggggacagtgatgggtgagtctggcatgaaaactgtggaggatgtaggaagccccctcaagtatgaattccaggtgggcccaatgggggaggggctggtgggcctggggaccctggtcctaggtctggagtggccctacgaagtcagcaatggcaagtggctgctgtatcccacggagatcaccgtccatggcaatgggtcctggccctgccgaccacctggagaccttatcaaccctctcaacctcactctttctgaccctggggacaggccatcatccccacagcggccccccacctgtcactctggctgctgccaaaaaagccaagtctgagactgtgctgacctgtgccacagggcgtgcccactgtgtgtggctagagtgccccatccctgatgcccccgttgtcaccaacgtgactgtgaaggcacgagtgtggaacagcaccttcatcgaggattacagagactttgaccgagtccgggtaaatggctgggctaccctattcctccgaaccagcatccccaccatcaacatggagaacaagaccacgtggttctctgtggacattgactcggagctggtggaggagctgccggccgaaatcgagctgtggctggtgctggtggccgtgggtgcagggctgctgctgctggggctgatcatcctcctgctgtggaagtgcggcttcttcaagcgagcccgcactcgcgccctgtatgaagctaagaggcagaaggcggagatgaagagccagccgtcagagacagagaggctgaccgacgactactgagggggcagccccccgcccccggcccacctggtgtgacttctttaagcggacccgctattatcagatcatgcccaagtaccacgcagtgcggatccgggaggaggagcgctacccacctccagggagcaccctgcccaccaagaagcactgggtgaccagctggcagactcgggaccaatactactgacgtcctccctgatcccaccccctcctcccccagtgtcccctttcttcctatttatcataagttatgcctctgacagtccacaggggccaccacctttggctggtagcagcaggctcaggcacatacacctcgtcaagagcatgcacatgctgtctggccctggggatcttcccacaggagggccagcgctgtggaccttacaacgccgagtgcactgcattcctgtgccctagatgcacgtggggcccactgctcgtggactgtgctggtgcatcacggatggtgcatgggctcgccgtgtctcagcctctgccagcgccaaaacaagccaaagagcctcccaccagagccgggaggaaaaggcccctgcaatgtggtgacacctccccctttcacactggatccatcttgagccacagtcactggattgactttgctgtcaaaactactgacagggagcagcccccgggccgctggctggtgggcccccaatgacacccatgccagagaggtggggatcctgcctaaggttgtctacgggggcacttggaggacctggcgtgctcagacccaacagcaaaggaactagaaagaaggacccagaacggcttgctttcctgcatctctgtgaagcctctctccttggccacagactgaactcgcagggagtgcagcaggaaggaacaaagacaggcaaacggcaacgtagcctgggctcactgtgctggggcacggcgggatcctccacagagaggaggggaccaattctggacagacagatgttgggaggatacagaggagatgccacttctcactcaccactaccagccagcctcagaaggccccagagagaccctgcaagaccacggagggagcgacacttgaatgtagaataggcagggggccctgccccaccccatccagccagaccccacgctgaccatgcgtcaggggcctagaggtggagttcttagctatccttggctttcagagccagcctggctctgccccctcccccatgggctgtgtcctaaggcccatttgagaagctgaggctagttccagaaaacctctcctgacccctgcctgttggcaggcccactccccagccccagccccttccatggtactgtagcaggggaattccctccccctccttgtgccttctttgtatataggcttctcacggcgaccaataaacagctcccagtttgta

SEQ ID NO: 328644 - DNA, 2290 bp, Homo sapiens
gtgactccagcatccttcttacccctagggtaaatcaccggctacaaagcttctttggggggacagtgatgggtgagtctggcatgaaaactgtggaggatgtaggaagccccctcaagtatgaattccaggtgggcccaatgggggaggggctggtgggcctggggaccctggtcctaggtctggagtggccctacgaagtcagcaatggcaagtggctgctgtatcccacggagatcaccgtccatggcaatgggtcctggccctgccgaccacctggagaccttatcaaccctctcaacctcactctttctgaccctggggacaggccatcatccccacagcgcaggcggcgacagctggatccagggggaggccagggccccccacctgtcactctggctgctgccaaaaaagccaagtctgagactgtgctgacctgtgccacagggcgtgcccactgtgtgtggctagagtgccccatccctgatgcccccgttgtcaccaacgtgactgtgaaggcacgagtgtggaacagcaccttcatcgaggattacagagactttgaccgagtccgggtaaatggctgggctaccctattcctccgaaccagcatccccaccatcaacatggagaacaagaccacgtggttctctgtggacattgactcggagctggtggaggagctgccggccgaaatcgagctgtggctggtgctggtggccgtgggtgcagggctgctgctgctggggctgatcatcctcctgctgtggaagtgcggcttcttcaagcgagcccgcactcgcgccctgtatgaagctaagaggcagaaggcggagatgaagagccagccgtcagagacagagaggctgaccgacgactactgagggggcagccccccgcccccggcccacctggtgtgacttctttaagcggacccgctattatcagatcatgcccaagtaccacgcagtgcggatccgggaggaggagcgctacccacctccagggagcaccctgcccaccaagaagcactgggtgaccagctggcagactcgggaccaatactactgacgtcctccctgatcccaccccctcctcccccagtgtcccctttcttcctatttatcataagttatgcctctgacagtccacaggggccaccacctttggctggtagcagcaggctcaggcacatacacctcgtcaagagcatgcacatgctgtctggccctggggatcttcccacaggagggccagcgctgtggaccttacaacgccgagtgcactgcattcctgtgccctagatgcacgtggggcccactgctcgtggactgtgctggtgcatcacggatggtgcatgggctcgccgtgtctcagcctctgccagcgccaaaacaagccaaagagcctcccaccagagccgggaggaaaaggcccctgcaatgtggtgacacctccccctttcacactggatccatcttgagccacagtcactggattgactttgctgtcaaaactactgacagggagcagcccccgggccgctggctggtgggcccccaatgacacccatgccagagaggtggggatcctgcctaaggttgtctacgggggcacttggaggacctggcgtgctcagacccaacagcaaaggaactagaaagaaggacccagaacggcttgctttcctgcatctctgtgaagcctctctccttggccacagactgaactcgcagggagtgcagcaggaaggaacaaagacaggcaaacggcaacgtagcctgggctcactgtgctggggcacggcgggatcctccacagagaggaggggaccaattctggacagacagatgttgggaggatacagaggagatgccacttctcactcaccactaccagccagcctcagaaggccccagagagaccctgcaagaccacggagggagcgacacttgaatgtagaataggcagggggccctgccccaccccatccagccagaccccacgctgaccatgcgtcaggggcctagaggtggagttcttagctatccttggctttcagagccagcctggctctgccccctcccccatgggctgtgtcctaaggcccatttgagaagctgaggctagttccagaaaacctctcctgacccctgcctgttggcaggcccactccccagccccagccccttccatggtactgtagcaggggaattccctccccctccttgtgccttctttgtatataggcttctcacggcgaccaataaacagctcccagtttgta

SEQ ID NO: 328645 - DNA, 4945 bp, Homo sapiens
aagggggcgcggccgggacaagctgggggccggttgcccggggcagggacggcggcgacccggccgctggggaggcaggaagatagacccacggatcttaggaagggatccgagagcgcagctgtgaaactggctggggctgggggcacgaaaccgatcagcgctacggagcgcagcggccggcgggttccagtgtcctccggcggcgcggggagcaggtgaacaggtcctcacgcccagctccgccccctcacgcgctctcgccgggaccccgcttccgctggcagccatgggccccggccccagccgcgcgccccgcgccccacgcctgatgctctgtgcgctcgccttgatggtggcggccggcggctgcgtcgtctccgccttcaacctggatacccgattcctggtagtgaaggaggccgggaacccgggcagcctcttcggctactcggtcgccctccatcggcagacagagcggcagcagcgctacctgctcctggctggtgccccccgggagctcgctgtgcccgatggctacaccaaccggactggtgctgtgtacctgtgcccactcactgcccacaaggatgactgtgagcggatgaacatcacagtgaaaaatgaccctggccatcacattattgaggacatgtggcttggagtgactgtggccagccagggccctgcaggcagagttctggtctgtgcccaccgctacacccaggtgctgtggtcagggtcagaagaccagcggcgcatggtgggcaagtgctacgtgcgaggcaatgacctagagctggactccagtgatgactggcagacctaccacaacgagatgtgcaatagcaacacagactacctggagacgggcatgtgccagctgggcaccagcggtggcttcacccagaacactgtgtacttcggcgcccccggtgcctacaactggaaaggaaacagctacatgattcagcgcaaggagtgggacttatctgagtatagttacaaggacccagaggaccaaggaaacctctatattgggtacacgatgcaggtaggcagcttcatcctgcaccccaaaaacatcaccattgtgacaggtgccccacggcaccgacatatgggcgcggtgttcttgctgagccaggaggcaggcggagacctgcggaggaggcaggtgctggagggctcgcaggtgggcgcctattttggcagcgccattgccctggcagacctgaacaatgatgggtggcaggacctcctggtgggcgccccctactacttcgagaggaaagaggaagtagggggtgccatctatgtcttcatgaaccaggcgggaacctccttccctgctcacccctcactccttcttcatggccccagtggctctgcctttggtttatctgtggccagcattggtgacatcaaccaggatggatttcaggatattgctgtgggagctccgtttgaaggcttgggcaaagtgtacatctatcacagtagctctaaggggctccttagacagccccagcaggtaatccatggagagaagctgggactgcctgggttggccaccttcggctattccctcagtgggcagatggatgtggatgagaacttctacccagaccttctagtgggaagcctgtcagaccacattgtgctgctgcgggcccggcccgtcatcaacatcgtccacaagaccttggtgcccaggccagctgtgctggaccctgcactttgcacggccacctcttgtgtgcaagtggagctgtgctttgcttacaaccagagtgccgggaaccccaactacaggcgaaacatcaccctggcctacactctggaggctgacagggaccgccggccgccccggctccgctttgccggcagtgagtccgctgtcttccacggcttcttctccatgcccgagatgcgctgccagaagctggagctgctcctgatggacaacctccgtgacaaactccgccccatcatcatctccatgaactactctttacctttgcggatgcccgatcgcccccggctggggctgcggtccctggacgcctacccgatcctcaaccaggcacaggctctggagaaccacactgaggtccagttccagaaggagtgcgggcctgacaacaagtgtgagagcaacttgcagatgcgggcagccttcgtgtcagagcagcagcagaagctgagcaggctccagtacagcagagacgtccggaaattgctcctgagcatcaacgtgacgaacacccggacctcggagcgctccggggaggacgcccacgaggcgctgctcaccctggtggtgcctcccgccctgctgctgtcctcagtgcgcccccccggggcctgccaagctaatgagaccatcttttgcgagctggggaaccccttcaaacggaaccagaggatggagctgctcatcgcctttgaggtcatcggggtgaccctgcacacaagggaccttcaggtgcagctgcagctctccacgtcgagtcaccaggacaacctgtggcccatgatcctcactctgctggtggactatacactccagacctcgcttagcatggtaaatcaccggctacaaagcttctttggggggacagtgatgggtgagtctggcatgaaaactgtggaggatgtaggaagccccctcaagtatgaattccaggtgggcccaatgggggaggggctggtgggcctggggaccctggtcctaggtctggagtggccctacgaagtcagcaatggcaagtggctgctgtatcccacggagatcaccgtccatggcaatgggtcctggccctgccgaccacctggagaccttatcaaccctctcaacctcactctttctgaccctggggacaggccatcatccccacagcgcaggcggcgacagctggatccagggggaggccagggccccccacctgtcactctggctgctgccaaaaaagccaagtctgagactgtgctgacctgtgccacagggcgtgcccactgtgtgtggctagagtgccccatccctgatgcccccgttgtcaccaacgtgactgtgaaggcacgagtgtggaacagcaccttcatcgagcatccagcacaggacctgacgcagaaatgaatgaacaaataaatgaatgatgcgcatttgtgtgtggaggggaggcctggctgacagatcctttggggattacagagactttgaccgagtccgggtaaatggctgggctaccctattcctccgaaccagcatccccaccatcaacatggagaacaagaccacgtggttctctgtggacattgactcggagctggtggaggagctgccggccgaaatcgagctgtggctggtgctggtggccgtgggtgcagggctgctgctgctggggctgatcatcctcctgctgtggaagtgcggcttcttcaagcgagcccgcactcgcgccctgtatgaagctaagaggcagaaggcggagatgaagagccagccgtcagagacagagaggctgaccgacgactactgagggggcagccccccgcccccggcccacctggtgtgacttctttaagcggacccgctattatcagatcatgcccaagtaccacgcagtgcggatccgggaggaggagcgctacccacctccagggagcaccctgcccaccaagaagcactgggtgaccagctggcagactcgggaccaatactactgacgtcctccctgatcccaccccctcctcccccagtgtcccctttcttcctatttatcataagttatgcctctgacagtccacaggggccaccacctttggctggtagcagcaggctcaggcacatacacctcgtcaagagcatgcacatgctgtctggccctggggatcttcccacaggagggccagcgctgtggaccttacaacgccgagtgcactgcattcctgtgccctagatgcacgtggggcccactgctcgtggactgtgctggtgcatcacggatggtgcatgggctcgccgtgtctcagcctctgccagcgccaaaacaagccaaagagcctcccaccagagccgggaggaaaaggcccctgcaatgtggtgacacctccccctttcacactggatccatcttgagccacagtcactggattgactttgctgtcaaaactactgacagggagcagcccccgggccgctggctggtgggcccccaatgacacccatgccagagaggtggggatcctgcctaaggttgtctacgggggcacttggaggacctggcgtgctcagacccaacagcaaaggaactagaaagaaggacccagaacggcttgctttcctgcatctctgtgaagcctctctccttggccacagactgaactcgcagggagtgcagcaggaaggaacaaagacaggcaaacggcaacgtagcctgggctcactgtgctggggcacggcgggatcctccacagagaggaggggaccaattctggacagacagatgttgggaggatacagaggagatgccacttctcactcaccactaccagccagcctcagaaggccccagagagaccctgcaagaccacggagggagcgacacttgaatgtagaataggcagggggccctgccccaccccatccagccagaccccacgctgaccatgcgtcaggggcctagaggtggagttcttagctatccttggctttcagagccagcctggctctgccccctcccccatgggctgtgtcctaaggcccatttgagaagctgaggctagttccagaaaacctctcctgacccctgcctgttggcaggcccactccccagccccagccccttccatggtactgtagcaggggaattccctccccctccttgtgccttctttgtatataggcttctcacggcgaccaataaacagctcccagtttgta

SEQ ID NO: 328646 - DNA, 4748 bp, Homo sapiens
aagggggcgcggccgggacaagctgggggccggttgcccggggcagggacggcggcgacccggccgctggggaggcaggaagatagacccacggatcttaggaagggatccgagagcgcagctgtgaaactggctggggctgggggcacgaaaccgatcagcgctacggagcgcagcggccggcgggttccagtgtcctccggcggcgcggggagcaggtgaacaggtcctcacgcccagctccgccccctcacgcgctctcgccgggaccccgcttccgctggcagccatgggccccggccccagccgcgcgccccgcgccccacgcctgatgctctgtgcgctcgccttgatggtggcggccggcggctgcgtcgtctccgccttcaacctggatacccgattcctggtagtgaaggaggccgggaacccgggcagcctcttcggctactcggtcgccctccatcggcagacagagcggcagcagcgctacctgctcctggctggtgccccccgggagctcgctgtgcccgatggctacaccaaccggactggtgctgtgtacctgtgcccactcactgcccacaaggatgactgtgagcggatgaacatcacagtgaaaaatgaccctggccatcacattattgaggacatgtggcttggagtgactgtggccagccagggccctgcaggcagagttctggtctgtgcccaccgctacacccaggtgctgtggtcagggtcagaagaccagcggcgcatggtgggcaagtgctacgtgcgaggcaatgacctagagctggactccagtgatgactggcagacctaccacaacgagatgtgcaatagcaacacagactacctggagacgggcatgtgccagctgggcaccagcggtggcttcacccagaacactgtgtacttcggcgcccccggtgcctacaactggaaaggaaacagctacatgattcagcgcaaggagtgggacttatctgagtatagttacaaggacccagaggaccaaggaaacctctatattgggtacacgatgcaggtaggcagcttcatcctgcaccccaaaaacatcaccattgtgacaggtgccccacggcaccgacatatgggcgcggtgttcttgctgagccaggaggcaggcggagacctgcggaggaggcaggtgctggagggctcgcaggtgggcgcctattttggcagcgccattgccctggcagacctgaacaatgatgggtggcaggacctcctggtgggcgccccctactacttcgagaggaaagaggaagtagggggtgccatctatgtcttcatgaaccaggcgggaacctccttccctgctcacccctcactccttcttcatggccccagtggctctgcctttggtttatctgtggccagcattggtgacatcaaccaggatggatttcaggatattgctgtgggagctccgtttgaaggcttgggcaaagtgtacatctatcacagtagctctaaggggctccttagacagccccagcaggtaatccatggagagaagctgggactgcctgggttggccaccttcggctattccctcagtgggcagatggatgtggatgagaacttctacccagaccttctagtgggaagcctgtcagaccacattgtgctgctgcgggcccggcccgtcatcaacatcgtccacaagaccttggtgcccaggccagctgtgctggaccctgcactttgcacggccacctcttgtgtgcaagtggagctgtgctttgcttacaaccagagtgccgggaaccccaactacaggcgaaacatcaccctggcctacactctggaggctgacagggaccgccggccgccccggctccgctttgccggcagtgagtccgctgtcttccacggcttcttctccatgcccgagatgcgctgccagaagctggagctgctcctgatggacaacctccgtgacaaactccgccccatcatcatctccatgaactactctttacctttgcggatgcccgatcgcccccggctggggctgcggtccctggacgcctacccgatcctcaaccaggcacaggctctggagaaccacactgaggtccagttccagaaggagtgcgggcctgacaacaagtgtgagagcaacttgcagatgcgggcagccttcgtgtcagagcagcagcagaagctgagcaggctccagtacagcagagacgtccggaaattgctcctgagcatcaacgtgacgaacacccggacctcggagcgctccggggaggacgcccacgaggcgctgctcaccctggtggtgcctcccgccctgctgctgtcctcagtgcgcccccccggggcctgccaagctaatgagaccatcttttgcgagctggggaaccccttcaaacggaaccagaggatggagctgctcatcgcctttgaggtcatcggggtgaccctgcacacaagggaccttcaggtgcagctgcagctctccacgtcgagtcaccaggacaacctgtggcccatgatcctcactctgctggtggactatacactccagacctcgcttagcatggtaaatcaccggctacaaagcttctttggggggacagtgatgggtgagtctggcatgaaaactgtggaggatgtaggaagccccctcaagtatgaattccaggtgggcccaatgggggaggggctggtgggcctggggaccctggtcctaggtctggagtggccctacgaagtcagcaatggcaagtggctgctgtatcccacggagatcaccgtccatggcaatgggtcctggccctgccgaccacctggagaccttatcaaccctctcaacctcactctttctgaccctggggacaggccatcatccccacagcgcaggcggcgacagctggatccagggggaggccagggccccccacctgtcactctggctgctgccaaaaaagccaagtctgagactgtgctgacctgtgccacagggcgtgcccactgtgtgtggctagagtgccccatccctgatgcccccgttgtcaccaacgtgactgtgaaggcacgagtgtggaacagcaccttcatcgaggattacagagactttgaccgagtccgggtaaatggctgggctaccctattcctccgaaccagcatccccaccatcaacatggagaacaagaccacgtggttctctgtggacattgactcggagctggtggaggagctgccggccgaaatcgagctgtggctggtgctggtggccgtgggtgcagggctgctgctgctggggctgatcatcctcctgctgtggaagtgcggcttcttcaagcgagcccgcactcgcgccctgtatgaagctaagaggcagaaggcggagatgaagagccagccgtcagagacagagaggctgaccgacgactactgagggggcagccccccgcccccggcccacctggtgtgacttctttaagcggacccgctattatcagatcatgcccaagtaccacgcagtgcggatccgggaggaggagcgctacccacctccagggagcaccctgcccaccaagaagcactgggtgaccagctggcagactcgggaccaatactactgacgtcctccctgatcccaccccctcctcccccagtgtcccctttcttcctatttatcataagttatgcctctgacagtccacaggggccaccacctttggctggtagcagcaggctcaggcacatacacctcgtcaagagcatgcacatgctgtctggccctggggatcttcccacaggagggccagcgctgtggaccttacaacgccgagtgcactgcattcctgtgccctagatgcacgtggggcccactgctcgtggactgtgctggtgcatcacggatggtgcatgggctcgccgtgtctcagcctctgccagcgccaaaacaagccaaagagcctcccaccagagccgggaggaaaaggcccctgcaatgtggtgacacctccccctttcacactggatccatcttgagccacagtcactggattgactttgctgtcaaaactactgacagggagcagcccccgggccgctggctggtgggcccccaatgacacccatgccagagaggtggggatcctgcctaaggttgtctacgggggcacttggaggacctggcgtgctcagacccaacagcaaaggaactagaaagaaggacccagaacggcttgctttcctgcatctctgtgaagcctctctccttggccacagactgaactcgcagggagtgcagcaggaaggaacaaagacaggcaaacggcaacgtagcctgggctcactgtgctggggcacggcgggatcctccacagagaggaggggaccaattctggacagacagatgttgggaggatacagaggagatgccacttctcactcaccactaccagccagcctcagaaggccccagagagaccctgcaagaccacggagggagcgacacttgaatgtagaataggcagggggccctgccccaccccatccagccagaccccacgctgaccatgcgtcaggggcctagaggtggagttcttagctatccttggctttcagagccagcctggctctgccccctccccccttccatggtactgtagcaggggaattccctccccctccttgtgccttctttgtatataggcttctcacggcgaccaataaacagctcccagtttgta

SEQ ID NO: 328647 - DNA, 1679 bp, Homo sapiens
agtttaagcgggatcaacatggagaacaagaccacgtggttctctgtggacattgactcggagctggtggaggagctgccggccgaaatcgagctgtggctggtgctggtggccgtgggtgcagggctgctgctgctggggctgatcatcctcctgctgtggaagtgcggcttcttcaagcgagcccgcactcgcgccctgtatgaagctaagaggcagaaggcggagatgaagagccagccgtcagagacagagaggctgaccgacgactactgagggggcagccccccgcccccggcccacctggtgtgacttctttaagcggacccgctattatcagatcatgcccaagtaccacgcagtgcggatccgggaggaggagcgctacccacctccagggagcaccctgcccaccaagaagcactgggtgaccagctggcagactcgggaccaatactactgacgtcctccctgatcccaccccctcctcccccagtgtcccctttcttcctatttatcataagttatgcctctgacagtccacaggggccaccacctttggctggtagcagcaggctcaggcacatacacctcgtcaagagcatgcacatgctgtctggccctggggatcttcccacaggagggccagcgctgtggaccttacaacgccgagtgcactgcattcctgtgccctagatgcacgtggggcccactgctcgtggactgtgctggtgcatcacggatggtgcatgggctcgccgtgtctcagcctctgccagcgccaaaacaagccaaagagcctcccaccagagccgggaggaaaaggcccctgcaatgtggtgacacctccccctttcacactggatccatcttgagccacagtcactggattgactttgctgtcaaaactactgacagggagcagcccccgggccgctggctggtgggcccccaatgacacccatgccagagaggtggggatcctgcctaaggttgtctacgggggcacttggaggacctggcgtgctcagacccaacagcaaaggaactagaaagaaggacccagaacggcttgctttcctgcatctctgtgaagcctctctccttggccacagactgaactcgcagggagtgcagcaggaaggaacaaagacaggcaaacggcaacgtagcctgggctcactgtgctggggcacggcgggatcctccacagagaggaggggaccaattctggacagacagatgttgggaggatacagaggagatgccacttctcactcaccactaccagccagcctcagaaggccccagagagaccctgcaagaccacggagggagcgacacttgaatgtagaataggcagggggccctgccccaccccatccagccagaccccacgctgaccatgcgtcaggggcctagaggtggagttcttagctatccttggctttcagagccagcctggctctgccccctcccccatgggctgtgtcctaaggcccatttgagaagctgaggctagttccagaaaacctctcctgacccctgcctgttggcaggcccactccccagccccagccccttccatggtactgtagcaggggaattccctccccctccttgtgccttctttgtatataggcttctcacggcgaccaataaacagctcccagtttgta

SEQ ID NO: 328648 - DNA, 1275 bp, Homo sapiens
tgcgagactcgtaagcaattgtactggaggtcttccctgatcctacccctcctgcccctgagtaccttcgtttgtatctccatacacctacattaagtaatggcccgctgacaatcgaccgtgtgctcaacaacttccggatggataagtcctggaggtccttgagcctggttctattacagtacgggaatcaataggacgatgttcgatttgacacctgaggctctgcccctgaggagggccagcgctgtggaccttacaacgccgagtgcactgcattcctgtgccctagatgcacgtggggcccactgctcgtggactgtgctggtgcatcacggatggtgcatgggctcgccgtgtctcagcctctgccagcgccaaaacaagccaaagagcctcccaccagagccgggaggaaaaggcccctgcaatgtggtgacacctccccctttcacactggatccatcttgagccacagtcactggattgactttgctgtcaaaactactgacagggagcagcccccgggccgctggctggtgggcccccaatgacacccatgccagagaggtggggatcctgcctaaggttgtctacgggggcacttggaggacctggcgtgctcagacccaacagcaaaggaactagaaagaaggacccagaacggcttgctttcctgcatctctgtgaagcctctctccttggccacagactgaactcgcagggagtgcagcaggaaggaacaaagacaggcaaacggcaacgtagcctgggctcactgtgctggggcacggcgggatcctccacagagaggaggggaccaattctggacagacagatgttgggaggatacagaggagatgccacttctcactcaccactaccagccagcctcagaaggccccagagagaccctgcaagaccacggagggagcgacacttgaatgtagaataggcagggggccctgccccaccccatccagccagaccccacgctgaccatgcgtcaggggcctagaggtggagttcttagctatccttggctttcagagccagcctggctctgccccctcccccatgggctgtgtcctaaggcccatttgagaagctgaggctagttccagaaaacctctcctgacccctgcctgttggcaggcccactccccagccccagccccttccatggtactgtagcaggggaattccctccccctccttgtgccttctttgtatataggcttctcacggcgaccaataaacagctcccagtttgta

SEQ ID NO: 328649 - DNA, 3731 bp, Homo sapiens
aagggggcgcggccgggacaagctgggggccggttgcccggggcagggacggcggcgacccggccgctggggaggcaggaagatagacccacggatcttaggaagggatccgagagcgcagctgtgaaactggctggggctgggggcacgaaaccgatcagcgctacggagcgcagcggccggcgggttccagtgtcctccggcggcgcggggagcaggtgaacaggtcctcacgcccagctccgccccctcacgcgctctcgccgggaccccgcttccgctggcagccatgggccccggccccagccgcgcgccccgcgccccacgcctgatgctctgtgcgctcgccttgatggtggcggccggcggctgcgtcgtctccgccttcaacctggatacccgattcctggtagtgaaggaggccgggaacccgggcagcctcttcggctactcggtcgccctccatcggcagacagagcggcagcagcgctacctgctcctggctggtgccccccgggagctcgctgtgcccgatggctacaccaaccggactggtgctgtgtacctgtgcccactcactgcccacaaggatgactgtgagcggatgaacatcacagtgaaaaatgaccctggccatcacattattgaggacatgtggcttggagtgactgtggccagccagggccctgcaggcagagttctggtctgtgcccaccgctacacccaggtgctgtggtcagggtcagaagaccagcggcgcatggtgggcaagtgctacgtgcgaggcaatgacctagagctggactccagtgatgactggcagacctaccacaacgagatgtgcaatagcaacacagactacctggagacgggcatgtgccagctgggcaccagcggtggcttcacccagaacactgtgtacttcggcgcccccggtgcctacaactggaaaggaaacagctacatgattcagcgcaaggagtgggacttatctgagtatagttacaaggacccagaggaccaaggaaacctctatattgggtacacgatgcaggtaggcagcttcatcctgcaccccaaaaacatcaccattgtgacaggtgccccacggcaccgacatatgggcgcggtgttcttgctgagccaggaggcaggcggagacctgcggaggaggcaggtgctggagggctcgcaggtgggcgcctattttggcagcgccattgccctggcagacctgaacaatgatgggtggcaggacctcctggtgggcgccccctactacttcgagaggaaagaggaagtagggggtgccatctatgtcttcatgaaccaggcgggaacctccttccctgctcacccctcactccttcttcatggccccagtggctctgcctttggtttatctgtggccagcattggtgacatcaaccaggatggatttcaggatattgctgtgggagctccgtttgaaggcttgggcaaagtgtacatctatcacagtagctctaaggggctccttagacagccccagcaggtaatccatggagagaagctgggactgcctgggttggccaccttcggctattccctcagtgggcagatggatgtggatgagaacttctacccagaccttctagtgggaagcctgtcagaccacattgtgctgctgcgggcccggcccgtcatcaacatcgtccacaagaccttggtgcccaggccagctgtgctggaccctgcactttgcacggccacctcttgtgtgcaagtggagctgtgctttgcttacaaccagagtgccgggaaccccaactacaggcgaaacatcaccctggcctacactctggaggctgacagggaccgccggccgccccggctccgctttgccggcagtgagtccgctgtcttccacggcttcttctccatgcccgagatgcgctgccagaagctggagctgctcctgatggacaacctccgtgacaaactccgccccatcatcatctccatgaactactctttacctttgcggatgcccgatcgcccccggctggggctgcggtccctggacgcctacccgatcctcaaccaggcacaggctctggagaaccacactgaggtccagttccagaaggagtgcgggcctgacaacaagtgtgagagcaacttgcagatgcgggcagccttcgtgtcagagcagcagcagaagctgagcaggctccagtacagcagagacgtccggaaattgctcctgagcatcaacgtgacgaacacccggacctcggagcgctccggggaggacgcccacgaggcgctgctcaccctggtggtgcctcccgccctgctgctgtcctcagtgcgcccccccggggcctgccaagctaatgagaccatcttttgcgagctggggaaccccttcaaacggaaccagaggatggagctgctcatcgcctttgaggtcatcggggtgaccctgcacacaagggaccttcaggtgcagctgcagctctccacgtcgagtcaccaggacaacctgtggcccatgatcctcactctgctggtggactatacactccagacctcgcttagcatggtaaatcaccggctacaaagcttctttggggggacagtgatgggtgagtctggcatgaaaactgtggaggatgtaggaagccccctcaagtatgaattccaggtgggcccaatgggggaggggctggtgggcctggggaccctggtcctaggtctggagtggccctacgaagtcagcaatggcaagtggctgctgtatcccacggagatcaccgtccatggcaatgggtcctggccctgccgaccacctggagaccttatcaaccctctcaacctcactctttctgaccctggggacaggccatcatccccacagcgcaggcggcgacagctggatccagggggaggccagggccccccacctgtcactctggctgctgccaaaaaagccaagtctgagactgtgctgacctgtgccacagggcgtgcccactgtgtgtggctagagtgccccatccctgatgcccccgttgtcaccaacgtgactgtgaaggcacgagtgtggaacagcaccttcatcgaggattacagagactttgaccgagtccgggtaaatggctgggctaccctattcctccgaaccagcatccccaccatcaacatggagaacaagaccacgtggttctctgtggacattgactcggagctggtggaggagctgccggccgaaatcgagctgtggctggtgctggtggccgtgggtgcagggctgctgctgctggggctgatcatcctcctgctgtggaagtgcggcttcttcaagcgagcccgcactcgcgccaccctgcaagaccacggagggagcgacacttgaatgtagaataggcagggggccctgccccaccccatccagccagaccccacgctgaccatgcgtcaggggcctagaggtggagttcttagctatccttggctttcagagccagcctggctctgccccctcccccatgggctgtgtcctaaggcccatttgagaagctgaggctagttccagaaaacctctcctgacccctgcctgttggcaggcccactccccagccccagccccttccatggtactgtagcaggggaattccctccccctccttgtgccttctttgtatataggcttctcacggcgaccaataaacagctcccagtttgta

SEQ ID NO: 328650 - DNA, 1061 bp, Homo sapiens
aagggggcgcggccgggacaagctgggggccggttgcccggggcagggacggcggcgacccggccgctggggaggcaggaagatagacccacggatcttaggaagggatccgagagcgcagctgtgaaactggctggggctgggggcacgaaaccgatcagcgctacggagcgcagcggccggcgggttccagtgtcctccggcggcgcggggagcaggtgaacaggtcctcacgcccagctccgccccctcacgcgctctcgccgggaccccgcttccgctggcagccatgggccccggccccagccgcgcgccccgcgccccacgcctgatgctctgtgcgctcgccttgatggtggcggccggcggctgcgtcgtctccgccttcaacctggatacccgattcctggtagtgaaggaggccgggaacccgggcagcctcttcggctactcggtcgccctccatcggcagacagagcggcagcagcgctacctgctcctggctggtgccccccgggagctcgctgtgcccgatggctacaccaaccggactggtgctgtgtacctgtgcccactcactgcccacaaggatgactgtgagcggatgaacatcacagtgaaaaatgaccctggccatcacattattgaggacatgtggcttggagtgactgtggccagccagggccctgcaggcagagttctggtctgtgcccaccgctacacccaggtgctgtggtcagggtcagaagaccagcggcgcatggtgggcaagtgctacgtgcgaggcaatgacctagagctggactccagtgatgactggcagacctaccacaacgagatgtgcaatagcaacacagactacctggagacgggcatgtgccagctgggcaccagcggtggcttcacccagaacactgtgtacttcggcgcccccggtgcctacaactggaaaggtggggaccatggggccatgggggaagaaaggaagagcagagaccacccacccctagttagccacggggacagctggcctagaccatccacactagaaacaggacctc

SEQ ID NO: 328651 - DNA, 1191 bp, Homo sapiens
aagggggcgcggccgggacaagctgggggccggttgcccggggcagggacggcggcgacccggccgctggggaggcaggaagatagacccacggatcttaggaagggatccgagagcgcagctgtgaaactggctggggctgggggcacgaaaccgatcagcgctacggagcgcagcggccggcgggttccagtgtcctccggcggcgcggggagcaggtgaacaggtcctcacgcccagctccgccccctcacgcgctctcgccgggaccccgcttccgctggcagccatgggccccggccccagccgcgcgccccgcgccccacgcctgatgctctgtgcgctcgccttgatggtggcggccggcggctgcgtcgtctccgccttcaacctggatacccgattcctggtagtgaaggaggccgggaacccgggcagcctcttcggctactcggtcgccctccatcggcagacagagcggcagcagcgctacctgctcctggctggtgccccccgggagctcgctgtgcccgatggctacaccaaccggactggtgctgtgtacctgtgcccactcactgcccacaaggatgactgtgagcggatgaacatcacagtgaaaaatgaccctggccatcacattattgaggacatgtggcttggagtgactgtggccagccagggccctgcaggcagagttctggtaaggtgggtgctcagtgttggctcctccacctctacccggctctcccctcatctccagagctgggaggaaagaagagggcagcaggggggtccacggcgcgtgtgtgctggggcctgcacacatgtcccttcctgtggctgtgtgtccctcgctctctgcactcctggggagggggtgagtatcctgtgctctcccaaacccccgcacggcctgagttctctgactcatccacttcctccgcatgcctacactgggtgctcagccttcgtgggaacaagccgagggagccgagggaactgcaaggaggagaaagggcagagagggccccaggcagctcagcgctggctggcgctccttcctgggaggctgactgccggaagaaggcccagccctgttgaccccggttcacccagctctggtctgggggctaatcaaatgtgtcacctcctgcccacattctatagtggcagctcctgagttctcca

SEQ ID NO: 328652 - DNA, 366 bp, Homo sapiens
catcaacgtgacgaacacccggacctcggagcgctccggggaggacgcccacgaggcgctgctcaccctggtggtgcctcccgccctgctgctgtcctcagtgcgccccgtgagtgcccgccggccggctcagagcccaagcagggctccccgcgtctttgcatccccatatccatgtcctgtgcaggtgttgtcgtctgccacgtgcccacctcctctggtctgggccttcttgggggccttagcgtctctgctgcttggagaatccggctctcaagctctagggcttctgaccttgcaccacagaggagggaggacaagccctactttgacccgaccctgaccttattcgccttctttcctcag

SEQ ID NO: 328653 - DNA, 763 bp, Homo sapiens
tggggaatagatgcttggtaggcattaaatgttattcactctaaaagagatttgctagtgtccttttttaagatttataggtacatgttaatttaatacaacaacctgatgagcagagcatacaactcactcgtgtgtaatagttattgccccaccacttgtttgctgcacgtacccatgcaatttgaccaatgtttatgctatactagatcgtaaatatttctaatattactcatgccaataaatcaaatgacttcgtggtttattaaccaaattgaggcagttttgagagtcaaaagaagtgtgacattttaaaagctattattccagggcatcaagaataaaccgcaggattataaatcattctactacaaagacacatgcacacgtatgtttattgcggcactgttcacaatagcaaagacttggaaccaacccaaatggccatcagtgatagactgaataaagaaaatgtggcatatatacaccagggaatactatgcagccgtaaataaggatgagttcatgtcctttgcagggacatggatgaaactggaaaccatcattctcagtaaactaacacaaggacagaaaaccaaatatggcatgttctcactcataagtgggagttgaacaatgagaacacatggacacagggaggggaacatcacacaccagggcctgtttggcggcagggggctagagaagggctagcattaggagaaatacctaatgtatatgatggcttgatgggtgcagaaaa

SEQ ID NO: 328654 - DNA, 746 bp, Homo sapiens
ctgtagtctcagctactcaggaggctgaggcgggaggaccacttgagtccaggaggttgaggctgcagtgagccgtgatagtaccactgcactccagtctgggcaacagagtgagaccctatctcaaaaataaataagcaaataaaaataaaataggaactcagtgggtttaatggcagattagactcacttaaaaataaattagagacctgataaacaactgaaagatacatttgaagaaattagtcagaatttagcacaaacaaataatgagatgggaaacacaatggaagaattttaagaatgtaggatagaataagaaggtcatacatccaatgggagttccagaaggagataatagaaagaaggtagagagttgatattcaaagacgttaaggctgagaattttccaatgagaatagaaacgaaagacatcaatgatctttgacaggaagcccactgaatttcaagcaaaataaaaagaaatccacgggtagatatactgtgaaactgctaaataacaaagacaaagaaaagatcataaaagctaccagagatacaaggcagattatgtgctaacacacagtggtaattaagactgacagctgacttcgcaacagtaacaatgcaattcacaagtcagtgaaatctgtttgagtgctcagagaaaataactgaaaacttagaattatgtactctatgaacctgtctttcaagagaagaggcaaaataaagacgcttgagaa

SEQ ID NO: 328655 - DNA, 234 bp, Homo sapiens
aatgtgctactgtgttacaaccatgtactacagagatataaatttcaaaaggtcttttaaaaatccagtttctctggactttttagatatacagtttgaattcctaaatcatcacacattcaaatatatgtccacgtgaagatccgttccacttgcatgttttggccacaacaaggtctccaaaagtgattctttggaaaggatgatgtagagattcttatagcactccacagc

SEQ ID NO: 328656 - DNA, 180 bp, Homo sapiens
ctcccaaagtgctgggattacaggtgtgaaccaccacacctggcctaatagcaccatagttctttgaactgttaggaggattaaaagataatatacatatgtgatccacgcagcagagttcctagtacatagaaggctctcagtagatagctgctccattgttaacagccccacctatcc

SEQ ID NO: 328657 - DNA, 1353 bp, Homo sapiens
cagaccccaccttgtcttccctccctggcgtcctcagacttagtcccacggtctcctgcatcagctggtgatgaagaggagcatgctggggtgagactgggattctggcttctctttgaaccacctgcatcccagcccttcaggaagcctgtgaaaaacgtgattcctgggccccaccaagacccaccaaaaccatctctggggcttggtgcaggactctgaatttctaacaatgcccagtgactgtcgcacttgagtttgagggccagtgggcctgatgaacgctcagacccctccagcttagagtctgcatttgggctgtgacgtctcccacctgccccaataagatctgctctgtctgcgacaccaagatccagctggggactcccctgaggcctgcctaagtccaggccttggtcaggtcaggtgcacattgcagggataagcccaggaccggcagagagtggttgcctttccatttgccctccctggccatgccttcttgcctttggaaaaatgatgaagaaaaccttggctccttccttgtctggaaagggttacttgcctatgggttctggtggctagagagaaaagtagaaaaccagagtgcacgtaggtgtctaacacagaggagagtaggaacagggcggatacctgaaggtgactccgagtccagccccctggagaaggggtcgggggtggtggtaaagtagcacaactactattttttttctttttccattattattgttttttaagacagaatctcgtgctgctgcccaggctggagtgcagtggcacgatctgcaaactccgcctcctgggttcaagtgattcttctgcctcagcctcccgagtagctgggattacaggcacgcaccaccacacctggctaatttttgtacttttagtagagatggggtttcaccatgttggccaggctggtcttgaactcctgacctcaaatgagcctcctgcttcagtctcccaaattgccgggattacaggcatgagccactgtgtctggccctatttcctttaaaaagtgaaattaagagttgttcagtatgcaaaacttggaaagatggaggagaaaaagaaaaggaagaaaaaaatgtcacccatagtctcaccagagactatcattatttcgttttgttgtacttccttccactcttttcttcttcacataatttgccggtgttctttttacagagcaattatcttgtatatacaactttgtatcctgccttttccaccttatcgttccatcactttattccagcacttctctgtgttttacagacctttttataaataaaatgttcatcagctgcatattccatcctatca

SEQ ID NO: 328658 - DNA, 935 bp, Homo sapiens
tggagtgcagtggcgcaatctcggctcactgcaacctctacttccggggctcaagtgattcttccacctcagcctcccaagtagctgggactataggtgtgtgccaccattcccagataatttttgtctttttttggtagagacagggtttcaccatgttggtcagtctggtctcaaactcctgacctcaactgacccacctaccttggcctcccaaagtgctgggaatacaggcatgagccaccacgcctggcctctggtagtatctttacagcagtgtgaaaatggactaatacatctttatagaaaacccaatgaataaataataaagttactataactaataagtttaccaagtttacagatacaaaatcaatatatgaaccatcacatactattttcaaaggttaaataccctttaaagtagcatcaacaatattaacttcttagagataaatctgacaaaacatgtgaaagacctatacaacaaaaaatatgaaattttgctgagagaaattaaagaaggcctaaagagagatcacttctatcatagattgaaagactcaacattgttaagatgtaaattttcccgttaatctacacattcacagcaatcccaaccacaaatccagcaggatttttgggagaaactgacaaactgatgctaaaactcatattgaaataaaaagggcctagaatagccaaaacaactctgaaaataaagttgaaggattaacactacctgatttcaagaattattataaagtttatgtaatcaaaagaggtattggcataaagcagacaaacagatcaatgcaacagaatataaactccagaaaaaaaacccccacatatatggacaactgacttttgacaaagtcccaaaggcactgcagtgtgaagaaagatagccttttcaactactggtgcttgaa

SEQ ID NO: 328659 - DNA, 838 bp, Homo sapiens
catctgtgaaaaacctatagctaatctcatacttactggtgaaagactgaaagcttgccctcttagatcagcaacagaaagggacgtttgctcccaccacctctattcaacattgtaggctgggtgcagtggctcatgtccgtaagcaatcccagcactttgggagtatctttacagcagtgtgaaaatggactaatacatctttatagaaaacccaatgaataaataataaagttactataactaataagtttaccaagtttacagatacaaaatcaatatatgaaccatcacatactattttcaaaggttaaataccctttaaagtagcatcaacaatattaacttcttagagataaatctgacaaaacatgtgaaagacctatacaacaaaaaatatgaaattttgctgagagaaattaaagaaggcctaaagagagatcacttctatcatagattgaaagactcaacattgttaagatgtaaattttcccgttaatctacacattcacagcaatcccaaccacaaatccagcaggatttttgggagaaactgacaaactgatgctaaaactcatattgaaataaaaagggcctagaatagccaaaacaactctgaaaataaagttgaaggattaacactacctgatttcaagaattattataaagtttatgtaatcaaaagaggtattggcataaagcagacaaacagatcaatgcaacagaatataaactccagaaaaaaaacccccacatatatggacaactgacttttgacaaagtcccaaaggcactgcagtgtgaagaaagatagccttttcaactactggtgcttgaa

SEQ ID NO: 328660 - DNA, 1976 bp, Homo sapiens
acgcctggtgttctcgcgggaaagaaccgttgcgcccgactttgcgcggaggtaggagggggaagtggaggcgggagtgaagtctcgcgagaagagtcggttgccgtagcagagccctctagctgtgtgtgtctgaggctcggccgcctgagccgcggacggtttgctgagcccgttagtgcgcccggccgagacacgccgccgccatgtcccgctacctgcgtccccccaacacgtctctgttcgtcaggaacgtggccgacgacaccaggtctgaagacttgcggcgtgaatttggtcgttatggtcctatagttgatgtgtatgttccacttgatttctacactcgccgtccaagaggatttgcttatgttcaatttgaggatgttcgtgatgctgaagacgctttacataatttggacagaaagtggatttgtggacggcagattgaaatacagtttgcccagggggatcgaaagacaccaaatcagatgaaagccaaggaagggaggaatgtgtacagttcttcacgctatgatgattatgacagatacagacgttctagaagccgaagttatgaaaggaggagatcaagaagtcggtcttttgattacaactatagaagatcgtatagtcctagaaacagtagaccgactggaagaccacggcgtagcagaagccattccgacaatgatagaccaaactgcagctggaatacccagtacagttctgcttactacacttcaagaaagatctgaaagcggaaaaagaaccaaagaagggcagttcaagcgaccaaagggtgggtggaaggtgctgcagtatgaatactgtacgaatattttgactctggtctgaaaagataaaagaatgttatcgaaaactacatggaataattgaagtcccttcaagtttgaaagtaagcattttaggacaaataaaaggaaattcaactttgtacttgtggaaactaatccctaaatatgaataggtttatattgattcatgggtaacaggtccataataaattattggaaactaggatgtctgaatatcaaggaagacagccatagtctcttacagtgcctctgttggtctgtctcaaactgaattgggtgggaaaaggtatggtccaatataaaagttccatttttgccattattggcaaatcttgcctttgtttattttggtgccagtgttttctgcttaatcatttgctttgttggcatctgtgtttatttacttgtacaccacatgcagtttacatctgtcttaactactccttcccaggtaaattccaattatatttgacatccagctaagagggcccatctcttctcacctctttcctagtcagtatattcagcaaatatttattgagcccttactgtgggcaaatcattgtactggataattgagaaaaatagataattcccttattcagtaaatgtctactgagcacaatctagtgaatcattacagtatggcctcattgttttgtttgaggtgtgttattcataacaatattttacaccattcgtatcaatgtaattatagaacacaatatacgatcaaggataagtaattgtgtggttatctgccatttaaaagtatccagtatttgatcacattattataaataatgaaaaaatgatttaatctgtaataaactggtttattgtgcagtgactgtaatatactagagttataataaattgtttactctgcctcaccaaacacatgctaggatataacccccaaaataagtatttaactttgcattaggtataaaggagactgggtgctataattagattattttgaggcagacagagagctgttatcctaactgatttagtatgttctgtaattgagaaaatgttcaccaaattatactttttagtgatttacatgtacattttataggggacatgttctgtgtatagcgaataaataacttttatagtatcacaaaa

SEQ ID NO: 328661 - DNA, 2031 bp, Homo sapiens
aggaaactgaggcacaaagaaaagactgtaaggcagagccaggatttaagcccaggcctggtcccttagttttgggggggttttgtttgttttacagactataatttgagagaagtagattgaggagatagctcattgaaattgttcattttctgtatagaactagaaggcctaatttcatttttatttttacttgtgtcaacttatttttagacttggactattgagaatcttatatgttgttcctaaagcgacacacctaacagcttcaaaaggactatattacagttgaacccatggtagtttggatcctactgatacttgatgaggatctttacgtagtgttttatgttagttttgggtgatgtagttgagtcccccacttactgagtttacctactgtgtatgactgggctcaatgataaatagaatggttatatcaacactcaaatgagggctgacacacttcacctctccttttacttaagatctctctgcattttttttttttttttgaagccaagtaagcaagaagaaaaatgagagataatgcttcagtgagagaggaaaggtgctacatagagtatgagctgttaagttacatcccaggggaaagacctgggaactattgtattattctcttgaaaatttggcccagtaagctgctacatccagttcaactaacaaaatcctgtataccacagagaagaataaagaaaaccaaactgacaaacatccttcttttatttaagaccaaactgcagctggaatacccagtacagttctgcttactacacttcaagaaagatctgaaagcggaaaaagaaccaaagaagggcagttcaagcgaccaaagggtgggtggaaggtgctgcagtatgaatactgtacgaatattttgactctggtctgaaaagataaaagaatgttatcgaaaactacatggaataattgaagtcccttcaagtttgaaagtaagcattttaggacaaataaaaggaaattcaactttgtacttgtggaaactaatccctaaatatgaataggtttatattgattcatgggtaacaggtccataataaattattggaaactaggatgtctgaatatcaaggaagacagccatagtctcttacagtgcctctgttggtctgtctcaaactgaattgggtgggaaaaggtatggtccaatataaaagttccatttttgccattattggcaaatcttgcctttgtttattttggtgccagtgttttctgcttaatcatttgctttgttggcatctgtgtttatttacttgtacaccacatgcagtttacatctgtcttaactactccttcccaggtaaattccaattatatttgacatccagctaagagggcccatctcttctcacctctttcctagtcagtatattcagcaaatatttattgagcccttactgtgggcaaatcattgtactggataattgagaaaaatagataattcccttattcagtaaatgtctactgagcacaatctagtgaatcattacagtatggcctcattgttttgtttgaggtgtgttattcataacaatattttacaccattcgtatcaatgtaattatagaacacaatatacgatcaaggataagtaattgtgtggttatctgccatttaaaagtatccagtatttgatcacattattataaataatgaaaaaatgatttaatctgtaataaactggtttattgtgcagtgactgtaatatactagagttataataaattgtttactctgcctcaccaaacacatgctaggatataacccccaaaataagtatttaactttgcattaggtataaaggagactgggtgctataattagattattttgaggcagacagagagctgttatcctaactgatttagtatgttctgtaattgagaaaatgttcaccaaattatactttttagtgatttacatgtacattttataggggacatgttctgtgtatagcgaataaataacttttatagtatcacaaaa

SEQ ID NO: 328662 - DNA, 905 bp, Homo sapiens
acgcctggtgttctcgcgggaaagaaccgttgcgcccgactttgcgcggaggtaggagggggaagtggaggcgggagtgaagtctcgcgagaagagtcggttgccgtagcagagccctctagctgtgtgtgtctgaggctcggccgcctgagccgcggacggtttgctgagcccgttagtgcgcccggccgagacacgccgccgccatgtcccgctacctgcgtccccccaacacgtctctgttcgtcaggaacgtggccgacgacaccaggtctgaagacttgcggcgtgaatttggtcgttatggtcctatagttgatgtgtatgttccacttgatttctacactcgccgtccaagaggatttgcttatgttcaatttgaggatgttcgtgatgctgaagacgctttacataatttggacagaaagtggatttgtggacggcagattgaaatacagtttgcccagggggatcgaaagacaccaaatcagatgaaagccaaggaagggaggaatgtgtacagttcttcacgctatgatgattatgacagatacagacgttctagaagccgaagttatgaaaggaggagatcaagaagtcggtcttttgattacaactatagaagatcgtatagtcctagaaacagtagaccgactggaagaccacggcgtagcagaagccattccgacaatgatagattcaaacaccgaaatcgatctttttcaagatctaaatccaattcaagatcacggtccaagtcccagcccaagaaagaaatgaaggctaaatcacgttctaggtctgcatctcacaccaaaactagaggcacctctaaaacagattccaaacctttagttggccagattggaggccggaaagaccctacaatcaaaaaacgtagcagg

SEQ ID NO: 328663 - DNA, 1198 bp, Homo sapiens
acgcctggtgttctcgcgggaaagaaccgttgcgcccgactttgcgcggaggtaggagggggaagtggaggcgggagtgaagtctcgcgagaagagtcggttgccgtagcagagccctctagctgtgtgtgtctgaggctcggccgcctgagccgcggacggtttgctgagcccgttagtgcgcccggccgagacacgccgccgccatgtcccgctacctgcgtccccccaacacgtctctgttcgtcaggaacgtggccgacgacaccaggtctgaagacttgcggcgtgaatttggtcgttatggtcctatagttgatgtgtatgttccacttgatttctacactcgccgtccaagaggatttgcttatgttcaatttgaggatgttcgtgatgctgaagacgctttacataatttggacagaaagtggatttgtggacggcagattgaaatacagtttgcccagggggatcgaaagacaccaaatcagatgaaagccaaggaagggaggaatgtgtacagttcttcacgctatgatgattatgacagatacagacgttctagaagccgaagttatgaaaggaggagatcaagaagtcggtcttttgattacaactatagaagatcgtatagtcctagaaacagtagaccgactggaagaccacggcgtagcagaagccattccgacaatgatagccaagtaagcaagaagaaaaatgagagataatgcttcagtgagagaggaaaggtgctacatagagtatgagctgttaagttacatcccaggggaaagacctgggaactattgtattattctcttgaaaatttggcccagtaagctgctacatccagttcaactaacaaaatcctgtataccacagagaagaataaagaaaaccaaactgacaaacatccttcttttatttaagaccaaactgcagctggaatacccagtacagttctgcttactacacttcaagaaagatctgaaagcggaaaaagaaccaaagaagggcagttcaagcgaccaaagggtgggtggaaggtgctgcagtatgaatactgtacgaatattttgactctggtctgaaaagataaaagaatgttatcgaaaactacatggaataattgaagtcccttcaagtttgaaagtaagcattttaggacaaataaaaggaaattcaactttgtacttgt

SEQ ID NO: 328664 - DNA, 420 bp, Homo sapiens
  misc_feature (8)..(9): n is a, c, g, or t
  misc_feature (12)..(12): n is a, c, g, or t
  misc_feature (15)..(15): n is a, c, g, or t
  misc_feature (28)..(28): n is a, c, g, or t
  misc_feature (30)..(30): n is a, c, g, or t
  misc_feature (33)..(33): n is a, c, g, or t
agcggccnntantantactaaattcgcngncgncgagttatctgccatttaaaagtatccagtatttgatcacattattataaataatgaaaaaatgatttaatctgtaataaactggtttattgtgcagtgactgtaatatactagagttataataaattgtttactctgcctcaccaaacacatgctaggatataacccccaaaataagtatttaactttgcattaggtataaaggagactgggtgctataattagattattttgaggcagacagagagctgttatcctaactgatttagtatgttctgtaattgagaaaatgttcaccaaattatactttttagtgatttacatgtacattttataggggacatgttctgtgtatagcgaataaataacttttatagtatcacaaaa

SEQ ID NO: 328665 - DNA, 708 bp, Homo sapiens
aaaatgtatttgttagcatttaatttttttttactattttgtatacttttaattatatacattgaatgtttcattgagacaaaaaatactgtagcattttattttaaaagttttatggtttgcttttaattagaaactttgcctctatgaatagatatttgtcactgctttttctgatatgctttttagcagtagaccgactggaagaccacggcgtagcagaagccattccgacaatgatagattcaaacaccgaaatcgatctttttcaagatctaaatccaattcaagatcacggtccaagtcccagcccaagaaagaaatgaaggctaaatcacgttctaggtctgcatctcacaccaaaactagaggcacctctaaaacagattccaaaacacattataagtctggctcaagatatgaaaaggaatcaaggaaaaaagaaccacctagatccaaatctcagtcaagatcacagtctaggtctaggtcaaaatctagatcaaggtcttggactagtcctaagtccagtggccactgatagtataaaccatggtcatttttaggcatgtatcattcatttactcatagtttggtttacttaaattatcaggaatacaatgttgcaatgatgcttaaaaaacacttgttagttttccctgtaccaggcaatggttataattaaaatgatatgctgttgagaagcca

SEQ ID NO: 328666 - DNA, 3534 bp, Homo sapiens
acgcctggtgttctcgcgggaaagaaccgttgcgcccgactttgcgcggaggtaggagggggaagtggaggcgggagtgaagtctcgcgagaagagtcggttgccgtagcagagccctctagctgtgtgtgtctgaggctcggccgcctgagccgcggacggtttgctgagcccgttagtgcgcccggccgagacacgccgccgccatgtcccgctacctgcgtccccccaacacgtctctgttcgtcaggaacgtggccgacgacaccaggtctgaagacttgcggcgtgaatttggtcgttatggtcctatagttgatgtgtatgttccacttgatttctacactcgccgtccaagaggatttgcttatgttcaatttgaggatgttcgtgatgctgaagacgctttacataatttggacagaaagtggatttgtggacggcagattgaaatacagtttgcccagggggatcgaaagacaccaaatcagatgaaagccaaggaagggaggaatgtgtacagttcttcacgctatgatgattatgacagatacagacgttctagaagccgaagttatgaaaggaggagatcaagaagtcggtcttttgattacaactatagaagatcgtatagtcctagaaacagtagaccgactggaagaccacggcgtagcagaagccattccgacaatgatagattcaaacaccgaaatcgatctttttcaagatctaaatccaattcaagatcacggtccaagtcccagcccaagaaagaaatgaaggctaaatcacgttctaggtctgcatctcacaccaaaactagaggcacctctaaaacagattccaaaacacattataagtctggctcaagatatgaaaaggaatcaaggaaaaaagaaccacctagatccaaatctcagtcaagatcacagtctaggtctaggtcaaaatctagatcaaggtcttggactagtcctaagtccagtggccactgatagtataaaccatggtcatttttaggcatgtatcattcatttactcatagtttggtttacttaaattatcaggaatacaatgttgcaatgatgcttaaaaaacacttgttagttttccctgtaccaggcaatggttataattaaaatgatatgctgttgagaagccactcttaagagtccagtttgtttaatgttatgggcagctaccaatttgtggtgtctctgtatatttttgtaaagattctcattttttatgcttgaagtatttggtgaaaagatgttggttgaccataatttgcaacattgtctcattaaaaataaactttcatattcatatttggtagaactgttaacctagaaatgtagcttgctaataagatagaatgatacaaaagtgaagtagtagccacagtacaacactgactgctcagacacatttaggttcagggtggacctttatgtcttgtcaagatgtctaggcccggctgggcgtggtggctcacacctgtaatcccagcactttgggaggccgaggcgggcggatcacgaggtcaggagttcgagaccagcctgaccaacacggtgaaaccccgtctctactaaaaatacaaaaattatccgggcatggtggcacatgcctgtaatctcagctactcaggaggctgaggcaagagaatcgcttgaacctgggaggtagaagttgcagtgagccaaaatcacgccactgcactccagcctgggcaacagagtgagactccgtctcaaaaaaaaaaaaaaaaccggatgtctaggccaatgataattatttttgatgcagtgtggattagttcttttgttaaccccactgtcttggggaatgatgccagctgggaaattgagtttttgactgaaacatggagccttcactgctttttttctggttcctatgaagatttggaacatagaaaacacaaaaactcaccttaaaatttgagcaggtcgttgatggcaaaaataattttaaggaaaaaggaatattcttatgtagttattctaaagtttaaggagcgttgttgaccataatattgcttagttttcttactgctgttaagtaagtaaattgtttcaaagtaggttttgtgtgtgtgtgcctagtgtaaaagaactgaaattttgatgcttacagcacttggctcgtgcatttgtatcaaaatttgcctgcctctttatgagggaggcctgcttttcacacctcagtttatttaatacgaggcaagttgtaagacaacactcattctaggtgattctgtggtgccatgaaatttaaggtaatttggggaaaaggattagtcagttttaagcaagagtcacatcttttgagctttcgattatcagtgtagtacctgactaaaaatgaagtaatacccttaaaccatttataatttctagtatttctctgaaagatcgttttggggacaaaagtgacttgacatgtccaatttcatttcagaataaaaagctagcatctttaaaaatctcagattgcttgcttacagatacaagtaagaattatggacaaacgattccttttagaggattacttttttcaatttcggttttagtaatctaggctttgcctgtaaagaatacaacgatggattttaaatactgtttgtggaatgtgtttaaaggattgattctagaacctttgtatatttgatagtatttctaactttcatttctttactgtttgcagttaatgttcatgttctgctatgcaatcgtttatatgcacgtttctttaatttttttagattttcctggatgtatagtttaaacaacaaaaagtctatttaaaactgtagcagtagtttacagttctagcaaagaggaaagttgtggggttaaactttgtattttctttcttatagaggcttctaaaaaggtatttttatatgttctttttaacaaatattgtgtacaacctttaaaacatcaatgtttggatcaaaacaagacccagcttattttctgcttgctgtaaattaagcaaacatgctataataaaaacaaaatgaaggaaataatgattaactggaattattacagtattgaatatgattctaaaataacaatggaaacagtcctttatagatttaggaatattttaaatcattgttgcactaggcacaactaacttttactttggaaatgatagaacttgccagaaaggtacatcttttacacagtagttaaaaattcattgtgtaatatcaaagttgtttcatgattgctcattaagcctcttgggttaactaacttaagaggttatttggtagtgttaagatgaaatttggatcagctaattccaagtttatattttcattattggatggatcagtaattctgctctccctcttgtaaacaagacgcattagggcttaacgtttatgacatgattttaaatcattttaaattgaatgttgatgagcaactaatattaagtgataacctctttggggaagtaggttaggtattttgtggtttgaattctatctac

SEQ ID NO: 328667 - DNA, 3075 bp, Homo sapiens
acgcctggtgttctcgcgggaaagaaccgttgcgcccgactttgcgcggaggtaggagggggaagtggaggcgggagtgaagtctcgcgagaagagtcggttgccgtagcagagccctctagctgtgtgtgtctgaggctcggccgcctgagccgcggacggtttgctgagcccgttagtgcgcccggccgagacacgccgccgccatgtcccgctacctgcgtccccccaacacgtctctgttcgtcaggaacgtggccgacgacaccaggtctgaagacttgcggcgtgaatttggtcgttatggtcctatagttgatgtgtatgttccacttgatttctacactcgccgtccaagaggatttgcttatgttcaatttgaggatgttcgtgatgctgaagacgctttacataatttggacagaaagtggatttgtggacggcagattgaaatacagtttgcccagggggatcgaaagacaccaaatcagatgaaagccaaggaagggaggaatgtgtacagttcttcacgctatgatgattatgacagatacagacgttctagaagccgaagttatgaaaggaggagatcaagaagtcggtcttttgattacaactatagaagatcgtatagtcctagaaacagtagaccgactggaagaccacggcgtagcagaagccattccgacaatgatagattcaaacaccgaaatcgatctttttcaagatctaaatccaattcaagatcacggtccaagtcccagcccaagaaagaaatgaaggctaaatcacgttctaggtctgcatctcacaccaaaactagaggcacctctaaaacagattccaaaacacattataagtctggctcaagatatgaaaaggaatcaaggaaaaaagaaccacctagatccaaatctcagtcaagatcacagtctaggtctaggtcaaaatctagatcaaggtcttggactagtcctaagtccagtggccactgatagtataaaccatggtcatttttaggcatgtatcattcatttactcatagtttggtttacttaaattatcaggaatacaatgttgcaatgatgcttaaaaaacacttgttagttttccctgtaccaggcaatggttataattaaaatgatatgctgttgagaagccactcttaagagtccagtttgtttaatgttatgggcagctaccaatttgtggtgtctctgtatatttttgtaaagattctcattttttatgcttgaagtatttggtgaaaagatgttggttgaccataatttgcaacattgtctcattaaaaataaactttcatattcatatttggtagaactgttaacctagaaatgtagcttgctaataagatagaatgatacaaaagtgaagtagtagccacagtacaacactgactgctcagacacatttaggttcagggtggacctttatgtcttgtcaagatgtctaggcccggctgggcgtggtggctcacacctgtaatcccagcactttgggaggccgaggcgggcggatcacgaggtcaggagttcgagaccagcctgaccaacacggtgaaaccccgtctctactaaaaatacaaaaattatccgggcatggtggcacatgcctgtaatctcagctactcaggaggctgaggcaagagaatcgcttgaacctgggaggtagaagttgcagtgagccaaaatcacgccactgcactccagcctgggcaacagagtgagactccgtctcaaaaaaaaaaaaaaaaccggatgtctaggccaatgataattatttttgatgcagtgtggattagttcttttgttaaccccactgtcttggggaatgatgccagctgggaaattgagtttttgactgaaacatggagccttcactgctttttttctggttcctatgaagatttggaacatagaaaacacaaaaactcaccttaaaatttgagcaggtcgttgatggcaaaaataattttaaggaaaaaggaatattcttatgtagttattctaaagtttaaggagcgttgttgaccataatattgcttagttttcttactgctgttaagtaagtaaattgtttcaaagtaggttttgtgtgtgtgtgcctagtgtaaaagaactgaaattttgatgcttacagcacttggctcgtgcatttgtatcaaaatttgcctgcctctttatgagggaggcctgcttttcacacctcagtttatttaatacgaggcaagttgtaagacaacactcattctaggtgattctgtggtgccatgaaatttaaggtaatttggggaaaaggattagtcagttttaagcaagagtcacatcttttgagctttcgattatcagtgtagtacctgactaaaaatgaagtaatacccttaaaccatttataatttctagtatttctctgaaagatcgttttggggacaaaagtgacttgacatgtccaatttcatttcagaataaaaagctagcatctttaaaaatctcagattgcttgcttacagatacaagtaagaattatggacaaacgattccttttagaggattacttttttcaatttcggttttagtaatctaggctttgcctgtaaagaatacaacgatggattttaaatactgtttgtggaatgtgtttaaaggattgattctagaacctttgtatatttgatagtatttctaactttcatttctttactgtttgcagttaatgttcatgttctgctatgcaatcgtttatatgcacgtttctttaatttttttagattttcctggatgtatagtttaaacaacaaaaagtctatttaaaactgtagcagtagtttacagttctagcaaagaggaaagttgtggggttaaactttgtattttctttcttatagaggcttctaaaaaggtatttttttttccttcattttgtttttattatagcatgtttgcttaatttacagcaagcagaaaataagctgggtcttgttttgatccaaacattgatgttttaaaggttgtacacaatatttgttaaaaagaacatataaaaatgtcgacgcgg

SEQ ID NO: 328668 - DNA, 4073 bp, Homo sapiens
acgcctggtgttctcgcgggaaagaaccgttgcgcccgactttgcgcggaggtaggagggggaagtggaggcgggagtgaagtctcgcgagaagagtcggttgccgtagcagagccctctagctgtgtgtgtctgaggctcggccgcctgagccgcggacggtttgctgagcccgttagtgcgcccggccgagacacgccgccgccatgtcccgctacctgcgtccccccaacacgtctctgttcgtcaggaacgtggccgacgacaccaggtctgaagacttgcggcgtgaatttggtcgttatggtcctatagttgatgtgtatgttccacttgatttctacactcgccgtccaagaggatttgcttatgttcaatttgaggatgttcgtgatgctgaagacgctttacataatttggacagaaagtggatttgtggacggcagattgaaatacagtttgcccagggggatcgaaagacaccaaatcagatgaaagccaaggaagggaggaatgtgtacagttcttcacgctatgatgattatgacagatacagacgttctagaagccgaagttatgaaaggaggagatcaagaagtcggtcttttgattacaactatagaagatcgtatagtcctagaaacagtagaccgactggaagaccacggcgtagcagaagccattccgacaatgatagaccaaactgcagctggaatacccagtacagttctgcttactacacttcaagaaagatctgaaagcggaaaaagaaccaaagaagggcagttcaagcgaccaaagggtgggtggaaggtgctgcagtatgaatactgtacgaatattttgactctggtctgaaaagataaaagaatgttatcgaaaactacatggaataattgaagtcccttcaagtttgaaagtaagcattttaggacaaataaaaggaaattcaactttgtacttgtggaaactaatccctaaatatgaataggtttatattgattcatgggtaacaggtccataataaattattggaaactaggatgtctgaatatcaaggaagacagccatagtctcttacagtgcctctgttggtctgtctcaaactgaattgggtgggaaaaggtatggtccaatataaaagttccatttttgccattattggcaaatcttgcctttgtttattttggtgccagtgttttctgcttaatcatttgctttgttggcatctgtgtttatttacttgtacaccacatgcagtttacatctgtcttaactactccttcccaggtaaattccaattatatttgacatccagctaagagggcccatctcttctcacctctttcctagtcagtatattcagcaaatatttattgagcccttactgtgggcaaatcattgtactggataattgagaaaaatagataattcccttattcagtaaatgtctactgagcacaatctagtgaatcattacagtatggcctcattgttttgtttgaggtgtgttattcataacaatattttacaccattcgtatcaatgtaattatagaacacaatatacgatcaaggataagtaattgtgtggttatctgccatttaaaagtatccagtatttgatcacattattataaataatgaaaaaatgatttaatctgtaataaactggtttattgtgcagtgactgtaatatactagagttataataaattgtttactctgcctcaccaaacacatgctaggatataacccccaaaataagtatttaactttgcattaggtataaaggagactgggtgctataattagattattttgaggcagacagagagctgttatcctaactgatttagtatgttctgtaattgagaaaatgttcaccaaattatactttttagtgatttacatgtacattttataggggacatgttctgtgtatagcgaataaataacttttatagtatcacaaaatgttttggattccttagtttcttattaggatatgatgtttctttacctatacattgatttcatcacatttgattttgtcatcttttttgccacatacttaaaactttccatataaaattaactaaaaatctggaagtggaatttaagcttttaatttgtagcaattttgaaaatatagcagaggtatattttcaagggaggtgtgaaatggaggtattattgtttgtattttattttagaaattttgtttgaacttgcccaagatcacacagcaagtgtcagatcctaggttacagcccataatttttcacttgtttcatcttttgttaccatgtttgttgtttaatccaatggggaagtgtttttatagctttattttcatggagatagtaacattgatataatgggatctagaatttacttagagtcaaagtgactagatttaattacaaaaagtattttgttgtataccgttatacactcattaacataggggttcttatggacagaggttctatgtatttttaaaagaatatgtagaggctatagacttttttgccctctacctcccttctccatttccttttgaagttaagacatttaagggggagaattaaggtgcatattgagttggggttttgtttaaaaaaaattaggtaaatacatatataactacaataacaacagttggtagttctctaaaatatttaattatggtaaatcagaaaaggccctttaatttttgcatctgttgaatgaattgctttaggatctcttctgtggttgtttctctttatactgaatgctgtcaatattattgagcacttactgtgccgaaccatgtgcttttcaaatatttctatttaatcctaaaaacactcctgggaaatgggtattattcccattttacagatgagaaaattgtcctttgtagaatacccatcatgtgatagcttcttgcatattatgctattcatttctcacaaccttacaaggtaaatggataatgttcctggatgagagattaaacgtactcgaagatcttatggttgtgtggctcagagactctaagcatggctttccaaatctcattctcttgtagagattttccattgtattgcattttgaccatgttcctgtttacaaaacctaagattatattctgaagtatctgtgacttgagtgatagctcaggaataatctgagggcattctattaggaaggaggactagcaaagcctatagttagcctatcctaggcatgaactattctcattttagataggatgacttgataaataggatgaagtgagcaacctgtttgtcttcggttattggtatctacaagacattctgctagtcactgtggaaaagtttccttctcttgggttttttcctcttccccttcctcttaacagtgttggttatctttattatgtttctgtgtatttgtaacagctgtttcacccttgtattgcataatggggatttttcttggaataaaaagtgaggcatgtaaattcattgagaactaaccgtagtttgtaaagaagtaaaaggcctttgtatctagttttttgcagatcacatttctttgaatgctggaaagtgaaataaactggtctaggagccaaaaataaatcttgggtttttttaagattttgctcttagatttgtaaccacctgggtacaactttttcctaatttgtgtaagaggttttagagatgcactctgtccctcttgctttacaaattgcctacaagaatgcaaccaaaatactagaaactgaaacttacacaaaacctttcaggttttttcctgtgttgtagttctagggaagaggatagtttattagtatttattttaagcttaaggataggttttggacctggattccatcatagtataactgccatcgaaaagaagacaaattgaaattacagcatttacctaaggttcacagtatggctgacttcagcagccttacatggtaagttctctgtaccagctatttttggttctcgcaattgcatcgacttgggaaattcctatcaccattctctatataggctaaccaaaacttttatcagtaccttt

SEQ ID NO: 328669 - DNA, 3581 bp, Homo sapiens
acgcctggtgttctcgcgggaaagaaccgttgcgcccgactttgcgcggaggtaggagggggaagtggaggcgggagtgaagtctcgcgagaagagtcggttgccgtagcagagccctctagctgtgtgtgtctgaggctcggccgcctgagccgcggacggtttgctgagcccgttagtgcgcccggccgagacacgccgccgccatgtcccgctacctgcgtccccccaacacgtctctgttcgtcaggaacgtggccgacgacaccaggtctgaagacttgcggcgtgaatttggtcgttatggtcctatagttgatgtgtatgttccacttgatttctacactcgccgtccaagaggatttgcttatgttcaatttgaggatgttcgtgatgctgaagacgctttacataatttggacagaaagtggatttgtggacggcagattgaaatacagtttgcccagggggatcgaaagacaccaaatcagatgaaagccaaggaagggaggaatgtgtacagttcttcacgctatgatgattatgacagatacagacgttctagaagccgaagttatgaaaggaggagatcaagaagtcggtcttttgattacaactatagaagatcgtatagtcctagaaacagtagaccgactggaagaccacggcgtagcagaagccattccgacaatgatagaccaaactgcagctggaatacccagtacagttctgcttactacacttcaagaaagatctgaaagcggaaaaagaaccaaagaagggcagttcaagcgaccaaagggtgggtggaaggtgctgcagtatgaatactgtacgaatattttgactctggtctgaaaagataaaagaatgttatcgaaaactacatggaataattgaagtcccttcaagtttgaaagtaagcattttaggacaaataaaaggaaattcaactttgtacttgtggaaactaatccctaaatatgaataggtttatattgattcatgggtaacaggtccataataaattattggaaactaggatgtctgaatatcaaggaagacagccatagtctcttacagtgcctctgttggtctgtctcaaactgaattgggtgggaaaaggtatggtccaatataaaagttccatttttgccattattggcaaatcttgcctttgtttattttggtgccagtgttttctgcttaatcatttgctttgttggcatctgtgtttatttacttgtacaccacatgcagtttacatctgtcttaactactccttcccaggtaaattccaattatatttgacatccagctaagagggcccatctcttctcacctctttcctagtcagtatattcagcaaatatttattgagcccttactgtgggcaaatcattgtactggataattgagaaaaatagataattcccttattcagtaaatgtctactgagcacaatctagtgaatcattacagtatggcctcattgttttgtttgaggtgtgttattcataacaatattttacaccattcgtatcaatgtaattatagaacacaatatacgatcaaggataagtaattgtgtggttatctgccatttaaaagtatccagtatttgatcacattattataaataatgaaaaaatgatttaatctgtaataaactggtttattgtgcagtgactgtaatatactagagttataataaattgtttactctgcctcaccaaacacatgctaggatataacccccaaaataagtatttaactttgcattaggtataaaggagactgggtgctataattagattattttgaggcagacagagagctgttatcctaactgatttagtatgttctgtaattgagaaaatgttcaccaaattatactttttagtgatttacatgtacattttataggggacatgttctgtgtatagcgaataaataacttttatagtatcacaaaatgttttggattccttagtttcttattaggatatgatgtttctttacctatacattgatttcatcacatttgattttgtcatcttttttgccacatacttaaaactttccatataaaattaactaaaaatctggaagtggaatttaagcttttaatttgtagcaattttgaaaatatagcagaggtatattttcaagggaggtgtgaaatggaggtattattgtttgtattttattttagaaattttgtttgaacttgcccaagatcacacagcaagtgtcagatcctaggttacagcccataatttttcacttgtttcatcttttgttaccatgtttgttgtttaatccaatggggaagtgtttttatagctttattttcatggagatagtaacattgatataatgggatctagaatttacttagagtcaaagtgactagatttaattacaaaaagtattttgttgtataccgttatacactcattaacataggggttcttatggacagaggttctatgtatttttaaaagaatatgtagaggctatagacttttttgccctctacctcccttctccatttccttttgaagttaagacatttaagggggagaattaaggtgcatattgagttggggttttgtttaaaaaaaattaggtaaatacatatataactacaataacaacagttggtagttctctaaaatatttaattatggtaaatcagaaaaggccctttaatttttgcatctgttgaatgaattgctttaggatctcttctgtggttgtttctctttatactgaatgctgtcaatattattgagcacttactgtgccgaaccatgtgcttttcaaatatttctatttaatcctaaaaacactcctgggaaatgggtattattcccattttacagatgagaaaattgtcctttgtagaatacccatcatgtgatagcttcttgcatattatgctattcatttctcacaaccttacaaggtaaatggataatgttcctggatgagagattaaacgtactcgaagatcttatggttgtgtggctcagagactctaagcatggctttccaaatctcattctcttgtagagattttccattgtattgcattttgaccatgttcctgtttacaaaacctaagattatattctgaagtatctgtgacttgagtgatagctcaggaataatctgagggcattctattaggaaggaggactagcaaagcctatagttagcctatcctaggcatgaactattctcattttagataggatgacttgataaataggatgaagtgagcaacctgtttgtcttcggttattggtatctacaagacattctgctagtcactgtggaaaagtttccttctcttgggttttttcctcttccccttcctcttaacagtgttggttatctttattatgtttctgtgtatttgtaacagctgtttcacccttgtattgcataatggggatttttcttggaataaaaagtgaggcatgtaaattcattgagaactaaccgtagtttgtaaagaagtaaaagcgttgagctcaaagctttatacttcaagaaaagatccgaagcatgtt

SEQ ID NO: 328670 - DNA, 3691 bp, Homo sapiens
tatatcaaacactgtcttgaatgtgtacttggcctctgttaaaatgatggttttaggaaaggagctaggtttggacagaatagctatataaagccagcagttctcgtagtattattgctgacatgaccagggaggacaagcagcttagcttctcagatcaaaaacaagtaccagtagttcctgcttaaggctggtaaataatatcttgaaattctcaagttggaaaccagtctcaaacccatttctttgcaagaagttgtatatttagggtcatggttagggctttccagtctaggagtccttccagtggtctgtttcttgatagcatgcttttacagtctgcatggatgtaataacgcttttggtatagtgattgtcttgagtactgcttgactctggtcttgatgcccacaaatggctagcgtgcttgtcttcccatgcagtggaaggaagacagttaaatgaaatagtagtattagatatatatgaaaaagaaaacagcaaaataaatttgaagttaatgctttcgtctcttgtaaggtaaggcatatactgcttgcttacacaagaactattggcattttctttttttcgtttgaaacaaatatgaaaaatagtattttggttttaagaaatttttattttagcatacaacatataactgacatttgttttttcttttttgtcttgtaaacttaattcttaaaacttaggaaaatttttggataggacaacttggtgattcagctataacagatcttatttcaataataactttactgcaatatgtattcatacattttcaaatgtgtgccttaggaaatcacaagtgcttttatagtgtgaagtgttaatggctgaatccaactgaatcaccaactagtaagtggggttctggttgatgttctggaataatattgggagattgtgaattgttccagacataccaactgaactttcattcattatcaaagtttgcaaaacttcccaagccccttaacatttagcaatttgaggatgttcgtgatgctgaagacgctttacataatttggacagaaagtggatttgtggacggcagattgaaatacagtttgcccagggggatcgaaagacaccaaatcagatgaaagccaaggaagggaggaatgtgtacagttcttcacgctatgatgattatgacagatacagacgttctagaagccgaagttatgaaaggaggagatcaagaagtcggtcttttgattacaactatagaagatcgtatagtcctagaaacagtagaccgactggaagaccacggcgtagcagaagccattccgacaatgatagattcaaacaccgaaatcgatctttttcaagatctaaatccaattcaagatcacggtccaagtcccagcccaagaaagaaatgaaggctaaatcacgttctaggtctgcatctcacaccaaaactagaggcacctctaaaacagattccaaaacacattataagtctggctcaagatatgaaaaggaatcaaggaaaaaagaaccacctagatccaaatctcagtcaagatcacagtctaggtctaggtcaaaatctagatcaaggtcttggactagtcctaagtccagtggccactgatagtataaaccatggtcatttttaggcatgtatcattcatttactcatagtttggtttacttaaattatcaggaatacaatgttgcaatgatgcttaaaaaacacttgttagttttccctgtaccaggcaatggttataattaaaatgatatgctgttgagaagccactcttaagagtccagtttgtttaatgttatgggcagctaccaatttgtggtgtctctgtatatttttgtaaagattctcattttttatgcttgaagtatttggtgaaaagatgttggttgaccataatttgcaacattgtctcattaaaaataaactttcatattcatatttggtagaactgttaacctagaaatgtagcttgctaataagatagaatgatacaaaagtgaagtagtagccacagtacaacactgactgctcagacacatttaggttcagggtggacctttatgtcttgtcaagatgtctaggcccggctgggcgtggtggctcacacctgtaatcccagcactttgggaggccgaggcgggcggatcacgaggtcaggagttcgagaccagcctgaccaacacggtgaaaccccgtctctactaaaaatacaaaaattatccgggcatggtggcacatgcctgtaatctcagctactcaggaggctgaggcaagagaatcgcttgaacctgggaggtagaagttgcagtgagccaaaatcacgccactgcactccagcctgggcaacagagtgagactccgtctcaaaaaaaaaaaaaaaaccggatgtctaggccaatgataattatttttgatgcagtgtggattagttcttttgttaaccccactgtcttggggaatgatgccagctgggaaattgagtttttgactgaaacatggagccttcactgctttttttctggttcctatgaagatttggaacatagaaaacacaaaaactcaccttaaaatttgagcaggtcgttgatggcaaaaataattttaaggaaaaaggaatattcttatgtagttattctaaagtttaaggagcgttgttgaccataatattgcttagttttcttactgctgttaagtaagtaaattgtttcaaagtaggttttgtgtgtgtgtgcctagtgtaaaagaactgaaattttgatgcttacagcacttggctcgtgcatttgtatcaaaatttgcctgcctctttatgagggaggcctgcttttcacacctcagtttatttaatacgaggcaagttgtaagacaacactcattctaggtgattctgtggtgccatgaaatttaaggtaatttggggaaaaggattagtcagttttaagcaagagtcacatcttttgagctttcgattatcagtgtagtacctgactaaaaatgaagtaatacccttaaaccatttataatttctagtatttctctgaaagatcgttttggggacaaaagtgacttgacatgtccaatttcatttcagaataaaaagctagcatctttaaaaatctcagattgcttgcttacagatacaagtaagaattatggacaaacgattccttttagaggattacttttttcaatttcggttttagtaatctaggctttgcctgtaaagaatacaacgatggattttaaatactgtttgtggaatgtgtttaaaggattgattctagaacctttgtatatttgatagtatttctaactttcatttctttactgtttgcagttaatgttcatgttctgctatgcaatcgtttatatgcacgtttctttaatttttttagattttcctggatgtatagtttaaacaacaaaaagtctatttaaaactgtagcagtagtttacagttctagcaaagaggaaagttgtggggttaaactttgtattttctttcttatagaggcttctaaaaaggtatttttatatgttctttttaacaaatattgtgtacaacctttaaaacatcaatgtttggatcaaaacaagacccagcttattttctgcttgctgtaaattaagcaaacatgctataataaaaacaaaatgaaggaaa

SEQ ID NO: 328671 - DNA, 3614 bp, Homo sapiens
acgcctggtgttctcgcgggaaagaaccgttgcgcccgactttgcgcggaggtaggagggggaagtggaggcgggagtgaagtctcgcgagaagagtcggttgccgtagcagagccctctagctgtgtgtgtctgaggctcggccgcctgagccgcggacggtttgctgagcccgttagtgcgcccggccgagacacgccgccgccatgtcccgctacctgcgtccccccaacacgtctctgttcgtcaggaacgtggccgacgacaccaggtctgaagacttgcggcgtgaatttggtcgttatggtcctatagttgatgtgtatgttccacttgatttctacactcgccgtccaagaggatttgcttatgttcaatatcctttcttcagatggctgattagtgaggggtgttgaagtttgaaattcaagtttatagaatgtaaagctgtacagttatggcgaccccaaagagaaagcatgaaagaacctttagagtagagttcaacacttaaggcaagtagacaagccaaagacctcttaaggatcaggcttgaagagaagggagagtttgggaaaagaaaaaataaagaaaagctggaagaaggacaagcctaatgggagacaaagcctcgctttatctacaaaagggggaaaaggttgtttttcaaagttaaagataaagccatctgtcatatttggccaagcatctcatgacaagtccttctgacaagcacttaaagagttaaaggtcaagatgaagttgaatgatggccaagattaaaggagtcatacctgatatttgaggatgttcgtgatgctgaagacgctttacataatttggacagaaagtggatttgtggacggcagattgaaatacagtttgcccagggggatcgaaagacaccaaatcagatgaaagccaaggaagggaggaatgtgtacagttcttcacgctatgatgattatgacagatacagacgttctagaagccgaagttatgaaaggaggagatcaagaagtcggtcttttgattacaactatagaagatcgtatagtcctagaaacagtagaccgactggaagaccacggcgtagcagaagccattccgacaatgataggtaaataactttgctttgaaaaagactcatgtattttttaatttcagagtgaacttttgctctaaaaataacaaatttgattactatagaatctaatttttactctaattatatctctcctctgttttgaaagattcaaacaccgaaatcgatctttttcaagatctaaatccaattcaagatcacggtccaagtcccagcccaagaaagaaatgaaggctaaatcacgttctaggtctgcatctcacaccaaaactagaggcacctctaaaacagattccaaaacacattataagtctggctcaagatatgaaaaggaatcaaggaaaaaagaaccacctagatccaaatctcagtcaagatcacagtctaggtctaggtcaaaatctagatcaaggtcttggactagtcctaagtccagtggccactgatagtataaaccatggtcatttttaggcatgtatcattcatttactcatagtttggtttacttaaattatcaggaatacaatgttgcaatgatgcttaaaaaacacttgttagttttccctgtaccaggcaatggttataattaaaatgatatgctgttgagaagccactcttaagagtccagtttgtttaatgttatgggcagctaccaatttgtggtgtctctgtatatttttgtaaagattctcattttttatgcttgaagtatttggtgaaaagatgttggttgaccataatttgcaacattgtctcattaaaaataaactttcatattcatatttggtagaactgttaacctagaaatgtagcttgctaataagatagaatgatacaaaagtgaagtagtagccacagtacaacactgactgctcagacacatttaggttcagggtggacctttatgtcttgtcaagatgtctaggcccggctgggcgtggtggctcacacctgtaatcccagcactttgggaggccgaggcgggcggatcacgaggtcaggagttcgagaccagcctgaccaacacggtgaaaccccgtctctactaaaaatacaaaaattatccgggcatggtggcacatgcctgtaatctcagctactcaggaggctgaggcaagagaatcgcttgaacctgggaggtagaagttgcagtgagccaaaatcacgccactgcactccagcctgggcaacagagtgagactccgtctcaaaaaaaaaaaaaaaaccggatgtctaggccaatgataattatttttgatgcagtgtggattagttcttttgttaaccccactgtcttggggaatgatgccagctgggaaattgagtttttgactgaaacatggagccttcactgctttttttctggttcctatgaagatttggaacatagaaaacacaaaaactcaccttaaaatttgagcaggtcgttgatggcaaaaataattttaaggaaaaaggaatattcttatgtagttattctaaagtttaaggagcgttgttgaccataatattgcttagttttcttactgctgttaagtaagtaaattgtttcaaagtaggttttgtgtgtgtgtgcctagtgtaaaagaactgaaattttgatgcttacagcacttggctcgtgcatttgtatcaaaatttgcctgcctctttatgagggaggcctgcttttcacacctcagtttatttaatacgaggcaagttgtaagacaacactcattctaggtgattctgtggtgccatgaaatttaaggtaatttggggaaaaggattagtcagttttaagcaagagtcacatcttttgagctttcgattatcagtgtagtacctgactaaaaatgaagtaatacccttaaaccatttataatttctagtatttctctgaaagatcgttttggggacaaaagtgacttgacatgtccaatttcatttcagaataaaaagctagcatctttaaaaatctcagattgcttgcttacagatacaagtaagaattatggacaaacgattccttttagaggattacttttttcaatttcggttttagtaatctaggctttgcctgtaaagaatacaacgatggattttaaatactgtttgtggaatgtgtttaaaggattgattctagaacctttgtatatttgatagtatttctaactttcatttctttactgtttgcagttaatgttcatgttctgctatgcaatcgtttatatgcacgtttctttaatttttttagattttcctggatgtatagtttaaacaacaaaaagtctatttaaaactgtagcagtagtttacagttctagcaaagaggaaagttgtggggttaaactttgtattttctttcttatagaggcttctaaaaaggtatttttatatgttctttttaacaaatattgtgtacaacctttaaaacatcaatgtttggatcaaaacaagacccagcttattttctgcttgctgtaaattaagcaaacatgctataataaaaacaaaatgaaggaaa

SEQ ID NO: 328672 - DNA, 3061 bp, Homo sapiens
gcggccgcctactactactactactgctcgaattcaagcttctaacgatgtacggggacatgaaagaacctttagagtagagttcaacacttaaggcaagtagacaagccaaagacctcttaaggatcaggcttgaagagaagggagagtttgggaaaagaaaaaataaagaaaagctggaagaaggacaagcctaatgggagacaaagcctcgctttatctacaaaagggggaaaaggttgtttttcaaagttaaagataaagccatctgtcatatttggccaagcatctcatgacaagtccttctgacaagcacttaaagagttaaaggtcaagatgaagttgaatgatggccaagattaaaggagtcatacctgatatttgaggatgttcgtgatgctgaagacgctttacataatttggacagaaagtggatttgtggacggcagattgaaatacagtttgcccagggggatcgaaagacaccaaatcagatgaaagccaaggaagggaggaatgtgtacagttcttcacgctatgatgattatgacagatacagacgttctagaagccgaagttatgaaaggaggagatcaagaagtcggtcttttgattacaactatagaagatcgtatagtcctagaaacagtagaccgactggaagaccacggcgtagcagaagccattccgacaatgatagattcaaacaccgaaatcgatctttttcaagatctaaatccaattcaagatcacggtccaagtcccagcccaagaaagaaatgaaggctaaatcacgttctaggtctgcatctcacaccaaaactagaggcacctctaaaacagattccaaaacacattataagtctggctcaagatatgaaaaggaatcaaggaaaaaagaaccacctagatccaaatctcagtcaagatcacagtctaggtctaggtcaaaatctagatcaaggtcttggactagtcctaagtccagtggccactgatagtataaaccatggtcatttttaggcatgtatcattcatttactcatagtttggtttacttaaattatcaggaatacaatgttgcaatgatgcttaaaaaacacttgttagttttccctgtaccaggcaatggttataattaaaatgatatgctgttgagaagccactcttaagagtccagtttgtttaatgttatgggcagctaccaatttgtggtgtctctgtatatttttgtaaagattctcattttttatgcttgaagtatttggtgaaaagatgttggttgaccataatttgcaacattgtctcattaaaaataaactttcatattcatatttggtagaactgttaacctagaaatgtagcttgctaataagatagaatgatacaaaagtgaagtagtagccacagtacaacactgactgctcagacacatttaggttcagggtggacctttatgtcttgtcaagatgtctaggcccggctgggcgtggtggctcacacctgtaatcccagcactttgggaggccgaggcgggcggatcacgaggtcaggagttcgagaccagcctgaccaacacggtgaaaccccgtctctactaaaaatacaaaaattatccgggcatggtggcacatgcctgtaatctcagctactcaggaggctgaggcaagagaatcgcttgaacctgggaggtagaagttgcagtgagccaaaatcacgccactgcactccagcctgggcaacagagtgagactccgtctcaaaaaaaaaaaaaaaaccggatgtctaggccaatgataattatttttgatgcagtgtggattagttcttttgttaaccccactgtcttggggaatgatgccagctgggaaattgagtttttgactgaaacatggagccttcactgctttttttctggttcctatgaagatttggaacatagaaaacacaaaaactcaccttaaaatttgagcaggtcgttgatggcaaaaataattttaaggaaaaaggaatattcttatgtagttattctaaagtttaaggagcgttgttgaccataatattgcttagttttcttactgctgttaagtaagtaaattgtttcaaagtaggttttgtgtgtgtgtgcctagtgtaaaagaactgaaattttgatgcttacagcacttggctcgtgcatttgtatcaaaatttgcctgcctctttatgagggaggcctgcttttcacacctcagtttatttaatacgaggcaagttgtaagacaacactcattctaggtgattctgtggtgccatgaaatttaaggtaatttggggaaaaggattagtcagttttaagcaagagtcacatcttttgagctttcgattatcagtgtagtacctgactaaaaatgaagtaatacccttaaaccatttataatttctagtatttctctgaaagatcgttttggggacaaaagtgacttgacatgtccaatttcatttcagaataaaaagctagcatctttaaaaatctcagattgcttgcttacagatacaagtaagaattatggacaaacgattccttttagaggattacttttttcaatttcggttttagtaatctaggctttgcctgtaaagaatacaacgatggattttaaatactgtttgtggaatgtgtttaaaggattgattctagaacctttgtatatttgatagtatttctaactttcatttctttactgtttgcagttaatgttcatgttctgctatgcaatcgtttatatgcacgtttctttaatttttttagattttcctggatgtatagtttaaacaacaaaaagtctatttaaaactgtagcagtagtttacagttctagcaaagaggaaagttgtggggttaaactttgtattttctttcttatagaggcttctaaaaaggtatttttatatgttctttttaacaaatattgtgtacaacctttaaaacatcaatgtttggatcaaaacaagacccagcttattttctgcttgctgtaaattaagcaaacatgctataataaaaacaaaatgaaggaaa

SEQ ID NO: 328673 - DNA, 3375 bp, Homo sapiens
cattcccttgtaccatacatatgtctgctgttgtcctgttaatgtaaactgcatttttatcttccaaattcttggatcctagctttccttcatcaaaaagatatattgcctatacatcttaaggacttggacataaaaatttgaggtctttttatgatgttttaggtctgaagacttgcggcgtgaatttggtcgttatggtcctatagttgatgtgtatgttccacttgatttctacactcgccgtccaagaggatttgcttatgttcaatatcctttcttcagatggctgattagtgaggggtgttgaagtttgaaattcaagtttatagaatgtaaagctgtacagttatggcgaccccaaagagaaagcatgaaagaacctttagagtagagttcaacacttaaggcaagtagacaagccaaagacctcttaaggatcaggcttgaagagaagggagagtttgggaaaagaaaaaataaagaaaagctggaagaaggacaagcctaatgggagacaaagcctcgctttatctacaaaagggggaaaaggttgtttttcaaagttaaagataaagccatctgtcatatttggccaagcatctcatgacaagtccttctgacaagcacttaaagagttaaaggtcaagatgaagttgaatgatggccaagattaaaggagtcatacctgatatttgaggatgttcgtgatgctgaagacgctttacataatttggacagaaagtggatttgtggacggcagattgaaatacagtttgcccagggggatcgaaagacaccaaatcagatgaaagccaaggaagggaggaatgtgtacagttcttcacgctatgatgattatgacagatacagacgttctagaagccgaagttatgaaaggaggagatcaagaagtcggtcttttgattacaactatagaagatcgtatagtcctagaaacagtagaccgactggaagaccacggcgtagcagaagccattccgacaatgatagattcaaacaccgaaatcgatctttttcaagatctaaatccaattcaagatcacggtccaagtcccagcccaagaaagaaatgaaggctaaatcacgttctaggtctgcatctcacaccaaaactagaggcacctctaaaacagattccaaaacacattataagtctggctcaagatatgaaaaggaatcaaggaaaaaagaaccacctagatccaaatctcagtcaagatcacagtctaggtctaggtcaaaatctagatcaaggtcttggactagtcctaagtccagtggccactgatagtataaaccatggtcatttttaggcatgtatcattcatttactcatagtttggtttacttaaattatcaggaatacaatgttgcaatgatgcttaaaaaacacttgttagttttccctgtaccaggcaatggttataattaaaatgatatgctgttgagaagccactcttaagagtccagtttgtttaatgttatgggcagctaccaatttgtggtgtctctgtatatttttgtaaagattctcattttttatgcttgaagtatttggtgaaaagatgttggttgaccataatttgcaacattgtctcattaaaaataaactttcatattcatatttggtagaactgttaacctagaaatgtagcttgctaataagatagaatgatacaaaagtgaagtagtagccacagtacaacactgactgctcagacacatttaggttcagggtggacctttatgtcttgtcaagatgtctaggcccggctgggcgtggtggctcacacctgtaatcccagcactttgggaggccgaggcgggcggatcacgaggtcaggagttcgagaccagcctgaccaacacggtgaaaccccgtctctactaaaaatacaaaaattatccgggcatggtggcacatgcctgtaatctcagctactcaggaggctgaggcaagagaatcgcttgaacctgggaggtagaagttgcagtgagccaaaatcacgccactgcactccagcctgggcaacagagtgagactccgtctcaaaaaaaaaaaaaaaaccggatgtctaggccaatgataattatttttgatgcagtgtggattagttcttttgttaaccccactgtcttggggaatgatgccagctgggaaattgagtttttgactgaaacatggagccttcactgctttttttctggttcctatgaagatttggaacatagaaaacacaaaaactcaccttaaaatttgagcaggtcgttgatggcaaaaataattttaaggaaaaaggaatattcttatgtagttattctaaagtttaaggagcgttgttgaccataatattgcttagttttcttactgctgttaagtaagtaaattgtttcaaagtaggttttgtgtgtgtgtgcctagtgtaaaagaactgaaattttgatgcttacagcacttggctcgtgcatttgtatcaaaatttgcctgcctctttatgagggaggcctgcttttcacacctcagtttatttaatacgaggcaagttgtaagacaacactcattctaggtgattctgtggtgccatgaaatttaaggtaatttggggaaaaggattagtcagttttaagcaagagtcacatcttttgagctttcgattatcagtgtagtacctgactaaaaatgaagtaatacccttaaaccatttataatttctagtatttctctgaaagatcgttttggggacaaaagtgacttgacatgtccaatttcatttcagaataaaaagctagcatctttaaaaatctcagattgcttgcttacagatacaagtaagaattatggacaaacgattccttttagaggattacttttttcaatttcggttttagtaatctaggctttgcctgtaaagaatacaacgatggattttaaatactgtttgtggaatgtgtttaaaggattgattctagaacctttgtatatttgatagtatttctaactttcatttctttactgtttgcagttaatgttcatgttctgctatgcaatcgtttatatgcacgtttctttaatttttttagattttcctggatgtatagtttaaacaacaaaaagtctatttaaaactgtagcagtagtttacagttctagcaaagaggaaagttgtggggttaaactttgtattttctttcttatagaggcttctaaaaaggtatttttatatgttctttttaacaaatattgtgtacaacctttaaaacatcaatgtttggatcaaaacaagacccagcttattttctgcttgctgtaaattaagcaaacatgctataataaaaacaaaatgaaggaaa

SEQ ID NO: 328674 - DNA, 4729 bp, Homo sapiens
acgcctggtgttctcgcgggaaagaaccgttgcgcccgactttgcgcggaggtaggagggggaagtggaggcgggagtgaagtctcgcgagaagagtcggttgccgtagcagagccctctagctgtgtgtgtctgaggctcggccgcctgagccgcggacggtttgctgagcccgttagtgcgcccggccgagacacgccgccgccatgtcccgctacctgcgtccccccaacacgtctctgttcgtcaggaacgtggccgacgacaccaggtctgaagacttgcggcgtgaatttggtcgttatggtcctatagttgatgtgtatgttccacttgatttctacactcgccgtccaagaggatttgcttatgttcaatatcctttcttcagatggctgattagtgaggggtgttgaagtttgaaattcaagtttatagaatgtaaagctgtacagttatggcgaccccaaagagaaagcatgaaagaacctttagagtagagttcaacacttaaggcaagtagacaagccaaagacctcttaaggatcaggcttgaagagaagggagagtttgggaaaagaaaaaataaagaaaagctggaagaaggacaagcctaatgggagacaaagcctcgctttatctacaaaagggggaaaaggttgtttttcaaagttaaagataaagccatctgtcatatttggccaagcatctcatgacaagtccttctgacaagcacttaaagagttaaaggtcaagatgaagttgaatgatggccaagattaaaggagtcatacctgatatttgaggatgttcgtgatgctgaagacgctttacataatttggacagaaagtggatttgtggacggcagattgaaatacagtttgcccagggggatcgaaagacaccaaatcagatgaaagccaaggaagggaggaatgtgtacagttcttcacgctatgatgattatgacagatacagacgttctagaagccgaagttatgaaaggaggagatcaagaagtcggtcttttgattacaactatagaagatcgtatagtcctagaaacagtagaccgactggaagaccacggcgtagcagaagccattccgacaatgatagccaagtaagcaagaagaaaaatgagagataatgcttcagtgagagaggaaaggtgctacatagagtatgagctgttaagttacatcccaggggaaagacctgggaactattgtattattctcttgaaaatttggcccagtaagctgctacatccagttcaactaacaaaatcctgtataccacagagaagaataaagaaaaccaaactgacaaacatccttcttttatttaagaccaaactgcagctggaatacccagtacagttctgcttactacacttcaagaaagatctgaaagcggaaaaagaaccaaagaagggcagttcaagcgaccaaagggtgggtggaaggtgctgcagtatgaatactgtacgaatattttgactctggtctgaaaagataaaagaatgttatcgaaaactacatggaataattgaagtcccttcaagtttgaaagtaagcattttaggacaaataaaaggaaattcaactttgtacttgtggaaactaatccctaaatatgaataggtttatattgattcatgggtaacaggtccataataaattattggaaactaggatgtctgaatatcaaggaagacagccatagtctcttacagtgcctctgttggtctgtctcaaactgaattgggtgggaaaaggtatggtccaatataaaagttccatttttgccattattggcaaatcttgcctttgtttattttggtgccagtgttttctgcttaatcatttgctttgttggcatctgtgtttatttacttgtacaccacatgcagtttacatctgtcttaactactccttcccaggtaaattccaattatatttgacatccagctaagagggcccatctcttctcacctctttcctagtcagtatattcagcaaatatttattgagcccttactgtgggcaaatcattgtactggataattgagaaaaatagataattcccttattcagtaaatgtctactgagcacaatctagtgaatcattacagtatggcctcattgttttgtttgaggtgtgttattcataacaatattttacaccattcgtatcaatgtaattatagaacacaatatacgatcaaggataagtaattgtgtggttatctgccatttaaaagtatccagtatttgatcacattattataaataatgaaaaaatgatttaatctgtaataaactggtttattgtgcagtgactgtaatatactagagttataataaattgtttactctgcctcaccaaacacatgctaggatataacccccaaaataagtatttaactttgcattaggtataaaggagactgggtgctataattagattattttgaggcagacagagagctgttatcctaactgatttagtatgttctgtaattgagaaaatgttcaccaaattatactttttagtgatttacatgtacattttataggggacatgttctgtgtatagcgaataaataacttttatagtatcacaaaatgttttggattccttagtttcttattaggatatgatgtttctttacctatacattgatttcatcacatttgattttgtcatcttttttgccacatacttaaaactttccatataaaattaactaaaaatctggaagtggaatttaagcttttaatttgtagcaattttgaaaatatagcagaggtatattttcaagggaggtgtgaaatggaggtattattgtttgtattttattttagaaattttgtttgaacttgcccaagatcacacagcaagtgtcagatcctaggttacagcccataatttttcacttgtttcatcttttgttaccatgtttgttgtttaatccaatggggaagtgtttttatagctttattttcatggagatagtaacattgatataatgggatctagaatttacttagagtcaaagtgactagatttaattacaaaaagtattttgttgtataccgttatacactcattaacataggggttcttatggacagaggttctatgtatttttaaaagaatatgtagaggctatagacttttttgccctctacctcccttctccatttccttttgaagttaagacatttaagggggagaattaaggtgcatattgagttggggttttgtttaaaaaaaattaggtaaatacatatataactacaataacaacagttggtagttctctaaaatatttaattatggtaaatcagaaaaggccctttaatttttgcatctgttgaatgaattgctttaggatctcttctgtggttgtttctctttatactgaatgctgtcaatattattgagcacttactgtgccgaaccatgtgcttttcaaatatttctatttaatcctaaaaacactcctgggaaatgggtattattcccattttacagatgagaaaattgtcctttgtagaatacccatcatgtgatagcttcttgcatattatgctattcatttctcacaaccttacaaggtaaatggataatgttcctggatgagagattaaacgtactcgaagatcttatggttgtgtggctcagagactctaagcatggctttccaaatctcattctcttgtagagattttccattgtattgcattttgaccatgttcctgtttacaaaacctaagattatattctgaagtatctgtgacttgagtgatagctcaggaataatctgagggcattctattaggaaggaggactagcaaagcctatagttagcctatcctaggcatgaactattctcattttagataggatgacttgataaataggatgaagtgagcaacctgtttgtcttcggttattggtatctacaagacattctgctagtcactgtggaaaagtttccttctcttgggttttttcctcttccccttcctcttaacagtgttggttatctttattatgtttctgtgtatttgtaacagctgtttcacccttgtattgcataatggggatttttcttggaataaaaagtgaggcatgtaaattcattgagaactaaccgtagtttgtaaagaagtaaaaggcctttgtatctagttttttgcagatcacatttctttgaatgctggaaagtgaaataaactggtctaggagccaaaaataaatcttgggtttttttaagattttgctcttagatttgtaaccacctgggtacaactttttcctaatttgtgtaagaggttttagagatgcactctgtccctcttgctttacaaattgcctacaagaatgcaaccaaaatactagaaactgaaacttacacaaaacctttcaggttttttcctgtgttgtagttctagggaagaggatagtttattagtatttattttaagcttaaggataggttttggacctggattccatcatagtataactgccatcgaaaagaagacaaattgaaattacagcatttacctaaggttcacagtatggctgacttcagcagccttacatggtaagttctctgtaccagctatttttggttctcgcaattgcatcgacttgggaaattcctatcaccattctctatataggctaaccaaaacttttatcagtaccttt

SEQ ID NO: 328675 - DNA, 4019 bp, Homo sapiens
acgcctggtgttctcgcgggaaagaaccgttgcgcccgactttgcgcggaggtaggagggggaagtggaggcgggagtgaagtctcgcgagaagagtcggttgccgtagcagagccctctagctgtgtgtgtctgaggctcggccgcctgagccgcggacggtttgctgagcccgttagtgcgcccggccgagacacgccgccgccatgtcccgctacctgcgtccccccaacacgtctctgttcgtcaggaacgtggccgacgacaccaggtctgaagacttgcggcgtgaatttggtcgttatggtcctatagttgatgtgtatgttccacttgatttctacactcgccgtccaagaggatttgcttatgttcaatttgaggatgttcgtgatgctgaagacgctttacataatttggacagaaagtggatttgtggacggcagattgaaatacagtttgcccagggggatcgaaagacaccaaatcagatgaaagccaaggaagggaggaatgtgtacagttcttcacgctatgatgattatgacagatacagacgttctagaagccgaagttatgaaaggaggagatcaagaagtcggtcttttgattacaactatagaagatcgtatagtcctagaaaaccaaactgcagctggaatacccagtacagttctgcttactacacttcaagaaagatctgaaagcggaaaaagaaccaaagaagggcagttcaagcgaccaaagggtgggtggaaggtgctgcagtatgaatactgtacgaatattttgactctggtctgaaaagataaaagaatgttatcgaaaactacatggaataattgaagtcccttcaagtttgaaagtaagcattttaggacaaataaaaggaaattcaactttgtacttgtggaaactaatccctaaatatgaataggtttatattgattcatgggtaacaggtccataataaattattggaaactaggatgtctgaatatcaaggaagacagccatagtctcttacagtgcctctgttggtctgtctcaaactgaattgggtgggaaaaggtatggtccaatataaaagttccatttttgccattattggcaaatcttgcctttgtttattttggtgccagtgttttctgcttaatcatttgctttgttggcatctgtgtttatttacttgtacaccacatgcagtttacatctgtcttaactactccttcccaggtaaattccaattatatttgacatccagctaagagggcccatctcttctcacctctttcctagtcagtatattcagcaaatatttattgagcccttactgtgggcaaatcattgtactggataattgagaaaaatagataattcccttattcagtaaatgtctactgagcacaatctagtgaatcattacagtatggcctcattgttttgtttgaggtgtgttattcataacaatattttacaccattcgtatcaatgtaattatagaacacaatatacgatcaaggataagtaattgtgtggttatctgccatttaaaagtatccagtatttgatcacattattataaataatgaaaaaatgatttaatctgtaataaactggtttattgtgcagtgactgtaatatactagagttataataaattgtttactctgcctcaccaaacacatgctaggatataacccccaaaataagtatttaactttgcattaggtataaaggagactgggtgctataattagattattttgaggcagacagagagctgttatcctaactgatttagtatgttctgtaattgagaaaatgttcaccaaattatactttttagtgatttacatgtacattttataggggacatgttctgtgtatagcgaataaataacttttatagtatcacaaaatgttttggattccttagtttcttattaggatatgatgtttctttacctatacattgatttcatcacatttgattttgtcatcttttttgccacatacttaaaactttccatataaaattaactaaaaatctggaagtggaatttaagcttttaatttgtagcaattttgaaaatatagcagaggtatattttcaagggaggtgtgaaatggaggtattattgtttgtattttattttagaaattttgtttgaacttgcccaagatcacacagcaagtgtcagatcctaggttacagcccataatttttcacttgtttcatcttttgttaccatgtttgttgtttaatccaatggggaagtgtttttatagctttattttcatggagatagtaacattgatataatgggatctagaatttacttagagtcaaagtgactagatttaattacaaaaagtattttgttgtataccgttatacactcattaacataggggttcttatggacagaggttctatgtatttttaaaagaatatgtagaggctatagacttttttgccctctacctcccttctccatttccttttgaagttaagacatttaagggggagaattaaggtgcatattgagttggggttttgtttaaaaaaaattaggtaaatacatatataactacaataacaacagttggtagttctctaaaatatttaattatggtaaatcagaaaaggccctttaatttttgcatctgttgaatgaattgctttaggatctcttctgtggttgtttctctttatactgaatgctgtcaatattattgagcacttactgtgccgaaccatgtgcttttcaaatatttctatttaatcctaaaaacactcctgggaaatgggtattattcccattttacagatgagaaaattgtcctttgtagaatacccatcatgtgatagcttcttgcatattatgctattcatttctcacaaccttacaaggtaaatggataatgttcctggatgagagattaaacgtactcgaagatcttatggttgtgtggctcagagactctaagcatggctttccaaatctcattctcttgtagagattttccattgtattgcattttgaccatgttcctgtttacaaaacctaagattatattctgaagtatctgtgacttgagtgatagctcaggaataatctgagggcattctattaggaaggaggactagcaaagcctatagttagcctatcctaggcatgaactattctcattttagataggatgacttgataaataggatgaagtgagcaacctgtttgtcttcggttattggtatctacaagacattctgctagtcactgtggaaaagtttccttctcttgggttttttcctcttccccttcctcttaacagtgttggttatctttattatgtttctgtgtatttgtaacagctgtttcacccttgtattgcataatggggatttttcttggaataaaaagtgaggcatgtaaattcattgagaactaaccgtagtttgtaaagaagtaaaaggcctttgtatctagttttttgcagatcacatttctttgaatgctggaaagtgaaataaactggtctaggagccaaaaataaatcttgggtttttttaagattttgctcttagatttgtaaccacctgggtacaactttttcctaatttgtgtaagaggttttagagatgcactctgtccctcttgctttacaaattgcctacaagaatgcaaccaaaatactagaaactgaaacttacacaaaacctttcaggttttttcctgtgttgtagttctagggaagaggatagtttattagtatttattttaagcttaaggataggttttggacctggattccatcatagtataactgccatcgaaaagaagacaaattgaaattacagcatttacctaaggttcacagtatggctgacttcagcagccttacatggtaagttctctgtaccagctatttttggttctcgcaattgcatcgacttgggaaattcctatcaccattctctatataggctaaccaaaacttttatcagtaccttt

SEQ ID NO: 328676 - DNA, 1178 bp, Homo sapiens
acgcctggtgttctcgcgggaaagaaccgttgcgcccgactttgcgcggaggtaggagggggaagtggaggcgggagtgaagtctcgcgagaagagtcggttgccgtagcagagccctctagctgtgtgtgtctgaggctcggccgcctgagccgcggacggtttgctgagcccgttagtgcgcccggccgagacacgccgccgccatgtcccgctacctgcgtccccccaacacgtctctgttcgtcaggaacgtggccgacgacaccaggtctgaagacttgcggcgtgaatttggtcgttatggtcctatagttgatgtgtatgttccacttgatttctacactcgccgtccaagaggatttgcttatgttcaatttgaggatgttcgtgatgctgaagacgctttacataatttggacagaaagtggatttgtggacggcagattgaaatacagtttgcccagggggatcgaaagacaccaaatcagatgaaagccaaggaagggaggaatgtgtacagttcttcacgctatgatgattatgacagatacagacgttctagaagccgaagttatgaaaggaggagatcaagaagtcggtcttttgattacaactatagaagatcgtatagtcctagaaacagtagaccgactggaagaccacggcgtagcagaagccattccgacaatgatagattcaaacaccgaaatcgatctttttcaagatctaaatccaattcaagatcacggtccaagtcccagcccaagaaagaaatgaaggctaaatcacgttctaggtctgcatctcacaccaaaactagaggcacctctaaaacagattccaaaacacattataagtctggctcaagatatgaaaaggaatcaaggaaaaaagaaccacctagatccaaatctcagtcaagatcacagtctaggtctaggtcaaaatctagatcaaggtcttggactagtcctaagtccagtggccactgatagtataaaccatggtcatttttaggcatgtatcattcatttactcatagtttggtgtgaggtgcagacctagaacgtgatttagccttcatttctttcttgggctgggacttggaccgtgatcttgaattggatttagatcttgagtcgacgcggtctcgaattcattagtagcagatcgac

SEQ ID NO: 328677 - DNA, 886 bp, Homo sapiens
  misc_feature (34)..(34): n is a, c, g, or t
tccttgaggtatccccaatcgttcatatagcggngggaggcctgcttttcacacctcagtttatttaatacgaggcaagttgtaagacaacactcattctaggtgattctgtggtgccatgaaatttaaggtaatttggggaaaaggattagtcagttttaagcaagagtcacatcttttgagctttcgattatcagtgtagtacctgactaaaaatgaagtaatacccttaaaccatttataatttctagtatttctctgaaagatcgttttggggacaaaagtgacttgacatgtccaatttcatttcagaataaaaagctagcatctttaaaaatctcagattgcttgcttacagatacaagtaagaattatggacaaacgattccttttagaggattacttttttcaatttcggttttagtaatctaggctttgcctgtaaagaatacaacgatggattttaaatactgtttgtggaatgtgtttaaaggattgattctagaacctttgtatatttgatagtatttctaactttcatttctttactgtttgcagttaatgttcatgttctgctatgcaatcgtttatatgcacgtttctttaatttttttagattttcctggatgtatagtttaaacaacaaaaagtctatttaaaactgtagcagtagtttacagttctagcaaagaggaaagttgtggggttaaactttgtattttctttcttatagaggcttctaaaaaggtatttttatatgttctttttaacaaatattgtgtacaacctttaaaacatcaatgtttggatcaaaacaagacccagcttattttctgcttgctgtaaattaagcaaacatgctataataaaaacaaaatgaaggaaa

SEQ ID NO: 328678 - DNA, 1068 bp, Homo sapiens
acgcctggtgttctcgcgggaaagaaccgttgcgcccgactttgcgcggaggtaggagggggaagtggaggcgggagtgaagtctcgcgagaagagtcggttgccgtagcagagccctctagctgtgtgtgtctgaggctcggccgcctgagccgcggacggtttgctgagcccgttagtgcgcccggccgagacacgccgccgccatgtcccgctacctgcgtccccccaacacgtctctgttcgtcaggaacgtggccgacgacaccaggtctgaagacttgcggcgtgaatttggtcgttatggtcctatagttgatgtgtatgttccacttgatttctacactcgccgtccaagaggatttgcttatgttcaatatcctttcttcagatggctgattagtgaggggtgttgaagtttgaaattcaagtttatagaatgtaaagctgtacagttatggcgaccccaaagagaaagcatgaaagaacctttagagtagagttcaacacttaaggcaagtagacaagccaaagacctcttaaggatcaggcttgaagagaagggagagtttgggaaaagaaaaaataaagaaaagctggaagaaggacaagcctaatgggagacaaagcctcgctttatctacaaaagggggaaaaggttgtttttcaaagttaaagataaagccatctgtcatatttggccaagcatctcatgacaagtccttctgacaagcacttaaagagttaaaggtcaagatgaagttgaatgatggccaagattaaaggagtcatacctgatatttgaggatgttcgtgatgctgaagacgctttacataatttggacagaaagtggatttgtggacggcagattgaaatacagtttgcccagggggatcgaaagacaccaaatcagatgaaagccaaggaagggaggaatgtgtacagttcttcacgctatgatgattatgaagaggatgaggaagatgatgatgatgatgaagatgacacagggatgggagatgagggtgaagatagtaatgaaggaactggcactgcctcaaacaatg

SEQ ID NO: 328679 - DNA, 1611 bp, Homo sapiens
acgcctggtgttctcgcgggaaagaaccgttgcgcccgactttgcgcggaggtaggagggggaagtggaggcgggagtgaagtctcgcgagaagagtcggttgccgtagcagagccctctagctgtgtgtgtctgaggctcggccgcctgagccgcggacggtttgctgagcccgttagtgcgcccggccgagacacgccgccgccatgtcccgctacctgcgtccccccaacacgtctctgttcgtcaggaacgtggccgacgacaccaggtctgaagacttgcggcgtgaatttggtcgttatggtcctatagttgatgtgtatgttccacttgatttctacactcgccgtccaagaggatttgcttatgttcaatatcctttcttcagatggctgattagtgaggggtgttgaagtttgaaattcaagtttatagaatgtaaagctgtacagttatggcgaccccaaagagaaagcatgaaagaacctttagagtagagttcaacacttaaggcaagtagacaagccaaagacctcttaaggatcaggcttgaagagaagggagagtttgggaaaagaaaaaataaagaaaagctggaagaaggacaagcctaatgggagacaaagcctcgctttatctacaaaagggggaaaaggttgtttttcaaagttaaagataaagccatctgtcatatttggccaagcatctcatgacaagtccttctgacaagcacttaaagagttaaaggtcaagatgaagttgaatgatggccaagattaaaggagtcatacctgatgtatcctacagaataactatttttcttttttttttttttaatgttttgtaagcagttaattttcaaaattattctggtttggtctagtgacaaaacctgtaacttgatttatgtgggcctttgatgttgtgattgtggtcttgtgtaaatgcactctctcttatgaagttaaagtgtaacaggatgtatattcttaagattaaattcagcatattttggttttggaccaggtggtcagatgccacggagtagcaggcagtgctctttggagtagcgtggggttctggggttaagccacagagccctgcttaaaggagagacaggtgcatgcactggggactacttagaaacagctctggtggtcttgtagggtcagaaccactagaaattttgtttatatatagattttaaagtggttgctggggacacatataaacccttaacttctttaacttagcccagtgatcaaggacagttgtgagaattggttgcaaagctccattacagagaaaataatagctatatctggcttagtaaataaaggtagcagtgcgttctggcttacaacatagacctcattttacctagtgttgggtggccgaggaatcaaggtcagtagtagtttgattcaagagtgtgtgatatttgaggcaaaaaaggctagtaattcaaagcaatctaaaggagaatgataattttaaaatacatattcagtaagtctatggttttaaaatagttgaaaagaaataagtaacaggcttatgaatttcatttttgtgcctctgctgctgctgtctcttctgtctgactcc

SEQ ID NO: 328680 - DNA, 429 bp, Homo sapiens
ccttttatgaaaaatgacggctgtagataaaaataagttgtggtcattcccttgtaccatacatatgtctgctgttgtcctgttaatgtaaactgcatttttatcttccaaattcttggatcctagctttccttcatcaaaaagatatattgcctatacatcttaaggacttggacataaaaatttgaggtctttttatgatgttttaggtctgaagacttgcggcgtgaatttggtcgttatggtcctatagttgatgtgtatgttccacttgatttctacactcgccgtccaagaggatttgcttatgttcaatatcctttcttcagatggctgattagtgaggggtgttgaagtttgaaattcaagtttatgtaagtggtaacatctaaaaagtagttctttttgtcctctaataaatgtctgtct

SEQ ID NO: 328681 - DNA, 3058 bp, Homo sapiens
acgcctggtgttctcgcgggaaagaaccgttgcgcccgactttgcgcggaggtaggagggggaagtggaggcgggagtgaagtctcgcgagaagagtcggttgccgtagcagagccctctagctgtgtgtgtctgaggctcggccgcctgagccgcggacggtttgctgagcccgttagtgcgcccggccgagacacgccgccgccatgtcccgctacctgcgtccccccaacacgtctctgttcgtcaggaacgtggccgacgacaccaggtctgaagacttgcggcgtgaatttggtcgttatggtcctatagttgatgtgtatgttccacttgatttctacactcgccgtccaagaggatttgcttatgttcaatttgaggatgttcgtgatgctgaagacgctttacataatttggacagaaagtggatttgtggacggcagattgaaatacagtttgcccagggggatcgaaagacaccaaatcagatgaaagccaaggaagggaggaatgtgtacagttcttcacgctatgatgattatgacagatacagacgttctagaagccgaagttatgaaaggaggagatcaagaagtcggtcttttgattacaactatagaagatcgtatagtcctagaaacagtagaccgactggaagaccacggcgtagcagaagccattccgacaatgatagattcaaacaccgaaatcgatctttttcaagatctaaatccaattcaagatcacggtccaagtcccagcccaagaaagaaatgaaggctaaatcacgttctaggtctgcatctcacaccaaaactagaggcacctctaaaacagattccaaaacacattataagtctggctcaagatatgaaaaggaatcaaggaaaaaagaaccacctagatccaaatctcagtcaagatcacagtctaggtctaggtcaaaatctagatcaaggtcttggactagtcctaagtccagtggccactgatagtataaaccatggtcatttttaggcatgtatcattcatttactcatagtttggtttacttaaattatcaggaatacaatgttgcaatgatgcttaaaaaacacttgttagttttccctgtaccaggcaatggttataattaaaatgatatgctgttgagaagccactcttaagagtccagtttgtttaatgttatgggcagctaccaatttgtggtgtctctgtatatttttgtaaagattctcattttttatgcttgaagtatttggtgaaaagatgttggttgaccataatttgcaacattgtctcattaaaaataaactttcatattcatatttggtagaactgttaacctagaaatgtagcttgctaataagatagaatgatacaaaagtgaagtagtagccacagtacaacactgactgctcagacacatttaggttcagggtggacctttatgtcttgtcaagatgtctaggcccggctgggcgtggtggctcacacctgtaatcccagcactttgggaggccgaggcgggcggatcacgaggtcaggagttcgagaccagcctgaccaacacggtgaaaccccgtctctactaaaaatacaaaaattatccgggcatggtggcacatgcctgtaatctcagctactcaggaggctgaggcaagagaatcgcttgaacctgggaggtagaagttgcagtgagccaaaatcacgccactgcactccagcctgggcaacagagtgagactccgtctcaaaaaaaaaaaaaaaaccggatgtctaggccaatgataattatttttgatgcagtgtggattagttcttttgttaaccccactgtcttggggaatgatgccagctgggaaattgagtttttgactgaaacatggagccttcactgctttttttctggttcctatgaagatttggaacatagaaaacacaaaaactcaccttaaaatttgagcaggtcgttgatggcaaaaataattttaaggaaaaaggaatattcttatgtagttattctaaagtttaaggagcgttgttgaccataatattgcttagttttcttactgctgttaagtaagtaaattgtttcaaagtaggttttgtgtgtgtgtgcctagtgtaaaagaactgaaattttgatgcttacagcacttggctcgtgcatttgtatcaaaatttgcctgcctctttatgagggaggcctgcttttcacacctcagtttatttaatacgaggcaagttgtaagacaacactcattctaggtgattctgtggtgccatgaaatttaaggtaatttggggaaaaggattagtcagttttaagcaagagtcacatcttttgagctttcgattatcagtgtagtacctgactaaaaatgaagtaatacccttaaaccatttataatttctagtatttctctgaaagatcgttttggggacaaaagtgacttgacatgtccaatttcatttcagaataaaaagctagcatctttaaaaatctcagattgcttgcttacagatacaagtaagaattatggacaaacgattccttttagaggattacttttttcaatttcggttttagtaatctaggctttgcctgtaaagaatacaacgatggattttaaatactgtttgtggaatgtgtttaaaggattgattctagaacctttgtatatttgatagtatttctaactttcatttctttactgtttgcagttaatgttcatgttctgctatgcaatcgtttatatgcacgtttctttaatttttttagattttcctggatgtatagtttaaacaacaaaaagtctatttaaaactgtagcagtagtttacagttctagcaaagaggaaagttgtggggttaaactttgtattttctttcttatagaggcttctaaaaaggtatttttatatgttctttttaacaaatattgtgtacaacctttaaaacatcaatgtttggatcaaaacaagacccagcttattttctgcttgctgtaaattaagcaaacatgctataataaaaacaaaatgaaggaaa

SEQ ID NO: 328682 - DNA, 965 bp, Homo sapiens
acgcctggtgttctcgcgggaaagaaccgttgcgcccgactttgcgcggaggtaggagggggaagtggaggcgggagtgaagtctcgcgagaagagtcggttgccgtagcagagccctctagctgtgtgtgtctgaggctcggccgcctgagccgcggacggtttgctgagcccgttagtgcgcccggccgagacacgccgccgccatgtcccgctacctgcgtccccccaacacgtctctgttcgtcaggaacgtggccgacgacaccaggtctgaagacttgcggcgtgaatttggtcgttatggtcctatagttgatgtgtatgttccacttgatttctacactcgccgtccaagaggatttgcttatgttcaatttgaggatgttcgtgatgctgaagacgctttacataatttggacagaaagtggatttgtggacggcagattgaaatacagtttgcccagggggatcgaaagacaccaaatcagatgaaagccaaggaagggaggaatgtgtacagttcttcacgctatgatgattatgacagatacagacgttctagaagccgaagttatgaaaggaggagatcaagaagtcggtcttttgattacaactatagaagatcgtatagtcctagaaacagtagaccgactggaagaccacggcgtagcagaagccattccgacaatgatagaccaaactgcagctggaatacccagtacagttctgcttactacacttcaagaaagatctgaaagcggaaaaagaaccaaagaagggcagttcaagcgaccaaagggtgggtggaaggtgctgcagtatgaatactgtacgaatattttgactctggtctgaaaagataaaagaatgttatcgaaaactacatggaataattgaagtcccttcaagtttgaaagtaagcattttaggacaaataaaaggaaattcaactttgtacttgt

SEQ ID NO: 328683 - DNA, 717 bp, Homo sapiens
  misc_feature (8)..(8): n is a, c, g, or t
  misc_feature (66)..(66): n is a, c, g, or t
  misc_feature (78)..(78): n is a, c, g, or t
  misc_feature (96)..(96): n is a, c, g, or t
  misc_feature (101)..(101): n is a, c, g, or t
  misc_feature (110)..(111): n is a, c, g, or t
  misc_feature (174)..(174): n is a, c, g, or t
  misc_feature (178)..(178): n is a, c, g, or t
  misc_feature (193)..(193): n is a, c, g, or t
  misc_feature (195)..(195): n is a, c, g, or t
  misc_feature (197)..(197): n is a, c, g, or t
  misc_feature (227)..(227): n is a, c, g, or t
  misc_feature (279)..(279): n is a, c, g, or t
ctattccngaagcggtacttcgaaggcatttcttgtggctcatagacatgagctgtgagaggggcnggcacaaaagcntgcagtgccgcagcctgnaagancagtgctgnnatgtggtgaccactggatccagaaaaggtgaagaagggcgtcaaagaaatgacgccaccctcngtgngctgtggctacctcncngnctgccgggctcccaatggtttccacaacancgacaccttccacttcctgaaatgctgcaacccaccaaatgcaacgagggcncaatcctggagcttgaaaatctgccgcagcatttcaggaagtggaaggtgtcgtgttatctgccatttaaaagtatccagtatttgatcacattattataaataatgaaaaaatgatttaatctgtaataaactggtttattgtgcagtgactgtaatatactagagttataataaattgtttactctgcctcaccaaacacatgctaggatataacccccaaaataagtatttaactttgcattaggtataaaggagactgggtgctataattagattattttgaggcagacagagagctgttatcctaactgatttagtatgttctgtaattgagaaaatgttcaccaaattatactttttagtgatttacatgtacattttataggggacatgttctgtgtatagcgaataaataacttttatagtatcacaaaa

SEQ ID NO: 328684 - DNA, 3787 bp, Homo sapiens
acgcctggtgttctcgcgggaaagaaccgttgcgcccgactttgcgcggaggtaggagggggaagtggaggcgggagtgaagtctcgcgagaagagtcggttgccgtagcagagccctctagctgtgtgtgtctgaggctcggccgcctgagccgcggacggtttgctgagcccgttagtgcgcccggccgagacacgccgccgccatgtcccgctacctgcgtccccccaacacgtctctgttcgtcaggaacgtggccgacgacaccaggtctgaagacttgcggcgtgaatttggtcgttatggtcctatagttgatgtgtatgttccacttgatttctacactcgccgtccaagaggatttgcttatgttcaatttgaggatgttcgtgatgctgaagacgctttacataatttggacagaaagtggatttgtggacggcagattgaaatacagtttgcccagggggatcgaaagacaccaaatcagatgaaagccaaggaagggaggaatgtgtacagttcttcacgctatgatgattatgacagatacagacgttctagaagccgaagttatgaaaggaggagatcaagaagtcggtcttttgattacaactatagaagatcgtatagtcctagaaacagtagaccgactggaagaccacggcgtagcagaagccattccgacaatgatagattcaaacaccgaaatcgatctttttcaagatctaaatccaattcaagatcacggtccaagtcccagcccaagaaagaaatgaaggctaaatcacgttctaggtctgcatctcacaccaaaactagaggcacctctaaaacagattccaaaacacattataagtctggctcaagatatgaaaaggaatcaaggaaaaaagaaccacctagatccaaatctcagtcaagatcacagtctaggtctaggtcaaaatctagatcaaggtcttggactagtcctaagtccagtggccactgatagtataaaccatggtcatttttaggcatgtatcattcatttactcatagtttggtttacttaaattatcaggaatacaatgttgcaatgatgcttaaaaaacacttgttagttttccctgtaccaggcaatggttataattaaaatgatatgctgttgagaagccactcttaagagtccagtttgtttaatgttatgggcagctaccaatttgtggtgtctctgtatatttttgtaaagattctcattttttatgcttgaagtatttggtgaaaagatgttggttgaccataatttgcaacattgtctcattaaaaataaactttcatattcatatttggtagaactgttaacctagaaatgtagcttgctaataagatagaatgatacaaaagtgaagtagtagccacagtacaacactgactgctcagacacatttaggttcagggtggacctttatgtcttgtcaagatgtctaggcccggctgggcgtggtggctcacacctgtaatcccagcactttgggaggccgaggcgggcggatcacgaggtcaggagttcgagaccagcctgaccaacacggtgaaaccccgtctctactaaaaatacaaaaattatccgggcatggtggcacatgcctgtaatctcagctactcaggaggctgaggcaagagaatcgcttgaacctgggaggtagaagttgcagtgagccaaaatcacgccactgcactccagcctgggcaacagagtgagactccgtctcaaaaaaaaaaaaaaaaccggatgtctaggccaatgataattatttttgatgcagtgtggattagttcttttgttaaccccactgtcttggggaatgatgccagctgggaaattgagtttttgactgaaacatggagccttcactgctttttttctggttcctatgaagatttggaacatagaaaacacaaaaactcaccttaaaatttgagcaggtcgttgatggcaaaaataattttaaggaaaaaggaatattcttatgtagttattctaaagtttaaggagcgttgttgaccataatattgcttagttttcttactgctgttaagtaagtaaattgtttcaaagtaggttttgtgtgtgtgtgcctagtgtaaaagaactgaaattttgatgcttacagcacttggctcgtgcatttgtatcaaaatttgcctgcctctttatgagggaggcctgcttttcacacctcagtttatttaatacgaggcaagttgtaagacaacactcattctaggtgattctgtggtgccatgaaatttaaggtaatttggggaaaaggattagtcagttttaagcaagagtcacatcttttgagctttcgattatcagtgtagtacctgactaaaaatgaagtaatacccttaaaccatttataatttctagtatttctctgaaagatcgttttggggacaaaagtgacttgacatgtccaatttcatttcagaataaaaagctagcatctttaaaaatctcagattgcttgcttacagatacaagtaagaattatggacaaacgattccttttagaggattacttttttcaatttcggttttagtaatctaggctttgcctgtaaagaatacaacgatggattttaaatactgtttgtggaatgtgtttaaaggattgattctagaacctttgtatatttgatagtatttctaactttcatttctttactgtttgcagttaatgttcatgttctgctatgcaatcgtttatatgcacgtttctttaatttttttagattttcctggatgtatagtttaaacaacaaaaagtctatttaaaactgtagcagtagtttacagttctagcaaagaggaaagttgtggggttaaactttgtattttctttcttatagaggcttctaaaaaggtatttttatatgttctttttaacaaatattgtgtacaacctttaaaacatcaatgtttggatcaaaacaagacccagcttattttctgcttgctgtaaattaagcaaacatgctataataaaaacaaaatgaaggaaaaacaaaaaaaagaaaaaaaaaaaaaaaaaaaaaaaaaaaaaaacaaaaaaaaagcaagaagaaaaaaaaaagaaacaaaaaaaaacaaaaacgcgcgggggccccccccccccccgacatcgtcccaaccccgcggggggcacccgcgcccacactgatactcagaaaaccaacgacgcaccattatcactgcgagccaaaccatccctggactttgcaaacgaaggcgaggctggggggatccccgacacaaaaaaaaccagcggaggggtcgggacaccgacttgtgtatccaacaccaaatcgacaggagtagtacaacgaccgactcccacggtatacacaaacgcacggaaccgacaggcagaataataataaactccccgccccgtcaggggaacacacaccaaaaaccaacacaacaccgccgcggacccaccccggtgcagagcgcgcaacacagacagggggcgagagaccacatggtacgaagccgaagcggagtggaggacatcccgcggcaggagcaggcggggagacgtagcgccggcggcagcaccgacatcgcacctaggagcacagagagcatacgaggaggagaacgggagaggggctacagcgatagccgagcgaggaggaagcatcgcaaggccagatacaagcagagcagagcgaaaggggaagaacaaagcacataacagacaaagcgctgcgtagtccacgcgcagc

SEQ ID NO: 328685 - DNA, 3004 bp, Homo sapiens
acgcctggtgttctcgcgggaaagaaccgttgcgcccgactttgcgcggaggtaggagggggaagtggaggcgggagtgaagtctcgcgagaagagtcggttgccgtagcagagccctctagctgtgtgtgtctgaggctcggccgcctgagccgcggacggtttgctgagcccgttagtgcgcccggccgagacacgccgccgccatgtcccgctacctgcgtccccccaacacgtctctgttcgtcaggaacgtggccgacgacaccaggtctgaagacttgcggcgtgaatttggtcgttatggtcctatagttgatgtgtatgttccacttgatttctacactcgccgtccaagaggatttgcttatgttcaatttgaggatgttcgtgatgctgaagacgctttacataatttggacagaaagtggatttgtggacggcagattgaaatacagtttgcccagggggatcgaaagacaccaaatcagatgaaagccaaggaagggaggaatgtgtacagttcttcacgctatgatgattatgacagatacagacgttctagaagccgaagttatgaaaggaggagatcaagaagtcggtcttttgattacaactatagaagatcgtatagtcctagaaacagtagaccgactggaagaccacggcgtagcagaagccattccgacaatgatagattcaaacaccgaaatcgatctttttcaagatctaaatccaattcaagatcacggtccaagtcccagcccaagaaagaaatgaaggctaaatcacgttctaggtctgcatctcacaccaaaactagaggcacctctaaaacagattccaaaacacattataagtctggctcaagatatgaaaaggaatcaaggaaaaaagaaccacctagatccaaatctcagtcaagatcacagtctaggtctaggtcaaaatctagatcaaggtcttggactagtcctaagtccagtggccactgatagtataaaccatggtcatttttaggcatgtatcattcatttactcatagtttggtttacttaaattatcaggaatacaatgttgcaatgatgcttaaaaaacacttgttagttttccctgtaccaggcaatggttataattaaaatgatatgctgttgagaagccactcttaagagtccagtttgtttaatgttatgggcagctaccaatttgtggtgtctctgtatatttttgtaaagattctcattttttatgcttgaagtatttggtgaaaagatgttggttgaccataatttgcaacattgtctcattaaaaataaactttcatattcatatttggtagaactgttaacctagaaatgtagcttgctaataagatagaatgatacaaaagtgaagtagtagccacagtacaacactgactgctcagacacatttaggttcagggtggacctttatgtcttgtcaagatgtctaggcccggctgggcgtggtggctcacacctgtaatcccagcactttgggaggccgaggcgggcggatcacgaggtcaggagttcgagaccagcctgaccaacacggtgaaaccccgtctctactaaaaatacaaaaattatccgggcatggtggcacatgcctgtaatctcagctactcaggaggctgaggcaagagaatcgcttgaacctgggaggtagaagttgcagtgagccaaaatcacgccactgcactccagcctgggcaacagagtgagactccgtctcaaaaaaaaaaaaaaaaccggatgtctaggccaatgataattatttttgatgcagtgtggattagttcttttgttaaccccactgtcttggggaatgatgccagctgggaaattgagtttttgactgaaacatggagccttcactgctttttttctggttcctatgaagatttggaacatagaaaacacaaaaactcaccttaaaatttgagcaggtcgttgatggcaaaaataattttaaggaaaaaggaatattcttatgtagttattctaaagtttaaggagcgttgttgaccataatattgcttagttttcttactgctgttaagtaagtaaattgtttcaaagtaggttttgtgtgtgtgtgcctagtgtaaaagaactgaaattttgatgcttacagcacttggctcgtgcatttgtatcaaaatttgcctgcctctttatgagggaggcctgcttttcacacctcagtttatttaatacgaggcaagttgtaagacaacactcattctaggtgattctgtggtgccatgaaatttaaggtaatttggggaaaaggattagtcagttttaagcaagagtcacatcttttgagctttcgattatcagtgtagtacctgactaaaaatgaagtaatacccttaaaccatttataatttctagtatttctctgaaagatcgttttggggacaaaagtgacttgacatgtccaatttcatttcagaataaaaagctagcatctttaccttttagaggattacttttttcaatttcggttttagtaatctaggctttgcctgtaaagaatacaacgatggattttaaatactgtttgtggaatgtgtttaaaggattgattctagaacctttgtatatttgatagtatttctaactttcatttctttactgtttgcagttaatgttcatgttctgctatgcaatcgtttatatgcacgtttctttaatttttttagattttcctggatgtatagtttaaacaacaaaaagtctatttaaaactgtagcagtagtttacagttctagcaaagaggaaagttgtggggttaaactttgtattttctttcttatagaggcttctaaaaaggtatttttatatgttctttttaacaaatattgtgtacaacctttaaaacatcaatgtttggatcaaaacaagacccagcttattttctgcttgctgtaaattaagcaaacatgctataataaaaacaaaatgaaggaaa

SEQ ID NO: 328686 - DNA, 3608 bp, Homo sapiens
acgcctggtgttctcgcgggaaagaaccgttgcgcccgactttgcgcggaggtaggagggggaagtggaggcgggagtgaagtctcgcgagaagagtcggttgccgtagcagagccctctagctgtgtgtgtctgaggctcggccgcctgagccgcggacggtttgctgagcccgttagtgcgcccggccgagacacgccgccgccatgtcccgctacctgcgtccccccaacacgtctctgttcgtcaggaacgtggccgacgacaccaggtctgaagacttgcggcgtgaatttggtcgttatggtcctatagttgatgtgtatgttccacttgatttctacactcgccgtccaagaggatttgcttatgttcaatttgaggatgttcgtgatgctgaagacgctttacataatttggacagaaagtggatttgtggacggcagattgaaatacagtttgcccagggggatcgaaagacaccaaatcagatgaaagccaaggaagggaggaatgtgtacagttcttcacgctatgatgattatgacagatacagacgttctagaagccgaagttatgaaaggaggagatcaagaagtcggtcttttgattacaactatagaagatcgtatagtcctagaaacagtagaccgactggaagaccacggcgtagcagaagccattccgacaatgatagaccaaactgcagctggaatacccagtacagttctgcttactacacttcaagaaagatctgaaagcggaaaaagaaccaaagaagggcagttcaagcgaccaaagggtgggtggaaggtgctgcagtatgaatactgtacgaatattttgactctggtctgaaaagataaaagaatgttatcgaaaactacatggaataattgaagtcccttcaagtttgaaagtaagcattttaggacaaataaaaggaaattcaactttgtacttgtggaaactaatccctaaatatgaataggtttatattgattcatgggtaacaggtccataataaattattggaaactaggatgtctgaatatcaaggaagacagccatagtctcttacagtgcctctgttggtctgtctcaaactgaattgggtgggaaaaggtatggtccaatataaaagttccatttttgccattattggcaaatcttgcctttgtttattttggtgccagtgttttctgcttaatcatttgctttgttggcatctgtgtttatttacttgtacaccacatgcagtttacatctgtcttaactactccttcccaggtaaattccaattatatttgacatccagctaagagggcccatctcttctcacctctttcctagtcagtatattcagcaaatatttattgagcccttactgtgggcaaatcattgtactggataattgagaaaaatagataattcccttattcagtaaatgtctactgagcacaatctagtgaatcattacagtatggcctcattgttttgtttgaggtgtgttattcataacaatattttacaccattcgtatcaatgtaattatagaacacaatatacgatcaaggataagtaattgtgtggttatctgccatttaaaagtatccagtatttgatcacattattataaataatgaaaaaatgatttaatctgtaataaactggtttattgtgcagtgactgtaatatactagagttataataaattgtttactctgcctcaccaaacacatgctaggatataacccccaaaataagtatttaactttgcattaggtataaaggagactgggtgctataattagattattttgaggcagacagagagctgttatcctaactgatttagtatgttctgtaattgagaaaatgttcaccaaattatactttttagtgatttacatgtacattttataggggacatgttctgtgtatagcgaataaataacttttatagtatcacaaaatgttttggattccttagtttcttattaggatatgatgtttctttacctatacattgatttcatcacatttgattttgtcatcttttttgccacatacttaaaactttccatataaaattaactaaaaatctggaagtggaatttaagcttttaatttgtagcaattttgaaaatatagcagaggtatattttcaagggaggtgtgaaatggaggtattattgtttgtattttattttagaaattttgtttgaacttgcccaagatcacacagcaagtgtcagatcctaggttacagcccataatttttcacttgtttcatcttttgttaccatgtttgttgtttaatccaatggggaagtgtttttatagctttattttcatggagatagtaacattgatataatgggatctagaatttacttagagtcaaagtgactagatttaattacaaaaagtattttgttgtataccgttatacactcattaacataggggttcttatggacagaggttctatgtatttttaaaagaatatgtagaggctatagacttttttgccctctacctcccttctccatttccttttgaagttaagacatttaagggggagaattaaggtgcatattgagttggggttttgtttaaaaaaaattaggtaaatacatatataactacaataacaacagttggtagttctctaaaatatttaattatggtaaatcagaaaaggccctttaatttttgcatctgttgaatgaattgctttaggatctcttctgtggttgtttctctttatactgaatgctgtcaatattattgagcacttactgtgccgaaccatgtgcttttcaaatatttctatttaatcctaaaaacactcctgggaaatgggtattattcccattttacagatgagaaaattgtcctttgtagaatacccatcatgtgatagcttcttgcatattatgctattcatttctcacaaccttacaaggtaaatggataatgttcctggatgagagattaaacgtactcgaagatcttatggttgtgtggctcagagactctaagcatggctttccaaatctcattctcttgtagagattttccattgtattgcattttgaccatgttcctgtttacaaaacctaagattatattctgaagtatctgtgacttgagtgatagctcaggaataatctgagggcattctattaggaaggaggactagcaaagcctatagttagcctatcctaggcatgaactattctcattttagataggatgacttgataaataggatgaagtgagcaacctgtttgtcttcggttattggtatctacaagacattctgctagtcactgtggaaaagtttccttctcttgggttttttcctcttccccttcctcttaacagtgttggttatctttattatgtttctgtgtatttgtaacagctgtttcacccttgtattgcataatggggatttttcttggaataaaaagtgaggcatgtaaattcattgagaactaaccgtagtttgtaaagaagtaaaaggcctttgtatctagttttttgcagatcacatttctttgaatgctggaaagtgaaataaactggtctaggagcca

SEQ ID NO: 328687 - DNA, 3481 bp, Homo sapiens
acgcctggtgttctcgcgggaaagaaccgttgcgcccgactttgcgcggaggtaggagggggaagtggaggcgggagtgaagtctcgcgagaagagtcggttgccgtagcagagccctctagctgtgtgtgtctgaggctcggccgcctgagccgcggacggtttgctgagcccgttagtgcgcccggccgagacacgccgccgccatgtcccgctacctgcgtccccccaacacgtctctgttcgtcaggaacgtggccgacgacaccaggtctgaagacttgcggcgtgaatttggtcgttatggtcctatagttgatgtgtatgttccacttgatttctacactcgccgtccaagaggatttgcttatgttcaatatcctttcttcagatggctgattagtgaggggtgttgaagtttgaaattcaagtttatagaatgtaaagctgtacagttatggcgaccccaaagagaaagcatgaaagaacctttagagtagagttcaacacttaaggcaagtagacaagccaaagacctcttaaggatcaggcttgaagagaagggagagtttgggaaaagaaaaaataaagaaaagctggaagaaggacaagcctaatgggagacaaagcctcgctttatctacaaaagggggaaaaggttgtttttcaaagttaaagataaagccatctgtcatatttggccaagcatctcatgacaagtccttctgacaagcacttaaagagttaaaggtcaagatgaagttgaatgatggccaagattaaaggagtcatacctgatatttgaggatgttcgtgatgctgaagacgctttacataatttggacagaaagtggatttgtggacggcagattgaaatacagtttgcccagggggatcgaaagacaccaaatcagatgaaagccaaggaagggaggaatgtgtacagttcttcacgctatgatgattatgacagatacagacgttctagaagccgaagttatgaaaggaggagatcaagaagtcggtcttttgattacaactatagaagatcgtatagtcctagaaacagtagaccgactggaagaccacggcgtagcagaagccattccgacaatgatagattcaaacaccgaaatcgatctttttcaagatctaaatccaattcaagatcacggtccaagtcccagcccaagaaagaaatgaaggctaaatcacgttctaggtctgcatctcacaccaaaactagaggcacctctaaaacagattccaaaacacattataagtctggctcaagatatgaaaaggaatcaaggaaaaaagaaccacctagatccaaatctcagtcaagatcacagtctaggtctaggtcaaaatctagatcaaggtcttggactagtcctaagtccagtggccactgatagtataaaccatggtcatttttaggcatgtatcattcatttactcatagtttggtttacttaaattatcaggaatacaatgttgcaatgatgcttaaaaaacacttgttagttttccctgtaccaggcaatggttataattaaaatgatatgctgttgagaagccactcttaagagtccagtttgtttaatgttatgggcagctaccaatttgtggtgtctctgtatatttttgtaaagattctcattttttatgcttgaagtatttggtgaaaagatgttggttgaccataatttgcaacattgtctcattaaaaataaactttcatattcatatttggtagaactgttaacctagaaatgtagcttgctaataagatagaatgatacaaaagtgaagtagtagccacagtacaacactgactgctcagacacatttaggttcagggtggacctttatgtcttgtcaagatgtctaggcccggctgggcgtggtggctcacacctgtaatcccagcactttgggaggccgaggcgggcggatcacgaggtcaggagttcgagaccagcctgaccaacacggtgaaaccccgtctctactaaaaatacaaaaattatccgggcatggtggcacatgcctgtaatctcagctactcaggaggctgaggcaagagaatcgcttgaacctgggaggtagaagttgcagtgagccaaaatcacgccactgcactccagcctgggcaacagagtgagactccgtctcaaaaaaaaaaaaaaaaccggatgtctaggccaatgataattatttttgatgcagtgtggattagttcttttgttaaccccactgtcttggggaatgatgccagctgggaaattgagtttttgactgaaacatggagccttcactgctttttttctggttcctatgaagatttggaacatagaaaacacaaaaactcaccttaaaatttgagcaggtcgttgatggcaaaaataattttaaggaaaaaggaatattcttatgtagttattctaaagtttaaggagcgttgttgaccataatattgcttagttttcttactgctgttaagtaagtaaattgtttcaaagtaggttttgtgtgtgtgtgcctagtgtaaaagaactgaaattttgatgcttacagcacttggctcgtgcatttgtatcaaaatttgcctgcctctttatgagggaggcctgcttttcacacctcagtttatttaatacgaggcaagttgtaagacaacactcattctaggtgattctgtggtgccatgaaatttaaggtaatttggggaaaaggattagtcagttttaagcaagagtcacatcttttgagctttcgattatcagtgtagtacctgactaaaaatgaagtaatacccttaaaccatttataatttctagtatttctctgaaagatcgttttggggacaaaagtgacttgacatgtccaatttcatttcagaataaaaagctagcatctttaaaaatctcagattgcttgcttacagatacaagtaagaattatggacaaacgattccttttagaggattacttttttcaatttcggttttagtaatctaggctttgcctgtaaagaatacaacgatggattttaaatactgtttgtggaatgtgtttaaaggattgattctagaacctttgtatatttgatagtatttctaactttcatttctttactgtttgcagttaatgttcatgttctgctatgcaatcgtttatatgcacgtttctttaatttttttagattttcctggatgtatagtttaaacaacaaaaagtctatttaaaactgtagcagtagtttacagttctagcaaagaggaaagttgtggggttaaactttgtattttctttcttatagaggcttctaaaaaggtatttttatatgttctttttaacaaatattgtgtacaacctttaaaacatcaatgtttggatcaaaacaagacccagcttattttctgcttgctgtaaattaagcaaacatgctataataaaaacaaaatgaaggaaa

SEQ ID NO: 328688 - DNA, 3191 bp, Homo sapiens
acgcctggtgttctcgcgggaaagaaccgttgcgcccgactttgcgcggaggtaggagggggaagtggaggcgggagtgaagtctcgcgagaagagtcggttgccgtagcagagccctctagctgtgtgtgtctgaggctcggccgcctgagccgcggacggtttgctgagcccgttagtgcgcccggccgagacacgccgccgccatgtcccgctacctgcgtccccccaacacgtctctgttcgtcaggaacgtggccgacgacaccaggtctgaagacttgcggcgtgaatttggtcgttatggtcctatagttgatgtgtatgttccacttgatttctacactcgccgtccaagaggatttgcttatgttcaatttgaggatgttcgtgatgctgaagacgctttacataatttggacagaaagtggatttgtggacggcagattgaaatacagtttgcccagggggatcgaaagacaccaaatcagatgaaagccaaggaagggaggaatgtgtacagttcttcacgctatgatgattatgacagatacagacgttctagaagccgaagttatgaaaggaggagatcaagaagtcggtcttttgattacaactatagaagatcgtatagtcctagaaacagtagaccgactggaagaccacggcgtagcagaagccattccgacaatgataggtaaataactttgctttgaaaaagactcatgtattttttaatttcagagtgaacttttgctctaaaaataacaaatttgattactatagaatctaatttttactctaattatatctctcctctgttttgaaagattcaaacaccgaaatcgatctttttcaagatctaaatccaattcaagatcacggtccaagtcccagcccaagaaagaaatgaaggctaaatcacgttctaggtctgcatctcacaccaaaactagaggcacctctaaaacagattccaaaacacattataagtctggctcaagatatgaaaaggaatcaaggaaaaaagaaccacctagatccaaatctcagtcaagatcacagtctaggtctaggtcaaaatctagatcaaggtcttggactagtcctaagtccagtggccactgatagtataaaccatggtcatttttaggcatgtatcattcatttactcatagtttggtttacttaaattatcaggaatacaatgttgcaatgatgcttaaaaaacacttgttagttttccctgtaccaggcaatggttataattaaaatgatatgctgttgagaagccactcttaagagtccagtttgtttaatgttatgggcagctaccaatttgtggtgtctctgtatatttttgtaaagattctcattttttatgcttgaagtatttggtgaaaagatgttggttgaccataatttgcaacattgtctcattaaaaataaactttcatattcatatttggtagaactgttaacctagaaatgtagcttgctaataagatagaatgatacaaaagtgaagtagtagccacagtacaacactgactgctcagacacatttaggttcagggtggacctttatgtcttgtcaagatgtctaggcccggctgggcgtggtggctcacacctgtaatcccagcactttgggaggccgaggcgggcggatcacgaggtcaggagttcgagaccagcctgaccaacacggtgaaaccccgtctctactaaaaatacaaaaattatccgggcatggtggcacatgcctgtaatctcagctactcaggaggctgaggcaagagaatcgcttgaacctgggaggtagaagttgcagtgagccaaaatcacgccactgcactccagcctgggcaacagagtgagactccgtctcaaaaaaaaaaaaaaaaccggatgtctaggccaatgataattatttttgatgcagtgtggattagttcttttgttaaccccactgtcttggggaatgatgccagctgggaaattgagtttttgactgaaacatggagccttcactgctttttttctggttcctatgaagatttggaacatagaaaacacaaaaactcaccttaaaatttgagcaggtcgttgatggcaaaaataattttaaggaaaaaggaatattcttatgtagttattctaaagtttaaggagcgttgttgaccataatattgcttagttttcttactgctgttaagtaagtaaattgtttcaaagtaggttttgtgtgtgtgtgcctagtgtaaaagaactgaaattttgatgcttacagcacttggctcgtgcatttgtatcaaaatttgcctgcctctttatgagggaggcctgcttttcacacctcagtttatttaatacgaggcaagttgtaagacaacactcattctaggtgattctgtggtgccatgaaatttaaggtaatttggggaaaaggattagtcagttttaagcaagagtcacatcttttgagctttcgattatcagtgtagtacctgactaaaaatgaagtaatacccttaaaccatttataatttctagtatttctctgaaagatcgttttggggacaaaagtgacttgacatgtccaatttcatttcagaataaaaagctagcatctttaaaaatctcagattgcttgcttacagatacaagtaagaattatggacaaacgattccttttagaggattacttttttcaatttcggttttagtaatctaggctttgcctgtaaagaatacaacgatggattttaaatactgtttgtggaatgtgtttaaaggattgattctagaacctttgtatatttgatagtatttctaactttcatttctttactgtttgcagttaatgttcatgttctgctatgcaatcgtttatatgcacgtttctttaatttttttagattttcctggatgtatagtttaaacaacaaaaagtctatttaaaactgtagcagtagtttacagttctagcaaagaggaaagttgtggggttaaactttgtattttctttcttatagaggcttctaaaaaggtatttttatatgttctttttaacaaatattgtgtacaacctttaaaacatcaatgtttggatcaaaacaagacccagcttattttctgcttgctgtaaattaagcaaacatgctataataaaaacaaaatgaaggaaa

SEQ ID NO: 328689 - DNA, 4496 bp, Homo sapiens
acgcctggtgttctcgcgggaaagaaccgttgcgcccgactttgcgcggaggtaggagggggaagtggaggcgggagtgaagtctcgcgagaagagtcggttgccgtagcagagccctctagctgtgtgtgtctgaggctcggccgcctgagccgcggacggtttgctgagcccgttagtgcgcccggccgagacacgccgccgccatgtcccgctacctgcgtccccccaacacgtctctgttcgtcaggaacgtggccgacgacaccaggtctgaagacttgcggcgtgaatttggtcgttatggtcctatagttgatgtgtatgttccacttgatttctacactcgccgtccaagaggatttgcttatgttcaatatcctttcttcagatggctgattagtgaggggtgttgaagtttgaaattcaagtttatagaatgtaaagctgtacagttatggcgaccccaaagagaaagcatgaaagaacctttagagtagagttcaacacttaaggcaagtagacaagccaaagacctcttaaggatcaggcttgaagagaagggagagtttgggaaaagaaaaaataaagaaaagctggaagaaggacaagcctaatgggagacaaagcctcgctttatctacaaaagggggaaaaggttgtttttcaaagttaaagataaagccatctgtcatatttggccaagcatctcatgacaagtccttctgacaagcacttaaagagttaaaggtcaagatgaagttgaatgatggccaagattaaaggagtcatacctgatatttgaggatgttcgtgatgctgaagacgctttacataatttggacagaaagtggatttgtggacggcagattgaaatacagtttgcccagggggatcgaaagacaccaaatcagatgaaagccaaggaagggaggaatgtgtacagttcttcacgctatgatgattatgacagatacagacgttctagaagccgaagttatgaaaggaggagatcaagaagtcggtcttttgattacaactatagaagatcgtatagtcctagaaacagtagaccgactggaagaccacggcgtagcagaagccattccgacaatgatagaccaaactgcagctggaatacccagtacagttctgcttactacacttcaagaaagatctgaaagcggaaaaagaaccaaagaagggcagttcaagcgaccaaagggtgggtggaaggtgctgcagtatgaatactgtacgaatattttgactctggtctgaaaagataaaagaatgttatcgaaaactacatggaataattgaagtcccttcaagtttgaaagtaagcattttaggacaaataaaaggaaattcaactttgtacttgtggaaactaatccctaaatatgaataggtttatattgattcatgggtaacaggtccataataaattattggaaactaggatgtctgaatatcaaggaagacagccatagtctcttacagtgcctctgttggtctgtctcaaactgaattgggtgggaaaaggtatggtccaatataaaagttccatttttgccattattggcaaatcttgcctttgtttattttggtgccagtgttttctgcttaatcatttgctttgttggcatctgtgtttatttacttgtacaccacatgcagtttacatctgtcttaactactccttcccaggtaaattccaattatatttgacatccagctaagagggcccatctcttctcacctctttcctagtcagtatattcagcaaatatttattgagcccttactgtgggcaaatcattgtactggataattgagaaaaatagataattcccttattcagtaaatgtctactgagcacaatctagtgaatcattacagtatggcctcattgttttgtttgaggtgtgttattcataacaatattttacaccattcgtatcaatgtaattatagaacacaatatacgatcaaggataagtaattgtgtggttatctgccatttaaaagtatccagtatttgatcacattattataaataatgaaaaaatgatttaatctgtaataaactggtttattgtgcagtgactgtaatatactagagttataataaattgtttactctgcctcaccaaacacatgctaggatataacccccaaaataagtatttaactttgcattaggtataaaggagactgggtgctataattagattattttgaggcagacagagagctgttatcctaactgatttagtatgttctgtaattgagaaaatgttcaccaaattatactttttagtgatttacatgtacattttataggggacatgttctgtgtatagcgaataaataacttttatagtatcacaaaatgttttggattccttagtttcttattaggatatgatgtttctttacctatacattgatttcatcacatttgattttgtcatcttttttgccacatacttaaaactttccatataaaattaactaaaaatctggaagtggaatttaagcttttaatttgtagcaattttgaaaatatagcagaggtatattttcaagggaggtgtgaaatggaggtattattgtttgtattttattttagaaattttgtttgaacttgcccaagatcacacagcaagtgtcagatcctaggttacagcccataatttttcacttgtttcatcttttgttaccatgtttgttgtttaatccaatggggaagtgtttttatagctttattttcatggagatagtaacattgatataatgggatctagaatttacttagagtcaaagtgactagatttaattacaaaaagtattttgttgtataccgttatacactcattaacataggggttcttatggacagaggttctatgtatttttaaaagaatatgtagaggctatagacttttttgccctctacctcccttctccatttccttttgaagttaagacatttaagggggagaattaaggtgcatattgagttggggttttgtttaaaaaaaattaggtaaatacatatataactacaataacaacagttggtagttctctaaaatatttaattatggtaaatcagaaaaggccctttaatttttgcatctgttgaatgaattgctttaggatctcttctgtggttgtttctctttatactgaatgctgtcaatattattgagcacttactgtgccgaaccatgtgcttttcaaatatttctatttaatcctaaaaacactcctgggaaatgggtattattcccattttacagatgagaaaattgtcctttgtagaatacccatcatgtgatagcttcttgcatattatgctattcatttctcacaaccttacaaggtaaatggataatgttcctggatgagagattaaacgtactcgaagatcttatggttgtgtggctcagagactctaagcatggctttccaaatctcattctcttgtagagattttccattgtattgcattttgaccatgttcctgtttacaaaacctaagattatattctgaagtatctgtgacttgagtgatagctcaggaataatctgagggcattctattaggaaggaggactagcaaagcctatagttagcctatcctaggcatgaactattctcattttagataggatgacttgataaataggatgaagtgagcaacctgtttgtcttcggttattggtatctacaagacattctgctagtcactgtggaaaagtttccttctcttgggttttttcctcttccccttcctcttaacagtgttggttatctttattatgtttctgtgtatttgtaacagctgtttcacccttgtattgcataatggggatttttcttggaataaaaagtgaggcatgtaaattcattgagaactaaccgtagtttgtaaagaagtaaaaggcctttgtatctagttttttgcagatcacatttctttgaatgctggaaagtgaaataaactggtctaggagccaaaaataaatcttgggtttttttaagattttgctcttagatttgtaaccacctgggtacaactttttcctaatttgtgtaagaggttttagagatgcactctgtccctcttgctttacaaattgcctacaagaatgcaaccaaaatactagaaactgaaacttacacaaaacctttcaggttttttcctgtgttgtagttctagggaagaggatagtttattagtatttattttaagcttaaggataggttttggacctggattccatcatagtataactgccatcgaaaagaagacaaattgaaattacagcatttacctaaggttcacagtatggctgacttcagcagccttacatggtaagttctctgtaccagctatttttggttctcgcaattgcatcgacttgggaaattcctatcaccattctctatataggctaaccaaaacttttatcagtaccttt

SEQ ID NO: 328690 - DNA, 3088 bp, Homo sapiens
acgcctggtgttctcgcgggaaagaaccgttgcgcccgactttgcgcggaggtaggagggggaagtggaggcgggagtgaagtctcgcgagaagagtcggttgccgtagcagagccctctagctgtgtgtgtctgaggctcggccgcctgagccgcggacggtttgctgagcccgttagtgcgcccggccgagacacgccgccgccatgtcccgctacctgcgtccccccaacacgtctctgttcgtcaggaacgtggccgacgacaccaggtctgaagacttgcggcgtgaatttggtcgttatggtcctatagttgatgtgtatgttccacttgatttctacactcgccgtccaagaggatttgcttatgttcaatttgaggatgttcgtgatgctgaagacgctttacataatttggacagaaagtggatttgtggacggcagattgaaatacagtttgcccagggggatcgaaagacaccaaatcagatgaaagccaaggaagggaggaatgtgtacagttcttcacgctatgatgattatgacagatacagacgttctagaagccgaagttatgaaaggaggagatccacgaaggcgcgcgctctttgagatccacacacattatacgaagatcgcatcgtcctagaaaactatgcttttctacgcagtagaccgcaactgaagaacacgggtagccgcaagccacttcccgaccatgatagattcaaacaccgaaatcgatctttttcaagatctaaatccaattcaagatcacggtccaagtcccagcccaagaaagaaatgaaggctaaatcacgttctaggtctgcatctcacaccaaaactagaggcacctctaaaacagattccaaaacacattataagtctggctcaagatatgaaaaggaatcaaggaaaaaagaaccacctagatccaaatctcagtcaagatcacagtctaggtctaggtcaaaatctagatcaaggtcttggactagtcctaagtccagtggccactgatagtataaaccatggtcatttttaggcatgtatcattcatttactcatagtttggtttacttaaattatcaggaatacaatgttgcaatgatgcttaaaaaacacttgttagttttccctgtaccaggcaatggttataattaaaatgatatgctgttgagaagccactcttaagagtccagtttgtttaatgttatgggcagctaccaatttgtggtgtctctgtatatttttgtaaagattctcattttttatgcttgaagtatttggtgaaaagatgttggttgaccataatttgcaacattgtctcattaaaaataaactttcatattcatatttggtagaactgttaacctagaaatgtagcttgctaataagatagaatgatacaaaagtgaagtagtagccacagtacaacactgactgctcagacacatttaggttcagggtggacctttatgtcttgtcaagatgtctaggcccggctgggcgtggtggctcacacctgtaatcccagcactttgggaggccgaggcgggcggatcacgaggtcaggagttcgagaccagcctgaccaacacggtgaaaccccgtctctactaaaaatacaaaaattatccgggcatggtggcacatgcctgtaatctcagctactcaggaggctgaggcaagagaatcgcttgaacctgggaggtagaagttgcagtgagccaaaatcacgccactgcactccagcctgggcaacagagtgagactccgtctcaaaaaaaaaaaaaaaaccggatgtctaggccaatgataattatttttgatgcagtgtggattagttcttttgttaaccccactgtcttggggaatgatgccagctgggaaattgagtttttgactgaaacatggagccttcactgctttttttctggttcctatgaagatttggaacatagaaaacacaaaaactcaccttaaaatttgagcaggtcgttgatggcaaaaataattttaaggaaaaaggaatattcttatgtagttattctaaagtttaaggagcgttgttgaccataatattgcttagttttcttactgctgttaagtaagtaaattgtttcaaagtaggttttgtgtgtgtgtgcctagtgtaaaagaactgaaattttgatgcttacagcacttggctcgtgcatttgtatcaaaatttgcctgcctctttatgagggaggcctgcttttcacacctcagtttatttaatacgaggcaagttgtaagacaacactcattctaggtgattctgtggtgccatgaaatttaaggtaatttggggaaaaggattagtcagttttaagcaagagtcacatcttttgagctttcgattatcagtgtagtacctgactaaaaatgaagtaatacccttaaaccatttataatttctagtatttctctgaaagatcgttttggggacaaaagtgacttgacatgtccaatttcatttcagaataaaaagctagcatctttaaaaatctcagattgcttgcttacagatacaagtaagaattatggacaaacgattccttttagaggattacttttttcaatttcggttttagtaatctaggctttgcctgtaaagaatacaacgatggattttaaatactgtttgtggaatgtgtttaaaggattgattctagaacctttgtatatttgatagtatttctaactttcatttctttactgtttgcagttaatgttcatgttctgctatgcaatcgtttatatgcacgtttctttaatttttttagattttcctggatgtatagtttaaacaacaaaaagtctatttaaaactgtagcagtagtttacagttctagcaaagaggaaagttgtggggttaaactttgtattttctttcttatagaggcttctaaaaaggtatttttatatgttctttttaacaaatattgtgtacaacctttaaaacatcaatgtttggatcaaaacaagacccagcttattttctgcttgctgtaaattaagcaaacatgctataataaaaacaaaatgaaggaaa

SEQ ID NO: 328691 - DNA, 4306 bp, Homo sapiens
acgcctggtgttctcgcgggaaagaaccgttgcgcccgactttgcgcggaggtaggagggggaagtggaggcgggagtgaagtctcgcgagaagagtcggttgccgtagcagagccctctagctgtgtgtgtctgaggctcggccgcctgagccgcggacggtttgctgagcccgttagtgcgcccggccgagacacgccgccgccatgtcccgctacctgcgtccccccaacacgtctctgttcgtcaggaacgtggccgacgacaccaggtctgaagacttgcggcgtgaatttggtcgttatggtcctatagttgatgtgtatgttccacttgatttctacactcgccgtccaagaggatttgcttatgttcaatttgaggatgttcgtgatgctgaagacgctttacataatttggacagaaagtggatttgtggacggcagattgaaatacagtttgcccagggggatcgaaagacaccaaatcagatgaaagccaaggaagggaggaatgtgtacagttcttcacgctatgatgattatgacagatacagacgttctagaagccgaagttatgaaaggaggagatcaagaagtcggtcttttgattacaactatagaagatcgtatagtcctagaaacagtagaccgactggaagaccacggcgtagcagaagccattccgacaatgatagccaagtaagcaagaagaaaaatgagagataatgcttcagtgagagaggaaaggtgctacatagagtatgagctgttaagttacatcccaggggaaagacctgggaactattgtattattctcttgaaaatttggcccagtaagctgctacatccagttcaactaacaaaatcctgtataccacagagaagaataaagaaaaccaaactgacaaacatccttcttttatttaagaccaaactgcagctggaatacccagtacagttctgcttactacacttcaagaaagatctgaaagcggaaaaagaaccaaagaagggcagttcaagcgaccaaagggtgggtggaaggtgctgcagtatgaatactgtacgaatattttgactctggtctgaaaagataaaagaatgttatcgaaaactacatggaataattgaagtcccttcaagtttgaaagtaagcattttaggacaaataaaaggaaattcaactttgtacttgtggaaactaatccctaaatatgaataggtttatattgattcatgggtaacaggtccataataaattattggaaactaggatgtctgaatatcaaggaagacagccatagtctcttacagtgcctctgttggtctgtctcaaactgaattgggtgggaaaaggtatggtccaatataaaagttccatttttgccattattggcaaatcttgcctttgtttattttggtgccagtgttttctgcttaatcatttgctttgttggcatctgtgtttatttacttgtacaccacatgcagtttacatctgtcttaactactccttcccaggtaaattccaattatatttgacatccagctaagagggcccatctcttctcacctctttcctagtcagtatattcagcaaatatttattgagcccttactgtgggcaaatcattgtactggataattgagaaaaatagataattcccttattcagtaaatgtctactgagcacaatctagtgaatcattacagtatggcctcattgttttgtttgaggtgtgttattcataacaatattttacaccattcgtatcaatgtaattatagaacacaatatacgatcaaggataagtaattgtgtggttatctgccatttaaaagtatccagtatttgatcacattattataaataatgaaaaaatgatttaatctgtaataaactggtttattgtgcagtgactgtaatatactagagttataataaattgtttactctgcctcaccaaacacatgctaggatataacccccaaaataagtatttaactttgcattaggtataaaggagactgggtgctataattagattattttgaggcagacagagagctgttatcctaactgatttagtatgttctgtaattgagaaaatgttcaccaaattatactttttagtgatttacatgtacattttataggggacatgttctgtgtatagcgaataaataacttttatagtatcacaaaatgttttggattccttagtttcttattaggatatgatgtttctttacctatacattgatttcatcacatttgattttgtcatcttttttgccacatacttaaaactttccatataaaattaactaaaaatctggaagtggaatttaagcttttaatttgtagcaattttgaaaatatagcagaggtatattttcaagggaggtgtgaaatggaggtattattgtttgtattttattttagaaattttgtttgaacttgcccaagatcacacagcaagtgtcagatcctaggttacagcccataatttttcacttgtttcatcttttgttaccatgtttgttgtttaatccaatggggaagtgtttttatagctttattttcatggagatagtaacattgatataatgggatctagaatttacttagagtcaaagtgactagatttaattacaaaaagtattttgttgtataccgttatacactcattaacataggggttcttatggacagaggttctatgtatttttaaaagaatatgtagaggctatagacttttttgccctctacctcccttctccatttccttttgaagttaagacatttaagggggagaattaaggtgcatattgagttggggttttgtttaaaaaaaattaggtaaatacatatataactacaataacaacagttggtagttctctaaaatatttaattatggtaaatcagaaaaggccctttaatttttgcatctgttgaatgaattgctttaggatctcttctgtggttgtttctctttatactgaatgctgtcaatattattgagcacttactgtgccgaaccatgtgcttttcaaatatttctatttaatcctaaaaacactcctgggaaatgggtattattcccattttacagatgagaaaattgtcctttgtagaatacccatcatgtgatagcttcttgcatattatgctattcatttctcacaaccttacaaggtaaatggataatgttcctggatgagagattaaacgtactcgaagatcttatggttgtgtggctcagagactctaagcatggctttccaaatctcattctcttgtagagattttccattgtattgcattttgaccatgttcctgtttacaaaacctaagattatattctgaagtatctgtgacttgagtgatagctcaggaataatctgagggcattctattaggaaggaggactagcaaagcctatagttagcctatcctaggcatgaactattctcattttagataggatgacttgataaataggatgaagtgagcaacctgtttgtcttcggttattggtatctacaagacattctgctagtcactgtggaaaagtttccttctcttgggttttttcctcttccccttcctcttaacagtgttggttatctttattatgtttctgtgtatttgtaacagctgtttcacccttgtattgcataatggggatttttcttggaataaaaagtgaggcatgtaaattcattgagaactaaccgtagtttgtaaagaagtaaaaggcctttgtatctagttttttgcagatcacatttctttgaatgctggaaagtgaaataaactggtctaggagccaaaaataaatcttgggtttttttaagattttgctcttagatttgtaaccacctgggtacaactttttcctaatttgtgtaagaggttttagagatgcactctgtccctcttgctttacaaattgcctacaagaatgcaaccaaaatactagaaactgaaacttacacaaaacctttcaggttttttcctgtgttgtagttctagggaagaggatagtttattagtatttattttaagcttaaggataggttttggacctggattccatcatagtataactgccatcgaaaagaagacaaattgaaattacagcatttacctaaggttcacagtatggctgacttcagcagccttacatggtaagttctctgtaccagctatttttggttctcgcaattgcatcgacttgggaaattcctatcaccattctctatataggctaaccaaaacttttatcagtaccttt

SEQ ID NO: 328692 - DNA, 2670 bp, Homo sapiens
agaggggatgcagggatttttttccctatttattgagggctttaatactgtttttaatatttttaaatatttctgttctttgtatttcctagcaccaaatcagatgaaagccaaggaagggaggaatgtgtacagttcttcacgctatgatgattatgacagatacagacgttctagaagccgaagttatgaaaggaggagatcaagaagtcggtcttttgattacaactatagaagatcgtatagtcctagaaacagtagaccgactggaagaccacggcgtagcagaagccattccgacaatgatagattcaaacaccgaaatcgatctttttcaagatctaaatccaattcaagatcacggtccaagtcccagcccaagaaagaaatgaaggctaaatcacgttctaggtctgcatctcacaccaaaactagaggcacctctaaaacagattccaaaacacattataagtctggctcaagatatgaaaaggaatcaaggaaaaaagaaccacctagatccaaatctcagtcaagatcacagtctaggtctaggtcaaaatctagatcaaggtcttggactagtcctaagtccagtggccactgatagtataaaccatggtcatttttaggcatgtatcattcatttactcatagtttggtttacttaaattatcaggaatacaatgttgcaatgatgcttaaaaaacacttgttagttttccctgtaccaggcaatggttataattaaaatgatatgctgttgagaagccactcttaagagtccagtttgtttaatgttatgggcagctaccaatttgtggtgtctctgtatatttttgtaaagattctcattttttatgcttgaagtatttggtgaaaagatgttggttgaccataatttgcaacattgtctcattaaaaataaactttcatattcatatttggtagaactgttaacctagaaatgtagcttgctaataagatagaatgatacaaaagtgaagtagtagccacagtacaacactgactgctcagacacatttaggttcagggtggacctttatgtcttgtcaagatgtctaggcccggctgggcgtggtggctcacacctgtaatcccagcactttgggaggccgaggcgggcggatcacgaggtcaggagttcgagaccagcctgaccaacacggtgaaaccccgtctctactaaaaatacaaaaattatccgggcatggtggcacatgcctgtaatctcagctactcaggaggctgaggcaagagaatcgcttgaacctgggaggtagaagttgcagtgagccaaaatcacgccactgcactccagcctgggcaacagagtgagactccgtctcaaaaaaaaaaaaaaaaccggatgtctaggccaatgataattatttttgatgcagtgtggattagttcttttgttaaccccactgtcttggggaatgatgccagctgggaaattgagtttttgactgaaacatggagccttcactgctttttttctggttcctatgaagatttggaacatagaaaacacaaaaactcaccttaaaatttgagcaggtcgttgatggcaaaaataattttaaggaaaaaggaatattcttatgtagttattctaaagtttaaggagcgttgttgaccataatattgcttagttttcttactgctgttaagtaagtaaattgtttcaaagtaggttttgtgtgtgtgtgcctagtgtaaaagaactgaaattttgatgcttacagcacttggctcgtgcatttgtatcaaaatttgcctgcctctttatgagggaggcctgcttttcacacctcagtttatttaatacgaggcaagttgtaagacaacactcattctaggtgattctgtggtgccatgaaatttaaggtaatttggggaaaaggattagtcagttttaagcaagagtcacatcttttgagctttcgattatcagtgtagtacctgactaaaaatgaagtaatacccttaaaccatttataatttctagtatttctctgaaagatcgttttggggacaaaagtgacttgacatgtccaatttcatttcagaataaaaagctagcatctttaaaaatctcagattgcttgcttacagatacaagtaagaattatggacaaacgattccttttagaggattacttttttcaatttcggttttagtaatctaggctttgcctgtaaagaatacaacgatggattttaaatactgtttgtggaatgtgtttaaaggattgattctagaacctttgtatatttgatagtatttctaactttcatttctttactgtttgcagttaatgttcatgttctgctatgcaatcgtttatatgcacgtttctttaatttttttagattttcctggatgtatagtttaaacaacaaaaagtctatttaaaactgtagcagtagtttacagttctagcaaagaggaaagttgtggggttaaactttgtattttctttcttatagaggcttctaaaaaggtatttttatatgttctttttaacaaatattgtgtacaacctttaaaacatcaatgtttggatcaaaacaagacccagcttattttctgcttgctgtaaattaagcaaacatgctataataaaaacaaaatgaaggaaa

SEQ ID NO: 328693 - DNA, 4175 bp, Homo sapiens
acgcctggtgttctcgcgggaaagaaccgttgcgcccgactttgcgcggaggtaggagggggaagtggaggcgggagtgaagtctcgcgagaagagtcggttgccgtagcagagccctctagctgtgtgtgtctgaggctcggccgcctgagccgcggacggtttgctgagcccgttagtgcgcccggccgagacacgccgccgccatgtcccgctacctgcgtccccccaacacgtctctgttcgtcaggaacgtggccgacgacaccaggtctgaagacttgcggcgtgaatttggtcgttatggtcctatagttgatgtgtatgttccacttgatttctacactcgccgtccaagaggatttgcttatgttcaatttgaggatgttcgtgatgctgaagacgctttacataatttggacagaaagtggatttgtggacggcagattgaaatacagtttgcccagggggatcgaaagacaccaaatcagatgaaagccaaggaagggaggaatgtgtacagttcttcacgctatgatgattatgacagatacagacgttctagaagccgaagttatgaaaggaggagatcaagaagtcggtcttttgattacaactatagaagatcgtatagtcctagaaacagtagaccgactggaagaccacggcgtagcagaagccattccgacaatgatagattcaaacaccgaaatcgatctttttcaagatctaaatccaattcaagatcacggtccaagtcccagcccaagaaagaaatgaaggctaaatcacgttctagaccaaactgcagctggaatacccagtacagttctgcttactacacttcaagaaagatctgaaagcggaaaaagaaccaaagaagggcagttcaagcgaccaaagggtgggtggaaggtgctgcagtatgaatactgtacgaatattttgactctggtctgaaaagataaaagaatgttatcgaaaactacatggaataattgaagtcccttcaagtttgaaagtaagcattttaggacaaataaaaggaaattcaactttgtacttgtggaaactaatccctaaatatgaataggtttatattgattcatgggtaacaggtccataataaattattggaaactaggatgtctgaatatcaaggaagacagccatagtctcttacagtgcctctgttggtctgtctcaaactgaattgggtgggaaaaggtatggtccaatataaaagttccatttttgccattattggcaaatcttgcctttgtttattttggtgccagtgttttctgcttaatcatttgctttgttggcatctgtgtttatttacttgtacaccacatgcagtttacatctgtcttaactactccttcccaggtaaattccaattatatttgacatccagctaagagggcccatctcttctcacctctttcctagtcagtatattcagcaaatatttattgagcccttactgtgggcaaatcattgtactggataattgagaaaaatagataattcccttattcagtaaatgtctactgagcacaatctagtgaatcattacagtatggcctcattgttttgtttgaggtgtgttattcataacaatattttacaccattcgtatcaatgtaattatagaacacaatatacgatcaaggataagtaattgtgtggttatctgccatttaaaagtatccagtatttgatcacattattataaataatgaaaaaatgatttaatctgtaataaactggtttattgtgcagtgactgtaatatactagagttataataaattgtttactctgcctcaccaaacacatgctaggatataacccccaaaataagtatttaactttgcattaggtataaaggagactgggtgctataattagattattttgaggcagacagagagctgttatcctaactgatttagtatgttctgtaattgagaaaatgttcaccaaattatactttttagtgatttacatgtacattttataggggacatgttctgtgtatagcgaataaataacttttatagtatcacaaaatgttttggattccttagtttcttattaggatatgatgtttctttacctatacattgatttcatcacatttgattttgtcatcttttttgccacatacttaaaactttccatataaaattaactaaaaatctggaagtggaatttaagcttttaatttgtagcaattttgaaaatatagcagaggtatattttcaagggaggtgtgaaatggaggtattattgtttgtattttattttagaaattttgtttgaacttgcccaagatcacacagcaagtgtcagatcctaggttacagcccataatttttcacttgtttcatcttttgttaccatgtttgttgtttaatccaatggggaagtgtttttatagctttattttcatggagatagtaacattgatataatgggatctagaatttacttagagtcaaagtgactagatttaattacaaaaagtattttgttgtataccgttatacactcattaacataggggttcttatggacagaggttctatgtatttttaaaagaatatgtagaggctatagacttttttgccctctacctcccttctccatttccttttgaagttaagacatttaagggggagaattaaggtgcatattgagttggggttttgtttaaaaaaaattaggtaaatacatatataactacaataacaacagttggtagttctctaaaatatttaattatggtaaatcagaaaaggccctttaatttttgcatctgttgaatgaattgctttaggatctcttctgtggttgtttctctttatactgaatgctgtcaatattattgagcacttactgtgccgaaccatgtgcttttcaaatatttctatttaatcctaaaaacactcctgggaaatgggtattattcccattttacagatgagaaaattgtcctttgtagaatacccatcatgtgatagcttcttgcatattatgctattcatttctcacaaccttacaaggtaaatggataatgttcctggatgagagattaaacgtactcgaagatcttatggttgtgtggctcagagactctaagcatggctttccaaatctcattctcttgtagagattttccattgtattgcattttgaccatgttcctgtttacaaaacctaagattatattctgaagtatctgtgacttgagtgatagctcaggaataatctgagggcattctattaggaaggaggactagcaaagcctatagttagcctatcctaggcatgaactattctcattttagataggatgacttgataaataggatgaagtgagcaacctgtttgtcttcggttattggtatctacaagacattctgctagtcactgtggaaaagtttccttctcttgggttttttcctcttccccttcctcttaacagtgttggttatctttattatgtttctgtgtatttgtaacagctgtttcacccttgtattgcataatggggatttttcttggaataaaaagtgaggcatgtaaattcattgagaactaaccgtagtttgtaaagaagtaaaaggcctttgtatctagttttttgcagatcacatttctttgaatgctggaaagtgaaataaactggtctaggagccaaaaataaatcttgggtttttttaagattttgctcttagatttgtaaccacctgggtacaactttttcctaatttgtgtaagaggttttagagatgcactctgtccctcttgctttacaaattgcctacaagaatgcaaccaaaatactagaaactgaaacttacacaaaacctttcaggttttttcctgtgttgtagttctagggaagaggatagtttattagtatttattttaagcttaaggataggttttggacctggattccatcatagtataactgccatcgaaaagaagacaaattgaaattacagcatttacctaaggttcacagtatggctgacttcagcagccttacatggtaagttctctgtaccagctatttttggttctcgcaattgcatcgacttgggaaattcctatcaccattctctatataggctaaccaaaacttttatcagtaccttt

SEQ ID NO: 328694 - DNA, 2729 bp, Homo sapiens
acgcctggtgttctcgcgggaaagaaccgttgcgcccgactttgcgcggaggtaggagggggaagtggaggcgggagtgaagtctcgcgagaagagtcggttgccgtagcagagccctctagctgtgtgtgtctgaggctcggccgcctgagccgcggacggtttgctgagcccgttagtgcgcccggccgagacacgccgccgccatgtcccgctacctgcgtccccccaacacgtctctgttcgtcaggaacgtggccgacgacaccaggtctgaagacttgcggcgtgaatttggtcgttatggtcctatagttgatgtgtatgttccacttgatttctacactcgccgtccaagaggatttgcttatgttcaatttgaggatgttcgtgatgctgaagacgctttacataatttggacagaaagtggatttgtggacggcagattgaaatacagtttgcccagggggatcgaaagacaccaaatcagatgaaagccaaggaagggaggaatgtgtacagttcttcacgctatgatgattatgacagatacagacgttctagaagccgaagttatgaaaggaggagatcaagaagtcggtcttttgattacaactatagaagatcgtatagtcctagaaacagtagaccgactggaagaccacggcgtagcagaagccattccgacaatgatagaccaaactgcagctggaatacccagtacagttctgcttactacacttcaagaaagatctgaaagcggaaaaagaaccaaagaagggcagttcaagcgaccaaagggtgggtggaaggtgctgcagtatgaatactgtacgaatattttgactctggtctgaaaagataaaagaatgttatcgaaaactacatggaataattgaagtcccttcaagtttgaaagtaagcattttaggacaaataaaaggaaattcaactttgtacttgtggaaactaatccctaaatatgaataggtttatattgattcatgggtaacaggtccataataaattattggaaactaggatgtctgaatatcaaggaagacagccatagtctcttacagtgcctctgttggtctgtctcaaactgaattgggtgggaaaaggtatggtccaatataaaagttccatttttgccattattggcaaatcttgcctttgtttattttggtgccagtgttttctgcttaatcatttgctttgttggcatctgtgtttatttacttgtacaccacatgcagtttacatctgtcttaactactccttcccaggtaaattccaattatatttgacatccagctaagagggcccatctcttctcacctctttcctagtcagtatattcagcaaatatttattgagcccttactgtgggcaaatcattgtactggataattgagaaaaatagataattcccttattcagtaaatgtctactgagcacaatctagtgaatcattacagtatggcctcattgttttgtttgaggtgtgttattcataacaatattttacaccattcgtatcaatgtaattatagaacacaatatacgatcaaggataagtaattgtgtggttatctgccatttaaaagtatccagtatttgatcacattattataaataatgaaaaaatgatttaatctgtaataaactggtttattgtgcagtgactgtaatatactagagttataataaattgtttactctgcctcaccaaacacatgctaggatataacccccaaaataagtatttaactttgcattaggtataaaggagactgggtgctataattagattattttgaggcagacagagagctgttatcctaactgatttagtatgttctgtaattgagaaaatgttcaccaaattatactttttagtgatttacatgtacattttataggggacatgttctgtgtatagcgaataaataacttttatagtatcacaaaaaaaaaaaaaaaaaaaaaaacaaaaaacaaaaaaaagaaaaaaaaaaaaaaaaaaaaaaaaaaaaaaacaaaaaaaaagcaagaagaaaaaaaaaagaaacaaaaaaaaacaaaaacgcgcgggggccccccccccccccgacatcgtcccaaccccgcggggggcacccgcgcccacactgatactcagaaaaccaacgacgcaccattatcactgcgagccaaaccatccctggactttgcaaacgaaggcgaggctggggggatccccgacacaaaaaaaaccagcggaggggtcgggacaccgacttgtgtatccaacaccaaatcgacaggagtagtacaacgaccgactcccacggtatacacaaacgcacggaaccgacaggcagaataataataaactccccgccccgtcaggggaacacacaccaaaaaccaacacaacaccgccgcggacccaccccggtgcagagcgcgcaacacagacagggggcgagagaccacatggtacgaagccgaagcggagtggaggacatcccgcggcaggagcaggcggggagacgtagcgccggcggcagcaccgacatcgcacctaggagcacagagagcatacgaggaggagaacgggagaggggctacagcgatagccgagcgaggaggaagcatcgcaaggccagatacaagcagagcagagcgaaaggggaagaacaaagcacataacagacaaagcgctgcgtagtccacgcgcagc

SEQ ID NO: 328695 - DNA, 3864 bp, Homo sapiens
acgcctggtgttctcgcgggaaagaaccgttgcgcccgactttgcgcggaggtaggagggggaagtggaggcgggagtgaagtctcgcgagaagagtcggttgccgtagcagagccctctagctgtgtgtgtctgaggctcggccgcctgagccgcggacggtttgctgagcccgttagtgcgcccggccgagacacgccgccgccatgtcccgctacctgcgtccccccaacacgtctctgttcgtcaggaacgtggccgacgacaccagcaccaaatcagatgaaagccaaggaagggaggaatgtgtacagttcttcacgctatgatgattatgacagatacagacgttctagaagccgaagttatgaaaggaggagatcaagaagtcggtcttttgattacaactatagaagatcgtatagtcctagaaacagtagaccgactggaagaccacggcgtagcagaagccattccgacaatgatagaccaaactgcagctggaatacccagtacagttctgcttactacacttcaagaaagatctgaaagcggaaaaagaaccaaagaagggcagttcaagcgaccaaagggtgggtggaaggtgctgcagtatgaatactgtacgaatattttgactctggtctgaaaagataaaagaatgttatcgaaaactacatggaataattgaagtcccttcaagtttgaaagtaagcattttaggacaaataaaaggaaattcaactttgtacttgtggaaactaatccctaaatatgaataggtttatattgattcatgggtaacaggtccataataaattattggaaactaggatgtctgaatatcaaggaagacagccatagtctcttacagtgcctctgttggtctgtctcaaactgaattgggtgggaaaaggtatggtccaatataaaagttccatttttgccattattggcaaatcttgcctttgtttattttggtgccagtgttttctgcttaatcatttgctttgttggcatctgtgtttatttacttgtacaccacatgcagtttacatctgtcttaactactccttcccaggtaaattccaattatatttgacatccagctaagagggcccatctcttctcacctctttcctagtcagtatattcagcaaatatttattgagcccttactgtgggcaaatcattgtactggataattgagaaaaatagataattcccttattcagtaaatgtctactgagcacaatctagtgaatcattacagtatggcctcattgttttgtttgaggtgtgttattcataacaatattttacaccattcgtatcaatgtaattatagaacacaatatacgatcaaggataagtaattgtgtggttatctgccatttaaaagtatccagtatttgatcacattattataaataatgaaaaaatgatttaatctgtaataaactggtttattgtgcagtgactgtaatatactagagttataataaattgtttactctgcctcaccaaacacatgctaggatataacccccaaaataagtatttaactttgcattaggtataaaggagactgggtgctataattagattattttgaggcagacagagagctgttatcctaactgatttagtatgttctgtaattgagaaaatgttcaccaaattatactttttagtgatttacatgtacattttataggggacatgttctgtgtatagcgaataaataacttttatagtatcacaaaatgttttggattccttagtttcttattaggatatgatgtttctttacctatacattgatttcatcacatttgattttgtcatcttttttgccacatacttaaaactttccatataaaattaactaaaaatctggaagtggaatttaagcttttaatttgtagcaattttgaaaatatagcagaggtatattttcaagggaggtgtgaaatggaggtattattgtttgtattttattttagaaattttgtttgaacttgcccaagatcacacagcaagtgtcagatcctaggttacagcccataatttttcacttgtttcatcttttgttaccatgtttgttgtttaatccaatggggaagtgtttttatagctttattttcatggagatagtaacattgatataatgggatctagaatttacttagagtcaaagtgactagatttaattacaaaaagtattttgttgtataccgttatacactcattaacataggggttcttatggacagaggttctatgtatttttaaaagaatatgtagaggctatagacttttttgccctctacctcccttctccatttccttttgaagttaagacatttaagggggagaattaaggtgcatattgagttggggttttgtttaaaaaaaattaggtaaatacatatataactacaataacaacagttggtagttctctaaaatatttaattatggtaaatcagaaaaggccctttaatttttgcatctgttgaatgaattgctttaggatctcttctgtggttgtttctctttatactgaatgctgtcaatattattgagcacttactgtgccgaaccatgtgcttttcaaatatttctatttaatcctaaaaacactcctgggaaatgggtattattcccattttacagatgagaaaattgtcctttgtagaatacccatcatgtgatagcttcttgcatattatgctattcatttctcacaaccttacaaggtaaatggataatgttcctggatgagagattaaacgtactcgaagatcttatggttgtgtggctcagagactctaagcatggctttccaaatctcattctcttgtagagattttccattgtattgcattttgaccatgttcctgtttacaaaacctaagattatattctgaagtatctgtgacttgagtgatagctcaggaataatctgagggcattctattaggaaggaggactagcaaagcctatagttagcctatcctaggcatgaactattctcattttagataggatgacttgataaataggatgaagtgagcaacctgtttgtcttcggttattggtatctacaagacattctgctagtcactgtggaaaagtttccttctcttgggttttttcctcttccccttcctcttaacagtgttggttatctttattatgtttctgtgtatttgtaacagctgtttcacccttgtattgcataatggggatttttcttggaataaaaagtgaggcatgtaaattcattgagaactaaccgtagtttgtaaagaagtaaaaggcctttgtatctagttttttgcagatcacatttctttgaatgctggaaagtgaaataaactggtctaggagccaaaaataaatcttgggtttttttaagattttgctcttagatttgtaaccacctgggtacaactttttcctaatttgtgtaagaggttttagagatgcactctgtccctcttgctttacaaattgcctacaagaatgcaaccaaaatactagaaactgaaacttacacaaaacctttcaggttttttcctgtgttgtagttctagggaagaggatagtttattagtatttattttaagcttaaggataggttttggacctggattccatcatagtataactgccatcgaaaagaagacaaattgaaattacagcatttacctaaggttcacagtatggctgacttcagcagccttacatggtaagttctctgtaccagctatttttggttctcgcaattgcatcgacttgggaaattcctatcaccattctctatataggctaaccaaaacttttatcagtaccttt

SEQ ID NO: 328696 - DNA, 1162 bp, Homo sapiens
acgcctggtgttctcgcgggaaagaaccgttgcgcccgactttgcgcggaggtaggagggggaagtggaggcgggagtgaagtctcgcgagaagagtcggttgccgtagcagagccctctagctgtgtgtgtctgaggctcggccgcctgagccgcggacggtttgctgagcccgttagtgcgcccggccgagacacgccgccgccatgtcccgctacctgcgtccccccaacacgtctctgttcgtcaggaacgtggccgacgacaccaggtctgaagacttgcggcgtgaatttggtcgttatggtcctatagttgatgtgtatgttccacttgatttctacactcgccgtccaagaggatttgcttatgttcaatttgaggatgttcgtgatgctgaagacgctttacataatttggacagaaagtggatttgtggacggcagattgaaatacagtttgcccagggggatcgaaagacaccaaatcagatgaaagccaaggaagggaggaatgtgtacagttcttcacgctatgatgattatgacagatacagacgttctagaagccgaagttatgaaaggaggagatcaagaagtcggtcttttgattacaactatagaagatcgtatagtcctagaaacagtagaccgactggaagaccacggcgtagcagaagccattccgacaatgatagattcaaacaccgaaatcgatctttttcaagatctaaatccaattcaagatcacggtccaagtcccagcccaagaaagaaatgaaggctaaatcacgttctaggtctgcatctcacaccaaaactagaggcacctctaaaacagattccaaaacacattataagtctggctcaagatatgaaaaggaatcaaggaaaaaagaaccacctagatccaaatctcagtcaagatcacagtctaggtctaggtcaaaatctagatcaaggtcttggactagtcctaagtccagtggccactgatagtataaaccatggtcatttttaggcatgtatcattcatttactcatagtttggtttacttaaattatcaggaatacaatgttgcaatgatgcttaaaaaacacttgttagttttccctgtaccaggcaatggttataattaaaatgatatgctgttgagaagcca

SEQ ID NO: 328697 - DNA, 1091 bp, Homo sapiens
acgcctggtgttctcgcgggaaagaaccgttgcgcccgactttgcgcggaggtaggagggggaagtggaggcgggagtgaagtctcgcgagaagagtcggttgccgtagcagagccctctagctgtgtgtgtctgaggctcggccgcctgagccgcggacggtttgctgagcccgttagtgcgcccggccgagacacgccgccgccatgtcccgctacctgcgtccccccaacacgtctctgttcgtcaggaacgtggccgacgacaccaggtctgaagacttgcggcgtgaatttggtcgttatggtcctatagttgatgtgtatgttccacttgatttctacactcgccgtccaagaggatttgcttatgttcaatatcctttcttcagatggctgattagtgaggggtgttgaagtttgaaattcaagtttatagaatgtaaagctgtacagttatggcgaccccaaagagaaagcatgaaagaacctttagagtagagttcaacacttaaggcaagtagacaagccaaagacctcttaaggatcaggcttgaagagaagggagagtttgggaaaagaaaaaataaagaaaagctggaagaaggacaagcctaatgggagacaaagcctcgctttatctacaaaagggggaaaaggttgtttttcaaagttaaagataaagccatctgtcatatttggccaagcatctcatgacaagtccttctgacaagcacttaaagagttaaaggtcaagatgaagttgaatgatggccaagattaaaggagtcatacctgatatttgaggatgttcgtgatgctgaagacgctttacataatttggacagaaagtggatttgtggacggcagattgaaatacagtttgcccagggggatcgaaagacaccaaatcagatgaaagccaaggaagggaggaatgtgtacagttcttcacgctatgatgattatgacagatacagacgttctagaagccgaagttatgaaaggaggagatcaagaagtcggtcttttgattacaactatagaagatcgtatagtcctagaaagtaagtgtgctgtgtagcacagtga

SEQ ID NO: 328698 - DNA, 1173 bp, Homo sapiens
  misc_feature (8)..(9): n is a, c, g, or t
  misc_feature (12)..(12): n is a, c, g, or t
  misc_feature (15)..(15): n is a, c, g, or t
  misc_feature (28)..(28): n is a, c, g, or t
  misc_feature (30)..(30): n is a, c, g, or t
  misc_feature (33)..(33): n is a, c, g, or t
agcggccnntantantactaaattcgcngncgncgagttatctgccatttaaaagtatccagtatttgatcacattattataaataatgaaaaaatgatttaatctgtaataaactggtttattgtgcagtgactgtaatatactagagttataataaattgtttactctgcctcaccaaacacatgctaggatataacccccaaaataagtatttaactttgcattaggtataaaggagactgggtgctataattagattattttgaggcagacagagagctgttatcctaactgatttagtatgttctgtaattgagaaaatgttcaccaaattatactttttagtgatttacatgtacattttataggggacatgttctgtgtatagcgaataaataacttttatagtatcacaaaaaaaaaaaaaaaaaaaaaaacaaaaaacaaaaaaaagaaaaaaaaaaaaaaaaaaaaaaaaaaaaaaacaaaaaaaaagcaagaagaaaaaaaaaagaaacaaaaaaaaacaaaaacgcgcgggggccccccccccccccgacatcgtcccaaccccgcggggggcacccgcgcccacactgatactcagaaaaccaacgacgcaccattatcactgcgagccaaaccatccctggactttgcaaacgaaggcgaggctggggggatccccgacacaaaaaaaaccagcggaggggtcgggacaccgacttgtgtatccaacaccaaatcgacaggagtagtacaacgaccgactcccacggtatacacaaacgcacggaaccgacaggcagaataataataaactccccgccccgtcaggggaacacacaccaaaaaccaacacaacaccgccgcggacccaccccggtgcagagcgcgcaacacagacagggggcgagagaccacatggtacgaagccgaagcggagtggaggacatcccgcggcaggagcaggcggggagacgtagcgccggcggcagcaccgacatcgcacctaggagcacagagagcatacgaggaggagaacgggagaggggctacagcgatagccgagcgaggaggaagcatcgcaaggccagatacaagcagagcagagcgaaaggggaagaacaaagcacataacagacaaagcgctgcgtagtccacgcgcagc

SEQ ID NO: 328699 - DNA, 205 bp, Homo sapiens
gaggatgggaaggtagacgttgggaagaaaaggaccacaggagggtagaagtggggaaagacaaagatagcaagattgacaggtgatacatatataataaattgttcatttaatcatattaggttattaattacatgtacacaataagtttgggaaatggaattttgcatcaattttggatctgaagtgtctgttactacacatc

SEQ ID NO: 328700 - DNA, 2847 bp, Homo sapiens
cggccgcgttcccacgcctcggctggagccttgcggcgggcattggcgagcgcggccccgccccctggcccagccaatcgcgagccacgccgaccagcgagggggaggtgccgggcggaaggcctgggccggtgcgcgggggcgggtgaggtggccccacccgctcgaggggggggcgtggccggcgccggctcttgcggccgagcagagttgcggcgtgggaaagagccgctaggagcagaccgcgccgccgccggagccgcgcctgcccaggcccggggagggaggaggcgggcgtcagggtgctgcgccccgctcggcgtccgagcttccggccgggctgtgccccgcgcggtcttcgccgggatgaagcgcccctgcgaggagacgacctccgagagcgacatggacgagaccatcgacgtggggagcgagaacaattactcggggcaaagtactagctctgtgattagattgaattctccaacaacaacatctcagattatggcaagaaagaaaaggagagggattatagagaaaaggcgtcgggatcggataaataacagtttatctgagttgagaagacttgtgccaactgcttttgaaaaacaaggatctgcaaagttagaaaaagctgaaatattgcaaatgacagtggatcatttgaagatgcttcaggcaacagggggtaaaggctactttgacgcacacgctcttgccatggacttcatgagcataggattccgagagtgcctaacagaagttgcgcggtacctgagctccgtggaaggcctggactcctcggatccgctgcgggtgcggcttgtgtctcatctcagcacttgcgccacccagcgggaggcggcggccatgacatcctccatggcccaccaccatcatccgctccacccgcatcactgggccgccgccttccaccacctgcccgcagccctgctccagcccaacggcctccatgcctcagagtcaaccccttgtcgcctctccacaacttcagaagtgcctcctgcccacggctctgctctcctcacggccacgtttgcccatgcggattcagccctccgaatgccatccacgggcagcgtcgccccctgcgtgccacctctctccacctctctcttgtccctctctgccaccgtccacgccgcagccgcagcagccaccgcggctgcacacagcttccctctgtccttcgcgggggcattccccatgcttcccccaaacgcagcagcagcagtggccgcggccacagccatcagcccgcccttgtcagtatcagccacgtccagtcctcagcagaccagcagtggaacaaacaataaaccttaccgaccctgggggacagaagttggagctttttaaatttttcttgaacttcttgcaatagtaactgaatgtcctccatttcagagtcagcttaaaacctctgcaccctgaaggtagccatacagatgccgacagatccacaaaggaacaataaagctatttgagacacaaacctcacgagtggaaatgtggtattctcttttttttctctcccttttttgtttggttcaaggcagctcggtaactgacatcagcaacttttgaaaacttcacacttgttaccatttagaagtttcctggaaaatatatggaccgtaccatccagcagtgcatcagtatgtctgaattggggaagtaaaatgccctgactgaattctcttgagactagatgggacatacatatatagagagagagtgagagagtcgtgtttcgtaagtgcctgagcttaggaagttttcttctggatatataacattgcacaagggaagacgagtgtggaggataggttaagaaaggaaagggacagaagtcttgcaataggctgcagacattttaataccatgccagagaagagtattctgctgaaaccaacaggttttactggtcaaaatgactgctgaaaataattttcaagttgaaagatctagttttatcttagtttgccttctttgtacagacatgccaagaggtgacatttagcagtgcattggtataagcaattatttcatcagttctcagattaacaagcatttctgctctgcctgcaggcccccaggcacttttttttttggatggctcaaaatatggtgctgctttatataaaccttacatttatatagtgcacctatgagcagttgcctaccatgtgtccaccagaggctatttaattcatgccaacttgaaaactctccagtttgtaggagtttggtttaatttattcagtttcattaggactatttttatatatttatcctcttcattttctcctaatgatgcaacatctattcttgtcaccctttgggagaagttacatttctggaggtgatgaagcaaggagggagcactaggaagagaaaagctacaatttttaaagctctttgtcaagttagtgattgcatttgatcccaaaacaagatgaatgtatgcaatgggatgtacataagttatttttgcccatgcctaaactagtgctatgtaatggggttgtggttttgtttttttcgatttcgtttaatgacaaaataatctcttaatatgctgaaatcaagcacgtgagagtttttgtttaaaagataagagacacagcatgtattatgcacttcatttctctactgtgtggagaaagcaataaacattatgagaatgttaaacgttatgcaaaattatacttttaaatatttgttttgaaattactgtacctagtcttttttgcattactttgtaacctttttctatgcaagagtctttacataccactaattaaatgaagtcctttttgacta

SEQ ID NO: 328701 - DNA, 1513 bp, Homo sapiens
cggccgcgttcccacgcctcggctggagccttgcggcgggcattggcgagcgcggccccgccccctggcccagccaatcgcgagccacgccgaccagcgagggggaggtgccgggcggaaggcctgggccggtgcgcgggggcgggtgaggtggccccacccgctcgaggggggggcgtggccggcgccggctcttgcggccgagcagagttgcggcgtgggaaagagccgctaggagcagaccgcgccgccgccggagccgcgcctgcccaggcccggggagggaggaggcgggcgtcagggtgctgcgccccgctcggcgtccgagcttccggccgggctgtgccccgcgcggtcttcgccgggatgaagcgcccctgcgaggagacgacctccgagagcgacatggacgagaccatcgacgtggggagcgagaacaattactcggggcaaagtactagctctgtgattagattgaattctccaacaacaacatctcagattatggcaagaaagaaaaggagagggattatagagaaaaggcgtcgggatcggataaataacagtttatctgagttgagaagacttgtgccaactgcttttgaaaaacaaggatctgcaaagttagaaaaagctgaaatattgcaaatgacagtggatcatttgaagatgcttcaggcaacagggggtaaaggctactttgacgcacacgctcttgccatggacttcatgagcataggattccgagagtgcctaacagaagttgcgcggtacctgagctccgtggaaggcctggactcctcggatccgctgcgggtgcggcttgtgtctcatctcagcacttgcgccacccagcgggaggcggcggccatgacatcctccatggcccaccaccatcatccgctccacccgcatcactgggccgccgccttccaccacctgcccgcagccctgctccagcccaacggcctccatgcctcagagtcaaccccttgtcgcctctccacaacttcagaagtgcctcctgcccacggctctgctctcctcacggccacgtttgcccatgcggattcagccctccgaatgccatccacgggcagcgtcgccccctgcgtgccacctctctccacctctctcttgtccctctctgccaccgtccacgccgcagccgcagcagccaccgcggctgcacacagcttccctctgtccttcgcgggggcattccccatgcttcccccaaacgcagcagcagcagtggccgcggccacagccatcagcccgcccttgtcagtatcagccacgtccagtcctcagcagaccagcagtggaacaaacaataaaccttaccgaccctgggggacagaagttggagctttttaaatttttcttgaacttcttgcaatagtaactgaatgtcctccatttcagagtcagcttaaaacctctgcaccctgaaggtagccatacagatgccgacagatccacaaaggaacaataaagctatttgagacac

SEQ ID NO: 328702 - DNA, 2469 bp, Homo sapiens
gccctcacggaaagttgtgacggtcgagcttgagcctggcgggccgcggagcgttcacctgcggccgggaggcaaagtactagctctgtgattagattgaattctccaacaacaacatctcagattatggcaagaaagaaaaggagagggattatagagaaaaggcgtcgggatcggataaataacagtttatctgagttgagaagacttgtgccaactgcttttgaaaaacaaggatctgcaaagttagaaaaagctgaaatattgcaaatgacagtggatcatttgaagatgcttcaggcaacagggggtaaaggctactttgacgcacacgctcttgccatggacttcatgagcataggattccgagagtgcctaacagaagttgcgcggtacctgagctccgtggaaggcctggactcctcggatccgctgcgggtgcggcttgtgtctcatctcagcacttgcgccacccagcgggaggcggcggccatgacatcctccatggcccaccaccatcatccgctccacccgcatcactgggccgccgccttccaccacctgcccgcagccctgctccagcccaacggcctccatgcctcagagtcaaccccttgtcgcctctccacaacttcagaagtgcctcctgcccacggctctgctctcctcacggccacgtttgcccatgcggattcagccctccgaatgccatccacgggcagcgtcgccccctgcgtgccacctctctccacctctctcttgtccctctctgccaccgtccacgccgcagccgcagcagccaccgcggctgcacacagcttccctctgtccttcgcgggggcattccccatgcttcccccaaacgcagcagcagcagtggccgcggccacagccatcagcccgcccttgtcagtatcagccacgtccagtcctcagcagaccagcagtggaacaaacaataaaccttaccgaccctgggggacagaagttggagctttttaaatttttcttgaacttcttgcaatagtaactgaatgtcctccatttcagagtcagcttaaaacctctgcaccctgaaggtagccatacagatgccgacagatccacaaaggaacaataaagctatttgagacacaaacctcacgagtggaaatgtggtattctcttttttttctctcccttttttgtttggttcaaggcagctcggtaactgacatcagcaacttttgaaaacttcacacttgttaccatttagaagtttcctggaaaatatatggaccgtaccatccagcagtgcatcagtatgtctgaattggggaagtaaaatgccctgactgaattctcttgagactagatgggacatacatatatagagagagagtgagagagtcgtgtttcgtaagtgcctgagcttaggaagttttcttctggatatataacattgcacaagggaagacgagtgtggaggataggttaagaaaggaaagggacagaagtcttgcaataggctgcagacattttaataccatgccagagaagagtattctgctgaaaccaacaggttttactggtcaaaatgactgctgaaaataattttcaagttgaaagatctagttttatcttagtttgccttctttgtacagacatgccaagaggtgacatttagcagtgcattggtataagcaattatttcatcagttctcagattaacaagcatttctgctctgcctgcaggcccccaggcacttttttttttggatggctcaaaatatggtgctgctttatataaaccttacatttatatagtgcacctatgagcagttgcctaccatgtgtccaccagaggctatttaattcatgccaacttgaaaactctccagtttgtaggagtttggtttaatttattcagtttcattaggactatttttatatatttatcctcttcattttctcctaatgatgcaacatctattcttgtcaccctttgggagaagttacatttctggaggtgatgaagcaaggagggagcactaggaagagaaaagctacaatttttaaagctctttgtcaagttagtgattgcatttgatcccaaaacaagatgaatgtatgcaatgggatgtacataagttatttttgcccatgcctaaactagtgctatgtaatggggttgtggttttgtttttttcgatttcgtttaatgacaaaataatctcttaatatgctgaaatcaagcacgtgagagtttttgtttaaaagataagagacacagcatgtattatgcacttcatttctctactgtgtggagaaagcaataaacattatgagaatgttaaacgttatgcaaaattatacttttaaatatttgttttgaaattactgtacctagtcttttttgcattactttgtaacctttttctatgcaagagtctttacataccactaattaaatgaagtcctttttgacta

SEQ ID NO: 328703 - DNA, 3734 bp, Homo sapiens
aaatgcgaacttaggctgttacacaactgctggggtctgttctcgccgcccgcccggcagtcaggcagcgtcgccgccgtggtagcagcctcagccgtttctggagtctcgggcccacagtcaccgccgcttacctgcgcctcctcgagcctccggagtccccgtccgcccgcacaggccggttcgccgtctgcgtctcccccacgccgcctcgcctgccgccgcgctcgtccctccgggccgacatgagtggggaccacctccacaacgattcccagatcgaagcggatttccgattgaatgattctcataaacacaaagataaacacaaagatcgagaacaccggcacaaagaacacaagaaggagaaggaccgggaaaagtccaagcatagcaacagtgaacataaagattctgaaaagaaacacaaagagaaggagaagaccaaacacaaagatggaagctcagaaaagcataaagacaaacataaagacagagacaaggaaaaacgaaaagaggaaaaggttcgagcctctggggatgcaaaaataaagaaggagaaggaaaatggcttctctagtccaccacaaattaaagatgaacctgaagatgatggctattttgttcctcctaaagaggatataaagccattaaagagacctcgagatgaggatgatgctgattataaacctaagaaaattaaaacagaagataccaagaaggagaagaaaagaaaactagaagaagaagaggatggtaaattgaaaaaacccaagaataaagataaagataaaaaagttcctgagccagataacaagaaaaagaagccgaagaaagaagaggaacagaagtggaaatggtgggaagaagagcgctatcctgaaggcatcaagtggaaattcctagaacataaaggtccagtatttgccccaccatatgagcctcttccagagaatgtcaagttttattatgatggtaaagtcatgaagctgagccccaaagcagaggaagtagctacgttctttgcaaaaatgctcgaccatgaatatactaccaaggaaatatttaggaaaaatttctttaaagactggagaaaggaaatgactaatgaagagaagaatattatcaccaacctaagcaaatgtgattttacccagatgagccagtatttcaaagcccagacggaagctcggaaacagatgagcaaggaagagaaactgaaaatcaaagaggagaatgaaaaattactgaaagaatatggattctgtattatggataaccacaaagagaggattgctaacttcaagatagagcctcctggacttttccgtggccgcggcaaccaccccaagatgggcatgctgaagagacgaatcatgcccgaggatataatcatcaactgtagcaaagatgccaaggttccttctcctcctccaggacataagtggaaagaagtccggcatgataacaaggttacttggctggtttcctggacagagaacatccaaggttccattaaatacatcatgcttaaccctagttcacgaatcaagggtgagaaggactggcagaaatacgagactgctcggcggctgaaaaaatgtgtggacaagatccggaaccagtatcgagaagactggaagtccaaagagatgaaagtccggcagagagctgtagccctgtacttcatcgacaagcttgctctgagagcaggcaatgaaaaggaggaaggagaaacagcggacactgtgggctgctgctcacttcgtgtggagcacatcaatctacacccagagttggatggtcaggaatatgtggtagagtttgacttcctcgggaaggactccatcagatactataacaaggtccctgttgagaaacgagtttttaagaacctacaactatttatggagaacaagcagcccgaggatgatctttttgatagactcaatactggtattctgaataagcatcttcaggatctcatggagggcttgacagccaaggtattccgtacatacaatgcctccatcacgctacagcagcagctaaaagaactgacagccccggatgagaacatcccagcgaagatcctttcttataaccgtgccaatcgagctgttgcaattctttgtaaccatcagagggcaccaccaaaaacttttgagaagtctatgatgaacttgcaaactaagattgatgccaagaaggaacagctagcagatgcccggagagacctgaaaagtgctaaggctgatgccaaggtcatgaaggatgcaaagacgaagaaggtagtagagtcaaagaagaaggctgttcagagactggaggaacagttgatgaagctggaagttcaagccacagaccgagaggaaaataaacagattgccctgggaacctccaaactcaattatctggaccctaggatcacagtggcttggtgcaagaagtggggtgtcccaattgagaagatttacaacaaaacccagcgggagaagtttgcctgggccattgacatggctgatgaagactatgagttttagccagtctcaagaggcagagttctgtgaagaggaacagtgtggtttgggaaagatggataaactgagcctcacttgccctcgtgcctgggggagagaggcagcaagtcttaacaaaccaacatctttgcgaaaagataaacctggagatattataagggagagctgagccagttgtcctatggacaacttatttaaaaatatttcagatatcaaaattctagctgtatgatttgttttgaattttgtttttattttcaagagggcaagtggatgggaatttgtcagcgttctaccaggcaaattcactgtttcactgaaatgtttggattctcttagctactgtatgcaaagtccgattatattggtgcgtttttacagttagggttttgcaataacttctatattttaatagaaataaattcctaaactcccttccctctctcccatttcaggaatttaaaattaagtagaacaaaaaacccagcgcacctgttagagtcgtcactctctattgtcatggggatcaattttcattaaacttgaagcagtcgtggctttggcagtgttttggttcagacacctgttcacagaaaaagcatgatgggaaaatatttcctgacttgagtgttcctttttaaatgtgaatttttatttctttttaattattttaaaatatttaaacctttttcttgatcttaaagatcgtgtagattggggttggggagggatgaagggcgagtgaatctaaggataatgaaataatcagtgactgaaaccattttcccatcatcctttgttctgagcattcgctgtaccctttaagatatccatctttttctttttaaccctaatctttcacttgaaagattttattgtataaaaagtttcacaggtcaataaacttagaggaaaatgagtatttggtccaaaaaaaggaaaaataatcaagattttagggcttttattttttcttttgtaattgtgtaaaaaatggaaaaaaacataaaaagcagaattttaatgtgaagacattttttgctataatcattagttttagaggcattgttagtttagtgtgtgtgcagagtccatttcccacatctttcctcaagtatcttctatttttatcatgaattcccttttaatcaactgtaggttatttaaaataaattcctacaacttaaatggaaa

SEQ ID NO: 328704 - DNA, 719 bp, Homo sapiens
aaatgcgaacttaggctgttacacaactgctggggtctgttctcgccgcccgcccggcagtcaggcagcgtcgccgccgtggtagcagcctcagccgtttctggagtctcgggcccacagtcaccgccgcttacctgcgcctcctcgagcctccggagtccccgtccgcccgcacaggccggttcgccgtctgcgtctcccccacgccgcctcgcctgccgccgcgctcgtccctccgggccgacatgagtggggaccacctccacaacgattcccagatcgaagcggatttccgattgaatgattctcataaacacaaagataaacacaaagatcgagaacaccggcacaaagaacacaagaaggagaaggaccgggaaaagtccaagcatagcaacagtgaacataaagattctgaaaagaaacacaaagagaaggagaagaccaaacacaaagatggaagctcagaaaagcataaagacaaacataaagacagagacaaggaaaaacgaaaagaggaaaaggttcgagcctctggggatgcaaaaataaagaaggagaaggaaaatggcttctctagtccaccacaaattaaagatgaacctgaagatgatggctattttgttcctcctaaagaggatataaagccattaaagagacctcgagatgaggatgatgctgattataaacctaagaaaattaaaacagaagataccaag

SEQ ID NO: 328705 - DNA, 1189 bp, Homo sapiens
  misc_feature (993)..(993): n is a, c, g, or t
aaatgcgaacttaggctgttacacaactgctggggtctgttctcgccgcccgcccggcagtcaggcagcgtcgccgccgtggtagcagcctcagccgtttctggagtctcgggcccacagtcaccgccgcttacctgcgcctcctcgagcctccggagtccccgtccgcccgcacaggccggttcgccgtctgcgtctcccccacgccgcctcgcctgccgccgcgctcgtccctccgggccgacatgagtggggaccacctccacaacgattcccagatcgaagcggatttccgattgaatgattctcataaacacaaagataaacacaaagatcgagaacaccggcacaaagaacacaagaaggagaaggaccgggaaaagtccaagcatagcaacagtgaacataaagattctgaaaagaaacacaaagagaaggagaagaccaaacacaaagatggaagctcagaaaagcataaagacaaacataaagacagagacaaggaaaaacgaaaagaggaaaaggttcgagcctctggggatgcaaaaataaagaaggagaaggaaaatggcttctctagtccaccacaaattaaagatgaacctgaagatgatggctattttgttcctcctaaagaggatataaagccattaaagagacctcgagatgaggatgatgctgattataaacctaagaaaattaaaacagaagataccaagaaggagaagaaaagaaaactagaagaagaagagggggggtcggctgagaaaaagttttttaaaaacaattgtgtgtgggggggggggccccaggtgttatgggaacaatgggctaaagcggcggaccacaaagaagacgcggggccacgaacaggcgggccgggttcccccccaataaaaaaaagcgcgcggcgccaccgcggggccttggaaaccactcgaacgaggggttcgggggccatcagcggtcccacaccaggggagcccagcggangcgataacaacggccgcgcggcggagtgaaacaagagacgacacgaagacgaggacacaacgaacacctacagaaaagaacaagcacagagacgacgaaaagaacacacgagacagcacaagcaaaacacaaaagcagacgcacatagacacgaccgacagacaccggagcgaacgaagagcacgacgagagaacc

SEQ ID NO: 328706 - DNA, 844 bp, Homo sapiens
taagtcattttaaaacattttaatattagtaagtacatattttataataaagtaatacaactgtatttttttgttttttcaaaattcattaattgagattggctacttccagaaacctttgactgaaaaaatggtgcttgggtgtatttgcaaagaaacccaaggacttattagtgtattttcgttgtttttctttcatctccccattttcttttgactaggaaatgactaatgaagagaagaatattatcaccaacctaagcaaatgtgattttacccagatgagccagtatttcaaagcccagacggaagctcggaaacagatgagcaaggaagagaaactggtactacagaatttattaaacctctggagaattctggaattgtgattggttcatttaactttcttcttggttcttatgacacaacattaacatcagtaatttcacatcattctatgctaaagacttagagttctcaaagtctaaattttcttaaaggttttagttagactgaaaattgtgaacaagtactttgctcagtagctctgtacaggaatcttggtgcttcagtgacctaaaaaccagtcagtaactccagccaataatatagtaattaaggatgggcagacctgtcccacagtggctactggatattaaggatttaagacagatgaaatcatattggccatgtacctccctgctctttgatctattttactctggaatcttgtgatgctcatccatctccatcttccagccttggccatcctcattactgaaggatctttctggtatccagctgggatgtcatttttcttctacaggctgcctgtttttgtaaa

SEQ ID NO: 328707 - DNA, 665 bp, Homo sapiens
tcacccatggtggagtgcagtggcgtgatcttggctcactgcaacctctgcctcctgcgttcaagcaattcttgtgtcttagcctccctattagctagctgggattataggcttgcgccaccttgcctggctatattcaaagtctgtctttactacactgtcccaaagtaatctacatttgggtttgggtctttacagggtgagaaggactggcagaaatacgagactgctcggcggctgaaaaaatgtgtggacaagatccggaaccagtatcgagaagactggaagtccaaagagatgaaagtccggcagagagctgtagccctgtacttcatcgacaagcttgctctgagagcaggcaatgaaaaggaggaaggagaaacagcggacactgtgggctgctgctcacttcgtgtggagcacatcaatctacacccagagttggatggtcaggaatatgtggtagagtttgacttcctcgggaaggactccatcagatactataacaaggtccctgttgagaaacgagtaagttaatgtacctgtactgtctgacttgttttccattattcaacaagcatgggttgactgcttttttgtgtgctttgcactttgctgggcaccagcaaaagtgacttgagacaggcacatggcacatgcctgta

SEQ ID NO: 328708 - DNA, 363 bp, Homo sapiens
tcgacccacgcgtccgggcatgttagtttagtgtgggaaatggactctgcacacacatctttcctcaagtatcttctatttttatcatgaattcccttttaatcaactgtaggttatttaaaataaattcctacaacttaaatggaaaaaaaaaaaaaaaaaaaaaaaaaaacaaaaaaaaaaaaaacaaaaacaaaacaacaacaaaaaacacaaaccacacaacaaccacacaaacacaaccacataacaaaacacaaccaacaacaccaccccacccacccacaccacacaaaaaacaaccaccataaccccaccccacccccccccacttcccccacccacccaccaaaccactccccc

SEQ ID NO: 328709 - DNA, 3449 bp, Homo sapiens
agatgaagggattcgattgaatattctcataacacaagatgaccagagtgggagggggcggggaaatgactacaaagaaggagaaggaccgggaaaagtccaagcatagcaacagtgaacataaagattctgaaaagaaacacaaagagaaggagaagaccaaacacaaagatggaagctcagaaaagcataaagacaaacataaagacagagacaaggaaaaacgaaaagaggaaaaggttcgagcctctggggatgcaaaaataaagaaggagaaggaaaatggcttctctagtccaccacaaattaaagatgaacctgaagatgatggctattttgttcctcctaaagaggatataaagccattaaagagacctcgagatgaggatgatgctgattataaacctaagaaaattaaaacagaagataccaagaaggagaagaaaagaaaactagaagaagaagaggatggtaaattgaaaaaacccaagaataaagataaagataaaaaagttcctgagccagataacaagaaaaagaagccgaagaaagaagaggaacagaagtggaaatggtgggaagaagagcgctatcctgaaggcatcaagtggaaattcctagaacataaaggtccagtatttgccccaccatatgagcctcttccagagaatgtcaagttttattatgatggtaaagtcatgaagctgagccccaaagcagaggaagtagctacgttctttgcaaaaatgctcgaccatgaatatactaccaaggaaatatttaggaaaaatttctttaaagactggagaaaggaaatgactaatgaagagaagaatattatcaccaacctaagcaaatgtgattttacccagatgagccagtatttcaaagcccagacggaagctcggaaacagatgagcaaggaagagaaactgaaaatcaaagaggagaatgaaaaattactgaaagaatatggattctgtattatggataaccacaaagagaggattgctaacttcaagatagagcctcctggacttttccgtggccgcggcaaccaccccaagatgggcatgctgaagagacgaatcatgcccgaggatataatcatcaactgtagcaaagatgccaaggttccttctcctcctccaggacataagtggaaagaagtccggcatgataacaaggttacttggctggtttcctggacagagaacatccaaggttccattaaatacatcatgcttaaccctagttcacgaatcaagggtgagaaggactggcagaaatacgagactgctcggcggctgaaaaaatgtgtggacaagatccggaaccagtatcgagaagactggaagtccaaagagatgaaagtccggcagagagctgtagccctgtacttcatcgacaagcttgctctgagagcaggcaatgaaaaggaggaaggagaaacagcggacactgtgggctgctgctcacttcgtgtggagcacatcaatctacacccagagttggatggtcaggaatatgtggtagagtttgacttcctcgggaaggactccatcagatactataacaaggtccctgttgagaaacgagtttttaagaacctacaactatttatggagaacaagcagcccgaggatgatctttttgatagactcaatactggtattctgaataagcatcttcaggatctcatggagggcttgacagccaaggtattccgtacatacaatgcctccatcacgctacagcagcagctaaaagaactgacagccccggatgagaacatcccagcgaagatcctttcttataaccgtgccaatcgagctgttgcaattctttgtaaccatcagagggcaccaccaaaaacttttgagaagtctatgatgaacttgcaaactaagattgatgccaagaaggaacagctagcagatgcccggagagacctgaaaagtgctaaggctgatgccaaggtcatgaaggatgcaaagacgaagaaggtagtagagtcaaagaagaaggctgttcagagactggaggaacagttgatgaagctggaagttcaagccacagaccgagaggaaaataaacagattgccctgggaacctccaaactcaattatctggaccctaggatcacagtggcttggtgcaagaagtggggtgtcccaattgagaagatttacaacaaaacccagcgggagaagtttgcctgggccattgacatggctgatgaagactatgagttttagccagtctcaagaggcagagttctgtgaagaggaacagtgtggtttgggaaagatggataaactgagcctcacttgccctcgtgcctgggggagagaggcagcaagtcttaacaaaccaacatctttgcgaaaagataaacctggagatattataagggagagctgagccagttgtcctatggacaacttatttaaaaatatttcagatatcaaaattctagctgtatgatttgttttgaattttgtttttattttcaagagggcaagtggatgggaatttgtcagcgttctaccaggcaaattcactgtttcactgaaatgtttggattctcttagctactgtatgcaaagtccgattatattggtgcgtttttacagttagggttttgcaataacttctatattttaatagaaataaattcctaaactcccttccctctctcccatttcaggaatttaaaattaagtagaacaaaaaacccagcgcacctgttagagtcgtcactctctattgtcatggggatcaattttcattaaacttgaagcagtcgtggctttggcagtgttttggttcagacacctgttcacagaaaaagcatgatgggaaaatatttcctgacttgagtgttcctttttaaatgtgaatttttatttctttttaattattttaaaatatttaaacctttttcttgatcttaaagatcgtgtagattggggttggggagggatgaagggcgagtgaatctaaggataatgaaataatcagtgactgaaaccattttcccatcatcctttgttctgagcattcgctgtaccctttaagatatccatctttttctttttaaccctaatctttcacttgaaagattttattgtataaaaagtttcacaggtcaataaacttagaggaaaatgagtatttggtccaaaaaaaggaaaaataatcaagattttagggcttttattttttcttttgtaattgtgtaaaaaatggaaaaaaacataaaaagcagaattttaatgtgaagacattttttgctataatcattagttttagaggcattgttagtttagtgtgtgtgcagagtccatttcccacatctttcctcaagtatcttctatttttatcatgaattcccttttaatcaactgtaggttatttaaaataaattcctacaacttaaatggaaa

SEQ ID NO: 328710 - DNA, 3452 bp, Homo sapiens
tcaatgaggcagtggagtagtgaggataggatttacattggtttttaaaagtttagaaacagtaattatttaatacacacactccttaaaaaatttaaaaatccaagcatagcagcagtgaacataaagattctgaaaagaaacacaaagagaaggagaagaccaaacacaaagatggaagctcagaaaagcataaagacaaacataaagacagagacaaggaaaaacgaaaagaggaaaaggttcgagcctctggggatgcaaaaataaagaaggagaaggaaaatggcttctctagtccaccacaaattaaagatgaacctgaagatgatggctattttgttcctcctaaagaggatataaagccattaaagagacctcgagatgaggatgatgctgattataaacctaagaaaattaaaacagaagataccaagaaggagaagaaaagaaaactagaagaagaagaggatggtaaattgaaaaaacccaagaataaagataaagataaaaaagttcctgagccagataacaagaaaaagaagccgaagaaagaagaggaacagaagtggaaatggtgggaagaagagcgctatcctgaaggcatcaagtggaaattcctagaacataaaggtccagtatttgccccaccatatgagcctcttccagagaatgtcaagttttattatgatggtaaagtcatgaagctgagccccaaagcagaggaagtagctacgttctttgcaaaaatgctcgaccatgaatatactaccaaggaaatatttaggaaaaatttctttaaagactggagaaaggaaatgactaatgaagagaagaatattatcaccaacctaagcaaatgtgattttacccagatgagccagtatttcaaagcccagacggaagctcggaaacagatgagcaaggaagagaaactgaaaatcaaagaggagaatgaaaaattactgaaagaatatggattctgtattatggataaccacaaagagaggattgctaacttcaagatagagcctcctggacttttccgtggccgcggcaaccaccccaagatgggcatgctgaagagacgaatcatgcccgaggatataatcatcaactgtagcaaagatgccaaggttccttctcctcctccaggacataagtggaaagaagtccggcatgataacaaggttacttggctggtttcctggacagagaacatccaaggttccattaaatacatcatgcttaaccctagttcacgaatcaagggtgagaaggactggcagaaatacgagactgctcggcggctgaaaaaatgtgtggacaagatccggaaccagtatcgagaagactggaagtccaaagagatgaaagtccggcagagagctgtagccctgtacttcatcgacaagcttgctctgagagcaggcaatgaaaaggaggaaggagaaacagcggacactgtgggctgctgctcacttcgtgtggagcacatcaatctacacccagagttggatggtcaggaatatgtggtagagtttgacttcctcgggaaggactccatcagatactataacaaggtccctgttgagaaacgagtttttaagaacctacaactatttatggagaacaagcagcccgaggatgatctttttgatagactcaatactggtattctgaataagcatcttcaggatctcatggagggcttgacagccaaggtattccgtacatacaatgcctccatcacgctacagcagcagctaaaagaactgacagccccggatgagaacatcccagcgaagatcctttcttataaccgtgccaatcgagctgttgcaattctttgtaaccatcagagggcaccaccaaaaacttttgagaagtctatgatgaacttgcaaactaagattgatgccaagaaggaacagctagcagatgcccggagagacctgaaaagtgctaaggctgatgccaaggtcatgaaggatgcaaagacgaagaaggtagtagagtcaaagaagaaggctgttcagagactggaggaacagttgatgaagctggaagttcaagccacagaccgagaggaaaataaacagattgccctgggaacctccaaactcaattatctggaccctaggatcacagtggcttggtgcaagaagtggggtgtcccaattgagaagatttacaacaaaacccagcgggagaagtttgcctgggccattgacatggctgatgaagactatgagttttagccagtctcaagaggcagagttctgtgaagaggaacagtgtggtttgggaaagatggataaactgagcctcacttgccctcgtgcctgggggagagaggcagcaagtcttaacaaaccaacatctttgcgaaaagataaacctggagatattataagggagagctgagccagttgtcctatggacaacttatttaaaaatatttcagatatcaaaattctagctgtatgatttgttttgaattttgtttttattttcaagagggcaagtggatgggaatttgtcagcgttctaccaggcaaattcactgtttcactgaaatgtttggattctcttagctactgtatgcaaagtccgattatattggtgcgtttttacagttagggttttgcaataacttctatattttaatagaaataaattcctaaactcccttccctctctcccatttcaggaatttaaaattaagtagaacaaaaaacccagcgcacctgttagagtcgtcactctctattgtcatggggatcaattttcattaaacttgaagcagtcgtggctttggcagtgttttggttcagacacctgttcacagaaaaagcatgatgggaaaatatttcctgacttgagtgttcctttttaaatgtgaatttttatttctttttaattattttaaaatatttaaacctttttcttgatcttaaagatcgtgtagattggggttggggagggatgaagggcgagtgaatctaaggataatgaaataatcagtgactgaaaccattttcccatcatcctttgttctgagcattcgctgtaccctttaagatatccatctttttctttttaaccctaatctttcacttgaaagattttattgtataaaaagtttcacaggtcaataaacttagaggaaaatgagtatttggtccaaaaaaaggaaaaataatcaagattttagggcttttattttttcttttgtaattgtgtaaaaaatggaaaaaaacataaaaagcagaattttaatgtgaagacattttttgctataatcattagttttagaggcattgttagtttagtgtgtgtgcagagtccatttcccacatctttcctcaagtatcttctatttttatcatgaattcccttttaatcaactgtaggttatttaaaataaattcctacaacttaaatggaaa

SEQ ID NO: 328711 - DNA, 3764 bp, Homo sapiens
gtctcactctgttgcccaggctggagtgcagtggcacaatcttggctcactgcaacctctgcctcctgggttcaagcaattctcgtgcctcagcctcctgagcagctgggactacaggtgcgcgccaccatgcccagctaatttttgtatttttagtagagacggagtttcaccacattgcccaggctcctgacctggatcacgacctcctgacctcgtgatctgcccgcctcggcctcccaaagtgctgggattacaggcgtatatggtgtttattgtattactcatttttttcttatgttcgaccattttaaaaatacattttcaaaaagttgttcccactgagctttagattcacttatcagtgtttgctagatagttccaggtaatgcgtaagtaccttaaactcaacatgccccagttaagctatcatttcctagtcgtcttcctttatgtcctttctcatagggttgttttctcctctaccttccatctgacgtcaccactctgaggaggccttttccttacaaacaatgtaaacaatccctctgtcatgtatgccattgtggtaaaacaactgtttacattttcaagtccctcacttgttactgagctccttcattgttgatctcttctgtccagtattcttaaactgagctgttgaaatgtattttcctttattcaccacagtatttcatcttacttgtgagcgttggctttttcaaaatgagagacactggttcttttgatccaggccttgaatgtgaggcccagaagtcattccagagcactaatcagttgagcggataattatttggcatttaatcagtgatgatccccatgttagacaaggcgatcactaaatgaggctgtgctttgtcttttaaaggtgggaagaagagcgctatcctgaaggcatcaagtggaaattcctagaacataaaggtccagtatttgccccaccatatgagcctcttccagagaatgtcaagttttattatgatggtaaagtcatgaagctgagccccaaagcagaggaagtagctacgttctttgcaaaaatgctcgaccatgaatatactaccaaggaaatatttaggaaaaatttctttaaagactggagaaaggaaatgactaatgaagagaagaatattatcaccaacctaagcaaatgtgattttacccagatgagccagtatttcaaagcccagacggaagctcggaaacagatgagcaaggaagagaaactgaaaatcaaagaggagaatgaaaaattactgaaagaatatggattctgtattatggataaccacaaagagaggattgctaacttcaagatagagcctcctggacttttccgtggccgcggcaaccaccccaagatgggcatgctgaagagacgaatcatgcccgaggatataatcatcaactgtagcaaagatgccaaggttccttctcctcctccaggacataagtggaaagaagtccggcatgataacaaggttacttggctggtttcctggacagagaacatccaaggttccattaaatacatcatgcttaaccctagttcacgaatcaagggtgagaaggactggcagaaatacgagactgctcggcggctgaaaaaatgtgtggacaagatccggaaccagtatcgagaagactggaagtccaaagagatgaaagtccggcagagagctgtagccctgtacttcatcgacaagcttgctctgagagcaggcaatgaaaaggaggaaggagaaacagcggacactgtgggctgctgctcacttcgtgtggagcacatcaatctacacccagagttggatggtcaggaatatgtggtagagtttgacttcctcgggaaggactccatcagatactataacaaggtccctgttgagaaacgagtttttaagaacctacaactatttatggagaacaagcagcccgaggatgatctttttgatagactcaatactggtattctgaataagcatcttcaggatctcatggagggcttgacagccaaggtattccgtacatacaatgcctccatcacgctacagcagcagctaaaagaactgacagccccggatgagaacatcccagcgaagatcctttcttataaccgtgccaatcgagctgttgcaattctttgtaaccatcagagggcaccaccaaaaacttttgagaagtctatgatgaacttgcaaactaagattgatgccaagaaggaacagctagcagatgcccggagagacctgaaaagtgctaaggctgatgccaaggtcatgaaggatgcaaagacgaagaaggtagtagagtcaaagaagaaggctgttcagagactggaggaacagttgatgaagctggaagttcaagccacagaccgagaggaaaataaacagattgccctgggaacctccaaactcaattatctggaccctaggatcacagtggcttggtgcaagaagtggggtgtcccaattgagaagatttacaacaaaacccagcgggagaagtttgcctgggccattgacatggctgatgaagactatgagttttagccagtctcaagaggcagagttctgtgaagaggaacagtgtggtttgggaaagatggataaactgagcctcacttgccctcgtgcctgggggagagaggcagcaagtcttaacaaaccaacatctttgcgaaaagataaacctggagatattataagggagagctgagccagttgtcctatggacaacttatttaaaaatatttcagatatcaaaattctagctgtatgatttgttttgaattttgtttttattttcaagagggcaagtggatgggaatttgtcagcgttctaccaggcaaattcactgtttcactgaaatgtttggattctcttagctactgtatgcaaagtccgattatattggtgcgtttttacagttagggttttgcaataacttctatattttaatagaaataaattcctaaactcccttccctctctcccatttcaggaatttaaaattaagtagaacaaaaaacccagcgcacctgttagagtcgtcactctctattgtcatggggatcaattttcattaaacttgaagcagtcgtggctttggcagtgttttggttcagacacctgttcacagaaaaagcatgatgggaaaatatttcctgacttgagtgttcctttttaaatgtgaatttttatttctttttaattattttaaaatatttaaacctttttcttgatcttaaagatcgtgtagattggggttggggagggatgaagggcgagtgaatctaaggataatgaaataatcagtgactgaaaccattttcccatcatcctttgttctgagcattcgctgtaccctttaagatatccatctttttctttttaaccctaatctttcacttgaaagattttattgtataaaaagtttcacaggtcaataaacttagaggaaaatgagtatttggtccaaaaaaaggaaaaataatcaagattttagggcttttattttttcttttgtaattgtgtaaaaaatggaaaaaaacataaaaagcagaattttaatgtgaagacattttttgctataatcattagttttagaggcattgttagtttagtgtgtgtgcagagtccatttcccacatctttcctcaagtatcttctatttttatcatgaattcccttttaatcaactgtaggttatttaaaataaattcctacaacttaaatggaaa

SEQ ID NO: 328712 - DNA, 2379 bp, Homo sapiens
tcacccatggtggagtgcagtggcgtgatcttggctcactgcaacctctgcctcctgcgttcaagcaattcttgtgtcttagcctccctattagctagctgggattataggcttgcgccaccttgcctggctatattcaaagtctgtctttactacactgtcccaaagtaatctacatttgggtttgggtctttacagggtgagaaggactggcagaaatacgagactgctcggcggctgaaaaaatgtgtggacaagatccggaaccagtatcgagaagactggaagtccaaagagatgaaagtccggcagagagctgtagccctgtacttcatcgacaagcttgctctgagagcaggcaatgaaaaggaggaaggagaaacagcggacactgtgggctgctgctcacttcgtgtggagcacatcaatctacacccagagttggatggtcaggaatatgtggtagagtttgacttcctcgggaaggactccatcagatactataacaaggtccctgttgagaaacgagtttttaagaacctacaactatttatggagaacaagcagcccgaggatgatctttttgatagactcaatactggtattctgaataagcatcttcaggatctcatggagggcttgacagccaaggtattccgtacatacaatgcctccatcacgctacagcagcagctaaaagaactgacagccccggatgagaacatcccagcgaagatcctttcttataaccgtgccaatcgagctgttgcaattctttgtaaccatcagagggcaccaccaaaaacttttgagaagtctatgatgaacttgcaaactaagattgatgccaagaaggaacagctagcagatgcccggagagacctgaaaagtgctaaggctgatgccaaggtcatgaaggatgcaaagacgaagaaggtagtagagtcaaagaagaaggctgttcagagactggaggaacagttgatgaagctggaagttcaagccacagaccgagaggaaaataaacagattgccctgggaacctccaaactcaattatctggaccctaggatcacagtggcttggtgcaagaagtggggtgtcccaattgagaagatttacaacaaaacccagcgggagaagtttgcctgggccattgacatggctgatgaagactatgagttttagccagtctcaagaggcagagttctgtgaagaggaacagtgtggtttgggaaagatggataaactgagcctcacttgccctcgtgcctgggggagagaggcagcaagtcttaacaaaccaacatctttgcgaaaagataaacctggagatattataagggagagctgagccagttgtcctatggacaacttatttaaaaatatttcagatatcaaaattctagctgtatgatttgttttgaattttgtttttattttcaagagggcaagtggatgggaatttgtcagcgttctaccaggcaaattcactgtttcactgaaatgtttggattctcttagctactgtatgcaaagtccgattatattggtgcgtttttacagttagggttttgcaataacttctatattttaatagaaataaattcctaaactcccttccctctctcccatttcaggaatttaaaattaagtagaacaaaaaacccagcgcacctgttagagtcgtcactctctattgtcatggggatcaattttcattaaacttgaagcagtcgtggctttggcagtgttttggttcagacacctgttcacagaaaaagcatgatgggaaaatatttcctgacttgagtgttcctttttaaatgtgaatttttatttctttttaattattttaaaatatttaaacctttttcttgatcttaaagatcgtgtagattggggttggggagggatgaagggcgagtgaatctaaggataatgaaataatcagtgactgaaaccattttcccatcatcctttgttctgagcattcgctgtaccctttaagatatccatctttttctttttaaccctaatctttcacttgaaagattttattgtataaaaagtttcacaggtcaataaacttagaggaaaatgagtatttggtccaaaaaaaggaaaaataatcaagattttagggcttttattttttcttttgtaattgtgtaaaaaatggaaaaaaacataaaaagcagaattttaatgtgaagacattttttgctataatcattagttttagaggcattgttagtttagtgtgtgtgcagagtccatttcccacatctttcctcaagtatcttctatttttatcatgaattcccttttaatcaactgtaggttatttaaaataaattcctacaacttaaatggaaa

SEQ ID NO: 328713 - DNA, 3949 bp, Homo sapiens
aaatgcgaacttaggctgttacacaactgctggggtctgttctcgccgcccgcccggcagtcaggcagcgtcgccgccgtggtagcagcctcagccgtttctggagtctcgggcccacagtcaccgccgcttacctgcgcctcctcgagcctccggagtccccgtccgcccgcacaggccggttcgccgtctgcgtctcccccacgccgcctcgcctgccgccgcgctcgtccctccgggccgacatgagtggggaccacctccacaacgattcccagatcgaagcggatttccgattgaatgattctcataaacacaaagataaacacaaagatcgagaacaccggcacaaagaacacaagaaggagaaggaccgggaaaagtccaagcatagcaacagtgaacataaagattctgaaaagaaacacaaagagaaggagaagaccaaacacaaagatggaagctcagaaaagcataaagacaaacataaagacagagacaaggaaaaacgaaaagaggaaaaggttcgagcctctggggatgcaaaaataaagaaggagaaggaaaatggcttctctagtccaccacaaattaaagatgaacctgaagatgatggctattttgttcctcctaaagaggatataaagccattaaagagacctcgagatgaggatgatgctgattataaacctaagaaaattaaaacagaagataccaagaaggagaagaaaagaaaactagaagaagaagaggatggtaaattgaaaaaacccaagaataaagataaagataaaaaagttcctgagccagataacaagaaaaagaagccgaagaaagaagaggaacagaagtggaaatggtgggaagaagagcgctatcctgaaggcatcaagtggaaattcctagaacataaaggtccagtatttgccccaccatatgagcctcttccagagaatgtcaagttttattatgatggtaaagtcatgaagctgagccccaaagcagaggaagtagctacgttctttgcaaaaatgctcgaccatgaatatactaccaaggaaatatttaggaaaaatttctttaaagactggagaaaggaaatgactaatgaagagaagaatattatcaccaacctaagcaaatgtgattttacccagatgagccagtatttcaaagcccagacggaagctcggaaacagatgagcaaggaagagaaactgaaaatcaaagaggagaatgaaaaattactgaaagaatatggattctgtattatggataaccacaaagagaggattgctaacttcaagatagagcctcctggacttttccgtggccgcggcaaccaccccaagatgggcatgctgaagagacgaatcatgcccgaggatataatcatcaactgtagcaaagatgccaaggttccttctcctcctccaggacataagtggaaagaagtccggcatgataacaaggttacttggctggtttcctggacagagaacatccaaggttccattaaatacatcatgcttaaccctagttcacgaatcaagggtgagaaggactggcagaaatacgagactgctcggcggctgaaaaaatgtgtggacaagatccggaaccagtatcgagaagactggaagtccaaagagatgaaagtccggcagagagctgtagccctgtacttcatcgacaagcttgctctgagagcaggcaatgaaaaggaggaaggagaaacagcggacactgtgggctgctgctcacttcgtgtggagcacatcaatctacacccagagttggatggtcaggaatatgtggtagagtttgacttcctcgggaaggactccatcagatactataacaaggtccctgttgagaaacgagtttttaagaacctacaactatttatggagaacaagcagcccgaggatgatctttttgatagactcaatactggtattctgaataagcatcttcaggatctcatggagggcttgacagccaaggtattccgtacatacaatgcctccatcacgctacagcagcagctaaaagaactgacagccccggatgagaacatcccagcgaagatcctttcttataaccgtgccaatcgagctgttgcaattctttgtaaccatcagagggcaccaccaaaaacttttgagaagtctatgatgaacttgcaaactaagattgatgccaagaaggaacagctagcagatgcccggagagacctgaaaagtgctaaggctgatgccaaggtcatgaaggatgcaaagacgaagaaggtagtagagtcaaagaagaaggctgttcagagactggaggaacagttgatgaagctggaagttcaagccacagaccgagaggaaaataaacagattgccctgggaacctccaaactcaattatctggaccctaggatcacagtggcttggtgcaagaagtggggtgtcccaattgagaagatttacaacaaaacccagcgggagaagtttgcctgggccattgacatggctgatgaagactatgagttttagccagtctcaagaggcagagttctgtgaagaggaacagtgtggtttgggaaagatggataaactgagcctcacttgccctcgtgcctgggggagagaggcagcaagtcttaacaaaccaacatctttgcgaaaagataaacctggagatattataagggagagctgagccagttgtcctatggacaacttatttaaaaatatttcagatatcaaaattctagctgtatgatttgttttgaattttgtttttattttcaagagggcaagtggatgggaatttgtcagcgttctaccaggcaaattcactgtttcactgaaatgtttggattctcttagctactgtatgcaaagtccgattatattggtgcgtttttacagttagggttttgcaataacttctatattttaatagaaataaattcctaaactcccttccctctctcccatttcaggaatttaaaattaagtagaacaaaaaacccagcgcacctgttagagtcgtcactctctattgtcatggggatcaattttcattaaacttgaagcagtcgtggctttggcagtgttttggttcagacacctgttcacagaaaaagcatgatgggaaaatatttcctgacttgagtgttcctttttaaatgtgaatttttatttctttttaattattttaaaatatttaaacctttttcttgatcttaaagatcgtgtagattggggttggggagggatgaagggcgagtgaatctaaggataatgaaataatcagtgactgaaaccattttcccatcatcctttgttctgagcattcgctgtaccctttaagatatccatctttttctttttaaccctaatctttcacttgaaagattttattgtataaaaagtttcacaggtcaataaacttagaggaaaatgagtatttggtccaaaaaaaggaaaaataatcaagattttagggcttttattttttcttttgtaattgtgtaaaaaatggaaaaaaacataaaaagcagaattttaatgtgaagacattttttgctataatcattagttttagaggcattgttagtttagtgtgtgtgcagagtccatttcccacatctttcctcaagtatcttctatttttatcatgaattcccttttaatcaactgtaggttatttaaaataaattcctacaacttaaatggaaaaaaaaaaaaaaaaaaaaaaaaaaacaaaaaaaaaaaaaacaaaaacaaaacaacaacaaaaaacacaaaccacacaacaaccacacaaacacaaccacataacaaaacacaaccaacaacaccaccccacccacccacaccacacaaaaaacaaccaccataaccccaccccacccccccccacttcccccacccacccaccaaaccactccccc

SEQ ID NO: 328714 - DNA, 3895 bp, Homo sapiens
aaatgcgaacttaggctgttacacaactgctggggtctgttctcgccgcccgcccggcagtcaggcagcgtcgccgccgtggtagcagcctcagccgtttctggagtctcgggcccacagtcaccgccgcttacctgcgcctcctcgagcctccggagtccccgtccgcccgcacaggccggttcgccgtctgcgtctcccccacgccgcctcgcctgccgccgcgctcgtccctccgggccgacatgagtggggaccacctccacaacgattcccagatcgaagcggatttccgattgaatgattctcataaacacaaagataaacacaaagatcgagaacaccggcacaaagaacacaagaaggagaaggaccgggaaaagtccaagcatagcaacagtgaacataaagattctgaaaagaaacacaaagagaaggagaagaccaaacacaaagatggaagctcagaaaagcataaagacaaacataaagacagagacaaggaaaaacgaaaagaggaaaaggttcgagcctctggggatgcaaaaataaagaaggagaaggaaaatggcttctctagtccaccacaaattaaagatgaacctgaagatgatggctattttgttcctcctaaagaggatataaagccattaaagagacctcgagatgaggatgatgctgattataaacctaagaaaattaaaacagaagataccaagaaggagaagaaaagaaaactagaagaagaagaggatggtaaattgaaaaaacccaagaataaagataaagataaaaaagttcctgagccagataacaagaaaaagaagccgaagaaagaagaggaacagaagtggaaatggtgggaagaagagcgctatcctgaaggcatcaagtggaaattcctagaacataaaggtccagtatttgccccaccatatgagcctcttccagagaatgtcaagttttattatgatggtaaagtcatgaagctgagccccaaagcagaggaagtagctacgttctttgcaaaaatgctcgaccatgaatatactaccaaggaaatatttaggaaaaatttctttaaagactggagaaaggaaatgactaatgaagagaagaatattatcaccaacctaagcaaatgtgattttacccagatgagccagtatttcaaagcccagacggaagctcggaaacagatgagcaaggaagagaaactgaaaatcaaagaggagaatgaaaaattactgaaagaatatggattctgtattatggataaccacaaagagaggattgctaacttcaagatagagcctcctggacttttccgtggccgcggcaaccaccccaagatgggcatgctgaagagacgaatcatgcccgaggatataatcatcaactgtagcaaagatgccaaggttccttctcctcctccaggacataagtggaaagaagtccggcatgataacaaggttacttggctggtttcctggacagagaacatccaaggttccattaaatacatcatgcttaaccctagttcacgaatcaagggtgagaaggactggcagaaatacgagactgctcggcggctgaaaaaatgtgtggacaagatccggaaccagtatcgagaagactggaagtccaaagagatgaaagtccggcagagagctgtagccctgtacttcatcgacaagcttgctctgagagcaggcaatgaaaaggaggaaggagaaacagcggacactgtgggctgctgctcacttcgtgtggagcacatcaatctacacccagagttggatggtcaggaatatgtggtagagtttgacttcctcgggaaggactccatcagatactataacaaggtccctgttgagaaacgagtttttaagaacctacaactatttatggagaacaagcagcccgaggatgatctttttgatagactcaatactggtattctgaataagcatcttcaggatctcatggagggcttgacagccaaggtattccgtacatacaatgcctccatcacgctacagcagcagctaaaagaactgacagccccggatgagaacatcccagcgaagatcctttcttataaccgtgccaatcgagctgttgcaattctttgtaaccatcagagggcaccaccaaaaacttttgagaagtctatgatgaacttgcaaactaagattgatgccaagaaggaacagctagcagatgcccggagagacctgaaaagtgctaaggctgatgccaaggtcatgaaggatgcaaagacgaagaaggtagtagagtcaaagaagaaggctgttcagagactggaggaacagttgatgaagctggaagttcaagccacagaccgagaggaaaataaacagattgccctgggaacctccaaactcaattatctggaccctaggatcacagtggcttggtgcaagaagtggggtgtcccaattgagaagatttacaacaaaacccagcgggagaagtttgcctgggccattgacatggctgatgaagactatgagttttagccagtctcaagaggcagagttctgtgaagaggaacagtgtggtttgggaaagatggataaactgagcctcacttgccctcgtgcctgggggagagaggcagcaagtcttaacaaaccaacatctttgcgaaaagataaacctggagatattataagggagagctgagccagttgtcctatggacaacttatttaaaaatatttcagatatcaaaattctagctgtatgatttgttttgaattttgtttttattttcaagagggcaagtggatgggaatttgtcagcgttctaccaggcaaattcactgtttcactgaaatgtttggattctcttagctactgtatgcaaagtccgattatattggtgcgtttttacagttagggttttgcaataacttctatattttaatagaaataaattcctaaactcccttccctctctcccatttcaggaatttaaaattaagtagaacaaaaaacccagcgcacctgttagagtcgtcactctctattgtcatggggatcaattttcattaaacttgaagcagtcgtggctttggcagtgttttggttcagacacctgttcacagaaaaagcatgatgggaaaatatttcctgacttgagtgttcctttttaaatgtgaatttttatttctttttaattattttaaaatatttaaacctttttcttgatcttaaagatcgtgtagattggggttggggagggatgaagggcgagtgaatctaaggataatgaaataatcagtgactgaaaccattttcccatcatcctttgttctgagcattcgctgtaccctttaagatatccatctttttctttttaaccctaatctttcacttgaaagattttattgtataaaaagtttcacaggtcaataaacttagaggaaaatgagtatttggtccaaaaaaaggaaaaataatcaagattttagggcttttattttttcttttgtaattgtgtaaaaaatggaaaaaaacatagcattgttagtttagtgtgtgtgcagagtccatttcccacatctttcctcaagtatcttctatttttatcatgaattcccttttaatcaactgtaggttatttaaaataaattcctacaacttaaatggaaaaaaaaaaaaaaaaaaaaaaaaaaacaaaaaaaaaaaaaacaaaaacaaaacaacaacaaaaaacacaaaccacacaacaaccacacaaacacaaccacataacaaaacacaaccaacaacaccaccccacccacccacaccacacaaaaaacaaccaccataaccccaccccacccccccccacttcccccacccacccaccaaaccactccccc

SEQ ID NO: 328715 - DNA, 1645 bp, Homo sapiens
cttctctgcctccctcttcattccaggcaggcagaaggggaaaagtaaaatggcaggcatggctgcagctgcactccccaggtagaagcgtcaggaggccacagctaactgctagggaggctgggaaatgtggcccaacagtgtctgagaggaggaggcaacaaggactcgggcaggcagcatttctgccacacttgtgggtcccactctaaaccctaacagattttctactccaaagattgaaagagtgaagaaatagagtcttgtcacagggatactgaatcttcatctttcccactattgccacttctccaaactcaattatctggaccctaggatcacagtggcttggtgcaagaagtggggtgtcccaattgagaagatttacaacaaaacccagcgggagaagtttgcctgggccattgacatggctgatgaagactatgagttttagccagtctcaagaggcagagttctgtgaagaggaacagtgtggtttgggaaagatggataaactgagcctcacttgccctcgtgcctgggggagagaggcagcaagtcttaacaaaccaacatctttgcgaaaagataaacctggagatattataagggagagctgagccagttgtcctatggacaacttatttaaaaatatttcagatatcaaaattctagctgtatgatttgttttgaattttgtttttattttcaagagggcaagtggatgggaatttgtcagcgttctaccaggcaaattcactgtttcactgaaatgtttggattctcttagctactgtatgcaaagtccgattatattggtgcgtttttacagttagggttttgcaataacttctatattttaatagaaataaattcctaaactcccttccctctctcccatttcaggaatttaaaattaagtagaacaaaaaacccagcgcacctgttagagtcgtcactctctattgtcatggggatcaattttcattaaacttgaagcagtcgtggctttggcagtgttttggttcagacacctgttcacagaaaaagcatgatgggaaaatatttcctgacttgagtgttcctttttaaatgtgaatttttatttctttttaattattttaaaatatttaaacctttttcttgatcttaaagatcgtgtagattggggttggggagggatgaagggcgagtgaatctaaggataatgaaataatcagtgactgaaaccattttcccatcatcctttgttctgagcattcgctgtaccctttaagatatccatctttttctttttaaccctaatctttcacttgaaagattttattgtataaaaagtttcacaggtcaataaacttagaggaaaatgagtatttggtccaaaaaaaggaaaaataatcaagattttagggcttttattttttcttttgtaattgtgtaaaaaatggaaaaaaacataaaaagcagaattttaatgtgaagacattttttgctataatcattagttttagaggcattgttagtttagtgtgtgtgcagagtccatttcccacatctttcctcaagtatcttctatttttatcatgaattcccttttaatcaactgtaggttatttaaaataaattcctacaacttaaatggaaa

SEQ ID NO: 328716 - DNA, 3086 bp, Homo sapiens
aaatgcgaacttaggctgttacacaactgctggggtctgttctcgccgcccgcccggcagtcaggcagcgtcgccgccgtggtagcagcctcagccgtttctggagtctcgggcccacagtcaccgccgcttacctgcgcctcctcgagcctccggagtccccgtccgcccgcacaggccggttcgccgtctgcgtctcccccacgccgcctcgcctgccgccgcgctcgtccctccgggccgacatgagtggggaccacctccacaacgattcccagatcgaagcggatttccgattgaatgattctcataaacacaaagataaacacaaagatcgagaacaccggcacaaagaacacaagaaggagaaggaccgggaaaagtccaagcatagcaacagtgaacataaagattctgaaaagaaacacaaagagaaggagaagaccaaacacaaagatggaagctcagaaaagcataaagacaaacataaagacagagacaaggaaaaacgaaaagaggaaaaggttcgagcctctggggatgcaaaaataaagaaggagaaggaaaatggcttctctagtccaccacaaattaaagatgaacctgaagatgatggctattttgttcctcctaaagaggatataaagccattaaagagacctcgagatgaggatgatgctgattataaacctaagaaaattaaaacagaagataccaagaaggagaagaaaagaaaactagaagaagaagaggatggtaaattgaaaaaacccaagaataaagataaagataaaaaagttcctgagccagataacaagaaaaagaagccgaagaaagaagaggaacagaagtggaaatggtgggaagaagagcgctatcctgaaggcatcaagtggaaattcctagaacataaaggtccagtatttgccccaccatatgagcctcttccagagaatgtcaagttttattatgatggtaaagtcatgaagctgagccccaaagcagaggaagtagctacgttctttgcaaaaatgctcgaccatgaatatactaccaaggaaatatttaggaaaaatttctttaaagactggagaaaggaaatgactaatgaagagaagaatattatcaccaacctaagcaaatgtgattttacccagatgagccagtatttcaaagcccagacggaagctcggaaacagatgagcaaggaagagaaactgaaaatcaaagaggagaatgaaaaattactgaaagaatatggattctgtattatggataaccacaaagagaggattgctaacttcaagatagagcctcctggacttttccgtggccgcggcaaccaccccaagatgggcatgctgaagagacgaatcatgcccgaggatataatcatcaactgtagcaaagatgccaaggttccttctcctcctccaggacataagtggaaagaagtccggcatgataacaaggttacttggctggtttcctggacagagaacatccaaggttccattaaatacatcatgcttaaccctagttcacgaatcaagggtgagaaggactggcagaaatacgagactgctcggcggctgaaaaaatgtgtggacaagatccggaaccagtatcgagaagactggaagtccaaagagatgaaagtccggcagagagctgtagccctgtacttcatcgacaagcttgctctgagagcaggcaatgaaaaggaggaaggagaaacagcggacactgtgggctgctgctcacttcgtgtggagcacatcaatctacacccagagttggatggtcaggaatatgtggtagagtttgacttcctcgggaaggactccatcagatactataacaaggtccctgttgagaaacgagtttttaagaacctacaactatttatggagaacaagcagcccgaggatgatctttttgatagactcaatactggtattctgaataagcatcttcaggatctcatggagggcttgacagccaaggtattccgtacatacaatgcctccatcacgctacagcagcagctaaaagaactgacagccccggatgagaacatcccagcgaagatcctttcttataaccgtgccaatcgagctgttgcaattctttgtaaccatcagagggcaccaccaaaaacttttgagaagtctatgatgaacttgcaaactaagattgatgccaagaaggaacagctagcagatgcccggagagacctgaaaagtgctaaggctgatgccaaggtcatgaaggatgcaaagacgaagaaggtagtagagtcaaagaagaaggctgttcagagactggaggaacagttgatgaagctggaagttcaagccacagaccgagaggaaaataaacagattgccctgggaacctccaaactcaattatctggaccctaggatcacagtggcttggtgcaagaagtggggtgtcccaattgagaagatttacaacaaaacccagcgggagaagtttgcctgggccattgacatggctgatgaagactatgagttttagccagtctcaagaggcagagttctgtgaagaggaacagtgtggtttgggaaagatggataaactgagcctcacttgccctcgtgcctgggggagagaggcagcaagtcttaacaaaccaacatctttgcgaaaagataaacctggagatattataagggagagctgagccagttgtcctatggacaacttatttaaaaatatttcagatatcaaaattctagctgtatgatttgttttgaattttgtttttattttcaagagggcaagtggatgggaatttgtcagcgttctaccaggcaaattcactgtttcactgaaatgtttggattctcttagctactgtatgcaaagtccgattatattggtgcgtttttacagttagggttttgcaataacttctatattttaatagaaataaattcctaaactcccttccctctctcccatttcaggaatttaaaattaagtagaacaaaaaacccagcgcacctgttagagtcgtcactctctattgtcatgagatgtgggaaggggggatctcta

SEQ ID NO: 328717 - DNA, 2901 bp, Homo sapiens
aaatgcgaacttaggctgttacacaactgctggggtctgttctcgccgcccgcccggcagtcaggcagcgtcgccgccgtggtagcagcctcagccgtttctggagtctcgggcccacagtcaccgccgcttacctgcgcctcctcgagcctccggagtccccgtccgcccgcacaggccggttcgccgtctgcgtctcccccacgccgcctcgcctgccgccgcgctcgtccctccgggccgacatgagtggggaccacctccacaacgattcccagatcgaagcggatttccgattgaatgattctcataaacacaaagataaacacaaagatcgagaacaccggcacaaagaacacaagaaggagaaggaccgggaaaagtccaagcatagcaacagtgaacataaagattctgaaaagaaacacaaagagaaggagaagaccaaacacaaagatggaagctcagaaaagcataaagacaaacataaagacagagacaaggaaaaacgaaaagaggaaaaggttcgagcctctggggatgcaaaaataaagaaggagaaggaaaatggcttctctagtccaccacaaattaaagatgaacctgaagatgatggctattttgttcctcctaaagaggatataaagccattaaagagacctcgagatgaggatgatgctgattataaacctaagaaaattaaaacagaagataccaagaaggagaagaaaagaaaactagaagaagaagaggatggtaaattgaaaaaacccaagaataaagataaagataaaaaagttcctgagccagataacaagaaaaagaagccgaagaaagaagaggaacagaagtggaaatggtgggaagaagagcgctatcctgaaggcatcaagtggaaattcctagaacataaaggtccagtatttgccccaccatatgagcctcttccagagaatgtcaagttttattatgatggtaaagtcatgaagctgagccccaaagcagaggaagtagctacgttctttgcaaaaatgctcgaccatgaatatactaccaaggaaatatttaggaaaaatttctttaaagactggagaaaggaaatgactaatgaagagaagaatattatcaccaacctaagcaaatgtgattttacccagatgagccagtatttcaaagcccagacggaagctcggaaacagatgagcaaggaagagaaactgaaaatcaaagaggagaatgaaaaattactgaaagaatatggattctgtattatggataaccacaaagagaggattgctaacttcaagatagagcctcctggacttttccgtggccgcggcaaccaccccaagatgggcatgctgaagagacgaatcatgcccgaggatataatcatcaactgtagcaaagatgccaaggttccttctcctcctccaggacataagtggaaagaagtccggcatgataacaaggttacttggctggtttcctggacagagaacatccaaggttccattaaatacatcatgcttaaccctagttcacgaatcaagggtgagaaggactggcagaaatacgagactgctcggcggctgaaaaaatgtgtggacaagatccggaaccagtatcgagaagactggaagtccaaagagatgaaagtccggcagagagctgtagccctgtacttcatcgacaagcttgctctgagagcaggcaatgaaaaggaggaaggagaaacagcggacactgtgggctgctgctcacttcgtgtggagcacatcaatctacacccagagttggatggtcaggaatatgtggtagagtttgacttcctcgggaaggactccatcagatactataacaaggtccctgttgagaaacgagtttttaagaacctacaactatttatggagaacaagcagcccgaggatgatctttttgatagactcaatactggtattctgaataagcatcttcaggatctcatggagggcttgacagccaaggtattccgtacatacaatgcctccatcacgctacagcagcagctaaaagaactgacagccccggatgagaacatcccagcgaagatcctttcttataaccgtgccaatcgagctgttgcaattctttgtaaccatcagagggcaccaccaaaaacttttgagaagtctatgatgaacttgcaaactaagattgatgccaagaaggaacagctagcagatgcccggagagacctgaaaagtgctaaggctgatgccaaggtcatgaaggatgcaaagacgaagaaggtagtagagtcaaagaagaaggctgttcagagactggaggaacagttgatgaagctggaagttcaagccacagaccgagaggaaaataaacagattgccctgggaacctccaaactcaattatctggaccctaggatcacagtggcttggtgcaagaagtggggtgtcccaattgagaagatttacaacaaaacccagcgggagaagtttgcctgggccattgacatggctgatgaagactatgagttttagccagtctcaagaggcagagttctgtgaagaggaacagtgtggtttgggaaagatggataaactgagcctcacttgccctcgtgcctgggggagagaggcagcaagtcttaacaaaccaacatctttgcgaaaagataaacctggagatattataagggagagctgagccagttgtcctatggacaacttatttaaaaatatttcagatatcaaaattctagctgtatgatttgttttgaattttgtttttattttcaagaggaggctcagtttatccatctttcccaaaccacactgttcctcttcacagaactctgcctcttgagactggctaaaacttatagtcttcatcagccat

SEQ ID NO: 328718 - DNA, 1720 bp, Homo sapiens
aaatgcgaacttaggctgttacacaactgctggggtctgttctcgccgcccgcccggcagtcaggcagcgtcgccgccgtggtagcagcctcagccgtttctggagtctcgggcccacagtcaccgccgcttacctgcgcctcctcgagcctccggagtccccgtccgcccgcacaggccggttcgccgtctgcgtctcccccacgccgcctcgcctgccgccgcgctcgtccctccgggccgacatgagtggggaccacctccacaacgattcccagatcgaagcggatttccgattgaatgattctcataaacacaaagataaacacaaagatcgagaacaccggcacaaagaacacaagaaggagaaggaccgggaaaagtccaagcatagcaacagtgaacataaagattctgaaaagaaacacaaagagaaggagaagaccaaacacaaagatggaagctcagaaaagcataaagacaaacataaagacagagacaaggaaaaacgaaaagaggaaaaggttcgagcctctggggatgcaaaaataaagaaggagaaggaaaatggcttctctagtccaccacaaattaaagatgaacctgaagatgatggctattttgttcctcctaaagaggatataaagccattaaagagacctcgagatgaggatgatgctgattataaacctaagaaaattaaaacagaagataccaagaaggagaagaaaagaaaactagaagaagaagaggatggtaaattgaaaaaacccaagaataaagataaagataaaaaagttcctgagccagataacaagaaaaagaagccgaagaaagaagaggaacagaagtggaaatggtgggaagaagagcgctatcctgaaggcatcaagtggaaattcctagaacataaaggtccagtatttgccccaccatatgagcctcttccagagaatgtcaagttttattatgatggtaaagtcatgaagctgagccccaaagcagaggaagtagctacgttctttgcaaaaatgctcgaccatgaatatactaccaaggaaatatttaggaaaaatttctttaaagactggagaaaggaaatgactaatgaagagaagaatattatcaccaacctaagcaaatgtgattttacccagatgagccagtatttcaaagcccagacggaagctcggaaacagatgagcaaggaagagaaactggtactacagaatttattaaacctctggagaattctggaattgtgattggttcatttaactttcttcttggttcttatgacacaacattaacatcagtaatttcacatcattctatgctaaagacttagagttctcaaagtctaaattttcttaaaggttttagttagactgaaaattgtgaacaagtactttgctcagtagctctgtacaggaatcttggtgcttcagtgacctaaaaaccagtcagtaactccagccaataatatagtaattaaggatgggcagacctgtcccacagtggctactggatattaaggatttaagacagatgaaatcatattggccatgtacctccctgctctttgatctattttactctggaatcttgtgatgctcatccatctccatcttccagccttggccatcctcattactgaaggatctttctggtatccagctgggatgtcatttttcttctacaggctgcctgtttttgtaaa

SEQ ID NO: 328719 - DNA, 1373 bp, Homo sapiens
aaatgcgaacttaggctgttacacaactgctggggtctgttctcgccgcccgcccggcagtcaggcagcgtcgccgccgtggtagcagcctcagccgtttctggagtctcgggcccacagtcaccgccgcttacctgcgcctcctcgagcctccggagtccccgtccgcccgcacaggccggttcgccgtctgcgtctcccccacgccgcctcgcctgccgccgcgctcgtccctccgggccgacatgagtggggaccacctccacaacgattcccagatcgaagcggatttccgattgaatgattctcataaacacaaagataaacacaaagatcgagaacaccggcacaaagaacacaagaaggagaaggaccgggaaaagtccaagcatagcaacagtgaacataaagattctgaaaagaaacacaaagagaaggagaagaccaaacacaaagatggaagctcagaaaagcataaagacaaacataaagacagagacaaggaaaaacgaaaagaggaaaaggttcgagcctctggggatgcaaaaataaagaaggagaaggaaaatggcttctctagtccaccacaaattaaagatgaacctgaagatgatggctattttgttcctcctaaagaggatataaagccattaaagagacctcgagatgaggatgatgctgattataaacctaagaaaattaaaacagaagataccaagaaggagaagaaaagaaaactagaagaagaagaggatggtaaattgaaaaaacccaagaataaagataaagataaaaaagttcctgagccagataacaagaaaaagaagccgaagaaagaagaggaacagaagtggaaatggtaacatctcagcactgggttaaaatgccaccttttttattgcatatccttacgaagcaagagtattgagttattaaaattaatatcctgatatttggggggaaatactttaaacaatttctctagagtaactttctgaagtaagttttccaacttctagtgaaatcattaactggttctaaatctattggatctcaaactggtttccaccactgtgaacagaatggactgtagaagcagacctatgtataggtgggaatttagcatacgaagagagtacagatgcatttaaaaccatacggaaaggacagattattatgtaagtcgtgttgggaaaactgcctgttcaacaacagaagaaacctcaacaagaaaacgtgggtgaatatttttataattgtgcagtagtgaagatcctttgaagcaagacataaccagagccataaggaaaggtgttttacatttgatacatcaaagttcaatttatggcaggtggacaccttcatgccattta

SEQ ID NO: 328720 - DNA, 3084 bp, Homo sapiens
ctctagtcagaagagatatgaggaaatcgttacggaagtagcactacattaagaaaatggctaaacccgacacagtagcattgtgccaatttctggttggaatggtgacaacatgctggagccaagaataaagataaagataaaaaagttcctgagccagataacaagaaaaagaagccgaagaaagaagaggaacagaagtggaaatggtgggaagaagagcgctatcctgaaggcatcaagtggaaattcctagaacataaaggtccagtatttgccccaccatatgagcctcttccagagaatgtcaagttttattatgatggtaaagtcatgaagctgagccccaaagcagaggaagtagctacgttctttgcaaaaatgctcgaccatgaatatactaccaaggaaatatttaggaaaaatttctttaaagactggagaaaggaaatgactaatgaagagaagaatattatcaccaacctaagcaaatgtgattttacccagatgagccagtatttcaaagcccagacggaagctcggaaacagatgagcaaggaagagaaactgaaaatcaaagaggagaatgaaaaattactgaaagaatatggattctgtattatggataaccacaaagagaggattgctaacttcaagatagagcctcctggacttttccgtggccgcggcaaccaccccaagatgggcatgctgaagagacgaatcatgcccgaggatataatcatcaactgtagcaaagatgccaaggttccttctcctcctccaggacataagtggaaagaagtccggcatgataacaaggttacttggctggtttcctggacagagaacatccaaggttccattaaatacatcatgcttaaccctagttcacgaatcaagggtgagaaggactggcagaaatacgagactgctcggcggctgaaaaaatgtgtggacaagatccggaaccagtatcgagaagactggaagtccaaagagatgaaagtccggcagagagctgtagccctgtacttcatcgacaagcttgctctgagagcaggcaatgaaaaggaggaaggagaaacagcggacactgtgggctgctgctcacttcgtgtggagcacatcaatctacacccagagttggatggtcaggaatatgtggtagagtttgacttcctcgggaaggactccatcagatactataacaaggtccctgttgagaaacgagtttttaagaacctacaactatttatggagaacaagcagcccgaggatgatctttttgatagactcaatactggtattctgaataagcatcttcaggatctcatggagggcttgacagccaaggtattccgtacatacaatgcctccatcacgctacagcagcagctaaaagaactgacagccccggatgagaacatcccagcgaagatcctttcttataaccgtgccaatcgagctgttgcaattctttgtaaccatcagagggcaccaccaaaaacttttgagaagtctatgatgaacttgcaaactaagattgatgccaagaaggaacagctagcagatgcccggagagacctgaaaagtgctaaggctgatgccaaggtcatgaaggatgcaaagacgaagaaggtagtagagtcaaagaagaaggctgttcagagactggaggaacagttgatgaagctggaagttcaagccacagaccgagaggaaaataaacagattgccctgggaacctccaaactcaattatctggaccctaggatcacagtggcttggtgcaagaagtggggtgtcccaattgagaagatttacaacaaaacccagcgggagaagtttgcctgggccattgacatggctgatgaagactatgagttttagccagtctcaagaggcagagttctgtgaagaggaacagtgtggtttgggaaagatggataaactgagcctcacttgccctcgtgcctgggggagagaggcagcaagtcttaacaaaccaacatctttgcgaaaagataaacctggagatattataagggagagctgagccagttgtcctatggacaacttatttaaaaatatttcagatatcaaaattctagctgtatgatttgttttgaattttgtttttattttcaagagggcaagtggatgggaatttgtcagcgttctaccaggcaaattcactgtttcactgaaatgtttggattctcttagctactgtatgcaaagtccgattatattggtgcgtttttacagttagggttttgcaataacttctatattttaatagaaataaattcctaaactcccttccctctctcccatttcaggaatttaaaattaagtagaacaaaaaacccagcgcacctgttagagtcgtcactctctattgtcatggggatcaattttcattaaacttgaagcagtcgtggctttggcagtgttttggttcagacacctgttcacagaaaaagcatgatgggaaaatatttcctgacttgagtgttcctttttaaatgtgaatttttatttctttttaattattttaaaatatttaaacctttttcttgatcttaaagatcgtgtagattggggttggggagggatgaagggcgagtgaatctaaggataatgaaataatcagtgactgaaaccattttcccatcatcctttgttctgagcattcgctgtaccctttaagatatccatctttttctttttaaccctaatctttcacttgaaagattttattgtataaaaagtttcacaggtcaataaacttagaggaaaatgagtatttggtccaaaaaaaggaaaaataatcaagattttagggcttttattttttcttttgtaattgtgtaaaaaatggaaaaaaacataaaaagcagaattttaatgtgaagacattttttgctataatcattagttttagaggcattgttagtttagtgtgtgtgcagagtccatttcccacatctttcctcaagtatcttctatttttatcatgaattcccttttaatcaactgtaggttatttaaaataaattcctacaacttaaatggaaa

SEQ ID NO: 328721 - DNA, 2858 bp, Homo sapiens
taagtcattttaaaacattttaatattagtaagtacatattttataataaagtaatacaactgtatttttttgttttttcaaaattcattaattgagattggctacttccagaaacctttgactgaaaaaatggtgcttgggtgtatttgcaaagaaacccaaggacttattagtgtattttcgttgtttttctttcatctccccattttcttttgactaggaaatgactaatgaagagaagaatattatcaccaacctaagcaaatgtgattttacccagatgagccagtatttcaaagcccagacggaagctcggaaacagatgagcaaggaagagaaactgaaaatcaaagaggagaatgaaaaattactgaaagaatatggattctgtattatggataaccacaaagagaggattgctaacttcaagatagagcctcctggacttttccgtggccgcggcaaccaccccaagatgggcatgctgaagagacgaatcatgcccgaggatataatcatcaactgtagcaaagatgccaaggttccttctcctcctccaggacataagtggaaagaagtccggcatgataacaaggttacttggctggtttcctggacagagaacatccaaggttccattaaatacatcatgcttaaccctagttcacgaatcaagggtgagaaggactggcagaaatacgagactgctcggcggctgaaaaaatgtgtggacaagatccggaaccagtatcgagaagactggaagtccaaagagatgaaagtccggcagagagctgtagccctgtacttcatcgacaagcttgctctgagagcaggcaatgaaaaggaggaaggagaaacagcggacactgtgggctgctgctcacttcgtgtggagcacatcaatctacacccagagttggatggtcaggaatatgtggtagagtttgacttcctcgggaaggactccatcagatactataacaaggtccctgttgagaaacgagtttttaagaacctacaactatttatggagaacaagcagcccgaggatgatctttttgatagactcaatactggtattctgaataagcatcttcaggatctcatggagggcttgacagccaaggtattccgtacatacaatgcctccatcacgctacagcagcagctaaaagaactgacagccccggatgagaacatcccagcgaagatcctttcttataaccgtgccaatcgagctgttgcaattctttgtaaccatcagagggcaccaccaaaaacttttgagaagtctatgatgaacttgcaaactaagattgatgccaagaaggaacagctagcagatgcccggagagacctgaaaagtgctaaggctgatgccaaggtcatgaaggatgcaaagacgaagaaggtagtagagtcaaagaagaaggctgttcagagactggaggaacagttgatgaagctggaagttcaagccacagaccgagaggaaaataaacagattgccctgggaacctccaaactcaattatctggaccctaggatcacagtggcttggtgcaagaagtggggtgtcccaattgagaagatttacaacaaaacccagcgggagaagtttgcctgggccattgacatggctgatgaagactatgagttttagccagtctcaagaggcagagttctgtgaagaggaacagtgtggtttgggaaagatggataaactgagcctcacttgccctcgtgcctgggggagagaggcagcaagtcttaacaaaccaacatctttgcgaaaagataaacctggagatattataagggagagctgagccagttgtcctatggacaacttatttaaaaatatttcagatatcaaaattctagctgtatgatttgttttgaattttgtttttattttcaagagggcaagtggatgggaatttgtcagcgttctaccaggcaaattcactgtttcactgaaatgtttggattctcttagctactgtatgcaaagtccgattatattggtgcgtttttacagttagggttttgcaataacttctatattttaatagaaataaattcctaaactcccttccctctctcccatttcaggaatttaaaattaagtagaacaaaaaacccagcgcacctgttagagtcgtcactctctattgtcatggggatcaattttcattaaacttgaagcagtcgtggctttggcagtgttttggttcagacacctgttcacagaaaaagcatgatgggaaaatatttcctgacttgagtgttcctttttaaatgtgaatttttatttctttttaattattttaaaatatttaaacctttttcttgatcttaaagatcgtgtagattggggttggggagggatgaagggcgagtgaatctaaggataatgaaataatcagtgactgaaaccattttcccatcatcctttgttctgagcattcgctgtaccctttaagatatccatctttttctttttaaccctaatctttcacttgaaagattttattgtataaaaagtttcacaggtcaataaacttagaggaaaatgagtatttggtccaaaaaaaggaaaaataatcaagattttagggcttttattttttcttttgtaattgtgtaaaaaatggaaaaaaacataaaaagcagaattttaatgtgaagacattttttgctataatcattagttttagaggcattgttagtttagtgtgtgtgcagagtccatttcccacatctttcctcaagtatcttctatttttatcatgaattcccttttaatcaactgtaggttatttaaaataaattcctacaacttaaatggaaa

SEQ ID NO: 328722 - DNA, 1728 bp, Homo sapiens
aagagtggtatcaacgcagagtcgccattacggccggggcagctaaaagaactgacagccccggatgagaacatcccagcgaagatcctttcttataaccgtgccaatcgagctgttgcaattctttgtaaccatcagagggcaccaccaaaaacttttgagaagtctatgatgaacttgcaaactaagattgatgccaagaaggaacagctagcagatgcccggagagacctgaaaagtgctaaggctgatgccaaggtcatgaaggatgcaaagacgaagaaggtagtagagtcaaagaagaaggctgttcagagactggaggaacagttgatgaagctggaagttcaagccacagaccgagaggaaaataaacagattgccctgggaacctccaaactcaattatctggaccctaggatcacagtggcttggtgcaagaagtggggtgtcccaattgagaagatttacaacaaaacccagcgggagaagtttgcctgggccattgacatggctgatgaagactatgagttttagccagtctcaagaggcagagttctgtgaagaggaacagtgtggtttgggaaagatggataaactgagcctcacttgccctcgtgcctgggggagagaggcagcaagtcttaacaaaccaacatctttgcgaaaagataaacctggagatattataagggagagctgagccagttgtcctatggacaacttatttaaaaatatttcagatatcaaaattctagctgtatgatttgttttgaattttgtttttattttcaagagggcaagtggatgggaatttgtcagcgttctaccaggcaaattcactgtttcactgaaatgtttggattctcttagctactgtatgcaaagtccgattatattggtgcgtttttacagttagggttttgcaataacttctatattttaatagaaataaattcctaaactcccttccctctctcccatttcaggaatttaaaattaagtagaacaaaaaacccagcgcacctgttagagtcgtcactctctattgtcatggggatcaattttcattaaacttgaagcagtcgtggctttggcagtgttttggttcagacacctgttcacagaaaaagcatgatgggaaaatatttcctgacttgagtgttcctttttaaatgtgaatttttatttctttttaattattttaaaatatttaaacctttttcttgatcttaaagatcgtgtagattggggttggggagggatgaagggcgagtgaatctaaggataatgaaataatcagtgactgaaaccattttcccatcatcctttgttctgagcattcgctgtaccctttaagatatccatctttttctttttaaccctaatctttcacttgaaagattttattgtataaaaagtttcacaggtcaataaacttagaggaaaatgagtatttggtccaaaaaaaggaaaaataatcaagattttagggcttttattttttcttttgtaattgtgtaaaaaatggaaaaaaacataaaaagcagaattttaatgtgaagacattttttgctataatcattagttttagaggcattgttagtttagtgtgtgtgcagagtccatttcccacatctttcctcaagtatcttctatttttatcatgaattcccttttaatcaactgtaggttatttaaaataaattcctacaacttaaatggaaa

SEQ ID NO: 328723 - DNA, 3576 bp, Homo sapiens
aaatgcgaacttaggctgttacacaactgctggggtctgttctcgccgcccgcccggcagtcaggcagcgtcgccgccgtggtagcagcctcagccgtttctggagtctcgggcccacagtcaccgccgcttacctgcgcctcctcgagcctccggagtccccgtccgcccgcacaggccggttcgccgtctgcgtctcccccacgccgcctcgcctgccgccgcgctcgtccctccgggccgacatgagtggggaccacctccacaacgattcccagatcgaagcggatttccgattgaatgattctcataaacacaaagataaacacaaagatcgagaacaccggcacaaagaacacaagaaggagaaggaccgggaaaagtccaagcatagcaacagtgaacataaagattctgaaaagaaacacaaagagaaggagaagaccaaacacaaagatggaagctcagaaaagcataaagacaaacataaagacagagacaaggaaaaacgaaaagaggaaaaggttcgagcctctggggatgcaaaaataaagaaggagaaggaaaatggcttctctagtccaccacaaattaaagatgaacctgaagatgatggctattttgttcctcctaaagaggatataaagccattaaagagacctcgagatgaggatgatgctgattataaacctaagaaaattaaaacagaagataccaagaaggagaagaaaagaaaactagaagaagaagaggatggtaaattgaaaaaacccaagaataaagataaagataaaaaagttcctgagccagataacaagaaaaagaagccgaagaaagaagaggaacagaagtggaaatggtgggaagaagagcgctatcctgaaggcatcaagtggaaattcctagaacataaaggtccagtatttgccccaccatatgagcctcttccagagaatgtcaagttttattatgatggtaaagtcatgaagctgagccccaaagcagaggaagtagctacgttctttgcaaaaatgctcgaccatgaatatactaccaaggaaatatttaggaaaaatttctttaaagactggagaaaggaaatgactaatgaagagaagaatattatcaccaacctaagcaaatgtgattttacccagatgagccagtatttcaaagcccagacggaagctcggaaacagatgagcaaggaagagaaactgaaaatcaaagaggagaatgaaaaattactgaaagaatatggattctgtattatggataaccacaaagagaggattgctaacttcaagatagagcctcctggacttttccgtggccgcggcaaccaccccaagatgggcatgctgaagagacgaatcatgcccgaggatataatcatcaactgtagcaaagatgccaaggttccttctcctcctccaggacataagtggaaagaagtccggcatgataacaaggttacttggctggtttcctggacagagaacatccaaggttccattaaatacatcatgcttaaccctagttcacgaatcaagggtgagaaggactggcagaaatacgagactgctcggcggctgaaaaaatgtgtggacaagatccggaaccagtatcgagaagactggaagtccaaagagatgaaagtccggcagagagctgtagccctgtacttcatcgacaagcttgctctgagagcaggcaatgaaaaggaggaaggagaaacagcggacactgtgggctgctgctcacttcgtgtggagcacatcaatctacacccagagttggatggtcaggaatatgtggtagagtttgacttcctcgggaaggactccatcagatactataacaaggtccctgttgagaaacgagtttttaagaacctacaactatttatggagaacaagcagcccgaggatgatctttttgatagactcaatactggtattctgaataagcatcttcaggatctcatggagggcttgacagccaaggtattccgtacatacaatgcctccatcacgctacagcagcagctaaaagaactgacagccccggatgagaacatcccagcgaagatcctttcttataaccgtgccaatcgagctgttgcaattctttgtaaccatcagagggcaccaccaaaaacttttgagaagtctatgatgaacttgcaaactaagattgatgccaagaaggaacagctagcagatgcccggagagacctgaaaagtgctaaggctgatgccaaggtcatgaaggatgcaaagacgaagaaggtagtagagtcaaagaagaaggctgttcagagactggaggaacagttgatgaagctggaagttcaagccacagaccgagaggaaaataaacagattgccctgggaacctccaaactcaattatctggaccctaggatcacagtggcttggtgcaagaagtggggtgtcccaattgagaagatttacaacaaaacccagcgggagaagtttgcctgggccattgacatggctgatgaagactatgagttttagccagtctcaagaggcagagttctgtgaagaggaacagtgtggtttgggaaagatggataaactgagcctcacttgccctcgtgcctgggggagagaggcagcaagtcttaacaaaccaacatctttgcgaaaagataaacctggagatattataagggagagctgagccagttgtcctatggacaacttatttaaaaatatttcagatatcaaaattctagctgtatgatttgttttgaattttgtttttattttcaagagggcaagtggatgggaatttgtcagcgttctaccaggcaaattcactgtttcactgaaatgtttggattctcttagctactgtatgcaaagtccgattatattggtgcgtttttacagttagggttttgcaataacttctatattttaatagaaataaattcctaaactcccttccctctctcccatttcaggaatttaaaattaagtagaacaaaaaacccagcgcacctgttagagtcgtcactctctattgtcatggggatcaattttcattaaacttgaagcagtcgtggctttggcagtgttttggttcagacacctgttcacagaaaaagcatgatgggaaaatatttcctgacttgagtgttcctttttaaatgtgaatttttatttctttttaattattttaaaatatttaaacctttttcctaatctttcacttgaaagattttattgtataaaaagtttcacaggtcaataaacttagaggaaaatgagtatttggtccaaaaaaaggaaaaataatcaagattttagggcttttattttttcttttgtaattgtgtaaaaaatggaaaaaaacataaaaagcagaattttaatgtgaagacattttttgctataatcattagttttagaggcattgttagtttagtgtgtgtgcagagtccatttcccacatctttcctcaagtatcttctatttttatcatgaattcccttttaatcaactgtaggttatttaaaataaattcctacaacttaaatggaaa

SEQ ID NO: 328724 - DNA, 3151 bp, Homo sapiens
aaatgcgaacttaggctgttacacaactgctggggtctgttctcgccgcccgcccggcagtcaggcagcgtcgccgccgtggtagcagcctcagccgtttctggagtctcgggcccacagtcaccgccgcttacctgcgcctcctcgagcctccggagtccccgtccgcccgcacaggccggttcgccgtctgcgtctcccccacgccgcctcgcctgccgccgcgctcgtccctccgggccgacatgagtggggaccacctccacaacgattcccagatcgaagcggatttccgattgaatgattctcataaacacaaagataaacacaaagatcgagaacaccggcacaaagaacacaagaaggagaaggaccgggaaaagtccaagcatagcaacagtgaacataaagattctgaaaagaaacacaaagagaaggagaagaccaaacacaaagatggaagctcagaaaagcataaagacaaacataaagacagagacaaggaaaaacgaaaagaggaaaaggttcgagcctctggggatgcaaaaataaagaaggagaaggaaaatggcttctctagtccaccacaaattaaagatgaacctgaagatgatggctattttgttcctcctaaagaggatataaagccattaaagagacctcgagatgaggatgatgctgattataaacctaagaaaattaaaacagaagataccaagaaggagaagaaaagaaaactagaagaagaagaggatggtaaattgaaaaaacccaagaataaagataaagataaaaaagttcctgagccagataacaagaaaaagaagccgaagaaagaagaggaacagaagtggaaatggtgggaagaagagcgctatcctgaaggcatcaagtggaaattcctagaacataaaggtccagtatttgccccaccatatgagcctcttccagagaatgtcaagttttattatgatggtaaagtcatgaagctgagccccaaagcagaggaagtagctacgttctttgcaaaaatgctcgaccatgaatatactaccaaggaaatatttaggaaaaatttctttaaagactggagaaaggaaatgactaatgaagagaagaatattatcaccaacctaagcaaatgtgattttacccagatgagccagtatttcaaagcccagacggaagctcggaaacagatgagcaaggaagagaaactgaaaatcaaagaggagaatgaaaaattactgaaagaatatggattctgtattatggataaccacaaagagaggattgctaacttcaagatagagcctcctggacttttccgtggccgcggcaaccaccccaagatgggcatgctgaagagacgaatcatgcccgaggatataatcatcaactgtagcaaagatgccaaggttccttctcctcctccaggacataagtggaaagaagtccggcatgataacaaggttacttggctggtttcctggacagagaacatccaaggttccattaaatacatcatgcttaaccctagttcacgaatcaagggtgagaaggactggcagaaatacgagactgctcggcggctgaaaaaatgtgtggacaagatccggaaccagtatcgagaagactggaagtccaaagagatgaaagtccggcagagagctgtagccctgtacttcatcgacaagcttgctctgagagcaggcaatgaaaaggaggaaggagaaacagcggacactgtgggctgctgctcacttcgtgtggagcacatcaatctacacccagagttggatggtcaggaatatgtggtagagtttgacttcctcgggaaggactccatcagatactataacaaggtccctgttgagaaacgagtttttaagaacctacaactatttatggagaacaagcagcccgaggatgatctttttgatagactcaatactggtattctgaataagcatcttcaggatctcatggagggcttgacagccaaggtattccgtacatacaatgcctccatcacgctacagcagcagctaaaagaactgacagccccggatgagaacatcccagcgaagatcctttcttataaccgtgccaatcgagctgttgcaattctttgtaaccatcagagggcaccaccaaaaacttttgagaagtctatgatgaacttgcaaactaagattgatgccaagaaggaacagctagcagatgcccggagagacctgaaaagtgctaaggctgatgccaaggtcatgaaggatgcaaagacgaagaaggtagtagagtcaaagaagaaggctgttcagagactggaggaacagttgatgaagctggaagttcaagccacagaccgagaggaaaataaacagattgccctgggaacctccaaactcaattatctggaccctaggatcacagtggcttggtgcaagaagtggggtgtcccaattgagaagatttacaacaaaacccagcgggagaagtttgcctgggccattgacatggctgatgaagactatgagttttagccagtctcaagaggcagagttctgtgaagaggaacagtgtggtttgggaaagatggataaactgagcctcacttgccctcgtgcctgggggagagaggcagcaagtcttaacaaaccaacatctttgcgaaaagataaacctggagatattataagggagagctgagccagttgtcctatggacaacttatttaaaaatatttcagatatcaaaattctagctgtatgatttgttttgaattttgtttttattttcaagaggggacttaaaacaacacaattttattccctttagagtttctaaaattcagcccagaatttataaaatttagccctcacgtgagcccagttccaggttgggaagcagggcctggcggcccttccagggacctctgatgggagcgatgcatttcccgtggctctgagagtggccgtggactcgtgtggctttgacgttgcccttccttcaacttccagttttccgtgctccattcgcttacaccttccaaccctccttctcccgttcaccggccctcttcgtgttttacagaccccgggttgaggacattcaagcccttcctgaaccaagctgggattaattcttccgt

SEQ ID NO: 328725 - DNA, 2020 bp, Homo sapiens
aaatgcgaacttaggctgttacacaactgctggggtctgttctcgccgcccgcccggcagtcaggcagcgtcgccgccgtggtagcagcctcagccgtttctggagtctcgggcccacagtcaccgccgcttacctgcgcctcctcgagcctccggagtccccgtccgcccgcacaggccggttcgccgtctgcgtctcccccacgccgcctcgcctgccgccgcgctcgtccctccgggccgacatgagtggggaccacctccacaacgattcccagatcgaagcggatttccgattgaatgattctcataaacacaaagataaacacaaagatcgagaacaccggcacaaagaacacaagaaggagaaggaccgggaaaagtccaagcatagcaacagtgaacataaagattctgaaaagaaacacaaagagaaggagaagaccaaacacaaagatggaagctcagaaaagcataaagacaaacataaagacagagacaaggaaaaacgaaaagaggaaaaggttcgagcctctggggatgcaaaaataaagaaggagaaggaaaatggcttctctagtccaccacaaattaaagatgaacctgaagatgatggctattttgttcctcctaaagaggatataaagccattaaagagacctcgagatgaggatgatgctgattataaacctaagaaaattaaaacagaagataccaagaaggagaagaaaagaaaactagaagaagaagaggatggtaaattgaaaaaacccaagaataaagataaagataaaaaagttcctgagccagataacaagaaaaagaagccgaagaaagaagaggaacagaagtggaaatggtgggaagaagagcgctatcctgaaggcatcaagtggaaattcctagaacataaaggtccagtatttgccccaccatatgagcctcttccagagaatgtcaagttttattatgatggtaaagtcatgaagctgagccccaaagcagaggaagtagctacgttctttgcaaaaatgctcgaccatgaatatactaccaaggaaatatttaggaaaaatttctttaaagactggagaaaggaaatgactaatgaagagaagaatattatcaccaacctaagcaaatgtgattttacccagatgagccagtatttcaaagcccagacggaagctcggaaacagatgagcaaggaagagaaactgaaaatcaaagaggagaatgaaaaattactgaaagaatatggattctgtattatggataaccacaaagagaggattgctaacttcaagatagagcctcctggacttttccgtggccgcggcaaccaccccaagatgggcatgctgaagagacgaatcatgcccgaggatataatcatcaactgtagcaaagatgccaaggttccttctcctcctccaggacataagtggaaagaagtccggcatgataacaaggttacttggctggtttcctggacagagaacatccaaggttccattaaatacatcatgcttaaccctagttcacgaatcaagggtgagaaggactggcagaaatacgagactgctcggcggctgaaaaaatgtgtggacaagatccggaaccagtatcgagaagactggaagtccaaagagatgaaagtccggcagagagctgtagccctgtacttcatcgacaagcttgctctgagagcaggcaatgaaaaggaggaaggagaaacagcggacactgtgggctgctgctcacttcgtgtggagcacatcaatctacacccagagttggatggtcaggaatatgtggtagagtttgacttcctcgggaaggactccatcagatactataacaaggtccctgttgagaaacgagtaagttaatgtacctgtactgtctgacttgttttccattattcaacaagcatgggttgactgcttttttgtgtgctttgcactttgctgggcaccagcaaaagtgacttgagacaggcacatggcacatgcctgta

SEQ ID NO: 328726 - DNA, 2838 bp, Homo sapiens
acttggattagattccaaaagacaaaagtgttgggtgcttctagcttgaattcagtccctaaatacatgaggctgggtgagcagatgaaaccggtagccactgtgctgatgcatgtgactccattcagttggggattttggttccatgtggatccatactaagtattcttcagtcagtggattttagcaaggggaggtaggagtggaagagaggtgtgaagaaacctctccgaacaaatgaaccagcagtaagtttctaaaaatcagaatctagatagaagttctgcaatatgaaatgagcacattctttgataaggcgtatctattcatgcttttgtaccactgttttgtacctgactccctgaccgatttgtattttttatatacaactagaaggaagtcacaagattgccttctacagtgtgccatttccaaatggatctgttgttggaggaaactggttgctagtcaatgttctatatttaatgaatgtgtgataaatcatcctgtaatcagtatggagtaacctgtttttgtagtttggatgaatatgtcctgagaaatttccatccactttggttcagcggacatcaaggtagtaataataatttttcctccacaggtccctccactcatatggcctctccctccccagctagtggaggggaagcagtctggacttagaaaggaaataggtggtctgtcataggggctttcattagagttaaacttcatagagtcaactgtttcatcatcatagtgagcccagagagccactgcccagcagcatgctcacaccacctaccctagtgtaggtaataggtctacgctaggaccccgtgctgggctctcagcccatcatgagattttggtggatttaatggcaggtaggaacttatttatagtggattgataattgctttataattccttggtaatgacagctcagggaaggtttcacaaggtcatgatcaggagacttgaattgttactggatgtaggaattgtttcactgctcttaacttgctcaaactggggcaggttccaggaacttgaactaaaaatatctatttaagcctctctctctttctctcctccccaacttttttctgaaagccttgatttctgtagacagaactatggtttttggcatgttgggtcaagacgtgtttctataggaaatgcttgcacgtggcactggcttggtgagtcaagcttcctgagcttcagaccgtttgtcctgtcatctgtcctgcccaacactgtatggtttttctctagcacggcttcaattttgttctctgcacaaagcctttggtggttctgccctctgccctccagctttacccaccagagtaaggaatcttttctttttagaaatcaagaatttggcttcacagatggcttctcacagatgccctcctgccagccaaaccggacttgttcttcctgcctctgtgccttctctcattctccttctctccctccataccccacttttgaggttctgtgggtaccatctttgtggactcttgtcttttttttcaacccacatggagtgccctgtgtgtacatactgaccttttttttttttttttttttttgcttgaactctggtcggtatgagctccttaaaagcaggtactgggctggctgtggtgactcatgcctgtaatcccagcactttgggaggctgaggtgggaggattgcttgagtccaggagtttgagaccagcctgggcaacatggcgagaccctgtttctacaaaaagaaaaagggaaaaaaaaagcagggactgtcattctcatctcctccctggggtatccacaggaatggacattcaaatggttgtagcctggtggggtagaaggcagagaagactacccagccagtgaagtgcagaggatagacataggaaaacattccaggcatttggagacagctgaaagtatccatgctgactttcatgatttagaagtctttaactgaattattaaaattgccttttttttgtgctgtacaatgtctactgtactgtgggtcatttagatgagatgaaaaacttaattaaatctgaagtgtcagaggcgcttagtaagccttagtaaagttgtgattgaagaaacttaatacaaatgaactagaggtttgtaatcatgccactcactaacgattttatttctgtagcagaatcattttttctatgtaaggtgttaatgtgtgtgtatgtgctttggttgtaggaaaacttgaaaattccaaaatccttattttcctatttgagaggctggttcagcagggtgtgtgtgtgtgtgtgtgtgtgtgtgtgtatgaatggtatatttattacattattttgaaagagaattagtgtgttatgtggataatgttatatacagccaaagtggatgtttctatttggcaaggaaggtaggatttctgaaactcaggccttaaccaataggttggaagacaagaccaattgaagagttaggaaatgtgagtttttgttacttctgttattccagtcttggtttcattgtctcattctttatttttaaaatcttgtgcctaaaagtttttttgcttaattatgaagtagacatgcatgtttacatttatgtaaaatatttgctgtgtaaagtattttttgtttattctcttaaaagatcactatatttaaataaaagtgaaggtcagcaaccaaaaaaaaaaaaaaaaaaaactccagggggggccctggaccccaaatcccccttttagtgaggtcgttttaaaattacttggccgcccgtttaacaccttcttgacttgggaaaacccctggtgtttcccca

SEQ ID NO: 328727 - DNA, 2784 bp, Homo sapiens
acttggattagattccaaaagacaaaagtgttgggtgcttctagcttgaattcagtccctaaatacatgaggctgggtgagcagatgaaaccggtagccactgtgctgatgcatgtgactccattcagttggggattttggttccatgtggatccatactaagtattcttcagtcagtggattttagcaaggggaggtaggagtggaagagaggtgtgaagaaacctctccgaacaaatgaaccagcagtaagtttctaaaaatcagaatctagatagaagttctgcaatatgaaatgagcacattctttgataaggcgtatctattcatgcttttgtaccactgttttgtacctgactccctgaccgatttgtattttttatatacaactagaaggaagtcacaagattgccttctacagtgtgccatttccaaatggatctgttgttggaggaaactggttgctagtcaatgttctatatttaatgaatgtgtgataaatcatcctgtaatcagtatggagtaacctgtttttgtagtttggatgaatatgtcctgagaaatttccatccactttggttcagcggacatcaaggtagtaataataatttttcctccacaggtccctccactcatatggcctctccctccccagctagtggaggggaagcagtctggacttagaaaggaaataggtggtctgtcataggggctttcattagagttaaacttcatagagtcaactgtttcatcatcatagtgagcccagagagccactgcccagcagcatgctcacaccacctaccctagtgtaggtaataggtctacgctaggaccccgtgctgggctctcagcccatcatgagattttggtggatttaatggcaggtaggaacttatttatagtggattgataattgctttataattccttggtaatgacagctcagggaaggtttcacaaggtcatgatcaggagacttgaattgttactggatgtaggaattgtttcactgctcttaacttgctcaaactggggcaggttccaggaacttgaactaaaaatatctatttaagcctctctctctttctctcctccccaacttttttctgaaagccttgatttctgtagacagaactatggtttttggcatgttgggtcaagacgtgtttctataggaaatgcttgcacgtggcactggcttggtgagtcaagcttcctgagcttcagaccgtttgtcctgtcatctgtcctgcccaacactgtatggtttttctctagcacggcttcaattttgttctctgcacaaagcctttggtggttctgccctctgccctccagctttacccaccagagtaaggaatcttttctttttagaaatcaagaatttggcttcacagatggcttctcacagatgccctcctgccagccaaaccggacttgttcttcctgcctctgtgccttctctcattctccttctctccctccataccccacttttgaggttctgtgggtaccatctttgtggactcttgtcttttttttcaacccacatggagtgccctgtgtgtacatactgaccttttttttttttttttttttttgcttgaactctggtcggtatgagctccttaaaagcaggtactgggctggctgtggtgactcatgcctgtaatcccagcactttgggaggctgaggtgggaggattgcttgagtccaggagtttgagaccagcctgggcaacatggcgagaccctgtttctacaaaaagaaaaagggaaaaaaaaagcagggactgtcattctcatctcctccctggggtatccacaggaatggacattcaaatggttgtagcctggtggggtagaaggcagagaagactacccagccagtgaagtgcagaggatagacataggaaaacattccaggcatttggagacagctgaaagtatccatgctgactttcatgatttagaagtctttaactgaattattaaaattgccttttttttgtgctgtacaatgtctactgtactgtgggtcatttagatgagatgaaaaacttaattaaatctgaagtgtcagaggcgcttagtaagccttagtaaagttgtgattgaagaaacttaatacaaatgaactagaggtttgtaatcatgccactcactaacgattttatttctgtagcagaatcattttttctatgtaaggtgttaatgtgtgtgtatgtgctttggttgtaggaaaacttgaaaattccgtgtgtgtgtgtgtgtatgaatggtatatttattacattattttgaaagagaattagtgtgttatgtggataatgttatatacagccaaagtggatgtttctatttggcaaggaaggtaggatttctgaaactcaggccttaaccaataggttggaagacaagaccaattgaagagttaggaaatgtgagtttttgttacttctgttattccagtcttggtttcattgtctcattctttatttttaaaatcttgtgcctaaaagtttttttgcttaattatgaagtagacatgcatgtttacatttatgtaaaatatttgctgtgtaaagtattttttgtttattctcttaaaagatcactatatttaaataaaagtgaaggtcagcaaccaaaaaaaaaaaaaaaaaaaactccagggggggccctggaccccaaatcccccttttagtgaggtcgttttaaaattacttggccgcccgtttaacaccttcttgacttgggaaaacccctggtgtttcccca

SEQ ID NO: 328728 - DNA, 721 bp, Homo sapiens
aggacaataaaacttgagccttgactttaggaagattataaactggttacagagataaagacaaacctgaaagactagtaatataaaacacttaagagtataagcacccaacaaaagacataaacagccaatagtatttggtaactcaggagaaaggaaaaaatcacagactcagtttagacagaaatctgtgtgtgtgtgtgtgtgtgtgtgtatgaatggtatatttattacattattttgaaagagaattagtgtgttatgtggataatgttatatacagccaaagtggatgtttctatttggcaaggaaggtaggatttctgaaactcaggccttaaccaataggttggaagacaagaccaattgaagagttaggaaatgtgagtttttgttacttctgttattccagtcttggtttcattgtctcattctttatttttaaaatcttgtgcctaaaagtttttttgcttaattatgaagtagacatgcatgtttacatttatgtaaaatatttgctgtgtaaagtattttttgtttattctcttaaaagatcactatatttaaataaaagtgaaggtcagcaaccaaaaaaaaaaaaaaaaaaaactccagggggggccctggaccccaaatcccccttttagtgaggtcgttttaaaattacttggccgcccgtttaacaccttcttgacttgggaaaacccctggtgtttcccca

SEQ ID NO: 328729 - DNA, 956 bp, Homo sapiens
tgcactccagcctgggtgacagggtgagattcgccctcaaaataaataaataaatacataaaaagctagaataaggatcaccctgtaactataaagatgaatgcaggcaccaagaactactgcagaggagccttattttgaagaaccgtgctgcagttcaaagccgccgctgaacagacggcagagaaggggcttgcacgtggccacagatctaacatgacagacaatgggtgtctagtactaacacagctgggtgttttcccagcatgatttggtggctaaattaattttatcatctttccttctaacttattatcattctgatattaataccatggctaacaaccaatctcactatatgatgagaccactattctgaaatgtaatgtctgccacttacagcttttaatctagtaaagtgctccctaaacctaaaataattgctgtatattgttccctcattgttaatatactacagaaataacaccaataaaatgtcttaagtgcattaattggcaccaaaatgaatataatattttaaacctatttactggcatagctgagattattaaaggtgcaagccctcagtgcagatgggtaatgaaaacaaccgaagacaatctcttggcaaaggaaaggtcagactgatttcatttccttaaacttatgacccgatcatggggacaacgtgaccttaggcattatttgcttttacataaagattagacttcagatgtaggacaatgcaaactacagataagagatacatacgcatggatacacacaggttatatgtaaaaatgattttttgtaagtttagagttttgcaaccatcagcacaatccagttttagaacatttccatttcctcaaaaagctctcacttgcaccagtagacagctagtgggtatgtggggttatctcatttggatgtaagtggcatttttctataatgac

SEQ ID NO: 328730 - DNA, 719 bp, Homo sapiens
acccaacatagtgctcatatatgtcatcaaatttggtattaaaacatgcattattagtaatatacattgttatgaataaagcagaaatatgggccgggtgcagtggctcatgcctgcaatcctagcactttgggaggccaaggcaggcggatcacgaggtcaagagatcgagatcatcctggccaacatggtgatacgccatctctactaaaaatacaaaaattagctgggcatggtggcgcacgcctgtagtcccagctactcaggaggctgaggcaggagaatcacttgaacctgggaggcagaggctgcagtgagctgagatcgcaccgctgccctccagcctggtgacagagcgagactccgtctcaaaaaaaaaaaaaaaaggaagaagaagaaatatgcagctataacacttcgctaatagacgtgaaagattcctgaataggctggacactgtggctcatgcctgtaatcccagcactttagggtgctgaggtgggcagatcacttgaagccaggagtttgagaccagcctggccaatgcggtgaaaccccatcactgctaaaaatacaaaaatcagtaggggtagtggcacgcatctgtggtctcagctactcggaaggttgaagcatgagaattgcttgaacgtgggaggcagaggttgcagtgggccgagatggtgccactgcactccagcctgggtaatagagtgaga

SEQ ID NO: 328731 - DNA, 92 bp, Homo sapiens
cctgcttctgaaccatcgtgttcaactgtgaaactcacactttggtgaccacgactccaaaactcacttaatacacccaaggtcagccccag

SEQ ID NO: 328732 - DNA, 919 bp, Homo sapiens
aaactaagttccagtacttggatgccaacttgctgacgacaaggcacttccttacaatgagcctggaattctaagcagcagtttcacaatctgtaattgcacgtttctgccctttacaataaagaaatacacaatttcctttcaccacccacacccaccaaaaataccaccacactccaacacaccccacgaagaaagcgagaaagcccaaaactgggccccccaccacaaccgcacccccacgaatctgtcatacatccacaagacacccgggccctctgagcacccacggcgaacggccgccaagccgccacccccctcccaggcggcagcccccacatgcgccacgtcgtacatcacgtcacccaacgccaccgacctatgcgcaatcgcgcgcatagccccgtactcgggccagcagccccaccccagccagccacactgctccccctcgcacaccacaccaagatcgcgcgacccaacgcacccactccgcaccacaccccacaccacccccaccccgctcgaccagcatgtgtcacaaccccgtacccgcaccctgagtaccacgaaacggacaggctaacgacgcgaagtacctcacccacccgaccgaacgcgatccacggtcccgtaagcgctaattccagactacacccccatagctcgccgcaatggtctgcacgtccaccccacaccaacagagatcactacagaaatatgcctccaaccccgcccacgttaaactccccactccacacgcagcaatgtcactcggcaccgcgcctttcacggtgtgacaggtcttctccatagatgtcggatcggcctccttactacctccccccttacgaaagagtacacactccacaaccacagacctccgcccaaggcgccgcccgcgcgccccgcgcacgtg

SEQ ID NO: 328733 - DNA, 179 bp, Homo sapiens
gtggggtagaagtagagaaaaggcacttaagtaaaaatactacatttcacaaaattctatgtcctttgaattcttatgaaacatttttaatgaatcaattttatatttaccctgtgattagtgaaaattataaatatatgcacttcatacttatgaaagcactgagatgaagcccttta

SEQ ID NO: 328734 - DNA, 839 bp, Homo sapiens
caacacaggggcagtctccaggacctccacaccattaacaagatgagccttgtgctcccttgggctctagagaggaagcccctctgagccctcagcccctctttcctccctctcctaaagtaatttgatcctcaggaatttgttctgccctcatctggccctggccagctctgcatttgacaaatgccaggaagaggaaactgttgagaaaacggaactactggggaaagggagggctcactgagaaccatcccggtaacccgatcaccgctggtcaccatgaaccacattgtgcaaaccttctctcctgtcaacagcggccagcctcccaactacgagatgctcaaggaggagcaggaagtggctatgctgggggcgccccacaaccctgctcccccgacgtccaccgtgatccacatccgcagcgagacctccgtgcccgaccatgtcgtctggtccctgttcaacaccctcttcatgaacccctgctgcctgggcttcatagcattcgcctactccgtgaagtctagggacaggaagatggttggcgacgtgaccggggcccaggcctatgcctccaccgccaagtgcctgaacatctgggccctgattctgggcatcctcatgaccattctgctcatcatcatcccagtgttggtcgtccaggcccagcgatagatcaggaggcatcattgaggccaggagctctgcccgtgacctgtatcccacgtactctatcttccattcctcgccctgcccccaggccgagtcctgcatcagccctttatcctcacacgcttttctacaatggcattcaataaagtgtatatgtttctggt

SEQ ID NO: 328735 - DNA, 654 bp, Homo sapiens
tctagagtatcccacagcacagaggaggcagcacagaggagggtgttgaactcctgtcaacagcggccagcctcccaactacgagatgctcaaggaggagcaggaagtggctatgctgggggcgccccacaaccctgctcccccgacgtccaccgtgatccacatccgcagcgagacctccgtgcccgaccatgtcgtctggtccctgttcaacaccctcttcatgaacccctgctgcctgggcttcatagcattcgcctactccgtgaagtctagggacaggaagatggttggcgacgtgaccggggcccaggcctatgcctccaccgccaagtgcctgaacatctgggccctgattctgggcatcctcatgaccattctgctcatcatcatcccagtgttggtcgtccaggcccagcgatagatcaggaggcatcattgaggccaggagctctgcccgtgacctgtatcccacgtactctatcttccattcctcgccctgcccccagaggccaggagctctgcccttgacctgtattccacttactccaccttccattcctcgccctgtccccacagccgagtcctgcatcagccctttatcctcacacgcttttctacaatggcattcaataaagtgtatatgtttctggt

SEQ ID NO: 328736 - DNA, 592 bp, Homo sapiens
  misc_feature (19)..(19): n is a, c, g, or t
  misc_feature (36)..(36): n is a, c, g, or t
aaggggcatgagattaccncgccccctcccgggtancgggatacactgtccaaacctttcctgtcaacagcggccagcctcccaactacgagatgctcaaggaggagcaggaagtggctatgctgggggcgccccacaaccctgctcccccgacgtccaccgtgatccacatccgcagcgagacctccgtgcccgaccatgtcgtctggtccctgttcaacaccctcttcatgaacccctgctgcctgggcttcatagcattcgcctactccgtgaagtctagggacaggaagatggttggcgacgtgaccggggcccaggcctatgcctccaccgccaagtgcctgaacatctgggccctgattctgggcatcctcatgaccattctgctcatcatcatcccagtgttggtcgtccaggcccagcgatagatcaggaggcatcattgaggccaggagctctgcccgtgacctgtatcccacgtactctatcttccattcctcgccctgcccccaggccgagtcctgcatcagccctttatcctcacacgcttttctacaatggcattcaataaagtgtatatgtttctggt

SEQ ID NO: 328737 - DNA, 624 bp, Homo sapiens
tcagctcggacacaagcggctcgtcagcagaaaaccacacttctcaaaccttcactcaacacttccttccccaaagccagaagaaggaggagcaggaagtggctatgctgggggcgccccacaaccctgctcccccgacgtccaccgtgatccacatccgcagcgagacctccgtgcccgaccatgtcgtctggtccctgttcaacaccctcttcatgaacccctgctgcctgggcttcatagcattcgcctactccgtgaagtctagggacaggaagatggttggcgacgtgaccggggcccaggcctatgcctccaccgccaagtgcctgaacatctgggccctgattctgggcatcctcatgaccatggattcatcctgttactggtattcggctctgtgacagtctaccatattatgttacagataatacaggaaaaacggggttactagtagccgcccatagcctgcaacctttgcactccactgtgcaatgctggccctgcacgctggggctgttgcccctgcccccttggtcctgcccctagatacagcagtttatacccacacacctgtctacagtgtcattcaataaagtgcacgtgcttgtgaaaaaaaaaaaa

SEQ ID NO: 328738 - DNA, 1100 bp, Homo sapiens
  misc_feature (947)..(947): n is a, c, g, or t
  misc_feature (957)..(957): n is a, c, g, or t
  misc_feature (970)..(970): n is a, c, g, or t
  misc_feature (973)..(973): n is a, c, g, or t
  misc_feature (977)..(977): n is a, c, g, or t
  misc_feature (984)..(984): n is a, c, g, or t
  misc_feature (986)..(986): n is a, c, g, or t
  misc_feature (995)..(996): n is a, c, g, or t
  misc_feature (1012)..(1012): n is a, c, g, or t
  misc_feature (1025)..(1025): n is a, c, g, or t
  misc_feature (1028)..(1028): n is a, c, g, or t
  misc_feature (1031)..(1031): n is a, c, g, or t
  misc_feature (1034)..(1034): n is a, c, g, or t
caacacaggggcagtctccaggacctccacaccattaacaagatgagccttgtgctcccttgggctctagagaggaagcccctctgagccctcagcccctctttcctccctctcctaaagtaatttgatcctcaggaatttgttctgccctcatctggccctggccagctctgcatttgacaaatgccaggaagaggaaactgttgagaaaacggaactactggggaaagggagggctcactgagaaccatcccggtaacccgatcaccgctggtcaccatgaaccacattgtgcaaaccttctctcctgtcaacagcggccagcctcccaactacgagatgctcaaggaggagcaggaagtggctatgctgggggcgccccacaaccctgctcccccgacgtccaccgtgatccacatccgcagcgagacctccgtgcccgaccatgtcgtctggtccctgttcaacaccctcttcatgaacccctgctgcctgggcttcatagcattcgcctactccgtgaagtctagggacaggaagatggttggcgacgtgaccggggcccaggcctatgcctccaccgccaagtgcctgaacatctgggccctgattctgggcatcctcatgaccattctgctcatcatcatcccagtgttggtcgtccaggcccagcgatagatcaggaggcatcattgaggccaggagctctgcccgtgacctgtatcccacgtactctatcttccattcctcgccctgcccccagaggccaggagctctgcccttgacctgtattccacttactccaccttccattcctcgccctgtccccacagccgagtcctgcatcagccctttatcctcacacgcttttctacaatggcattcaataaagtgtatatgtttctggtaaaaaaaaacaaaaaaaaatgtggggggcgcccgaaagntttaaacagnggggcgggccagngangaanggcaggncngaaccgggnnagggggttcccaaaangcggggcggggtnaancanggngggctgctcaccgcaccccccccgccgcgggcaaggaagaaacgcgaggacacgagccaatagacg

SEQ ID NO: 328739 - DNA, 670 bp, Homo sapiens
gcggccgcctactactactaaattcgcggccgcgtgtcaccatgaaccacattgtgcaaaccttctctcctgtcaacagcggccagcctcccaactacgagatgctcaaggaggagcaggaagtggctatgctgggggcgccccacaaccctgctcccccgacgtccaccgtgatccacatccgcagcgagacctccgtgcccgaccatgtcgtctggtccctgttcaacaccctcttcatgaacccctgctgcctgggcttcatagcattcgcctactccgtgaagtctagggacaggaagatggttggcgacgtgaccggggcccaggcctatgcctccaccgccaagtgcctgaacatctgggccctgattctgggcatcctcatgaccattctgctcatcatcatcccagtgttggtcgtccaggcccagcgatagatcaggaggcatcattgaggccaggagctctgcccgtgacctgtatcccacgtactctatcttccattcctcgccctgcccccagaggccaggagctctgcccttgacctgtattccacttactccaccttccattcctcgccctgtccccacagccgagtcctgcatcagccctttatcctcacacgcttttctacaatggcattcaataaagtgtatatgtttctggt

SEQ ID NO: 328740 - DNA, 1059 bp, Homo sapiens
caacacaggggcagtctccaggacctccacaccattaacaagatgagccttgtgctcccttgggctctagagaggaagcccctctgagccctcagcccctctttcctccctctcctaaagtaatttgatcctcaggaatttgttctgccctcatctggccctggccagctctgcatttgacaaatgccaggaagaggaaactgttgagaaaacggaactactggggaaagggagggctcactgagaaccatcccggtaacccgatcaccgctggtcaccatgaaccacattgtgcaaaccttctctcctgtcaacagcggccagcctcccaactacgagatgctcaaggaggagcaggaagtggctatgctgggggcgccccacaaccctgctcccccgacgtccaccgtgatccacatccgcagcgagacctccgtgcccgaccatgtcgtctggtccctgttcaacaccctcttcatgaacccctgctgcctgggcttcatagcattcgcctactccgtgaagtctagggacaggaagatggttggcgacgtgaccggggcccaggcctatgcctccaccgccaagtgcctgaacatctgggccctgattctgggcatcctcatgaccattctgctcatcatcatcccagtgttggtcgtccaggcccagcgatagatcaggaggcatcattgaggccaggagctctgcccgtgacctgtatcccacgtactctatcttccattcctcgccctgcccccagaggccaggagctctgcccttgacctgtattccacttactccaccttccattcctcgccctgtccccacagccgagtcctgcatcagccctttatcctcacacgcttttctacaatggcattcaataaagtgtatatgtttctggtaaaaaaaaaccccaaacacaacaccacaaaagcgagcaagagcacacgggcccgcccacaccaccgcagaacaacagggcacaaagacagcaggcggcaaccctagaacgaccgggaacagcccccccagccgcccgggcccccttcggcc

SEQ ID NO: 328741 - DNA, 1209 bp, Homo sapiens
caacacaggggcagtctccaggacctccacaccattaacaagatgagccttgtgctcccttgggctctagagaggaagcccctctgagccctcagcccctctttcctccctctcctaaagtaatttgatcctcaggaatttgttctgccctcatctggccctggccagctctgcatttgacaaatgccaggaagaggaaactgttgagaaaacggaactactggggaaagggagggctcactgagaaccatcccggtaacccgatcaccgctggtcaccatgaaccacattgtgcaaaccttctctcctgtcaacagcggccagcctcccaactacgagatgctcaaggaggagcaggaagtggctatgctgggggcgccccacaaccctgctcccccgacgtccaccgtgatccacatccgcagcgagacctccgtgcccgaccatgtcgtctggtccctgttcaacaccctcttcatgaacccctgctgcctgggcttcatagcattcgcctactccgtgaagtctagggacaggaagatggttggcgacgtgaccggggcccaggcctatgcctccaccgccaagtgcctgaacatctgggccctgattctgggcatcctcatgaccattctgctcatcatcatcccagtgttggtcgtccaggcccagcgatagatcaggaggcatcattgaggccaggagctctgcccgtgacctgtatcccacgtactctatcttccattcctcgccctgcccccagaggccaggagctctgcccttgacctgtattccacttactccaccttccattcctcgccctgtccccacagccgagtcctgcatcagccctttatcctcacacgcttttctacaatggcattcaataaagtgtatatgtttctggtaaaaaaaaaaaaaaaaaaaaaaaaaaaaatttttgggccgcttgggccctgaaaaggtttttaaaccctttgtttgggcggggggccccagttgtgcttatgtctaaccctggttgctctcaggctgtttccccaagggagaccctggcgccattcgcattgcgctgctgtgtggttctctcccccattataaaaagcgcccgggagggacccgggcgggttctgtaacacattcccgtgggcgttcggagccactacgggtcctttcaccaggggtccaagggagtcgcattaatctggc

SEQ ID NO: 328742 - DNA, 1554 bp, Homo sapiens
  misc_feature (924)..(924): n is a, c, g, or t
  misc_feature (940)..(940): n is a, c, g, or t
caacacaggggcagtctccaggacctccacaccattaacaagatgagccttgtgctcccttgggctctagagaggaagcccctctgagccctcagcccctctttcctccctctcctaaagtaatttgatcctcaggaatttgttctgccctcatctggccctggccagctctgcatttgacaaatgccaggaagaggaaactgttgagaaaacggaactactggggaaagggagggctcactgagaaccatcccggtaacccgatcaccgctggtcaccatgaaccacattgtgcaaaccttctctcctgtcaacagcggccagcctcccaactacgagatgctcaaggaggagcaggaagtggctatgctgggggcgccccacaaccctgctcccccgacgtccaccgtgatccacatccgcagcgagacctccgtgcccgaccatgtcgtctggtccctgttcaacaccctcttcatgaacccctgctgcctgggcttcatagcattcgcctactccgtgaagtctagggacaggaagatggttggcgacgtgaccggggcccaggcctatgcctccaccgccaagtgcctgaacatctgggccctgattctgggcatcctcatgaccattctgctcatcatcatcccagtgttggtcgtccaggcccagcgatagatcaggaggcatcattgaggccaggagctctgcccgtgacctgtatcccacgtactctatcttccattcctcgccctgcccccagaggccaggagctctgcccttgacctgtattccacttactccaccttccattcctcgccctgtccccacagccgagtcctgcatcagccctttatcctcacacgcttttctacaatggcattcaataaagtgtatatgtttctggtaaaaaaaaaaaaaaanaaaaaaaaacaacacnaaaacaaacaaaacaaaaacaaaaagacgacacaaaaaaaaaaaaaagaaacaagaaaacacaaaactgggggggcggagcggccccccacgacaaggaccatgagaaccacgtggggggggcgcggaccaacaaaggaagaaaacacgaagcagcaagaaaaaagagatcacacacaaaagaagcagggagaagaaacacaaagtggagagaaacacacacaaaacaagagaacacgcgcggggaagaacgaggtgagtaaacaaacccataggacaggaaaggagagagaaaaaaaaggagaataaacacacagaagagtacacgcgagacagagtcgaaatgaaaaaaaagacgcgcaagcgagggtgtgaaaaaaaaacaaccaaaacaaacaagaaaaaaagacgagacaagaagaaagagagacggacgagaggaagagaaagaagagaggagaaagagagggcgaaaaaatagtaaagaaagacaaaagaggagagagaagggaaggggcaaagaagagagaggcgcagaccgagacacagacaagaaaataagaaaaagaaggagaggaaggcggagaagagcaagaaggaaaaaagtcaaaagag

SEQ ID NO: 328743 - DNA, 896 bp, Homo sapiens
caacacaggggcagtctccaggacctccacaccattaacaagatgagccttgtgctcccttgggctctagagaggaagcccctctgagccctcagcccctctttcctccctctcctaaagtaatttgatcctcaggaatttgttctgccctcatctggccctggccagctctgcatttgacaaatgccaggaagaggaaactgttgagaaaacggaactactggggaaagggagggctcactgagaaccatcccggtaacccgatcaccgctggtcaccatgaaccacattgtgcaaaccttctctcctgtcaacagcggccagcctcccaactacgagatgctcaaggaggagcaggaagtggctatgctgggggcgccccacaaccctgctcccccgacgtccaccgtgatccacatccgcagcgagacctccgtgcccgaccatgtcgtctggtccctgttcaacaccctcttcatgaacccctgctgcctgggcttcatagcattcgcctactccgtgaagtctagggacaggaagatggttggcgacgtgaccggggcccaggcctatgcctccaccgccaagtgcctgaacatctgggccctgattctgggcatcctcatgaccattctgctcatcatcatcccagtgttggtcgtccaggcccagcgatagatcaggaggcatcattgaggccaggagctctgcccgtgacctgtatcccacgtactctatcttccattcctcgccctgcccccaggccgagtcctgcatcagccctttatcctcacacgcttttctacaatggcattcaataaagtgtatatgtttctggtaaaaaaacacacacacaaacaacacaaaacactttcagacaaacacaagaccccaca

SEQ ID NO: 328744 - DNA, 1287 bp, Homo sapiens
  misc_feature (853)..(853): n is a, c, g, or t
caacacaggggcagtctccaggacctccacaccattaacaagatgagccttgtgctcccttgggctctagagaggaagcccctctgagccctcagcccctctttcctccctctcctaaagtaatttgatcctcaggaatttgttctgccctcatctggccctggccagctctgcatttgacaaatgccaggaagaggaaactgttgagaaaacggaactactggggaaagggagggctcactgagaaccatcccggtaacccgatcaccgctggtcaccatgaaccacattgtgcaaaccttctctcctgtcaacagcggccagcctcccaactacgagatgctcaaggaggagcaggaagtggctatgctgggggcgccccacaaccctgctcccccgacgtccaccgtgatccacatccgcagcgagacctccgtgcccgaccatgtcgtctggtccctgttcaacaccctcttcatgaacccctgctgcctgggcttcatagcattcgcctactccgtgaagtctagggacaggaagatggttggcgacgtgaccggggcccaggcctatgcctccaccgccaagtgcctgaacatctgggccctgattctgggcatcctcatgaccattctgctcatcatcatcccagtgttggtcgtccaggcccagcgatagatcaggaggcatcattgaggccaggagctctgcccgtgacctgtatcccacgtactctatcttccattcctcgccctgcccccaggccgagtcctgcatcagccctttatcctcacacgcttttctacaatggcattcaataaagtgtatatgtttctggtaaaaaaaaaaaaanaaaaacattttaaaaaaaaaaaaaaaaaaaaagggggggggggcccaaaaattcccccggaggggcgcccaagctaccggctgaccccggtttcctgggcacactgtggcgccccaaagagggaggcgagataaaaagccaacagacttgggcgggcgtttaacacacgtgccgagactgccggaacatctgcggacctcgcgacccctggggacgagcacccctaactctccgggggggcggggggaccccattgttgcgggccacaatattcccttcgaagagactttaacgccgccctgggggcaacactctacacatctttccccacgtgcatcttcccgtgcttaacacccagccgcgcatatctctcccgcgtctgaaaaaatttgccgcatcaccgggtatgtgcttatgacacatttttttacggc

SEQ ID NO: 328745 - DNA, 846 bp, Homo sapiens
caacacaggggcagtctccaggacctccacaccattaacaagatgagccttgtgctcccttgggctctagagaggaagcccctctgagccctcagcccctctttcctccctctcctaaagtaatttgatcctcaggaatttgttctgccctcatctggccctggccagctctgcatttgacaaatgccaggaagaggaaactgttgagaaaacggaactactggggaaagggagggctcactgagaaccatcccggtaacccgatcaccgctggtcaccatgaaccacattgtgcaaaccttctctcctgtcaacagcggccagcctcccaactacgagatgctcaaggaggagcaggaagtggctatgctgggggcgccccacaaccctgctcccccgacgtccaccgtgatccacatccgcagcgagacctccgtgcccgaccatgtcgtctggtccctgttcaacaccctcttcatgaacccctgctgcctgggcttcatagcattcgcctactccgtgaagtctagggacaggaagatggttggcgacgtgaccggggcccaggcctatgcctccaccgccaagtgcctgaacatctgggccctgattctgggcatcctcatgaccattctgctcatcatcatcccagtgttggtcgtccaggcccagcgatagatcaggaggcatcattgaggccaggagctctgcccgtgacctgtatcccacgtactctatcttccattcctcgccctgcccccagaggccaggagctctgcccttgacctgtattccacttactccacctagacgtcgctttccacctagacgtcgctttccacctag

SEQ ID NO: 328746 - DNA, 869 bp, Homo sapiens
caacacaggggcagtctccaggacctccacaccattaacaagatgagccttgtgctcccttgggctctagagaggaagcccctctgagccctcagcccctctttcctccctctcctaaagtaatttgatcctcaggaatttgttctgccctcatctggccctggccagctctgcatttgacaaatgccaggaagaggaaactgttgagaaaacggaactactggggaaagggagggctcactgagaaccatcccggtaacccgatcaccgctggtcaccatgaaccacattgtgcaaaccttctctcctgtcaacagcggccagcctcccaactacgagatgctcaaggaggagcaggaagtggctatgctgggggcgccccacaaccctgctcccccgacgtccaccgtgatccacatccgcagcgagacctccgtgcccgaccatgtcgtctggtccctgttcaacaccctcttcatgaacccctgctgcctgggcttcatagcattcgcctactccgtgaagtctagggacaggaagatggttggcgacgtgaccggggcccaggcctatgcctccaccgccaagtgcctgaacatctgggccctgattctgggcatcctcatgaccattctgctcatcatcatcccagtgttggtcgtccaggcccagcgatagatcaggaggcatcattgaggccaggagctctgcccgtgacctgtatcccacgtactctatcttccattcctcgccctgcccccaggccgagtcctgcatcagccctttatcctcacacgcttttctacaatggcattcaataaagtgtatatgtttctggtaaaacagaaaaacaaagaacaacaaaaggg

SEQ ID NO: 328747 - DNA, 1048 bp, Homo sapiens
caacacaggggcagtctccaggacctccacaccattaacaagatgagccttgtgctcccttgggctctagagaggaagcccctctgagccctcagcccctctttcctccctctcctaaagtaatttgatcctcaggaatttgttctgccctcatctggccctggccagctctgcatttgacaaatgccaggaagaggaaactgttgagaaaacggaactactggggaaagggagggctcactgagaaccatcccggtaacccgatcaccgctggtcaccatgaaccacattgtgcaaaccttctctcctgtcaacagcggccagcctcccaactacgagatgctcaaggaggagcaggaagtggctatgctgggggcgccccacaaccctgctcccccgacgtccaccgtgatccacatccgcagcgagacctccgtgcccgaccatgtcgtctggtccctgttcaacaccctcttcatgaacccctgctgcctgggcttcatagcattcgcctactccgtgaagtctagggacaggaagatggttggcgacgtgaccggggcccaggcctatgcctccaccgccaagtgcctgaacatctgggccctgattctgggcatcctcatgaccattctgctcatcatcatcccagtgttggtcgtccaggcccagcgatagatcaggaggcatcattgaggccaggagctctgcccgtgacctgtatcccacgtactctatcttccattcctcgccctgcccccaggccgagtcctgcatcagccctttatcctcacacgcttttctacaatggcattcaataaagtgtatatgtttctggtaaaaaaaaaaaaaaaaaaaaaaaaaaaaaaaaaaaacctcgggggctttttttggggggggggaaaaagggttttaaaagggcctgggccatgtttttcccggcccccttttttttaacagggggaaaactgggcggccccctaagggggggcgaaaaatcagaaacccggtaacctaatttttaggaaaaacggaacacgcaaacaag

SEQ ID NO: 328748 - DNA, 1506 bp, Homo sapiens
  misc_feature (876)..(876): n is a, c, g, or t
  misc_feature (892)..(892): n is a, c, g, or t
caacacaggggcagtctccaggacctccacaccattaacaagatgagccttgtgctcccttgggctctagagaggaagcccctctgagccctcagcccctctttcctccctctcctaaagtaatttgatcctcaggaatttgttctgccctcatctggccctggccagctctgcatttgacaaatgccaggaagaggaaactgttgagaaaacggaactactggggaaagggagggctcactgagaaccatcccggtaacccgatcaccgctggtcaccatgaaccacattgtgcaaaccttctctcctgtcaacagcggccagcctcccaactacgagatgctcaaggaggagcaggaagtggctatgctgggggcgccccacaaccctgctcccccgacgtccaccgtgatccacatccgcagcgagacctccgtgcccgaccatgtcgtctggtccctgttcaacaccctcttcatgaacccctgctgcctgggcttcatagcattcgcctactccgtgaagtctagggacaggaagatggttggcgacgtgaccggggcccaggcctatgcctccaccgccaagtgcctgaacatctgggccctgattctgggcatcctcatgaccattctgctcatcatcatcccagtgttggtcgtccaggcccagcgatagatcaggaggcatcattgaggccaggagctctgcccgtgacctgtatcccacgtactctatcttccattcctcgccctgcccccaggccgagtcctgcatcagccctttatcctcacacgcttttctacaatggcattcaataaagtgtatatgtttctggtaaaaaaaaaaaaaaaaaaaaaaaaaaaaaaaaaaaanaaaaaaaaacaacacnaaaacaaacaaaacaaaaacaaaaagacgacacaaaaaaaaaaaaaagaaacaagaaaacacaaaactgggggggcggagcggccccccacgacaaggaccatgagaaccacgtggggggggcgcggaccaacaaaggaagaaaacacgaagcagcaagaaaaaagagatcacacacaaaagaagcagggagaagaaacacaaagtggagagaaacacacacaaaacaagagaacacgcgcggggaagaacgaggtgagtaaacaaacccataggacaggaaaggagagagaaaaaaaaggagaataaacacacagaagagtacacgcgagacagagtcgaaatgaaaaaaaagacgcgcaagcgagggtgtgaaaaaaaaacaaccaaaacaaacaagaaaaaaagacgagacaagaagaaagagagacggacgagaggaagagaaagaagagaggagaaagagagggcgaaaaaatagtaaagaaagacaaaagaggagagagaagggaaggggcaaagaagagagaggcgcagaccgagacacagacaagaaaataagaaaaagaaggagaggaaggcggagaagagcaagaaggaaaaaagtcaaaagag

SEQ ID NO: 328749 - DNA, 876 bp, Homo sapiens
  misc_feature (859)..(859): n is a, c, g, or t
caacacaggggcagtctccaggacctccacaccattaacaagatgagccttgtgctcccttgggctctagagaggaagcccctctgagccctcagcccctctttcctccctctcctaaagtaatttgatcctcaggaatttgttctgccctcatctggccctggccagctctgcatttgacaaatgccaggaagaggaaactgttgagaaaacggaactactggggaaagggagggctcactgagaaccatcccggtaacccgatcaccgctggtcaccatgaaccacattgtgcaaaccttctctcctgtcaacagcggccagcctcccaactacgagatgctcaaggaggagcaggaagtggctatgctgggggcgccccacaaccctgctcccccgacgtccaccgtgatccacatccgcagcgagacctccgtgcccgaccatgtcgtctggtccctgttcaacaccctcttcatgaacccctgctgcctgggcttcatagcattcgcctactccgtgaagtctagggacaggaagatggttggcgacgtgaccggggcccaggcctatgcctccaccgccaagtgcctgaacatctgggccctgattctgggcatcctcatgaccattctgctcatcatcatcccagtgttggtcgtccaggcccagcgatagatcaggaggcatcattgaggccaggagctctgcccgtgacctgtatcccacgtactctatcttccattcctcgccctgcccccaggccgagtcctgcatcagccctttatcctcacacgcttttctacaatggcattcaataaagtgtatatgtttctggtctatagtgagtcgtattacntcctggcccgcgctttc

SEQ ID NO: 328750 - DNA, 805 bp, Homo sapiens
caacacaggggcagtctccaggacctccacaccattaacaagatgagccttgtgctcccttgggctctagagaggaagcccctctgagccctcagcccctctttcctccctctcctaaagtaatttgatcctcaggaatttgttctgccctcatctggccctggccagctctgcatttgacaaatgccaggaagaggaaactgttgagaaaacggaactactggggaaagggagggctcactgagaaccatcccggtaacccgatcaccgctggtcaccatgaaccacattgtgcaaaccttctctcctgtcaacagcggccagcctcccaactacgagatgctcaaggaggagcaggaagtggctatgctgggggcgccccacaaccctgctcccccgacgtccaccgtgatccacatccgcagcgagacctccgtgcccgaccatgtcgtctggtccctgttcaacaccctcttcatgaacccctgctgcctgggcttcatagcattcgcctactccgtgaagtctagggacaggaagatggttggcgacgtgaccggggcccaggcctatgcctccaccgccaagtgcctgaacatctgggccctgattctgggcatcctcatgaccattctgctcatcatcatcccagtgttggtcgtccaggcccagcgatagatcaggaggcatcattgaggccaggagctctgcccgtgacctgtatcccacgtactctatcttccattcctcgccctgcccccaggtcgacgcggccgcgaatttagtagtagtagtaggcggccgc

SEQ ID NO: 328751 - DNA, 596 bp, Homo sapiens
atgaggcactctagaggctcccccagcacagagaaggaggagcaggaagtggctatgctgggggcgccccacaaccctgctcccccgacgtccaccgtgatccacatccgcagcgagacctccgtgcccgaccatgtcgtctggtccctgttcaacaccctcttcatgaacccctgctgcctgggcttcatagcattcgcctactccgtgaagtctagggacaggaagatggttggcgacgtgaccggggcccaggcctatgcctccaccgccaagtgcctgaacatctgggccctgattctgggcatcctcatgaccattctgctcatcatcatcccagtgttggtcgtccaggcccagcgatagatcaggaggcatcattgaggccaggagctctgcccgtgacctgtatcccacgtactctatcttccattcctcgccctgcccccagaggccaggagctctgcccttgacctgtattccacttactccaccttccattcctcgccctgtccccacagccgagtcctgcatcagccctttatcctcacacgcttttctacaatggcattcaataaagtgtatatgtttctggt

SEQ ID NO: 328752 - DNA, 886 bp, Homo sapiens
caacacaggggcagtctccaggacctccacaccattaacaagatgagccttgtgctcccttgggctctagagaggaagcccctctgagccctcagcccctctttcctccctctcctaaagtaatttgatcctcaggaatttgttctgccctcatctggccctggccagctctgcatttgacaaatgccaggaagaggaaactgttgagaaaacggaactactggggaaagggagggctcactgagaaccatcccggtaacccgatcaccgctggtcaccatgaaccacattgtgcaaaccttctctcctgtcaacagcggccagcctcccaactacgagatgctcaaggaggagcaggaagtggctatgctgggggcgccccacaaccctgctcccccgacgtccaccgtgatccacatccgcagcgagacctccgtgcccgaccatgtcgtctggtccctgttcaacaccctcttcatgaacccctgctgcctgggcttcatagcattcgcctactccgtgaagtctagggacaggaagatggttggcgacgtgaccggggcccaggcctatgcctccaccgccaagtgcctgaacatctgggccctgattctgggcatcctcatgaccatggattcatcctgttactggtattcggctctgtgacagtctaccatattatgttacagataatacaggaaaaacggggttactagtagccgcccatagcctgcaacctttgcactccactgtgcaatgctggccctgcacgctggggctgttgcccctgcccccttggtcctgcccctagatacagcagtttatacccacacacctgtctacagtgtcattcaataaagtgcacgtgcttgtgaaaaaaaaaaaa

SEQ ID NO: 328753 - DNA, 642 bp, Homo sapiens
  misc_feature (62)..(62): n is a, c, g, or t
  misc_feature (64)..(64): n is a, c, g, or t
cttagatgtgaggtctcgctgcggatgtggatcacggtggacgtcgggggagcagcgtatgngnggcgcccccagcatagccacttcctgctcctccttgagcatctcgtagttgggaggctggccgctgttgacaggagagaaggtttgcacccgcagcgagacctccgtgcccgaccatgtcgtctggtccctgttcaacaccctcttcatgaacccctgctgcctgggcttcatagcattcgcctactccgtgaagtctagggacaggaagatggttggcgacgtgaccggggcccaggcctatgcctccaccgccaagtgcctgaacatctgggccctgattctgggcatcctcatgaccattctgctcatcatcatcccagtgttggtcgtccaggcccagcgatagatcaggaggcatcattgaggccaggagctctgcccgtgacctgtatcccacgtactctatcttccattcctcgccctgcccccagaggccaggagctctgcccttgacctgtattccacttactccaccttccattcctcgccctgtccccacagccgagtcctgcatcagccctttatcctcacacgcttttctacaatggcattcaataaagtgtatatgtttctggt

SEQ ID NO: 328754 - DNA, 708 bp, Homo sapiens
caacacaggggcagtctccaggacctccacaccattaacaagatgagccttgtgctcccttgggctctagagaggaagcccctctgagccctcagcccctctttcctccctctcctaaagtaatttgatcctcaggaatttgttctgccctcatctggccctggccagctctgcatttgacaaatgccaggaagaggaaactgttgagaaaacggaactactggggaaagggagggctcactgagaaccatcccggtaacccgatcaccgctggtcaccatgaaccacattgtgcaaaccttctctcctgtcaacagcggccagcctcccaactacgagatgctcaaggaggagcaggaagtggctatgctgggggcgccccacaaccctgctcccccgacgtccaccgtgatccacatccgcagcgagacctccgtgcccgaccatgtcgtctggtccctgttcaacaccctcttcatgaacccctgctgcctgggcttcatagcattcgcctactccgtgaagtctagggacaggaagatggttggcgacgtgaccggggcccaggcctatgcctccaccgccaagtgcctgaacatctgggccctgattctgggcatcctcatgaccatgccgagtcctgcatcagccctttatcctcacacgcttttctacaatggcattcaataaagtgtatatgtttctggt

SEQ ID NO: 328755 - DNA, 1482 bp, Homo sapiens
caacacaggggcagtctccaggacctccacaccattaacaagatgagccttgtgctcccttgggctctagagaggaagcccctctgagccctcagcccctctttcctccctctcctaaagtaatttgatcctcaggaatttgttctgccctcatctggccctggccagctctgcatttgacaaatgccaggaagaggaaactgttgagaaaacggaactactggggaaagggagggctcactgagaaccatcccggtaacccgatcaccgctggtcaccatgaaccacattgtgcaaaccttctctcctgtcaacagcggccagcctcccaactacgagatgctcaaggaggagcaggaagtggctatgctgggggcgccccacaaccctgctcccccgacgtccaccgtgatccacatccgcagcgagacctccgtgcccgaccatgtcgtctggtccctgttcaacaccctcttcatgaacccctgctgcctgggcttcatagcattcgcctactccgtgaaggtgcgtatggccctggcggaaatccagggggtgccggtgagcctggggctccacctgcccacatgctgcctggggtggggacttgtgtgtccctgtgactgtgagtttgtgtgcacgtctgtcctgtgtgtgcccacgtcagtggctttgtctgtgtgatctgtgtgtgtgtgtggcttggggaatctgcccagtgcaggtctaggaggaggctccaggaggctggctggctggctcagagtctgtccccggctatccactagcccagagcagttctccctatagcccagtaagaaattacaccttcaccttccagactggcacccaggctctcccagaaagtgagaagggaactcacaggtgacttcaccccatggtggggagaacagcctgtgctggggccaaggcagaaggaggatgagccccgaggctcctggagagtctgagccgggtgaggaaggggaggaggtggtccctgatctcagggcagggaggagccaatgaggagacggagccatagcacgcggctctcagctgggggatcctggtcccctcaccatctcctctcccccagtctagggacaggaagatggttggcgacgtgaccggggcccaggcctatgcctccaccgccaagtgcctgaacatctgggccctgattctgggcatcctcatgaccattctgctcatcatcatcccagtgttggtcgtccaggcccagcgatagatcaggaggcatcattgaggccaggagctctgcccgtgacctgtatcccacgtactctatcttccattcctcgccctgcccccagaggccaggagctctgcccttgacctgtattccacttactccaccttccattcctcgccctgtccccacagccgagtcctgcatcagccctttatcctcacacgcttttctacaatggcattcaataaagtgtatatgtttctggt

SEQ ID NO: 328756 - DNA, 1043 bp, Homo sapiens
caacacaggggcagtctccaggacctccacaccattaacaagatgagccttgtgctcccttgggctctagagaggaagcccctctgagccctcagcccctctttcctccctctcctaaagtaatttgatcctcaggaatttgttctgccctcatctggccctggccagctctgcatttgacaaatgccaggaagaggaaactgttgagaaaacggaactactggggaaagggagggctcactgagaaccatcccggtaacccgatcaccgctggtcaccatgaaccacattgtgcaaaccttctctcctgtcaacagcggccagcctcccaactacgagatgctcaaggaggagcaggaagtggctatgctgggggcgccccacaaccctgctcccccgacgtccaccgtgatccacatccgcagcgagacctccgtgcccgaccatgtcgtctggtccctgttcaacaccctcttcatgaacccctgctgcctgggcttcatagcattcgcctactccgtgaagactggcacccaggctctcccagaaagtgagaagggaactcacaggtgacttcaccccatggtggggagaacagcctgtgctggggccaaggcagaaggaggatgagccccgaggctcctggagagtctgagccggtctagggacaggaagatggttggcgacgtgaccggggcccaggcctatgcctccaccgccaagtgcctgaacatctgggccctgattctgggcatcctcatgaccattctgctcatcatcatcccagtgttggtcgtccaggcccagcgatagatcaggaggcatcattgaggccaggagctctgcccgtgacctgtatcccacgtactctatcttccattcctcgccctgcccccagaggccaggagctctgcccttgacctgtattccacttactccaccttccattcctcgccctgtccccacagccgagtcctgcatcagccctttatcctcacacgcttttctacaatggcattcaataaagtgtatatgtttctggt

SEQ ID NO: 328757 - DNA, 541 bp, Homo sapiens
  misc_feature (5)..(5): n is a, c, g, or t
  misc_feature (7)..(7): n is a, c, g, or t
  misc_feature (42)..(42): n is a, c, g, or t
  misc_feature (47)..(47): n is a, c, g, or t
  misc_feature (54)..(56): n is a, c, g, or t
  misc_feature (63)..(63): n is a, c, g, or t
  misc_feature (68)..(68): n is a, c, g, or t
  misc_feature (70)..(72): n is a, c, g, or t
  misc_feature (83)..(83): n is a, c, g, or t
  misc_feature (118)..(118): n is a, c, g, or t
tgacntngggggggacagggttgtggggcccccccagcacanccacntcgtgcnnntccgacntctcntnnntggggggctgnccactgttgacaggagagaagaggtttggacagtntgaccgcagcgagacctccgtgcccgaccatgtcgtctggtccctgttcaacaccctcttcatgaacccctgctgcctgggcttcatagcattcgcctactccgtgaagtctagggacaggaagatggttggcgacgtgaccggggcccaggcctatgcctccaccgccaagtgcctgaacatctgggccctgattctgggcatcctcatgaccattctgctcatcatcatcccagtgttggtcgtccaggcccagcgatagatcaggaggcatcattgaggccaggagctctgcccgtgacctgtatcccacgtactctatcttccattcctcgccctgcccccaggccgagtcctgcatcagccctttatcctcacacgcttttctacaatggcattcaataaagtgtatatgtttctggt

SEQ ID NO: 328758 - DNA, 1413 bp, Homo sapiens
caacacaggggcagtctccaggacctccacaccattaacaagatgagccttgtgctcccttgggctctagagaggaagcccctctgagccctcagcccctctttcctccctctcctaaagtaatttgatcctcaggaatttgttctgccctcatctggccctggccagctctgcatttgacaaatgccaggaagaggaaactgttgagaaaacggaactactggggaaagggagggctcactgagaaccatcccggtaacccgatcaccgctggtcaccatgaaccacattgtgcaaaccttctctcctgtcaacagcggccagcctcccaactacgagatgctcaaggaggagcaggaagtggctatgctgggggcgccccacaaccctgctcccccgacgtccaccgtgatccacatccgcagcgagacctccgtgcccgaccatgtcgtctggtccctgttcaacaccctcttcatgaacccctgctgcctgggcttcatagcattcgcctactccgtgaaggtgcgtatggccctggcggaaatccagggggtgccggtgagcctggggctccacctgcccacatgctgcctggggtggggacttgtgtgtccctgtgactgtgagtttgtgtgcacgtctgtcctgtgtgtgcccacgtcagtggctttgtctgtgtgatctgtgtgtgtgtgtggcttggggaatctgcccagtgcaggtctaggaggaggctccaggaggctggctggctggctcagagtctgtccccggctatccactagcccagagcagttctccctatagcccagtaagaaattacaccttcaccttccagactggcacccaggctctcccagaaagtgagaagggaactcacaggtgacttcaccccatggtggggagaacagcctgtgctggggccaaggcagaaggaggatgagccccgaggctcctggagagtctgagccgggtgaggaaggggaggaggtggtccctgatctcagggcagggaggagccaatgaggagacggagccatagcacgcggctctcagctgggggatcctggtcccctcaccatctcctctcccccagtctagggacaggaagatggttggcgacgtgaccggggcccaggcctatgcctccaccgccaagtgcctgaacatctgggccctgattctgggcatcctcatgaccattctgctcatcatcatcccagtgttggtcgtccaggcccagcgatagatcaggaggcatcattgaggccaggagctctgcccgtgacctgtatcccacgtactctatcttccattcctcgccctgcccccaggccgagtcctgcatcagccctttatcctcacacgcttttctacaatggcattcaataaagtgtatatgtttctggt

SEQ ID NO: 328759 - DNA, 401 bp, Homo sapiens
  misc_feature (382)..(382): n is a, c, g, or t
gtgaactagaggatccccccaccttatgcgtgggcttcatagcattcgcctactccgtgaagtctagggacaggaagatggttggcgacgtgaccggggcccaggcctatgcctccaccgccaagtgcctgaacatctgggccctgattctgggcatcctcatgaccattctgctcatcatcatcccagtgttggtcgtccaggcccagcgatagatcaggaggcatcattgaggccaggagctctgcccgtgacctgtatcccacgtactctatcttccattcctcgccctgcccccagaggccaggagctctgcccttgacctgtattccacttactccaccttccattcctcgccctgtccccacagcataaggttggnggatcctctagagtcacca

SEQ ID NO: 328760 - DNA, 594 bp, Homo sapiens
  misc_feature (441)..(441): n is a, c, g, or t
  misc_feature (451)..(451): n is a, c, g, or t
  misc_feature (464)..(464): n is a, c, g, or t
  misc_feature (467)..(467): n is a, c, g, or t
  misc_feature (471)..(471): n is a, c, g, or t
  misc_feature (478)..(478): n is a, c, g, or t
  misc_feature (480)..(480): n is a, c, g, or t
  misc_feature (489)..(490): n is a, c, g, or t
  misc_feature (506)..(506): n is a, c, g, or t
  misc_feature (519)..(519): n is a, c, g, or t
  misc_feature (522)..(522): n is a, c, g, or t
  misc_feature (525)..(525): n is a, c, g, or t
  misc_feature (528)..(528): n is a, c, g, or t
gcggccgctccaacatcagaatggtcatgaagatgcccaaaatcagggcccagatgttcaggcacttggcggtggaggcatatgcctgaacatctgggccctgattctgggcatcctcatgaccattctgctcatcatcatcccagtgttggtcgtccaggcccagcgatagatcaggaggcatcattgaggccaggagctctgcccgtgacctgtatcccacgtactctatcttccattcctcgccctgcccccagaggccaggagctctgcccttgacctgtattccacttactccaccttccattcctcgccctgtccccacagccgagtcctgcatcagccctttatcctcacacgcttttctacaatggcattcaataaagtgtatatgtttctggtaaaaaaaaacaaaaaaaaatgtggggggcgcccgaaagntttaaacagnggggcgggccagngangaanggcaggncngaaccgggnnagggggttcccaaaangcggggcggggtnaancanggngggctgctcaccgcaccccccccgccgcgggcaaggaagaaacgcgaggacacgagccaatagacg

SEQ ID NO: 328761 - DNA, 452 bp, Homo sapiens
gcggccgcctactactactaaattcgcggccgcgtcgaccttcttgaactggtgctgtctgggcttcatagcattcgcctactccgtgaagtctagggacaggaagatggttggcgacgtgaccggggcccaggcctatgcctccaccgccaagtgcctgaacatctgggccctgattctgggcatcctcatgaccatggattcatcctgttactggtattcggctctgtgacagtctaccatattatgttacagataatacaggaaaaacggggttactagtagccgcccatagcctgcaacctttgcactccactgtgcaatgctggccctgcacgctggggctgttgcccctgcccccttggtcctgcccctagatacagcagtttatacccacacacctgtctacagtgtcattcaataaagtgcacgtgcttgtgaaaaaaaaaaaa

SEQ ID NO: 328762 - DNA, 461 bp, Homo sapiens
  misc_feature (57)..(57): n is a, c, g, or t
ctaggtggacatccggctggggtggtctccccacctcctcacattatgcctacacgnacacagacacatgcaggtgcctttgcggaaaccaagtcagggttcttcaagtcaccaagggaagggcaggaaccactcttgcctctcagtcccacaccaggcagctgtctcacactttaccagctgtgagagacacatcagagccctgggcactgtcactgcttgcagccttgagtgtaactccctccttttctatctgagctctgcccgtgacctgtatcccacgtactctatcttccattcctcgccctgcccccagaggccaggagctctgcccttgacctgtattccacttactccaccttccattcctcgccctgtccccacagccgagtcctgcatcagccctttatcctcacacgcttttctacaatggcattcaataaagtgtatatgtttctggt

SEQ ID NO: 328763 - DNA, 420 bp, Homo sapiens
caacacaggggcagtctccaggacctccacaccattaacaagatgagccttgtgctcccttgggctctagagaggaagcccctctgagccctcagcccctctttcctccctctcctaaagtaatttgatcctcaggaatttgttctgccctcatctggccctggccagctctgcatttgacaaatgccaggaagaggaaactgttgagaaaacggaactactggggaaagggagggctcactgagaaccatcccggtaacccgatcaccgctggtcaccatgaaccacattgtgcaaaccttctctcctgtcaacagcggccagcctcccaactacgagatgctcggcaaaggtgtctggggtacacctggacaggtgtatgatgtggaggagtgattgtgaaagatctccaactatgat

SEQ ID NO: 328764 - DNA, 908 bp, Homo sapiens
caacacaggggcagtctccaggacctccacaccattaacaagatgagccttgtgctcccttgggctctagagaggaagcccctctgagccctcagcccctctttcctccctctcctaaagtaatttgatcctcaggaatttgttctgccctcatctggccctggccagctctgcatttgacaaatgccaggaagaggaaactgttgagaaaacggaactactggggaaagggagggctcactgagaaccatcccggtaacccgatcaccgctggtcaccatgaaccacattgtgcaaaccttctctcctgtcaacagcggccagcctcccaactacgagatgctcaaggaggagcaggaagtggctatgctgggggcgccccacaaccctgctcccccgacgtccaccgtgatccacatccgcagcgagacctccgtgcccgaccatgtcgtctggtccctgttcaacaccctcttcatgaacccctgctgcctgggcttcatagcattcgcctactccgtgaagtctagggacaggaagatggttggcgacgtgaccggggcccaggcctatgcctccaccgccaagtgcctgaacatctgggccctgattctgggcatcctcatgaccattctgctcatcatcatcccagtgttggtcgtccaggcccagcgatagatcaggaggcatcattgaggccaggagctctgcccgtgacctgtatcccacgtactctatcttccattcctcgccctgcccccagaggccaggagctctgcccttgacctgtattccacttactccaccttccattcctcgccctgtccccacagccgagtcctgcatcagccctttatcctcacacgcttttctacaatggcattcaataaagtgtatatgtttctggt

SEQ ID NO: 328765 - DNA, 629 bp, Homo sapiens
  misc_feature (16)..(16): n is a, c, g, or t
  misc_feature (31)..(32): n is a, c, g, or t
ccggcccaagtttaancccctcgaggattannggtagcgaggcctgggtgccgcgctggtcttgtcaccatgaaccacattgtgcaaaccttctctcctgtcaacagcggccagcctcccaactacgagatgctcaaggaggagcaggaagtggctatgctgggggcgccccacaaccctgctcccccgacgtccaccgtgatccacatccgcagcgagacctccgtgcccgaccatgtcgtctggtccctgttcaacaccctcttcatgaacccctgctgcctgggcttcatagcattcgcctactccgtgaagtctagggacaggaagatggttggcgacgtgaccggggcccaggcctatgcctccaccgccaagtgcctgaacatctgggccctgattctgggcatcctcatgaccattctgctcatcatcatcccagtgttggtcgtccaggcccagcgatagatcaggaggcatcattgaggccaggagctctgcccgtgacctgtatcccacgtactctatcttccattcctcgccctgcccccaggccgagtcctgcatcagccctttatcctcacacgcttttctacaatggcattcaataaagtgtatatgtttctggt

SEQ ID NO: 328766 - DNA, 655 bp, Homo sapiens
tctactgtgttcaatctctattgtttcaccctatgcaatcctgaccataaccctgaatgggcattaccagccttttctccggagaggaaacaggagctcagaggagttcaaagacatgctcagggtcacatagttcagcgtctggtcagacgctgaactataaggaggagcaggaagtggctatgctgggggcgccccacaaccctgctcccccgacgtccaccgtgatccacatccgcagcgagacctccgtgcccgaccatgtcgtctggtccctgttcaacaccctcttcatgaacccctgctgcctgggcttcatagcattcgcctactccgtgaagtctagggacaggaagatggttggcgacgtgaccggggcccaggcctatgcctccaccgccaagtgcctgaacatctgggccctgattctgggcatcctcatgaccattctgctcatcatcatcccagtgttggtcgtccaggcccagcgatagatcaggaggcatcattgaggccaggagctctgcccgtgacctgtatcccacgtactctatcttccattcctcgccctgcccccaggccgagtcctgcatcagccctttatcctcacacgcttttctacaatggcattcaataaagtgtatatgtttctggt

SEQ ID NO: 328767 - DNA, 490 bp, Homo sapiens
  misc_feature (62)..(62): n is a, c, g, or t
  misc_feature (64)..(64): n is a, c, g, or t
cttagatgtgaggtctcgctgcggatgtggatcacggtggacgtcgggggagcagcgtatgngnggcgcccccagcatagccacttcctgctcctccttgagcatctcgtagttgggaggctggccgctgttgacaggagagaaggtttgcacccgcagcgagacctccgtgcccgaccatgtcgtctggtccctgttcaacaccctcttcatgaacccctgctgcctgggcttcatagcattcgcctactccgtgaagtctagggacaggaagatggttggcgacgtgaccggggcccaggcctatgcctccaccgccaagtgcctgaacatctgggccctgattctgggcatcctcatgaccattctgctcatcatcatcccagtgttggtcgtccaggcccagcgatagatcaggaggcatcattgaggccaggagctctgcccgtgacctgtatcccacatagttcagcgtctgacgggtaggaga

SEQ ID NO: 328768 - DNA, 1573 bp, Homo sapiens
  misc_feature (943)..(943): n is a, c, g, or t
  misc_feature (959)..(959): n is a, c, g, or t
caacacaggggcagtctccaggacctccacaccattaacaagatgagccttgtgctcccttgggctctagagaggaagcccctctgagccctcagcccctctttcctccctctcctaaagtaatttgatcctcaggaatttgttctgccctcatctggccctggccagctctgcatttgacaaatgccaggaagaggaaactgttgagaaaacggaactactggggaaagggagggctcactgagaaccatcccggtaacccgatcaccgctggtcaccatgaaccacattgtgcaaaccttctctcctgtcaacagcggccagcctcccaactacgagatgctcaaggaggagcaggaagtggctatgctgggggcgccccacaaccctgctcccccgacgtccaccgtgatccacatccgcagcgagacctccgtgcccgaccatgtcgtctggtccctgttcaacaccctcttcatgaacccctgctgcctgggcttcatagcattcgcctactccgtgaagtctagggacaggaagatggttggcgacgtgaccggggcccaggcctatgcctccaccgccaagtgcctgaacatctgggccctgattctgggcatcctcatgaccattctgctcatcatcatcccagtgttggtcgtccaggcccagcgatagatcaggaggcatcattgaggccaggagctctgcccgtgacctgtatcccacgtactctatcttccattcctcgccctgcccccagaggccaggagctctgcccttgacctgtattccacttactccaccttccattcctcgccctgtccccacagccgagtcctgcatcagccctttatcctcacacgcttttctacaatggcattcaataaagtgtatatgtttctggtaaaaaaaaacaaaaaaaaaaaaaaaaaaaaaaaanaaaaaaaaacaacacnaaaacaaacaaaacaaaaacaaaaagacgacacaaaaaaaaaaaaaagaaacaagaaaacacaaaactgggggggcggagcggccccccacgacaaggaccatgagaaccacgtggggggggcgcggaccaacaaaggaagaaaacacgaagcagcaagaaaaaagagatcacacacaaaagaagcagggagaagaaacacaaagtggagagaaacacacacaaaacaagagaacacgcgcggggaagaacgaggtgagtaaacaaacccataggacaggaaaggagagagaaaaaaaaggagaataaacacacagaagagtacacgcgagacagagtcgaaatgaaaaaaaagacgcgcaagcgagggtgtgaaaaaaaaacaaccaaaacaaacaagaaaaaaagacgagacaagaagaaagagagacggacgagaggaagagaaagaagagaggagaaagagagggcgaaaaaatagtaaagaaagacaaaagaggagagagaagggaaggggcaaagaagagagaggcgcagaccgagacacagacaagaaaataagaaaaagaaggagaggaaggcggagaagagcaagaaggaaaaaagtcaaaagag

SEQ ID NO: 328769 - DNA, 969 bp, Homo sapiens
caacacaggggcagtctccaggacctccacaccattaacaagatgagccttgtgctcccttgggctctagagaggaagcccctctgagccctcagcccctctttcctccctctcctaaagtaatttgatcctcaggaatttgttctgccctcatctggccctggccagctctgcatttgacaaatgccaggaagaggaaactgttgagaaaacggaactactggggaaagggagggctcactgagaaccatcccggtaacccgatcaccgctggtcaccatgaaccacattgtgcaaaccttctctcctgtcaacagcggccagcctcccaactacgagatgctcaaggaggagcaggaagtggctatgctgggggcgccccacaaccctgctcccccgacgtccaccgtgatccacatccgcagcgagacctccgtgcccgaccatgtcgtctggtccctgttcaacaccctcttcatgaacccctgctgcctgggcttcatagcattcgcctactccgtgaagtctagggacaggaagatggttggcgacgtgaccggggcccaggcctatgcctccaccgccaagtgcctgaacatctgggccctgattctgggcatcctcatgaccattctgctcatcatcatcccagtgttggtcgtccaggcccagcgatagatcaggaggcatcattgaggccaggagctctgcccgtgacctgtatcccacgtactctatcttccattcctcgccctgcccccagaggccaggagctctgcccttgacctgtattccacttactccaccttccattcctcgccctgtccccacagccgagtcctgcatcagccctttatcctcacacgcttttctacaatggcattcaataaagtgtatatgtttctggtctgctcaaaaaacactctcttaactcatgtcggccgccttgcccagtcgatttagcttgcg

SEQ ID NO: 328770 - DNA, 1115 bp, Homo sapiens
  misc_feature (992)..(992): n is a, c, g, or t
caacacaggggcagtctccaggacctccacaccattaacaagatgagccttgtgctcccttgggctctagagaggaagcccctctgagccctcagcccctctttcctccctctcctaaagtaatttgatcctcaggaatttgttctgccctcatctggccctggccagctctgcatttgacaaatgccaggaagaggaaactgttgagaaaacggaactactggggaaagggagggctcactgagaaccatcccggtaacccgatcaccgctggtcaccatgaaccacattgtgcaaaccttctctcctgtcaacagcggccagcctcccaactacgagatgctcaaggaggagcaggaagtggctatgctgggggcgccccacaaccctgctcccccgacgtccaccgtgatccacatccgcagcgagacctccgtgcccgaccatgtcgtctggtccctgttcaacaccctcttcatgaacccctgctgcctgggcttcatagcattcgcctactccgtgaagtctagggacaggaagatggttggcgacgtgaccggggcccaggcctatgcctccaccgccaagtgcctgaacatctgggccctgattctgggcatcctcatgaccattctgctcatcatcatcccagtgttggtcgtccaggcccagcgatagatcaggaggcatcattgaggccaggagctctgcccgtgacctgtatcccacgtactctatcttccattcctcgccctgcccccagaggccaggagctctgcccttgacctgtattccacttactccaccttccattcctcgccctgtccccacagccgagtcctgcatcagccctttatcctcacacgcttttctacaatggcattcaataaagtgtatatgtttctggtaaaaaaaaaaaaaaaaaaaaataaataacttattattaataattaaaaatatataattttttaataaaataaatattttttttntattcttattttaaaattaaaaaaaaaaaccttccaggggggccccggaccccaatatttcccctttaggggaggctatttaaaaataacttggcccgttttttagaatataacccccttttg

SEQ ID NO: 328771 - DNA, 1185 bp, Homo sapiens
caacacaggggcagtctccaggacctccacaccattaacaagatgagccttgtgctcccttgggctctagagaggaagcccctctgagccctcagcccctctttcctccctctcctaaagtaatttgatcctcaggaatttgttctgccctcatctggccctggccagctctgcatttgacaaatgccaggaagaggaaactgttgagaaaacggaactactggggaaagggagggctcactgagaaccatcccggtaacccgatcaccgctggtcaccatgaaccacattgtgcaaaccttctctcctgtcaacagcggccagcctcccaactacgagatgctcaaggaggagcaggaagtggctatgctgggggcgccccacaaccctgctcccccgacgtccaccgtgatccacatccgcagcgagacctccgtgcccgaccatgtcgtctggtccctgttcaacaccctcttcatgaacccctgctgcctgggcttcatagcattcgcctactccgtgaagtctagggacaggaagatggttggcgacgtgaccggggcccaggcctatgcctccaccgccaagtgcctgaacatctgggccctgattctgggcatcctcatgaccattctgctcatcatcatcccagtgttggtcgtccaggcccagcgatagatcaggaggcatcattgaggccaggagctctgcccgtgacctgtatcccacgtactctatcttccattcctcgccctgcccccagaggccaggagctctgcccttgacctgtattccacttactccaccttccattcctcgccctgtccccacagccgagtcctgcatcagccctttatcctcacacgcttttctacaatggcattcaataaagtgtatatgtttctggtgctcgaagaatcgcgtcattcaaacggctagtaaaccgctttgtggttaggactgcggccgaggaaaagggtttgattaaccccgttccgtgtggggcacgggccccttggggcaggtacaacttggcaatgggggcctcgaggaaacccgtccggagactggggctgggttctccccatataaagaacgccggcgacacccggcttttgaaccaaccacattgggtttctgaggcaacacggactacacagggcagggaccgttaaccggcggggg

SEQ ID NO: 328772 - DNA, 871 bp, Homo sapiens
caacacaggggcagtctccaggacctccacaccattaacaagatgagccttgtgctcccttgggctctagagaggaagcccctctgagccctcagcccctctttcctccctctcctaaagtaatttgatcctcaggaatttgttctgccctcatctggccctggccagctctgcatttgacaaatgccaggaagaggaaactgttgagaaaacggaactactggggaaagggagggctcactgagaaccatcccggtaacccgatcaccgctggtcaccatgaaccacattgtgcaaaccttctctcctgtcaacagcggccagcctcccaactacgagatgctcaaggaggagcaggaagtggctatgctgggggcgccccacaaccctgctcccccgacgtccaccgtgatccacatccgcagcgagacctccgtgcccgaccatgtcgtctggtccctgttcaacaccctcttcatgaacccctgctgcctgggcttcatagcattcgcctactccgtgaagtctagggacaggaagatggttggcgacgtgaccggggcccaggcctatgcctccaccgccaagtgcctgaacatctgggccctgattctgggcatcctcatgaccattctgctcatcatcatcccagtgttggtcgtccaggcccagcgatagatcaggaggcatcattgaggccaggagctctgcccgtgacctgtatcccacgtactctatcttccattcctcgccctgcccccagaggccaggagctctgcccttgacctgtattccacttactccaccttccattcctcgccctgtccccacaggcataaggtgggggtacaagctcgaggttcgatgatga

SEQ ID NO: 328773 - DNA, 816 bp, Homo sapiens
caacacaggggcagtctccaggacctccacaccattaacaagatgagccttgtgctcccttgggctctagagaggaagcccctctgagccctcagcccctctttcctccctctcctaaagtaatttgatcctcaggaatttgttctgccctcatctggccctggccagctctgcatttgacaaatgccaggaagaggaaactgttgagaaaacggaactactggggaaagggagggctcactgagaaccatcccggtaacccgatcaccgctggtcaccatgaaccacattgtgcaaaccttctctcctgtcaacagcggccagcctcccaactacgagatgctcaaggaggagcaggaagtggctatgctgggggcgccccacaaccctgctcccccgacgtccaccgtgatccacatccgcagcgagacctccgtgcccgaccatgtcgtctggtccctgttcaacaccctcttcatgaacccctgctgcctgggcttcatagcattcgcctactccgtgaagtctagggacaggaagatggttggcgacgtgaccggggcccaggcctatgcctccaccgccaagtgcctgaacatctgggccctgattctgggcatcctcatgaccattctgctcatcatcatcccagtgttggtcgtccaggcccagcgatagatcaggaggcatcattgaggccaggagctctgcccgtgacctgtatcccacgtactctatcttccattcctcgccctgcccccagccgagtcctgtatcagccctttatcctcacagtctggggatcctcatagagca

SEQ ID NO: 328774 - DNA, 870 bp, Homo sapiens
caacacaggggcagtctccaggacctccacaccattaacaagatgagccttgtgctcccttgggctctagagaggaagcccctctgagccctcagcccctctttcctccctctcctaaagtaatttgatcctcaggaatttgttctgccctcatctggccctggccagctctgcatttgacaaatgccaggaagaggaaactgttgagaaaacggaactactggggaaagggagggctcactgagaaccatcccggtaacccgatcaccgctggtcaccatgaaccacattgtgcaaaccttctctcctgtcaacagcggccagcctcccaactacgagatgctcaaggaggagcaggaagtggctatgctgggggcgccccacaaccctgctcccccgacgtccaccgtgatccacatccgcagcgagacctccgtgcccgaccatgtcgtctggtccctgttcaacaccctcttcatgaacccctgctgcctgggcttcatagcattcgcctactccgtgaagtctagggacaggaagatggttggcgacgtgaccggggcccaggcctatgcctccaccgccaagtgcctgaacatctgggccctgattctgggcatcctcatgaccattctgctcatcatcatcccagtgttggtcgtccaggcccagcgatagatcaggaggcatcattgaggccaggagctctgcccgtgacctgtatcccacgtactctatcttccattcctcgccctgcccccaggccgagtcctgcatcagccctttatcctcacacgcttttctacaatggcattcaataaagtgtatatgtttctggtacctatatcttccttcttcccgtccctccct

SEQ ID NO: 328775 - DNA, 1082 bp, Homo sapiens
  misc_feature (1082)..(1082): n is a, c, g, or t
caacacaggggcagtctccaggacctccacaccattaacaagatgagccttgtgctcccttgggctctagagaggaagcccctctgagccctcagcccctctttcctccctctcctaaagtaatttgatcctcaggaatttgttctgccctcatctggccctggccagctctgcatttgacaaatgccaggaagaggaaactgttgagaaaacggaactactggggaaagggagggctcactgagaaccatcccggtaacccgatcaccgctggtcaccatgaaccacattgtgcaaaccttctctcctgtcaacagcggccagcctcccaactacgagatgctcaaggaggagcaggaagtggctatgctgggggcgccccacaaccctgctcccccgacgtccaccgtgatccacatccgcagcgagacctccgtgcccgaccatgtcgtctggtccctgttcaacaccctcttcatgaacccctgctgcctgggcttcatagcattcgcctactccgtgaagtctagggacaggaagatggttggcgacgtgaccggggcccaggcctatgcctccaccgccaagtgcctgaacatctgggccctgattctgggcatcctcatgaccattctgctcatcatcatcccagtgttggtcgtccaggcccagcgatagatcaggaggcatcattgaggccaggagctctgcccgtgacctgtatcccacgtactctatcttccattcctcgccctgcccccaggccgagtcctgcatcagccctttatcctcacacgcttttctacaatggcattcaataaagtgtatatgtttctggtaaaaaaaaaaaaaaacaaaaaacaaaacaaaacacaaccaccgcggagcgccccatatacggcggggggcgaggaaaaacgcgggtcactagaacgggcgccacgcgcgccgaacgcgtgttcctccagcaccccagcttctctgggccacccaggcgggacaacaggccggagtctcccaatagaggggagccgataaaactcagaaaacaccggtaccctcgttagccgaccacacaccgn

SEQ ID NO: 328776 - DNA, 837 bp, Homo sapiens
  misc_feature (765)..(765): n is a, c, g, or t
caacacaggggcagtctccaggacctccacaccattaacaagatgagccttgtgctcccttgggctctagagaggaagcccctctgagccctcagcccctctttcctccctctcctaaagtaatttgatcctcaggaatttgttctgccctcatctggccctggccagctctgcatttgacaaatgccaggaagaggaaactgttgagaaaacggaactactggggaaagggagggctcactgagaaccatcccggtaacccgatcaccgctggtcaccatgaaccacattgtgcaaaccttctctcctgtcaacagcggccagcctcccaactacgagatgctcaaggaggagcaggaagtggctatgctgggggcgccccacaaccctgctcccccgacgtccaccgtgatccacatccgcagcgagacctccgtgcccgaccatgtcgtctggtccctgttcaacaccctcttcatgaacccctgctgcctgggcttcatagcattcgcctactccgtgaagtctagggacaggaagatggttggcgacgtgaccggggcccaggcctatgcctccaccgccaagtgcctgaacatctgggccctgattctgggcatcctcatgaccattctgctcatcatcatcccagtgttggtcgtccaggcccagcgatagatcaggaggcatcattgaggccaggagctctgcccgtgacctgtatcccacgtactctatcttccattcctcgccctgcccccaggnagccgagtcctgtatcagccctttatcctaccacgctgttccacaatgcacgtgataagatcctgagagtag

SEQ ID NO: 328777 - DNA, 724 bp, Homo sapiens
tctactgtgttcaatctctattgtttcaccctatgcaatcctgaccataaccctgaatgggcattaccagccttttctccggagaggaaacaggagctcagaggagttcaaagacatgctcagggtcacatagttcagcgtctggtcagacgctgaactataaggaggagcaggaagtggctatgctgggggcgccccacaaccctgctcccccgacgtccaccgtgatccacatccgcagcgagacctccgtgcccgaccatgtcgtctggtccctgttcaacaccctcttcatgaacccctgctgcctgggcttcatagcattcgcctactccgtgaagtctagggacaggaagatggttggcgacgtgaccggggcccaggcctatgcctccaccgccaagtgcctgaacatctgggccctgattctgggcatcctcatgaccattctgctcatcatcatcccagtgttggtcgtccaggcccagcgatagatcaggaggcatcattgaggccaggagctctgcccgtgacctgtatcccacgtactctatcttccattcctcgccctgcccccagaggccaggagctctgcccttgacctgtattccacttactccaccttccattcctcgccctgtccccacagccgagtcctgcatcagccctttatcctcacacgcttttctacaatggcattcaataaagtgtatatgtttctggt

SEQ ID NO: 328778 - DNA, 1103 bp, Homo sapiens
  misc_feature (669)..(669): n is a, c, g, or t
tctactgtgttcaatctctattgtttcaccctatgcaatcctgaccataaccctgaatgggcattaccagccttttctccggagaggaaacaggagctcagaggagttcaaagacatgctcagggtcacatagttcagcgtctggtcagacgctgaactataaggaggagcaggaagtggctatgctgggggcgccccacaaccctgctcccccgacgtccaccgtgatccacatccgcagcgagacctccgtgcccgaccatgtcgtctggtccctgttcaacaccctcttcatgaacccctgctgcctgggcttcatagcattcgcctactccgtgaagtctagggacaggaagatggttggcgacgtgaccggggcccaggcctatgcctccaccgccaagtgcctgaacatctgggccctgattctgggcatcctcatgaccattctgctcatcatcatcccagtgttggtcgtccaggcccagcgatagatcaggaggcatcattgaggccaggagctctgcccgtgacctgtatcccacgtactctatcttccattcctcgccctgcccccaggccgagtcctgcatcagccctttatcctcacacgcttttctacaatggcattcaataaagtgtatatgtttctggtaaaaaaaaaaaaanaaaaacattttaaaaaaaaaaaaaaaaaaaaagggggggggggcccaaaaattcccccggaggggcgcccaagctaccggctgaccccggtttcctgggcacactgtggcgccccaaagagggaggcgagataaaaagccaacagacttgggcgggcgtttaacacacgtgccgagactgccggaacatctgcggacctcgcgacccctggggacgagcacccctaactctccgggggggcggggggaccccattgttgcgggccacaatattcccttcgaagagactttaacgccgccctgggggcaacactctacacatctttccccacgtgcatcttcccgtgcttaacacccagccgcgcatatctctcccgcgtctgaaaaaatttgccgcatcaccgggtatgtgcttatgacacatttttttacggc

SEQ ID NO: 328779 - DNA, 445 bp, Homo sapiens
gtgaactagaggatccccccaccttatgcgtgggcttcatagcattcgcctactccgtgaagtctagggacaggaagatggttggcgacgtgaccggggcccaggcctatgcctccaccgccaagtgcctgaacatctgggccctgattctgggcatcctcatgaccattctgctcatcatcatcccagtgttggtcgtccaggcccagcgatagatcaggaggcatcattgaggccaggagctctgcccgtgacctgtatcccacgtactctatcttccattcctcgccctgcccccagaggccaggagctctgcccttgacctgtattccacttactccaccttccattcctcgccctgtccccacagccgagtcctgcatcagccctttatcctcacacgcttttctacaatggcattcaataaagtgtatatgtttctggt

SEQ ID NO: 328780 - DNA, 571 bp, Homo sapiens
  misc_feature (28)..(28): n is a, c, g, or t
agtattcggtcgagcgctagataaaaanacgcctgggtcggccacgacgatgacgtcgtgaatcacactccacgatggagtactgtacggtcacttactggttctatctgcatggagtccaagcgagctcgtattatcaaacttacctgcctccgctgcgattcatagcattcgcctactccgtgaagtctagggacaggaagatggttggcgacgtgaccggggcccaggcctatgcctccaccgccaagtgcctgaacatctgggccctgattctgggcatcctcatgaccattctgctcatcatcatcccagtgttggtcgtccaggcccagcgatagatcaggaggcatcattgaggccaggagctctgcccgtgacctgtatcccacgtactctatcttccattcctcgccctgcccccagaggccaggagctctgcccttgacctgtattccacttactccaccttccattcctcgccctgtccccacagccgagtcctgcatcagccctttatcctcacacgcttttctacaatggcattcaataaagtgtatatgtttctggt

SEQ ID NO: 328781 - DNA, 486 bp, Homo sapiens
  misc_feature (5)..(5): n is a, c, g, or t
  misc_feature (7)..(7): n is a, c, g, or t
  misc_feature (42)..(42): n is a, c, g, or t
  misc_feature (47)..(47): n is a, c, g, or t
  misc_feature (54)..(56): n is a, c, g, or t
  misc_feature (63)..(63): n is a, c, g, or t
  misc_feature (68)..(68): n is a, c, g, or t
  misc_feature (70)..(72): n is a, c, g, or t
  misc_feature (83)..(83): n is a, c, g, or t
  misc_feature (118)..(118): n is a, c, g, or t
tgacntngggggggacagggttgtggggcccccccagcacanccacntcgtgcnnntccgacntctcntnnntggggggctgnccactgttgacaggagagaagaggtttggacagtntgattcatgaacccctgctgcctgggcttcatagcattcgcctactccgtgaagtctagggacaggaagatggttggcgacgtgaccggggcccaggcctatgcctccaccgccaagtgcctgaacatctgggccctgattctgggcatcctcatgaccattctgctcatcatcatcccagtgttggtcgtccaggcccagcgatagatcaggaggcatcattgaggccaggagctctgcccgtgacctgtatcccacgtactctatcttccattcctcgccctgcccccaggccgagtcctgcatcagccctttatcctcacacgcttttctacaatggcattcaataaagtgtatatgtttctggt

SEQ ID NO: 328782 - DNA, 193 bp, Homo sapiens
gcagagagcactaatcttgggacacttaactcttaagttggatctaccaatgcctgacaggctctggcgacccctggcaccctcactatctgactttcaacagttttgcactgatctcacttagaactcaaatttgcctaggtcaggacaaggactctgaacccatagatgtcctatgctctagttttctccc

SEQ ID NO: 328783 - DNA, 404 bp, Homo sapiens
agaggttgggagcacctgggtggtgaagggagtatgtggaggaagggcctggaggtatttaccccccgccagataaacacctgttggcagaattagccttgatctgacagccccaggaagcttagaaatctgaagatcctgaccatgaaagccatccaaagatggcaaggaccgcctgagaagtagtgagctccctgtcactggggggtatgtaaggacatggttagtgactgcttggcggagatgctggagagaggattcaagccaggaaagaaggtggggtcctgagattctgtgactgggtagagggaagatgcggccagtggggattcattagttcctcctctgagatttctggactcctccttccctggctctctccctgctctacatacggaatttgc

SEQ ID NO: 328784 - DNA, 197 bp, Homo sapiens
ggtcaggcactgaatgcctggtcaggcactgaagcctggtcaggcactgaagcctggtcaggcactgaagcctggtcaggcactaagcctgggcaacatgatgaaactgtgtctccacaaacacttaaaaaaaaataaataaggcagtcatggtgacacatgcatattgtcccagctacttgctggctgaggtggga

SEQ ID NO: 328785 - DNA, 871 bp, Homo sapiens
gatgattcccatggacttctacggatatattaatgctgttttggaggaccctctgtgtgccgcaggctccatgacacctaatgttggtggatgcgttctggtgtgtatgtgtttccatgaaatttacaaactaacacacagcattctaacatgttcacttaggaactttcaaaactttgccctacaagacaacattctcaatagagaaaatttagaaaaatagcagcacaaaagaggaggcaaaagtcacttatattattaatataatactactctagagctaaccacaattgaattttattttgcctcagtatttttttcccatgcacattcctaggcatgctatcttaaagcaacagtttgtgtagttaatctgttgctctccccacagttatattttaactagggtactgaatacagaacgttttgcacatgcatttttgctggagaaaccacagatatgtagccatttatagtgtttcttagctatcgcatgcatcatttcctctcctacttcctcctgtcactggcagtcctgcagctggcctgccttgccactcctgacatctgagtcatcactgacatctctctccccaggcctgctcaaggagctcttactaagctttgttatttttttctctccaagatttttcagatctgtactttatttttcaacgccccaactcaatcctaatctgcacttcaatcatctcgcgctgtcagtgtcagtttcttggctttgagctccttctcttttcaattcacattttcaaaagccattttctcccaagtgttttctcacctttcctttcttagcagaactcccccccgccgtggttacacctccacgttactttccaggtatgcccac

SEQ ID NO: 328786 - DNA, 583 bp, Homo sapiens
ctgggaaagacctgcctttattttcctatcatcttttccccattactttgcattattcaggaaataattatttattcccaaatgcagttttctaagcagtgaccacaaaaatttcttattctaaggaaaataattaagaaaataaccctatctgtggcattgttttaaaatgtgggatacaaatctggtaagcagatttcaggtcattattgttttcttttaatggtttacatgaaattttcctctcaaaaaacaagtacctcttactgtataacatttgagtttttaaaattgagatagcaggccgggcgcggtggctcacgcctgtaatcccagcactttgggaggccgaggcgggcggatcacgaggtcaggagatcgagaccatcccggctaaaacggtgaaaccccgtctctactaaaaatacaaaaaattagccgggcgtagtggcgggcgcctgtagtcccagctacttgggaggctgaggcaggagaatggcgtgaacccgggaggcagagcttgcagtgagccgagatcccgccactgcactccagcctgggcgacagagcgagactccgtctc

SEQ ID NO: 328787 - DNA, 2157 bp, Homo sapiens
ctgggaaagacctgcctttattttcctatcatcttttccccattactttgcattattcaggaaataattatttattcccaaatgcagttttctaagcagtgaccacaaaaatttcttattctaaggaaaataattaagaaaataaccctatctgtggcattgttttaaaatgtgggatacaaatctggtaagcagatttcaggtcattattgttttcttttaatggtttacatgaaattttcctctcaaaaaacaagtacctcttactgtataacatttgagtttttaaaattgagatagcttctgagagaaaaaaagaaagttgaatttgtagctctctcaactacaaaatcaccacacttttctcaaatctaataggaattcagtgtcattacagatacggtctctagtgaccaggtgaagacaattgaagctttggtagaacttctgcaaaagttaggtaaagaagaataaatccaatttatcagctttgttcatattctttttctgagtgatctaaatttttcttgcttgtgatcattagctaagacaaggagtgttaaaggttttctaaatgcaaacacatacgtttctgcatttcagaagtcagtcttgatagtaaatcctacaaactctcaactttctgcattgtattttaagtctatacaatgttagagcacatggtaatgtggggacagagttgattatatgatagcatgagaaatttgcactggttggtgttacaaaccaatgatctaaccagcatactctccaaatatgaaaaagtaaaaacatctcattaggtttggaagagcctaaggtagtccatacaggaagtttgcctgagaacagagaggagcctgttgattggcatggctcatgatgcctttcttgtatgaattatcaaaactgatactgagttgcccctagaaaacagccttccagaatatgtttgcttatttatggtggaagaggaagtgagaacaagatgagagtttcccttaaagtgaggagaatcattatacaactttgcaactgaagtatgtttccttgtagcaaacctttggtttattttatcgtcaaatcaaagccaccctcagttttttgtatggtgccatcaacctaaggaggacaatcaaataacctattgtttgccttggattcagtatatctactaagtacacagtctcgtataccttcaaaccagttacttgactaaacttccaccatattaccttagttcttcctatgccctttcctctgtgccaccacaaatcagagggaaagactgcagtacttctagaaagttgtggacttctaagaaagagccaggcttccatctcactatcccttgatcattatctctgaagtccctacctgcacttccctgattgccctgtagcaacaccagcatggtgggaattggagggaaagattgtggaaaatccctaaagggtcattgttcatgacgttattttgaattgtaaaattgtgagccactcacatttcaattacaaaaagaacagaactcttaatcacgttgtgaagattaatttcttgccattttctggattagcacagaagcttgtatcaatgaagagtatttaggaggggaatagggggaaaattgtatttttctgttcaaactctctccttctatttgtgtttccttcacccctctccctccaccacactgtgttggtcaaatgatactattctatgaaaccctgagctatagttgtcaaaagtaactatggattgtgattagtcctctgtgggtgcttccttccctcttttttctccctcactctctttctcagtctccactctggtaaatggaaaaggtgatgtcgaagaattgatgcttgcttggactcatgttgtatctgtgactatgctattagctgtctcctttttccttcctatatgggtagaattcttatgacttatgaagttcccttcttgataagtaggttaaatgcacaatgtggtactgttttatagtttctagatggttgtataaagcaaaaagttaatgtggttatgtgtttttaaagaaaataagtgattggtcactaaactctgtccttttttcattattacaatttctctctgttttccaacagtttgctgactcctttgtcactggtgaatggt

SEQ ID NO: 328788 - DNA, 4165 bp, Homo sapiens
cgcctaccggggcggagcgggggtggctggagcagtctggacagtcatggcggcgactgtggcgacggcggcagctgtggccccggcgccagcgcccggcacggacagcgcctcttcggtgcactggttccgcaaagggctgcgactccacgacaacccggcgttgctggcggccgtgcgcggggcgcgctgcgtgcgctgcgtttacattctcgacccgtggttcgcggcctcctcctcagtcgggatcaaccgatggaggttcctacttcagtctctggaagatttggacacaagtttaaggaaactgaactcccgcctgtttgtagtccggggacagccagccgacgtgttcccaaggctgttcaaggaatggggagtgacccgcttgacctttgaatatgactctgaaccctttgggaaagaacgggatgcagccatcatgaagatggccaaggaggctggtgtggaagtagtgacggagaattctcataccctctatgacctggacaggatcattgagctgaatgggcagaagccaccccttacatacaagcgctttcaggccatcatcagccgcatggagctgcccaagaagccagtgggcttggtgaccagccagcagatggagagctgcagggccgagatccaggagaaccacgacgagacctacggcgtgccctccctggaggagctggggttccccactgaaggacttggtccagctgtctggcagggaggagagacagaagctctggcccgcctggataagcacttggaacggaaggcctgggttgccaactatgagagaccccgaatgaacgccaactccctcctggccagccccacaggcctcagcccctacctgcgctttggttgtctctcctgccgcctcttctactaccgcctgtgggacctgtataaaaaggtgaagcggaacagcacacctcccctctccctatttgggcaactcctatggcgagagttcttctacacggcagctaccaacaaccccaggtttgaccgcatggaggggaaccccatctgcatccagatcccctgggaccgcaatcctgaggccctggccaagtgggctgagggcaagacaggcttcccttggattgatgccatcatgacccaactgaggcaggagggctggatccaccacctggcccggcatgccgtggcctgcttcctgacccgcggggacctctgggtcagctgggagagcggggtccgggtatttgatgagctgctcctggatgcagatttcagcgtgaacgcaggcagctggatgtggctgtcctgcagtgctttcttccagcagttcttccactgctactgccctgtgggctttggccgtcgcacggaccccagtggggactacatcaggcgatacctgcccaaattgaaagcgttcccctctcgatacatctatgagccctggaatgccccagagtcaattcagaaggcagccaagtgcatcattggtgtggactacccacggcccatcgtcaaccatgccgagaccagccggcttaacattgaacgaatgaagcagatttaccagcagctttcgcgctaccggggactctgtctactggcatctgtcccttcctgtgtggaagacctcagtcaccctgtggcagagcccagctcgagccaggctggcagcatgagcagtgcaggcccaagaccactacccagtggcccagcatcccccaaacgcaagctggaagcagccgaggaaccacctggtgaagaactcagcaaacgggcccgggtggcagagttgccaaccccagagctgccgagcaaggatgcctgagactgcagagcccttgctccgtgagcaaagcctgggtgcccaagcagccaccgcagcagcagagtacaacctgcagagaagctgatcaccgggcagagatagagcgagcatgtgtgtgtgtgtgcgcgtgtgcagaggagggagtggtgtgcctgtttgtgtgtgcatgcatctgttgacactcatgattctgaatgttgcctgggctgggggagtacctgtagcacgccagtgctgtttcccggcctccagacacaaggctcgaggttatggcagtgactttcagctgagacctgttcctgcaagccagctgccttgtctgaacagaacgtagtggtaggaccctagctgggattctggcatctgcctccctagacctccttccctccctcctcacgtcaggctgtggagcaggagcacagcagttctggctgttgtccaaagcatgggattctggaggcagccagagccctgctgagttcctgctttctgacctggaggctgagcaggccggagtggatggatgctgtccagacgtagccacctggcctctgtttcttattttaaaattctctgctactgggctcagtcccaggcccttccttgggcttctgggactgagcatgaggccatagacagatctaaaaagtttccaccaccctacagaagtacacacagatacctgactggtgtggggtatgcctggtactgtaataggagcctaagacagcacacctaccttttcaggatttagaacctaaaattagaaagagaatcccagctgtcattgttccttccccagaagctaagagccagcctcagagcctacccaggagctgtgaaggggcaagggtcaaactgactcactctaccaggaggagaccaggttgcagtggcgtaaggccccctggtttctctggccacactccaaggcaccacagtgctgccagtgaggacagctgacacccagccagggaaaccattctagtctttattctgttggcttccagggcctgtcctggacttgtcagcatccagactgccatgtcagctatcccagtagctgagctccaaggactcaggcagagggactcagggatggggactgccaggggcagttggcaaaagtccaagtagagattacacccagcacaccattccttccaggagcagtaggtgggaggtttgacccagagaagccaatccttgcattccaggagtggcctgtgcctcccacctcttccttcccactgccaaaggcctgtgttgagaaagatgtcatgcaaaaggacgacggtggccaactaaagcaagtcttccttccaccctgtggcctgcacttgagccacaaagtgtgtgtgtgtgtgtgcgtgtgtggtacgtgtgtgtgtgtgtggctatgaggctgattcctgtttggatttttgtcctcacgtgtatcattaagctggcctttgggccttttcctttctacctcccctgtgacctttcctagcctcagatctgttaattcttttggccccagccctgtccctcactgtcctctgtccttggaccagaaccctggggtcagacccatctcctgtagctgtccatcacactgacaggcttcttcctgagatatcctcaggttttctcagccagagagctgcctttagagtccaactgttgtacgtatgtcaccttcactagaaatgtcccatcatcgtgggaggggagcagggcacaggggatggtgtgcattcagagcattgggttgggggcttccctgttccctcagccccagtcgagaggaaagagaatcgggccactgccagaaagagagtcaagcaaacctggaagggcaaatctgagagtgggaaggccaaaggccgaggcccagatttagtattcactagcagcgccttcgggtagcaggatgattccttttcctgcctgtctgctgctggctctcttccctaaggtacaggttggcaggaccacctccgcctacttctccaccatccctagcatgccagcccgttcccagatcaacctgccagtggagtcaggcagtgcactcctggagccaagagggaagggcagggtagagagggtatgtccagtagcctggagctccatggtggcttcatgcctcccttctcccagctcaggtggccctgagggctccctcggaacagtgcctcaaatcctgacccaagggccagcatggggaagagatggttgcaggcaaaatgcactttatagagattttctattgctgggaaggtgtgtttctcccacaatttgtttgtgaatattcacttgttttataaatgtctgacctgtcttgagtaa

SEQ ID NO: 328789 - DNA, 649 bp, Homo sapiens
gcatggggctgagggtggcgctttctacctattaaaatgagtcacactcaagagaaagaaagctgagacctgctgtataattagagagttcattcagtgctttcagaattctttcatatctcattttaatccacagaagattggaaattttgttcttatttaatagatacgtagctgagggaagtaacaacgtgttcacagtcaccccacaaattaaagagcaagtcagagaatgacatagactcgttgtttggtctgatggtggttccgtctcaaaatcggctggacaagcacagtgttccatggctccatggctggctgttctgtgaccgtaggcagattccttaaccacccaatgcctccattttttcctctgttacatccaagcctttccttttgccaccttctctttctgctgtaggcctgggttgccaactatgagagaccccgaatgaacgccaactccctcctggccagccccacaggcctcagcccctacctgcgctttggttgtctctcctgccgcctcttctactaccgcctgtgggacctgtataaaaaggtaagggggacatacctgcccacattgcacctaaggcctgcagccaggccttttgggcttgtcagtcaccctaaaaaaggcactggt

SEQ ID NO: 328790 - DNA, 4111 bp, Homo sapiens
cgcctaccggggcggagcgggggtggctggagcagtctggacagtcatggcggcgactgtggcgacggcggcagctgtggccccggcgccagcgcccggcacggacagcgcctcttcggtgcactggttccgcaaagggctgcgactccacgacaacccggcgttgctggcggccgtgcgcggggcgcgctgcgtgcgctgcgtttacattctcgacccgtggttcgcggcctcctcctcagtcgggatcaaccgatggaggttcctacttcagtctctggaagatttggacacaagtttaaggaaactgaactcccgcctgtttgtagtccggggacagccagccgacgtgttcccaaggctgttcaaggaatggggagtgacccgcttgacctttgaatatgactctgaaccctttgggaaagaacgggatgcagccatcatgaagatggccaaggaggctggtgtggaagtagtgacggagaattctcataccctctatgacctggacaggatcattgagctgaatgggcagaagccaccccttacatacaagcgctttcaggccatcatcagccgcatggagctgcccaagaagccagtgggcttggtgaccagccagcagatggagagctgcagggccgagatccaggagaaccacgacgagacctacggcgtgccctccctggaggagctggggttccccactgaaggacttggtccagctgtctggcagggaggagagacagaagctctggcccgcctggataagcacttggaacggaaggcctgggttgccaactatgagagaccccgaatgaacgccaactccctcctggccagccccacaggcctcagcccctacctgcgctttggttgtctctcctgccgcctcttctactaccgcctgtgggacctgtataaaaaggtgaagcggaacagcacacctcccctctccctatttgggcaactcctatggcgagagttcttctacacggcagctaccaacaaccccaggtttgaccgcatggaggggaaccccatctgcatccagatcccctgggaccgcaatcctgaggccctggccaagtgggctgagggcaagacaggcttcccttggattgatgccatcatgacccaactgaggcaggagggctggatccaccacctggcccggcatgccgtggcctgcttcctgacccgcggggacctctgggtcagctgggagagcggggtccgggtatttgatgagctgctcctggatgcagatttcagcgtgaacgcaggcagctggatgtggctgtcctgcagtgctttcttccagcagttcttccactgctactgccctgtgggctttggccgtcgcacggaccccagtggggactacatcaggcgatacctgcccaaattgaaagcgttcccctctcgatacatctatgagccctggaatgccccagagtcaattcagaaggcagccaagtgcatcattggtgtggactacccacggcccatcgtcaaccatgccgagaccagccggcttaacattgaacgaatgaagcagatttaccagcagctttcgcgctaccggggactctgtctactggcatctgtcccttcctgtgtggaagacctcagtcaccctgtggcagagcccagctcgagccaggctggcagcatgagcagtgcaggcccaagaccactacccagtggcccagcatcccccaaacgcaagctggaagcagccgaggaaccacctggtgaagaactcagcaaacgggcccgggtggcagagttgccaaccccagagctgccgagcaaggatgcctgagactgcagagcccttgctccgtgagcaaagcctgggtgcccaagcagccaccgcagcagcagagtacaacctgcagagaagctgatcaccgggcagagatagagcgagcatgtgtgtgtgtgtgcgcgtgtgcagaggagggagtggtgtgcctgtttgtgtgtgcatgcatctgttgacactcatgattctgaatgttgcctgggctgggggagtacctgtagcacgccagtgctgtttcccggcctccagacacaaggctcgaggttatggcagtgactttcagctgagacctgttcctgcaagccagctgccttgtctgaacagaacgtagtggtaggaccctagctgggattctggcatctgcctccctagacctccttccctccctcctcacgtcaggctgtggagcaggagcacagcagttctggctgttgtccaaagcatgggattctggaggcagccagagccctgctgagttcctgctttctgacctggaggctgagcaggccggagtggatggatgctgtccagacgtagccacctggcctctgtttcttattttaaaattctctgctactgggctcagtcccaggcccttccttgggcttctgggactgagcatgaggccatagacagatctaaaaagtttccaccaccctacagaagtacacacagatacctgactggtgtggggtatgcctggtactgtaataggagcctaagacagcacacctaccttttcaggatttagaacctaaaattagaaagagaatcccagctgtcattgttccttccccagaagctaagagccagcctcagagcctacccaggagctgtgaaggggcaagggtcaaactgactcactctaccaggaggagaccaggttgcagtggcgtaaggccccctggtttctctggccacactccaaggcaccacagtgctgccagtgaggacagctgacacccagccagggaaaccattctagtctttattctgttggcttccagggcctgtcctggacttgtcagcatccagactgccatgtcagctatcccagtagctgagctccaaggactcaggcagagggactcagggatggggactgccaggggcagttggcaaaagtccaagtagagattacacccagcacaccattccttccaggagcagtaggtgggaggtttgacccagagaagccaatccttgcattccaggagtggcctgtgcctcccacctcttccttcccactgccaaaggcctgtgttgagaaagatgtcatgcacttgagccacaaagtgtgtgtgtgtgtgtgcgtgtgtggtacgtgtgtgtgtgtgtggctatgaggctgattcctgtttggatttttgtcctcacgtgtatcattaagctggcctttgggccttttcctttctacctcccctgtgacctttcctagcctcagatctgttaattcttttggccccagccctgtccctcactgtcctctgtccttggaccagaaccctggggtcagacccatctcctgtagctgtccatcacactgacaggcttcttcctgagatatcctcaggttttctcagccagagagctgcctttagagtccaactgttgtacgtatgtcaccttcactagaaatgtcccatcatcgtgggaggggagcagggcacaggggatggtgtgcattcagagcattgggttgggggcttccctgttccctcagccccagtcgagaggaaagagaatcgggccactgccagaaagagagtcaagcaaacctggaagggcaaatctgagagtgggaaggccaaaggccgaggcccagatttagtattcactagcagcgccttcgggtagcaggatgattccttttcctgcctgtctgctgctggctctcttccctaaggtacaggttggcaggaccacctccgcctacttctccaccatccctagcatgccagcccgttcccagatcaacctgccagtggagtcaggcagtgcactcctggagccaagagggaagggcagggtagagagggtatgtccagtagcctggagctccatggtggcttcatgcctcccttctcccagctcaggtggccctgagggctccctcggaacagtgcctcaaatcctgacccaagggccagcatggggaagagatggttgcaggcaaaatgcactttatagagattttctattgctgggaaggtgtgtttctcccacaatttgtttgtgaatattcacttgttttataaatgtctgacctgtcttgagtaa

SEQ ID NO: 328791 - DNA, 1800 bp, Homo sapiens
  misc_feature (24)..(24): n is a, c, g, or t
aaataagaaacagaggccaggtgnctacgtctggacagcatccatccactccggcctgctcagcctccaggtccttcctcatgctcagtcccagaagcccaaggctaaaaagtttccaccaccctacagaagtacacacagatacctgactggtgtggggtatgcctggtactgtaataggagcctaagacagcacacctaccttttcaggatttagaacctaaaattagaaagagaatcccagctgtcattgttccttccccagaagctaagagccagcctcagagcctacccaggagctgtgaaggggcaagggtcaaactgactcactctaccaggaggagaccaggttgcagtggcgtaaggccccctggtttctctggccacactccaaggcaccacagtgctgccagtgaggacagctgacacccagccagggaaaccattctagtctttattctgttggcttccagggcctgtcctggacttgtcagcatccagactgccatgtcagctatcccagtagctgagctccaaggactcaggcagagggactcagggatggggactgccaggggcagttggcaaaagtccaagtagagattacacccagcacaccattccttccaggagcagtaggtgggaggtttgacccagagaagccaatccttgcattccaggagtggcctgtgcctcccacctcttccttcccactgccaaaggcctgtgttgagaaagatgtcatgcaaaaggacgacggtggccaactaaagcaagtcttccttccaccctgtggcctgcacttgagccacaaagtgtgtgtgtgtgtgtgcgtgtgtggtacgtgtgtgtgtgtgtggctatgaggctgattcctgtttggatttttgtcctcacgtgtatcattaagctggcctttgggccttttcctttctacctcccctgtgacctttcctagcctcagatctgttaattcttttggccccagccctgtccctcactgtcctctgtccttggaccagaaccctggggtcagacccatctcctgtagctgtccatcacactgacaggcttcttcctgagatatcctcaggttttctcagccagagagctgcctttagagtccaactgttgtacgtatgtcaccttcactagaaatgtcccatcatcgtgggaggggagcagggcacaggggatggtgtgcattcagagcattgggttgggggcttccctgttccctcagccccagtcgagaggaaagagaatcgggccactgccagaaagagagtcaagcaaacctggaagggcaaatctgagagtgggaaggccaaaggccgaggcccagatttagtattcactagcagcgccttcgggtagcaggatgattccttttcctgcctgtctgctgctggctctcttccctaaggtacaggttggcaggaccacctccgcctacttctccaccatccctagcatgccagcccgttcccagatcaacctgccagtggagtcaggcagtgcactcctggagccaagagggaagggcagggtagagagggtatgtccagtagcctggagctccatggtggcttcatgcctcccttctcccagctcaggtggccctgagggctccctcggaacagtgcctcaaatcctgacccaagggccagcatggggaagagatggttgcaggcaaaatgcactttatagagattttctattgctgggaaggtgtgtttctcccacaatttgtttgtgaatattcacttgttttataaatgtctgacctgtcttgagtaa

SEQ ID NO: 328792 - DNA, 3635 bp, Homo sapiens
agaaccaagttgacctagaaaacgctaaaactttaaggattatctaacccccagtagcaccgagacactgtggttcaattctcataaagttcaaataacagaacagccgtgccgggctatcactgaaatggtcaaacctcctgtcttgtgacctttccttctcttcagggttccccactgaaggacttggtccagctgtctggcagggaggagagacagaagctctggcccgcctggataagcacttggaacggaaggcctgggttgccaactatgagagaccccgaatgaacgccaactccctcctggccagccccacaggcctcagcccctacctgcgctttggttgtctctcctgccgcctcttctactaccgcctgtgggacctgtataaaaaggtgaagcggaacagcacacctcccctctccctatttgggcaactcctatggcgagagttcttctacacggcagctaccaacaaccccaggtttgaccgcatggaggggaaccccatctgcatccagatcccctgggaccgcaatcctgaggccctggccaagtgggctgagggcaagacaggcttcccttggattgatgccatcatgacccaactgaggcaggagggctggatccaccacctggcccggcatgccgtggcctgcttcctgacccgcggggacctctgggtcagctgggagagcggggtccgggtatttgatgagctgctcctggatgcagatttcagcgtgaacgcaggcagctggatgtggctgtcctgcagtgctttcttccagcagttcttccactgctactgccctgtgggctttggccgtcgcacggaccccagtggggactacatcaggcgatacctgcccaaattgaaagcgttcccctctcgatacatctatgagccctggaatgccccagagtcaattcagaaggcagccaagtgcatcattggtgtggactacccacggcccatcgtcaaccatgccgagaccagccggcttaacattgaacgaatgaagcagatttaccagcagctttcgcgctaccggggactctgtctactggcatctgtcccttcctgtgtggaagacctcagtcaccctgtggcagagcccagctcgagccaggctggcagcatgagcagtgcaggcccaagaccactacccagtggcccagcatcccccaaacgcaagctggaagcagccgaggaaccacctggtgaagaactcagcaaacgggcccgggtggcagagttgccaaccccagagctgccgagcaaggatgcctgagactgcagagcccttgctccgtgagcaaagcctgggtgcccaagcagccaccgcagcagcagagtacaacctgcagagaagctgatcaccgggcagagatagagcgagcatgtgtgtgtgtgtgcgcgtgtgcagaggagggagtggtgtgcctgtttgtgtgtgcatgcatctgttgacactcatgattctgaatgttgcctgggctgggggagtacctgtagcacgccagtgctgtttcccggcctccagacacaaggctcgaggttatggcagtgactttcagctgagacctgttcctgcaagccagctgccttgtctgaacagaacgtagtggtaggaccctagctgggattctggcatctgcctccctagacctccttccctccctcctcacgtcaggctgtggagcaggagcacagcagttctggctgttgtccaaagcatgggattctggaggcagccagagccctgctgagttcctgctttctgacctggaggctgagcaggccggagtggatggatgctgtccagacgtagccacctggcctctgtttcttattttaaaattctctgctactgggctcagtcccaggcccttccttgggcttctgggactgagcatgaggccatagacagatctaaaaagtttccaccaccctacagaagtacacacagatacctgactggtgtggggtatgcctggtactgtaataggagcctaagacagcacacctaccttttcaggatttagaacctaaaattagaaagagaatcccagctgtcattgttccttccccagaagctaagagccagcctcagagcctacccaggagctgtgaaggggcaagggtcaaactgactcactctaccaggaggagaccaggttgcagtggcgtaaggccccctggtttctctggccacactccaaggcaccacagtgctgccagtgaggacagctgacacccagccagggaaaccattctagtctttattctgttggcttccagggcctgtcctggacttgtcagcatccagactgccatgtcagctatcccagtagctgagctccaaggactcaggcagagggactcagggatggggactgccaggggcagttggcaaaagtccaagtagagattacacccagcacaccattccttccaggagcagtaggtgggaggtttgacccagagaagccaatccttgcattccaggagtggcctgtgcctcccacctcttccttcccactgccaaaggcctgtgttgagaaagatgtcatgcaaaaggacgacggtggccaactaaagcaagtcttccttccaccctgtggcctgcacttgagccacaaagtgtgtgtgtgtgtgtgcgtgtgtggtacgtgtgtgtgtgtgtggctatgaggctgattcctgtttggatttttgtcctcacgtgtatcattaagctggcctttgggccttttcctttctacctcccctgtgacctttcctagcctcagatctgttaattcttttggccccagccctgtccctcactgtcctctgtccttggaccagaaccctggggtcagacccatctcctgtagctgtccatcacactgacaggcttcttcctgagatatcctcaggttttctcagccagagagctgcctttagagtccaactgttgtacgtatgtcaccttcactagaaatgtcccatcatcgtgggaggggagcagggcacaggggatggtgtgcattcagagcattgggttgggggcttccctgttccctcagccccagtcgagaggaaagagaatcgggccactgccagaaagagagtcaagcaaacctggaagggcaaatctgagagtgggaaggccaaaggccgaggcccagatttagtattcactagcagcgccttcgggtagcaggatgattccttttcctgcctgtctgctgctggctctcttccctaaggtacaggttggcaggaccacctccgcctacttctccaccatccctagcatgccagcccgttcccagatcaacctgccagtggagtcaggcagtgcactcctggagccaagagggaagggcagggtagagagggtatgtccagtagcctggagctccatggtggcttcatgcctcccttctcccagctcaggtggccctgagggctccctcggaacagtgcctcaaatcctgacccaagggccagcatggggaagagatggttgcaggcaaaatgcactttatagagattttctattgctgggaaggtgtgtttctcccacaatttgtttgtgaatattcacttgttttataaatgtctgacctgtcttgagtaa

SEQ ID NO: 328793 - DNA, 4083 bp, Homo sapiens
cgcctaccggggcggagcgggggtggctggagcagtctggacagtcatggcggcgactgtggcgacggcggcagctgtggccccggcgccagcgcccggcacggacagcgcctcttcggtgcactggttccgcaaagggctgcgactccacgacaacccggcgttgctggcggccgtgcgcggggcgcgctgcgtgcgctgcgtttacattctcgacccgtggttcgcggcctcctcctcagtcgggatcaaccgatggaggttcctacttcagtctctggaagatttggacacaagtttaaggaaactgaactcccgcctgtttgtagtccggggacagccagccgacgtgttcccaaggctgttcaaggaatggggagtgacccgcttgacctttgaatatgactctgaaccctttgggaaagaacgggatgcagccatcatgaagatggccaaggaggctggtgtggaagtagtgacggagaattctcataccctctatgacctggacaggatcattgagctgaatgggcagaagccaccccttacatacaagcgctttcaggccatcatcagccgcatggagctgcccaagaagccagtgggcttggtgaccagccagcagatggagagctgcagggccgagatccaggagaaccacgacgagacctacggcgtgccctccctggaggagctggggttccccactgaaggacttggtccagctgtctggcagggaggagagacagaagctctggcccgcctggataagcacttggaacggaaggcctgggttgccaactatgagagaccccgaatgaacgccaactccctcctggccagccccacaggcctcagcccctacctgcgctttggttgtctctcctgccgcctcttctactaccgcctgtgggacctgtataaaaaggtgaagcggaacagcacacctcccctctccctatttgggcaactcctatggcgagagttcttctacacggcagctaccaacaaccccaggtttgaccgcatggaggggaaccccatctgcatccagatcccctgggaccgcaatcctgaggccctggccaagtgggctgagggcaagacaggcttcccttggattgatgccatcatgacccaactgaggcaggagggctggatccaccacctggcccggcatgccgtggcctgcttcctgacccgcggggacctctgggtcagctgggagagcggggtccgggtatttgatgagctgctcctggatgcagatttcagcgtgaacgcaggcagctggatgtggctgtcctgcagtgctttcttccagcagttcttccactgctactgccctgtgggctttggccgtcgcacggaccccagtggggactacatcaggcgatacctgcccaaattgaaagcgttcccctctcgatacatctatgagccctggaatgccccagagtcaattcagaaggcagccaagtgcatcattggtgtggactacccacggcccatcgtcaaccatgccgagaccagccggcttaacattgaacgaatgaagcagatttaccagcagctttcgcgctaccggggactctgtctactggcatctgtcccttcctgtgtggaagacctcagtcaccctgtggcagagcccagctcgagccaggctggcagcatgagcagtgcaggcccaagaccactacccagtggcccagcatcccccaaacgcaagctggaagcagccgaggaaccacctggtgaagaactcagcaaacgggcccgggtggcagagttgccaaccccagagctgccgagcaaggatgcctgagactgcagagcccttgctccgtgagcaaagcctgggtgcccaagcagccaccgcagcagcagagtacaacctgcagagaagctgatcaccgggcagagatagagcgagcatgtgtgtgtgtgtgcgcgtgtgcagaggagggagtggtgtgcctgtttgtgtgtgcatgcatctgttgacactcatgattctgaatgttgcctgggctgggggagtacctgtagcacgccagtgctgtttcccggcctccagacacaaggctcgaggttatggcagtgactttcagctgagacctgttcctgcaagccagctgccttgtctgaacagaacgtagtggtaggaccctagctgggattctggcatctgcctccctagacctccttccctccctcctcacgtcaggctgtggagcaggagcacagcagttctggctgttgtccaaagcatgggattctggaggcagccagagccctgctgagttcctgctttctgacctggaggctgagcaggccggagtggatggatgctgtccagacgtagccacctggcctctgtttcttattttaaaattctctgctactgggctcagtcccaggcccttccttgggcttctgggactgagcatgaggccatagacagatctaaaaagtttccaccaccctacagaagtacacacagatacctgactggtgtggggtatgcctggtactgtaataggagcctaagacagcacacctaccttttcaggatttagaacctaaaattagaaagagaatcccagctgtcattgttccttccccagaagctaagagccagcctcagagcctacccaggagctgtgaaggggcaagggtcaaactgactcactctaccaggaggagaccaggttgcagtggcgtaaggccccctggtttctctggccacactccaaggcaccacagtgctgccagtgaggacagctgacacccagccagggaaaccattctagtctttattctgttggcttccagggcctgtcctggacttgtcagcatccagactgccatgtcagctatcccagtagctgagctccaaggactcaggcagagggactcagggatggggactgccaggggcagttggcaaaagtccaagtagagattacacccagcacacctcttccttcccactgccaaaggcctgtgttgagaaagatgtcatgcaaaaggacgacggtggccaactaaagcaagtcttccttccaccctgtggcctgcacttgagccacaaagtgtgtgtgtgtgtgtgcgtgtgtggtacgtgtgtgtgtgtgtggctatgaggctgattcctgtttggatttttgtcctcacgtgtatcattaagctggcctttgggccttttcctttctacctcccctgtgacctttcctagcctcagatctgttaattcttttggccccagccctgtccctcactgtcctctgtccttggaccagaaccctggggtcagacccatctcctgtagctgtccatcacactgacaggcttcttcctgagatatcctcaggttttctcagccagagagctgcctttagagtccaactgttgtacgtatgtcaccttcactagaaatgtcccatcatcgtgggaggggagcagggcacaggggatggtgtgcattcagagcattgggttgggggcttccctgttccctcagccccagtcgagaggaaagagaatcgggccactgccagaaagagagtcaagcaaacctggaagggcaaatctgagagtgggaaggccaaaggccgaggcccagatttagtattcactagcagcgccttcgggtagcaggatgattccttttcctgcctgtctgctgctggctctcttccctaaggtacaggttggcaggaccacctccgcctacttctccaccatccctagcatgccagcccgttcccagatcaacctgccagtggagtcaggcagtgcactcctggagccaagagggaagggcagggtagagagggtatgtccagtagcctggagctccatggtggcttcatgcctcccttctcccagctcaggtggccctgagggctccctcggaacagtgcctcaaatcctgacccaagggccagcatggggaagagatggttgcaggcaaaatgcactttatagagattttctattgctgggaaggtgtgtttctcccacaatttgtttgtgaatattcacttgttttataaatgtctgacctgtcttgagtaa

SEQ ID NO: 328794 - DNA, 3311 bp, Homo sapiens
cgcctaccggggcggagcgggggtggctggagcagtctggacagtcatggcggcgactgtggcgacggcggcagctgtggccccggcgccagcgcccggcacggacagcgcctcttcggtgcactggttccgcaaagggctgcgactccacgacaacccggcgttgctggcggccgtgcgcggggcgcgctgcgtgcgctgcgtttacattctcgacccgtggttcgcggcctcctcctcagtcgggatcaaccgatggaggttcctacttcagtctctggaagatttggacacaagtttaaggaaactgaactcccgcctgtttgtagtccggggacagccagccgacgtgttcccaaggctgttcaaggaatggggagtgacccgcttgacctttgaatatgactctgaaccctttgggaaagaacgggatgcagccatcatgaagatggccaaggaggctggtgtggaagtagtgacggagaattctcataccctctatgacctggacaggatcattgagctgaatgggcagaagccaccccttacatacaagcgctttcaggccatcatcagccgcatggagctgcccaagaagccagtgggcttggtgaccagccagcagatggagagctgcagggccgagatccaggagaaccacgacgagacctacggcgtgccctccctggaggagctggggttccccactgaaggacttggtccagctgtctggcagggaggagagacagaagctctggcccgcctggataagcacttggaacggaaggcctgggttgccaactatgagagaccccgaatgaacgccaactccctcctggccagccccacaggcctcagcccctacctgcgctttggttgtctctcctgccgcctcttctactaccgcctgtgggacctgtataaaaaggtgaagcggaacagcacacctcccctctccctatttgggcaactcctatggcgagagttcttctacacggcagctaccaacaaccccaggtttgaccgcatggaggggaaccccatctgcatccagatcccctgggaccgcaatcctgaggccctggccaagtgggctgagggcaagacaggcttcccttggattgatgccatcatgacccaactgaggcaggagggctggatccaccacctggcccggcatgccgtggcctgcttcctgacccgcggggacctctgggtcagctgggagagcggggtccgggtatttgatgagctgctcctggatgcagatttcagcgtgaacgcaggcagctggatgtggctgtcctgcagtgctttcttccagcagttcttccactgctactgccctgtgggctttggccgtcgcacggaccccagtggggactacatcaggcgatacctgcccaaattgaaagcgttcccctctcgatacatctatgagccctggaatgccccagagtcaattcagaaggcagccaagtgcatcattggtgtggactacccacggcccatcgtcaaccatgccgagaccagccggcttaacattgaacgaatgaagcagatttaccagcagctttcgcgctaccggggactctgtctactggcatctgtcccttcctgtgtggaagacctcagtcaccctgtggcagagcccagctcgagccaggctggcagcatgagcagtgcaggcccaagaccactacccagtggcccagcatcccccaaacgcaagctggaagcagccgaggaaccacctggtgaagaactcagcaaacgggcccgggtggcagagttgccaaccccagagctgccgagcaaggatgcctgagactgcagagcccttgctccgtgagcaaagcctgggtgcccaagcagccaccgcagcagcagagtacaacctgcagagaagctgatcaccgggcagagatagagcgagcatgtgtgtgtgtgtgcgcgtgtgcagaggagggagtggtgtgcctgtttgtgtgtgcatgcatctgttgacactcatgattctgaatgttgcctgggctgggggagtacctgtagcacgccagtgctgtttcccggcctccagacacaaggctcgaggttatggcagtgactttcagctgagacctgttcctgcaagccagctgccttgtctgaacagaacgtagtggtaggaccctagctgggattctggcatctgcctccctagacctccttccctccctcctcacgtcaggctgtggagcaggagcacagcagttctggctgttgtccaaagcatgggattctggaggcagccagagccctgctgagttcctgctttctgacctggaggctgagcaggccggagtggatggatgctgtccagacgtagccacctggcctctgtttcttattttaaaattctctgctactgggctcagtcccaggcccttccttgggcttctgggactgagcatgaggccatagacagatcctcagatctgttaattcttttggccccagccctgtccctcactgtcctctgtccttggaccagaaccctggggtcagacccatctcctgtagctgtccatcacactgacaggcttcttcctgagatatcctcaggttttctcagccagagagctgcctttagagtccaactgttgtacgtatgtcaccttcactagaaatgtcccatcatcgtgggaggggagcagggcacaggggatggtgtgcattcagagcattgggttgggggcttccctgttccctcagccccagtcgagaggaaagagaatcgggccactgccagaaagagagtcaagcaaacctggaagggcaaatctgagagtgggaaggccaaaggccgaggcccagatttagtattcactagcagcgccttcgggtagcaggatgattccttttcctgcctgtctgctgctggctctcttccctaaggtacaggttggcaggaccacctccgcctacttctccaccatccctagcatgccagcccgttcccagatcaacctgccagtggagtcaggcagtgcactcctggagccaagagggaagggcagggtagagagggtatgtccagtagcctggagctccatggtggcttcatgcctcccttctcccagctcaggtggccctgagggctccctcggaacagtgcctcaaatcctgacccaagggccagcatggggaagagatggttgcaggcaaaatgcactttatagagattttctattgctgggaaggtgtgtttctcccacaatttgtttgtgaatattcacttgttttataaatgtctgacctgtcttgagtaa

SEQ ID NO: 328795 - DNA, 3512 bp, Homo sapiens
cgcctaccggggcggagcgggggtggctggagcagtctggacagtcatggcggcgactgtggcgacggcggcagctgtggccccggcgccagcgcccggcacggacagcgcctcttcggtgcactggttccgcaaagggctgcgactccacgacaacccggcgttgctggcggccgtgcgcggggcgcgctgcgtgcgctgcgtttacattctcgacccgtggttcgcggcctcctcctcagtcgggatcaaccgatggaggttcctacttcagtctctggaagatttggacacaagtttaaggaaactgaactcccgcctgtttgtagtccggggacagccagccgacgtgttcccaaggctgttcaaggaatggggagtgacccgcttgacctttgaatatgactctgaaccctttgggaaagaacgggatgcagccatcatgaagatggccaaggaggctggtgtggaagtagtgacggagaattctcataccctctatgacctggacaggatcattgagctgaatgggcagaagccaccccttacatacaagcgctttcaggccatcatcagccgcatggagctgcccaagaagccagtgggcttggtgaccagccagcagatggagagctgcagggccgagatccaggagaaccacgacgagacctacggcgtgccctccctggaggagctggggttccccactgaaggacttggtccagctgtctggcagggaggagagacagaagctctggcccgcctggataagcacttggaacggaaggcctgggttgccaactatgagagaccccgaatgaacgccaactccctcctggccagccccacaggcctcagcccctacctgcgctttggttgtctctcctgccgcctcttctactaccgcctgtgggacctgtataaaaaggtgaagcggaacagcacacctcccctctccctatttgggcaactcctatggcgagagttcttctacacggcagctaccaacaaccccaggtttgaccgcatggaggggaaccccatctgcatccagatcccctgggaccgcaatcctgaggccctggccaagtgggctgagggcaagacaggcttcccttggattgatgccatcatgacccaactgaggcaggagggctggatccaccacctggcccggcatgccgtggcctgcttcctgacccgcggggacctctgggtcagctgggagagcggggtccgggtatttgatgagctgctcctggatgcagatttcagcgtgaacgcaggcagctggatgtggctgtcctgcagtgctttcttccagcagttcttccactgctactgccctgtgggctttggccgtcgcacggaccccagtggggactacatcaggcgatacctgcccaaattgaaagcgttcccctctcgatacatctatgagccctggaatgccccagagtcaattcagaaggcagccaagtgcatcattggtgtggactacccacggcccatcgtcaaccatgccgagaccagccggcttaacattgaacgaatgaagcagatttaccagcagctttcgcgctaccggggactctgtctactggcatctgtcccttcctgtgtggaagacctcagtcaccctgtggcagagcccagctcgagccaggctggcagcatgagcagtgcaggcccaagaccactacccagtggcccagcatcccccaaacgcaagctggaagcagccgaggaaccacctggtgaagaactcagcaaacgggcccgggtggcagagttgccaaccccagagctgccgagcaaggatgcctgagactgcagagcccttgctccgtgagcaaagcctgggtgcccaagcagccaccgcagcagcagagtacaacctgcagagaagctgatcaccgggcagagatagagcgagcatgtgtgtgtgtgtgcgcgtgtgcagaggagggagtggtgtgcctgtttgtgtgtgcatgcatctgttgacactcatgattctgaatgttgcctgggctgggggagtacctgtagcacgccagtgctgtttcccggcctccagacacaaggctcgaggttatggcagtgactttcagctgagacctgttcctgcaagccagctgccttgtctgaacagaacgtagtggtaggaccctagctgggattctggcatctgcctccctagacctccttccctccctcctcacgtcaggctgtggagcaggagcacagcagttctggctgttgtccaaagcatgggattctggaggcagccagagccctgctgagttcctgctttctgacctggaggctgagcaggccggagtggatggatgctgtccagacgtagccacctggcctctgtttcttattttaaaattctctgctactgggctcagtcccaggcccttccttgggcttctgggactgagcatgaggccatagacagatctaaaaagtttccaccaccctacagaagtacacacagatacctgactggtgtggggtatgcctggtactgtaataggagcctaagacagcacacctaccttttcaggatttagaacctaaaattagaaagagaatcccagctgtcattgttccttccccagaagctaagagccagcctcagagcctacccaggagctgtgaaggggcaagggtcaaactgactcactctaccaggaggagaccaggttgcagtggcgtaaggccccctggtttctctggccacactccaaggcaccacagtgctgccagtgaggacagctgacacccagccagggaaaccattctagtctttattctgttggcttccagggcctgtcctggacttgtcagcatccagactgccatgtcagctatcccagtagctgagctccaaggactcaggcagagggactcagggatggggactgccaggggcagttggcaaaagtccaagtagagattacacccagcacaccattccttccaggagcagtaggtgggaggtttgacccagagaagccaatccttgcattccaggagtggcctgtgcctcccacctcttccttcccactgccaaaggcctgtgttgagaaagatgtcatgcaaaaggacgacggtggccaactaaagcaagtcttccttccaccctgtggcctgcacttgagccacaaagtgtgtgtgtgtgtgtgcgtgtgtggtacgtgtgtgtgtgtgtggctatgaggctgattcctgtttggatttttgtcctcacgtgtatcattaagctggcctttgggccttttcctttctacctcccctgtgacctttcctagctcaggtggccctgagggctccctcggaacagtgcctcaaatcctgacccaagggccagcatggggaagagatggttgcaggcaaaatgcactttatagagattttctattgctgggaaggtgtgtttctcccacaatttgtttgtgaatattcacttgttttataaatgtctgacctgtcttgagtaa

SEQ ID NO: 328796 - DNA, 1827 bp, Homo sapiens
cgcctaccggggcggagcgggggtggctggagcagtctggacagtcatggcggcgactgtggcgacggcggcagctgtggccccggcgccagcgcccggcacggacagcgcctcttcggtgcactggttccgcaaagggctgcgactccacgacaacccggcgttgctggcggccgtgcgcggggcgcgctgcgtgcgctgcgtttacattctcgacccgtggttcgcggcctcctcctcagtcgggatcaaccgatggaggttcctacttcagtctctggaagatttggacacaagtttaaggaaactgaactcccgcctgtttgtagtccggggacagccagccgacgtgttcccaaggctgttcaaggaatggggagtgacccgcttgacctttgaatatgactctgaaccctttgggaaagaacgggatgcagccatcatgaagatggccaaggaggctggtgtggaagtagtgacggagaattctcataccctctatgacctggacaggatcattgagctgaatgggcagaagccaccccttacatacaagcgctttcaggccatcatcagccgcatggagctgcccaagaagccagtgggcttggtgaccagccagcagatggagagctgcagggccgagatccaggagaaccacgacgagacctacggcgtgccctccctggaggagctggggttccccactgaaggacttggtccagctgtctggcagggaggagagacagaagctctggcccgcctggataagcacttggaacggaaggcctgggttgccaactatgagagaccccgaatgaacgccaactccctcctggccagccccacaggcctcagcccctacctgcgctttggttgtctctcctgccgcctcttctactaccgcctgtgggacctgtataaaaaggtgaagcggaacagcacacctcccctctccctatttgggcaactcctatggcgagagttcttctacacggcagctaccaacaaccccaggtttgaccgcatggaggggaaccccatctgcatccagatcccctgggaccgcaatcctgaggccctggccaagtgggctgagggcaagacaggcttcccttggattgatgccatcatgacccaactgaggcaggagggctggatccaccacctggcccggcatgccgtggcctgcttcctgacccgcggggacctctgggtcagctgggagagcggggtccgggtatttgatgagctgctcctggatgcagatttcagcgtgaacgcaggcagctggatgtggctgtcctgcagtgctttcttccagcagttcttccactgctactgccctgtgggctttggccgtcgcacggaccccagtggggactacatcaggcgatacctgcccaaattgaaagcgttcccctctcgatacatctatgagccctggaatgccccagagtcaattcagaaggcagccaagtgcatcattggtgtggactacccacggcccatcgtcaaccatgccgagaccagccggcttaacattgaacgaatgaagcagatttaccagcagctttcgcgctaccggggactctgtctactggcatctgtcccttcctgtgtggaagacctcagtcaccctgtggcagagcccagctcgagccaggctggcagcatgagcagtgcaggcccaagaccactacccagtggcccagcatcccccaaacgcaagctggaagcagccgaggaaccacctggtgaagaactcagcagctctggggttggcaactctgccacccgggcccgtttgctgagttcttcaccagg

SEQ ID NO: 328797 - DNA, 5415 bp, Homo sapiens
ttggccctcaacagcagtttggtggacctggtgcactatacacgacagggttttcagcagctacaagaattaaccaaaacaccttaatggagccccaggttgattcaatgccttgggaactatttttgcacattggaagcctcaaaaacagtccagacgtttgtttcatcaggacaccaaactctaaaaaagaagcaccacgagatggccaggacatttgtccacttaaactctcaacaacagtgtgatcattggttggacactgtggttatgcagaagcagagatgaggaggctggccccagagatgatcttgcccttcctaactaaaggacagaagtgcaatttagcttaaatgggtgtatgaatggtctagaaacatttctattttttttttaaaccagcaggatacaagttgcaaatgaaatgaggagaaacagtttcaactctgaaagtgaatttcacgtcatctcagtagccacgctagtccattcccagaaggaaatttttttttttaacaatgacttttggtaaagggttttgtggatgattttttttcttttgagttttgggagaaatatttgtttaataacttctaatggccatctgtaaaccataagtaatgaaggactccactgtgccccactttctgccaatgaacagtggcttgataataccaagtattgttgtaatttataaaattgaaggcaacccccgctcctgccgcccccaatctccccattgcctagagcgctgcacattgaccccagctctgacttctcattactgtgctgaaagtcagcccacgtcggagcggtgaggaggagccacagcacatggggtgccacctcgaggtctgcacaggaggacttggcgctgccatttcctacccctgccatttcccacccctgcttcagcgaaagggactctctaacagggcagtcactgttgactctattctgaatttcctcccttggggaagaagggaaccaacatttatacctgaccagatggctaaagtgcttttaaagttttgtttaagtagagctggaatttgaggtgctgatctgtggtctacagttatgtggtaactcatgttgtccagccaactcagagtttcgtcagtgaacaagaaacatgaaatctgcttcttagagaggctatatttttctgctacaaatattttatatttatagcaaaactagactttcagagtccttgattgtctaggggaagttaactccctgagaggatgtagagatttggggtggttgattagacttttgaaaaactcatcaccacatgccttcactccagagtgttctcagctagatttgatttggttgaggaggaactgtggccctccgtaagttattgccatagtgtatgcattaaaccaagtccattttgaatgacctaaaatgaagtaacacaatcagaaatcccatgtgcccataagcacagatttttctttttcattgaaactttaaaggttattattggaaacattactttgagtgcagtgtttttaaaagccaattcttttttatcccttttagaagtagaatttgcacacttactacaattgaggagtgtcatctctataactttttctccgcctttgtcccattctgcccctgtacatgtttcctaccaagcatgtttcacattttcctattagtggaggagggagaaccatatttatttgtaatgaagacatctaagatccctatgatgaatgcaggaactctcttggtagtttgtaaatacacaaagggatgtgtcgagggatgggagcgatgcttatctctcacagtgtgagtggtctgtgtgaggctgttccttcagtttcttctccagactgttctttggttgtcactaagtcagaggtctggtccctcatgtttaggtgaaagccagagaatgacagctgtagtcatatctgagcataagaccttgatgtgtgattcctgatgaccggtttcatttattcatgttataaagcaaagccctggtcctttttaaactactagttttaaaaacctgtgttaaatgaacagtaattgcctggtaggtttggtgtgtgtgtagcattgtgtgtccatctgttatatgtaaaggacaaggcaccagaatcaggctttatttcgatattgaagatgttatttaacatctttcttttttccttactcccttagccatcccctccccttttgtcctatcattccctagaacaagccacctgtcaattgtgaagggttgtgttctttatggcaggttctatgcagattgtgccagagcatgtgcgtgttctgttggcaagccacagtgctcccttgactgaagacatttccaggtagatttctcagccagctctaaaacagattgctttttcagtggccttactctttgtgggtttttttttttttctctgaacttgatataaagattttatttgtcccttgaaaaagtaacaaatgtgcatagatcaatttgtactactttggtcattggatatttctgatccttattgcattgtacctaaaggagagtaactaatggtaacctttttaatagagtatgtgaaaggtagtggctgatgaatccttaacgttcatagggtctttttgctgttacggttgtatatagaggtctgaaggatttttaaaatgatttgcactttttcactgcatgcttacaattcccaaaggcaaaatctgtactgaggtagatcatttgaaagggctagattataaaattaagccttagagtatggaaagttcttataacaataatagtacacacttcagagtaagacaaatgcaaagcatcttaaggagtgaaaatagagtctaaatcttgcctttggcactacaaggtgtgtgtgtgtgtgtgtgttgtgtgtctttagtaggaaatggaagaacactgttttattttttaaagtgtttaatgtttctgtcctttctgtgaattattgaatttaagagccctgctaaataatgaaaaaacactttactaaaatttatcaaattatactgggttcggattgtgaaaacattggccacctagtagcagtggtgaggagtgggagggcccagcaagcatttatcagaaatagaatcacaataggaggagaatttgactgtctgatattatgatttgattacaatactgaatgggaaaagtatctaatattttgtaacaaaaagaccttcatattatctgttttgaccaaaatatgtagctatttcccttacacagattggaccgcacttatctcccttgtcctgtatcctttaatttcaggtctcaggatgtttagaaagctaaaaccccctacccctttctggctgaaaacttgccttatttggtatcttacacattaatgttactagcatcaggagcttactgttttattatgattcatcttcagtaatttttagaagcaagaagaaagccattgtgtcctctacaattaacaaaacttatctctgatatacaaagggatataaatatatacacttaaatagagaaaaagaggttgattgaattgtgcctttgagtgaacccagtttttaaataccgctgtgtttgtttcgccatggcttcagggatgctacatggctcttgcaccttttactcctctgctttatgaagtttgagttgtatttgtgcatcttaaagtaggttgaggcttgaggctgggctttcgggtttttttgttttttgttttgttttgttttgttttgttttcttgtacttaaacctgcttgcttcctaccacagattctttattttcccaaacactacaaaaaaacttttaaaactttgccatttcatctgtttacactctttgccactgattagcagtatttaaatcttgcaagaatattttgtgctttctttagaaacacaagagtatagatttttctcactgaaaagtgagagttacgcattgcagccatgaagggatgctaggatcaattatggcagtaccttttttcccctcctgttcttgagccagttgtctcttttgttttgggtcccacttaggattaatggatgtaaggtattttcctgtgcctttattttgtgtcattctattggaaggaggtgtaacggcagaatagcatcgtgttgggggttttccttcaaacactgcaagtgatattgccaccatgtgaacctcaaatatgcaatccagttgtgttggtttctcggtgacttggagtgttcatctcttcatgaattgtgagcactgaccatgttcttcagttcttaattatggtgagttgacaaataccaactactgcttttctttaggtggctataaatttcttactgtcaggaggaaatgacattatattctgttccactgaacgtcagagatcagcaggcactgtactgggtagagaagtgcctatacttctctacctaagagggcaggagggaaaccctacagctccttgtgagcctatatattagtatatcggcctggagaggacaagggaataagaccactcatagtgaggctggccaagctgcactggtcggaccaggcagtggctgacctaaggaagacaacttgctttgcttaaaagtagattttttaagcaatgcttaacacaggcagcattcacctttgttcaggccatcgacatgtattgttaaaattactgcatatccccctcagatatcaagtatacactgttcatgttggggttgtgtgtgtgtatgtgtgtatgtacgcacgcatgtgtcccaaatcttgttttaattttttttttctgaatgtgatcatgttttggatgatacctgagcagggttgccttttttttatttattaccattatatattatattatattatatattttttgctttcttataactttggaggaaagtcaaatcttggtattattaaaattgttttaaaaaggagtaaattttccagttgataaatgaaaatcactggcctatgtttaataagtttttctttaattactgtggaataacgtgccagctatcatcaacacaatgattttgtacatagggtagggaagcagtgatgctctcaatgggaagatgtgcaacacaaattaaggggaactccatgtattttacctacttcagcaatggaactgcaacttggggctttgtgaataaaatttagctgccttgtatagtcgtttgaaagaatatgtgatctgtgagagaattatagtttttttttagaagaaaaatctgcaaaagatctttccaaagacaatgtgccacagatcttttgttctctgtaatgaggattaattgctgtttaaacaaaaatgtaattgttcatctttaaattctttccttttcataagaggatcaagctgtaaaaaaacaaaaaaattaataaaaatttcgagaaatca

SEQ ID NO: 328798 - DNA, 3337 bp, Homo sapiens
ggacctacttttcacaggactgaaagcaaaatcattacacttagggtatagcataatagctcttaattgtgtactaagaatgttatttaacatctttcttttttccttactcccttagccatcccctccccttttgtcctatcattccctagaacaagccacctgtcaattgtgaagggttgtgttctttatggcaggttctatgcagattgtgccagagcatgtgcgtgttctgttggcaagccacagtgctcccttgactgaagacatttccaggtagatttctcagccagctctaaaacagattgctttttcagtggccttactctttgtgggtttttttttttttctctgaacttgatataaagattttatttgtcccttgaaaaagtaacaaatgtgcatagatcaatttgtactactttggtcattggatatttctgatccttattgcattgtacctaaaggagagtaactaatggtaacctttttaatagagtatgtgaaaggtagtggctgatgaatccttaacgttcatagggtctttttgctgttacggttgtatatagaggtctgaaggatttttaaaatgatttgcactttttcactgcatgcttacaattcccaaaggcaaaatctgtactgaggtagatcatttgaaagggctagattataaaattaagccttagagtatggaaagttcttataacaataatagtacacacttcagagtaagacaaatgcaaagcatcttaaggagtgaaaatagagtctaaatcttgcctttggcactacaaggtgtgtgtgtgtgtgtgtgttgtgtgtctttagtaggaaatggaagaacactgttttattttttaaagtgtttaatgtttctgtcctttctgtgaattattgaatttaagagccctgctaaataatgaaaaaacactttactaaaatttatcaaattatactgggttcggattgtgaaaacattggccacctagtagcagtggtgaggagtgggagggcccagcaagcatttatcagaaatagaatcacaataggaggagaatttgactgtctgatattatgatttgattacaatactgaatgggaaaagtatctaatattttgtaacaaaaagaccttcatattatctgttttgaccaaaatatgtagctatttcccttacacagattggaccgcacttatctcccttgtcctgtatcctttaatttcaggtctcaggatgtttagaaagctaaaaccccctacccctttctggctgaaaacttgccttatttggtatcttacacattaatgttactagcatcaggagcttactgttttattatgattcatcttcagtaatttttagaagcaagaagaaagccattgtgtcctctacaattaacaaaacttatctctgatatacaaagggatataaatatatacacttaaatagagaaaaagaggttgattgaattgtgcctttgagtgaacccagtttttaaataccgctgtgtttgtttcgccatggcttcagggatgctacatggctcttgcaccttttactcctctgctttatgaagtttgagttgtatttgtgcatcttaaagtaggttgaggcttgaggctgggctttcgggtttttttgttttttgttttgttttgttttgttttgttttcttgtacttaaacctgcttgcttcctaccacagattctttattttcccaaacactacaaaaaaacttttaaaactttgccatttcatctgtttacactctttgccactgattagcagtatttaaatcttgcaagaatattttgtgctttctttagaaacacaagagtatagatttttctcactgaaaagtgagagttacgcattgcagccatgaagggatgctaggatcaattatggcagtaccttttttcccctcctgttcttgagccagttgtctcttttgttttgggtcccacttaggattaatggatgtaaggtattttcctgtgcctttattttgtgtcattctattggaaggaggtgtaacggcagaatagcatcgtgttgggggttttccttcaaacactgcaagtgatattgccaccatgtgaacctcaaatatgcaatccagttgtgttggtttctcggtgacttggagtgttcatctcttcatgaattgtgagcactgaccatgttcttcagttcttaattatggtgagttgacaaataccaactactgcttttctttaggtggctataaatttcttactgtcaggaggaaatgacattatattctgttccactgaacgtcagagatcagcaggcactgtactgggtagagaagtgcctatacttctctacctaagagggcaggagggaaaccctacagctccttgtgagcctatatattagtatatcggcctggagaggacaagggaataagaccactcatagtgaggctggccaagctgcactggtcggaccaggcagtggctgacctaaggaagacaacttgctttgcttaaaagtagattttttaagcaatgcttaacacaggcagcattcacctttgttcaggccatcgacatgtattgttaaaattactgcatatccccctcagatatcaagtatacactgttcatgttggggttgtgtgtgtgtatgtgtgtatgtacgcacgcatgtgtcccaaatcttgttttaattttttttttctgaatgtgatcatgttttggatgatacctgagcagggttgccttttttttatttattaccattatatattatattatattatatattttttgctttcttataactttggaggaaagtcaaatcttggtattattaaaattgttttaaaaaggagtaaattttccagttgataaatgaaaatcactggcctatgtttaataagtttttctttaattactgtggaataacgtgccagctatcatcaacacaatgattttgtacatagggtagggaagcagtgatgctctcaatgggaagatgtgcaacacaaattaaggggaactccatgtattttacctacttcagcaatggaactgcaacttggggctttgtgaataaaatttagctgccttgtatagtcgtttgaaagaatatgtgatctgtgagagaattatagtttttttttagaagaaaaatctgcaaaagatctttccaaagacaatgtgccacagatcttttgttctctgtaatgaggattaattgctgtttaaacaaaaatgtaattgttcatctttaaattctttccttttcataagaggatcaagctgtaaaaaaacaaaaaaattaataaaaatttcgagaaatca

SEQ ID NO: 328799 - DNA, 5897 bp, Homo sapiens
  misc_feature (5745)..(5745): n is a, c, g, or t
ttggccctcaacagcagtttggtggacctggtgcactatacacgacagggttttcagcagctacaagaattaaccaaaacaccttaatggagccccaggttgattcaatgccttgggaactatttttgcacattggaagcctcaaaaacagtccagacgtttgtttcatcaggacaccaaactctaaaaaagaagcaccacgagatggccaggacatttgtccacttaaactctcaacaacagtgtgatcattggttggacactgtggttatgcagaagcagagatgaggaggctggccccagagatgatcttgcccttcctaactaaaggacagaagtgcaatttagcttaaatgggtgtatgaatggtctagaaacatttctattttttttttaaaccagcaggatacaagttgcaaatgaaatgaggagaaacagtttcaactctgaaagtgaatttcacgtcatctcagtagccacgctagtccattcccagaaggaaatttttttttttaacaatgacttttggtaaagggttttgtggatgattttttttcttttgagttttgggagaaatatttgtttaataacttctaatggccatctgtaaaccataagtaatgaaggactccactgtgccccactttctgccaatgaacagtggcttgataataccaagtattgttgtaatttataaaattgaaggcaacccccgctcctgccgcccccaatctccccattgcctagagcgctgcacattgaccccagctctgacttctcattactgtgctgaaagtcagcccacgtcggagcggtgaggaggagccacagcacatggggtgccacctcgaggtctgcacaggaggacttggcgctgccatttcctacccctgccatttcccacccctgcttcagcgaaagggactctctaacagggcagtcactgttgactctattctgaatttcctcccttggggaagaagggaaccaacatttatacctgaccagatggctaaagtgcttttaaagttttgtttaagtagagctggaatttgaggtgctgatctgtggtctacagttatgtggtaactcatgttgtccagccaactcagagtttcgtcagtgaacaagaaacatgaaatctgcttcttagagaggctatatttttctgctacaaatattttatatttatagcaaaactagactttcagagtccttgattgtctaggggaagttaactccctgagaggatgtagagatttggggtggttgattagacttttgaaaaactcatcaccacatgccttcactccagagtgttctcagctagatttgatttggttgaggaggaactgtggccctccgtaagttattgccatagtgtatgcattaaaccaagtccattttgaatgacctaaaatgaagtaacacaatcagaaatcccatgtgcccataagcacagatttttctttttcattgaaactttaaaggttattattggaaacattactttgagtgcagtgtttttaaaagccaattcttttttatcccttttagaagtagaatttgcacacttactacaattgaggagtgtcatctctataactttttctccgcctttgtcccattctgcccctgtacatgtttcctaccaagcatgtttcacattttcctattagtggaggagggagaaccatatttatttgtaatgaagacatctaagatccctatgatgaatgcaggaactctcttggtagtttgtaaatacacaaagggatgtgtcgagggatgggagcgatgcttatctctcacagtgtgagtggtctgtgtgaggctgttccttcagtttcttctccagactgttctttggttgtcactaagtcagaggtctggtccctcatgtttaggtgaaagccagagaatgacagctgtagtcatatctgagcataagaccttgatgtgtgattcctgatgaccggtttcatttattcatgttataaagcaaagccctggtcctttttaaactactagttttaaaaacctgtgttaaatgaacagtaattgcctggtaggtttggtgtgtgtgtagcattgtgtgtccatctgttatatgtaaaggacaaggcaccagaatcaggctttatttcgatattgaagatgttatttaacatctttcttttttccttactcccttagccatcccctccccttttgtcctatcattccctagaacaagccacctgtcaattgtgaagggttgtgttctttatggcaggttctatgcagattgtgccagagcatgtgcgtgttctgttggcaagccacagtgctcccttgactgaagacatttccaggtagatttctcagccagctctaaaacagattgctttttcagtggccttactctttgtgggtttttttttttttctctgaacttgatataaagattttatttgtcccttgaaaaagtaacaaatgtgcatagatcaatttgtactactttggtcattggatatttctgatccttattgcattgtacctaaaggagagtaactaatggtaacctttttaatagagtatgtgaaaggtagtggctgatgaatccttaacgttcatagggtctttttgctgttacggttgtatatagaggtctgaaggatttttaaaatgatttgcactttttcactgcatgcttacaattcccaaaggcaaaatctgtactgaggtagatcatttgaaagggctagattataaaattaagccttagagtatggaaagttcttataacaataatagtacacacttcagagtaagacaaatgcaaagcatcttaaggagtgaaaatagagtctaaatcttgcctttggcactacaaggtgtgtgtgtgtgtgtgtgttgtgtgtctttagtaggaaatggaagaacactgttttattttttaaagtgtttaatgtttctgtcctttctgtgaattattgaatttaagagccctgctaaataatgaaaaaacactttactaaaatttatcaaattatactgggttcggattgtgaaaacattggccacctagtagcagtggtgaggagtgggagggcccagcaagcatttatcagaaatagaatcacaataggaggagaatttgactgtctgatattatgatttgattacaatactgaatgggaaaagtatctaatattttgtaacaaaaagaccttcatattatctgttttgaccaaaatatgtagctatttcccttacacagattggaccgcacttatctcccttgtcctgtatcctttaatttcaggtctcaggatgtttagaaagctaaaaccccctacccctttctggctgaaaacttgccttatttggtatcttacacattaatgttactagcatcaggagcttactgttttattatgattcatcttcagtaatttttagaagcaagaagaaagccattgtgtcctctacaattaacaaaacttatctctgatatacaaagggatataaatatatacacttaaatagagaaaaagaggttgattgaattgtgcctttgagtgaacccagtttttaaataccgctgtgtttgtttcgccatggcttcagggatgctacatggctcttgcaccttttactcctctgctttatgaagtttgagttgtatttgtgcatcttaaagtaggttgaggcttgaggctgggctttcgggtttttttgttttttgttttgttttgttttgttttgttttcttgtacttaaacctgcttgcttcctaccacagattctttattttcccaaacactacaaaaaaacttttaaaactttgccatttcatctgtttacactctttgccactgattagcagtatttaaatcttgcaagaatattttgtgctttctttagaaacacaagagtatagatttttctcactgaaaagtgagagttacgcattgcagccatgaagggatgctaggatcaattatggcagtaccttttttcccctcctgttcttgagccagttgtctcttttgttttgggtcccacttaggattaatggatgtaaggtattttcctgtgcctttattttgtgtcattctattggaaggaggtgtaacggcagaatagcatcgtgttgggggttttccttcaaacactgcaagtgatattgccaccatgtgaacctcaaatatgcaatccagttgtgttggtttctcggtgacttggagtgttcatctcttcatgaattgtgagcactgaccatgttcttcagttcttaattatggtgagttgacaaataccaactactgcttttctttaggtggctataaatttcttactgtcaggaggaaatgacattatattctgttccactgaacgtcagagatcagcaggcactgtactgggtagagaagtgcctatacttctctacctaagagggcaggagggaaaccctacagctccttgtgagcctatatattagtatatcggcctggagaggacaagggaataagaccactcatagtgaggctggccaagctgcactggtcggaccaggcagtggctgacctaaggaagacaacttgctttgcttaaaagtagattttttaagcaatgcttaacacaggcagcattcacctttgttcaggccatcgacatgtattgttaaaattactgcatatccccctcagatatcaagtatacactgttcatgttggggttgtgtgtgtgtatgtgtgtatgtacgcacgcatgtgtcccaaatcttgttttaattttttttttctgaatgtgatcatgttttggatgatacctgagcagggttgccttttttttatttattaccattatatattatattatattatatattttttgctttcttataactttggaggaaagtcaaatcttggtattattaaaattgttttaaaaaggagtaaattttccagttgataaatgaaaatcactggcctatgtttaataagtttttctttaattactgtggaataacgtgccagctatcatcaacacaatgattttgtacatagggtagggaagcagtgatgctctcaatgggaagatgtgcaacacaaattaaggggaactccatgtattttacctacttcagcaatggaactgcaacttggggctttgtgaataaaatttagctgccttgtatagtcgtttgaaagaatatgtgatctgtgagagaattatagtttttttttagaagaaaaatctgcaaaagatctttccaaagacaatgtgccacagatcttttgttctctgtaatgaggattaattgctgtttaaacaaaaatgtaattgttcatctttaaattctttccttttcataagaggatcaagctgtaaaaaaacaaaaaaattaataaaaatttcgagaaatcaaaaaaaaaaaaaaaaaaaaaaaaaaaaaaaaaaaaaaaaaaaaaaaaacagaagaagaaaaaagaaaaaaaagaagaagcaaaaaagaagagaaaaaaacaaaaaaaagaagagggggggggggggagagacgggagaagacggagacagagagaaacaaataggagagacgacacgcagcacacaaaaaacaagacaaaacaacaagagaaaagagagggaggccaaacaacgagaaacacctgcccaccaaaaacacaacgagggagacgagacacaccacccgacaaataaaacacccgcggcgacagcgagcacaacacagcatcngcaccacaagaagcacaccacagagagagaagaacagaccacgaacgaagaaacaacgaaagaagcactaactacacagacagaggaaagaaaaaacaacacaagagagacgaaaagaaaaataataagaaacccgcacagaaacgaagaag

SEQ ID NO: 328800 - DNA, 5360 bp, Homo sapiens
ttggccctcaacagcagtttggtggacctggtgcactatacacgacagggttttcagcagctacaagaattaaccaaaacaccttaatggagccccaggttgattcaatgccttgggaactatttttgcacattggaagcctcaaaaacagtccagacgtttgtttcatcaggacaccaaactctaaaaaagaagcaccacgagatggccaggacatttgtccacttaaactctcaacaacagtgtgatcattggttggacactgtggttatgcagaagcagagatgaggaggctggccccagagatgatcttgcccttcctaactaaaggacagaagtgcaatttagcttaaatgggtgtatgaatggtctagaaacatttctattttttttttaaaccagcaggatacaagttgcaaatgaaatgaggagaaacagtttcaactctgaaagtgaatttcacgtcatctcagtagccacgctagtccattcccagaaggaaatttttttttttaacaatgacttttggtaaagggttttgtggatgattttttttcttttgagttttgggagaaatatttgtttaataacttctaatggccatctgtaaaccataagtaatgaaggactccactgtgccccactttctgccaatgaacagtggcttgataataccaagtattgttgtaatttataaaattgaaggcaacccccgctcctgccgcccccaatctccccattgcctagagcgctgcacattgaccccagctctgacttctcattactgtgctgaaagtcagcccacgtcggagcggtgaggaggagccacagcacatggggtgccacctcgaggtctgcacaggaggacttggcgctgccatttcctacccctgccatttcccacccctgcttcagcgaaagggactctctaacagggcagtcactgttgactctattctgaatttcctcccttggggaagaagggaaccaacatttatacctgaccagatggctaaagtgcttttaaagttttgtttaagtagagctggaatttgaggtgctgatctgtggtctacagttatgtggtaactcatgttgtccagccaactcagagtttcgtcagtgaacaagaaacatgaaatctgcttcttagagaggctatatttttctgctacaaatattttatatttatagcaaaactagactttcagagtccttgattgtctaggggaagttaactccctgagaggatgtagagatttggggtggttgattagacttttgaaaaactcatcaccacatgccttcactccagagtgttctcagctagatttgatttggttgaggaggaactgtggccctccgtaagttattgccatagtgtatgcattaaaccaagtccattttgaatgacctaaaatgaagtaacacaatcagaaatcccatgtgcccataagcacagatttttctttttcattgaaactttaaaggttattattggaaacattactttgagtgcagtgtttttaaaagccaattcttttttatcccttttagaagtagaatttgcacacttactacaattgaggagtgtcatctctataactttttctccgcctttgtcccattctgcccctgtacatgtttcctaccaagcatgtttcacattttcctattagtggaggagggagaaccatatttatttgtaatgaagacatctaagatccctatgatgaatgcaggaactctcttggtagtttgtaaatacacaaagggatgtgtcgagggatgggagcgatgcttatctctcacagtgtgagtggtctgtgtgaggctgttccttcagtttcttctccagactgttctttggttgtcactaagtcagaggtctggtccctcatgtttaggtgaaagccagagaatgacagctgtagtcatatctgagcataagaccttgatgtgtgattcctgatgaccggtttcatttattcatgttataaagcaaagccctggtcctttttaaactactagttttaaaaacctgtgttaaatgaacagtaattgcctggtaggtttggtgtgtgtgtagcattgtgtgtccatctgttatatgtaaaggacaaggcaccagaatcaggctttatttcgatattgaagatgttatttaacatctttcttttttccttactcccttagccatcccctccccttttgtcctatcattccctagaacaagccacctgtcaattgtgaagggttgtgttctttatggcaggttctatgcagattgtgccagagcatgtgcgtgttctgttggcaagccacagtgctcccttgactgaagacatttccaggtagatttctcagccagctctaaaacagattgctttttcagtggccttactctttgtgggtttttttttttttctctgaacttgatataaagattttatttgtcccttgaaaaagtaacaaatgtgcatagatcaatttgtactactttggtcattggatatttctgatccttattgcattgtacctaaaggagagtaactaatggtaacctttttaatagagtatgtgaaaggtagtggctgatgaatccttaacgttcatagggtctttttgctgttacggttgtatatagaggtctgaaggatttttaaaatgatttgcactttttcactgcatgcttacaattcccaaaggcaaaatctgtactgaggtagatcatttgaaagggctagattataaaattaagccttagagtatggaaagttcttataacaataatagtacacacttcagagtaagacaaatgcaaagcatcttaaggagtgaaaatagagtctaaatcttgcctttggcactacaaggtgtgtgtgtgtgtgtgtgttgtgtgtctttagtaggaaatggaagaacactgttttattttttaaagtgtttaatgtttctgtcctttctgtgaattattgaatttaagagccctgctaaataatgaaaaaacactttactaaaatttatcaaattatactgggttcggattgtgaaaacattggccacctagtagcagtggtgaggagtgggagggcccagcaagcatttatcagaaatagaatcacaataggaggagaatttgactgtctgatattatgatttgattacaatactgaatgggaaaagtatctaatattttgtaacaaaaagaccttcatattatctgttttgaccaaaatatgtagctatttcccttacacagattggaccgcacttatctcccttgtcctgtatcctttaatttcaggtctcaggatgtttagaaagctaaaaccccctacccctttctggctgaaaacttgccttatttggtatcttacacattaatgttactagcatcaggagcttactgttttattatgattcatcttcagtaatttttagaagcaagaagaaagccattgtgtcctctacaattaacaaaacttatctctgatatacaaagggatataaatatatacacttaaatagagaaaaagaggttgattgaattgtgcctttgagtgaacccagtttttaaataccgctgtgtttgtttcgccatggcttcagggatgctacatggctcttgcaccttttactcctctgctttatgaagtttgagttgtatttgtgcatcttaaagtaggttgaggcttgaggctgggctttcgggtttttttgttttttgttttgttttgttttgttttgttttcttgtacttaaacctgcttgcttcctaccacagattctttattttcccaaacactacaaaaaaacttttaaaactttgccatttcatctgtttacactctttgccactgattagcagtatttaaatcttgcaagaatattttgtgctttctttagaaacacaagagtatagatttttctcactgataccttttttcccctcctgttcttgagccagttgtctcttttgttttgggtcccacttaggattaatggatgtaaggtattttcctgtgcctttattttgtgtcattctattggaaggaggtgtaacggcagaatagcatcgtgttgggggttttccttcaaacactgcaagtgatattgccaccatgtgaacctcaaatatgcaatccagttgtgttggtttctcggtgacttggagtgttcatctcttcatgaattgtgagcactgaccatgttcttcagttcttaattatggtgagttgacaaataccaactactgcttttctttaggtggctataaatttcttactgtcaggaggaaatgacattatattctgttccactgaacgtcagagatcagcaggcactgtactgggtagagaagtgcctatacttctctacctaagagggcaggagggaaaccctacagctccttgtgagcctatatattagtatatcggcctggagaggacaagggaataagaccactcatagtgaggctggccaagctgcactggtcggaccaggcagtggctgacctaaggaagacaacttgctttgcttaaaagtagattttttaagcaatgcttaacacaggcagcattcacctttgttcaggccatcgacatgtattgttaaaattactgcatatccccctcagatatcaagtatacactgttcatgttggggttgtgtgtgtgtatgtgtgtatgtacgcacgcatgtgtcccaaatcttgttttaattttttttttctgaatgtgatcatgttttggatgatacctgagcagggttgccttttttttatttattaccattatatattatattatattatatattttttgctttcttataactttggaggaaagtcaaatcttggtattattaaaattgttttaaaaaggagtaaattttccagttgataaatgaaaatcactggcctatgtttaataagtttttctttaattactgtggaataacgtgccagctatcatcaacacaatgattttgtacatagggtagggaagcagtgatgctctcaatgggaagatgtgcaacacaaattaaggggaactccatgtattttacctacttcagcaatggaactgcaacttggggctttgtgaataaaatttagctgccttgtatagtcgtttgaaagaatatgtgatctgtgagagaattatagtttttttttagaagaaaaatctgcaaaagatctttccaaagacaatgtgccacagatcttttgttctctgtaatgaggattaattgctgtttaaacaaaaatgtaattgttcatctttaaattctttccttttcataagaggatcaagctgtaaaaaaacaaaaaaattaataaaaatttcgagaaatca

SEQ ID NO: 328801 - DNA, 348 bp, Homo sapiens
ttgcctcttcaggcactgctgtaaggcaaacataaattgatccatgcaaagtgcttagaacatccaggcaccacaccacaagcactgttaaatgttacttattatgattattagataatcgactgctttggcatttcacccctactgcttatttctgcttacccattcatgctattatctgctggcaagtttcttgtgaaacagaagaaaggcagtaatgggtatcaaaggtttaagaaaaatgtactggggcgggttgctcaatgtaggaagatcaaacataaagtgaatactagtcattaattttattttatttatttatttatttttgagacggagtctcactct

SEQ ID NO: 328802 - DNA, 209 bp, Homo sapiens
catggttcctcatacttccaatggctgagattttctaaggattctctgggatgaattggtttgctttttgttaaaacccctgcccccaaccccaaacttaaaatgaattgttaccactctttcacctgtgttcctacttcgtttaatatggtttagaagtacacgtctcattgtttcatctaaaatatagttaccgtttttgtttacag

SEQ ID NO: 328803 - DNA, 402 bp, Homo sapiens
atgtggaaatgaaagatgaattaggcattctggttccaggcaaaatgtcagctttttttttttcctgaactcaaagtgactctcaaagtgctgggattacaggtgtgagcccctgggcccagcctcatttatgtacaaaaattaaacatccagccatatcttatgagatgtattaaacataagaatgtgttcatttgaaaataaaaggatggaaaaagatagatcaggcacatactaagtgaaggaaaacaagtgtctatatttttgtgagacttcaagtctataagaattatttagaatagagaagttcataataataaaaggttatttcaccaggaaaatacaagaattctagtcaggcatggtagcacattcctgtaatcccagctactcggatagctg

SEQ ID NO: 328804 - DNA, 2461 bp, Homo sapiens
cgcgcgtttagccggccgccgccacctccacgccctaggccgggccgacttacggagtcgccggaagcggaagtcgctgaggggtggtgaagcggttgggaaagtgtcggtttatcttcgcgccccttgcgttcttgccgcggcttgcctgggcaggtaaagcgcgattgcgagagctcggcaaccctgccgactcagccggaaccggctcccggcccgaggggcgtggtgtcctggtgctccgactccttccgcaggctccttgggacccgcggttccgggagtcccttgctcagggtccctttcctgcagtgaggcgccgtccgccttccctgtgtccccgcagacccccatcatgggcaataccagcagtgagcgcgccgcgctggagcggcatggtggccataagacgccccggagggacagctcggggggcaccaaggacggggacaggcccaagatcctgatggacagccccgaagacgccgacctcttccactccgaggaaatcaaggcaccagagaaggaggaattcctggcctggcagcatgatctggaagtgaatgataaagctcccgcccaggctcggccaacggtgtttcgatggacggggggcggaaaggaagtttacttatctgggtccttcaacaactggagtaaacttcccctcaccagaagccacaataactttgtagccatcctggatctgccggaaggagagcatcagtacaagttctttgtggatggtcagtggacgcacgacccttccgagcccatagtaaccagccagcttggcacagttaacaacatcattcaagtgaagaaaactgactttgaagtatttgatgctttaatggtggattcccaaaagtgctccgatgtgtctgagctgtccagttctcccccaggaccctaccatcaggagccctacgtctgcaaacccgaagagcgctttcgggcaccccctattctccccccacatctcctccaggtcatcctgaacaaggacacggggatttcctgtgatccagctttgcttcctgagcccaatcacgtcatgctgaaccacctatacgcgctgtctatcaaggatggagtgatggtgctcagcgcaacccaccggtacaagaagaagtacgtcaccaccttgttatacaagcccatatgaagagctgggggcggatggtggcccaggagacagcacaccaccaggctccacacgtgcatgctttccccaagagggaatggactgtacattgctcatttcacactcttcagaagacatttcatacctgccctggtcctgcttgaaggtttgtccaggcagagcagctcctgcagcgcctcggtctgtgacagtcctcctagcacccccatggctttgagcctcggggactcatcaagtccaagaaaagagggaggggtggcagaggatctgcagccctggccccgcggtgcatgaggctgggtgcagttctaaacctacattctcgatttttcttaagccaaaaatgaatgctaactcctttgccagtaaaattctgggaaacagggactgaggccacacatcatttccagtcatctgtgtgtttttaaggccagccacttgtccctgttgaggcctggctatggaactaaatacagtgttggtcttgcctgtccttcaaaatcaacaacagattgtctctcggctccagggaggtgtcatttctatagaaattagaagctttctgatttctagatgaggttttacaattgtttcttacagtcatgtgcactaagtactctttttgtaagcagaggtggctggctctgcagccttaaggccattttttaagtcaccacgtctagaagtcacatgaactctgctcagcaataatctgttctcagaacagacttttcaacctgctgccggatttctccattcagctggatgatcctcaggactgaccagttagctggcaggttgtccagctttttattccagtcataataggtgacagtgttaaccgtgaaaacttgagaggcactctgccctcttccctataaaatcacacagcgtgattttacaaggtcccgtggcaccttgctcaggacctctgcccctagttagcaagactgcagcagttgctgttgcttattctgaaaggaatgtagaacttgacagcagccttctgagtctgggtcaggaagatgtcctttggaccaaagcagacttctttatacgcagctcagtttcccgggagtcgccacagatgtacccactagcccaggttgctgtgagtcagcggaagctcccgttatgccctttgctcctggtgggagagggaggagtgagctccctgggttccagtatttacttggtatacctgagtttgggggtacccttttttgtgacttttcaaaacagtgaattactgtcaccttgatggacaagtttcaataaaactttgtaaaaata

SEQ ID NO: 328805 - DNA, 701 bp, Homo sapiens
cgcccggctaattttttatatttttagtagagacggggtttcaccgtgttagccaggatggtctccatctcctgacctcaggagatccgcctgcctcggcctcccaaagtgctgggattacaggcgtgagccactgaacccaccctacttattttttttttttccttctttgagatggagtctcactctgttgcccaggctggagggcagtagcacaatctcggggcactgcaaccttcgtctcccggactcaaaccatcctgcctcagcctcccgagtagctgggactacaggcgtgtgccaccatgcctggctaattttgtgtatttttggtagaggtggggtttcgccatgttgcccaggttggtcttgaactcctgacctcaagtgatccgcccgcctgggccgcccaaagtgctgcgattacaggcatgagccaccactcccggcctcaccctgcttttttttaaagcgtacatagaaaagtctttcagcttctagaggtcagtgggcggtgagggtctgtctgaaggaggcagccagcagctactgaacttctctctagtgttgtttaaatatgacttaatcgtgcttaagcaggccagtgcaaacatttttcttcctgctgcagcctgtttaaattcaaaaactcaggtgacttaactcctgcttcaaccacactcctgttaaccaccttcata

SEQ ID NO: 328806 - DNA, 2520 bp, Homo sapiens
cgcgcgtttagccggccgccgccacctccacgccctaggccgggccgacttacggagtcgccggaagcggaagtcgctgaggggtggtgaagcggttgggaaagtgtcggtttatcttcgcgccccttgcgttcttgccgcggcttgcctgggcaggtaaagcgcgattgcgagagctcggcaaccctgccgactcagccggaaccggctcccggcccgaggggcgtggtgtcctggtgctccgactccttccgcaggctccttgggacccgcggttccgggagtcccttgctcagggtccctttcctgcagtgaggcgccgtccgccttccctgtgtccccgcagacccccatcatgggcaataccagcagtgagcgcgccgcgctggagcggcatggtggccataagacgccccggagggacagctcggggggcaccaaggacggggacaggcccaagatcctgatggacagccccgaagacgccgacctcttccactccgaggaaatcaaggcaccagagaaggaggaattcctggcctggcagcatgatctggaagtgaatgataaagctcccgcccaggctcggccaacggtgtttcgatggacggggggcggaaaggaagtttacttatctgggtccttcaacaactggagtaaacttcccctcaccagaagccacaataactttgtagccatcctggatctgccggaaggagagcatcagtacaagttctttgtggatggtcagtggacgcacgacccttccgagcccatagtaaccagccagcttggcacagttaacaacatcattcaagtgaagaaaactgactttgaagtatttgatgctttaatggtggattcccaaaagtgctccgatgtgtctgagctgtccagttctcccccaggaccctaccatcaggagccctacgtctgcaaacccgaagagcgctttcgggcaccccctattctccccccacatctcctccaggtcatcctgaacaaggacacggggatttcccatctccctacccccaccactcctagccgctggcaaccaccactctactctctacttcttgtgatccagctttgcttcctgagcccaatcacgtcatgctgaaccacctatacgcgctgtctatcaaggatggagtgatggtgctcagcgcaacccaccggtacaagaagaagtacgtcaccaccttgttatacaagcccatatgaagagctgggggcggatggtggcccaggagacagcacaccaccaggctccacacgtgcatgctttccccaagagggaatggactgtacattgctcatttcacactcttcagaagacatttcatacctgccctggtcctgcttgaaggtttgtccaggcagagcagctcctgcagcgcctcggtctgtgacagtcctcctagcacccccatggctttgagcctcggggactcatcaagtccaagaaaagagggaggggtggcagaggatctgcagccctggccccgcggtgcatgaggctgggtgcagttctaaacctacattctcgatttttcttaagccaaaaatgaatgctaactcctttgccagtaaaattctgggaaacagggactgaggccacacatcatttccagtcatctgtgtgtttttaaggccagccacttgtccctgttgaggcctggctatggaactaaatacagtgttggtcttgcctgtccttcaaaatcaacaacagattgtctctcggctccagggaggtgtcatttctatagaaattagaagctttctgatttctagatgaggttttacaattgtttcttacagtcatgtgcactaagtactctttttgtaagcagaggtggctggctctgcagccttaaggccattttttaagtcaccacgtctagaagtcacatgaactctgctcagcaataatctgttctcagaacagacttttcaacctgctgccggatttctccattcagctggatgatcctcaggactgaccagttagctggcaggttgtccagctttttattccagtcataataggtgacagtgttaaccgtgaaaacttgagaggcactctgccctcttccctataaaatcacacagcgtgattttacaaggtcccgtggcaccttgctcaggacctctgcccctagttagcaagactgcagcagttgctgttgcttattctgaaaggaatgtagaacttgacagcagccttctgagtctgggtcaggaagatgtcctttggaccaaagcagacttctttatacgcagctcagtttcccgggagtcgccacagatgtacccactagcccaggttgctgtgagtcagcggaagctcccgttatgccctttgctcctggtgggagagggaggagtgagctccctgggttccagtatttacttggtatacctgagtttgggggtacccttttttgtgacttttcaaaacagtgaattactgtcaccttgatggacaagtttcaataaaactttgtaaaaata

SEQ ID NO: 328807 - DNA, 2441 bp, Homo sapiens
cgcgcgtttagccggccgccgccacctccacgccctaggccgggccgacttacggagtcgccggaagcggaagtcgctgaggggtggtgaagcggttgggaaagtgtcggtttatcttcgcgccccttgcgttcttgccgcggcttgcctgggcaggtaaagcgcgattgcgagagctcggcaaccctgccgactcagccggaaccggctcccggcccgaggggcgtggtgtcctggtgctccgactccttccgcaggctccttgggacccgcggttccgggagtcccttgctcagggtccctttcctgcagtgaggcgccgtccgccttccctgtgtccccgcagacccccatcatgggcaataccagcagtgagcgcgccgcgctggagcggcatggtggccataagacgccccggagggacagctcggggggcaccaaggacggggacaggcccaagatcctgatggacagcttgctcagggtccctttcctgcagtgaaacaccgactccttccgcagctccttggaaccggctcccggcccgagggcgatgggtgtcctggtgctcaacggtgtttcgatggacggggggcggaaaggaagtttacttatctgggtccttcaacaactggagtaaacttcccctcaccagaagccacaataactttgtagccatcctggatctgccggaaggagagcatcagtacaagttctttgtggatggtcagtggacgcacgacccttccgagcccatagtaaccagccagcttggcacagttaacaacatcattcaagtgaagaaaactgactttgaagtatttgatgctttaatggtggattcccaaaagtgctccgatgtgtctgagctgtccagttctcccccaggaccctaccatcaggagccctacgtctgcaaacccgaagagcgctttcgggcaccccctattctccccccacatctcctccaggtcatcctgaacaaggacacggggatttcctgtgatccagctttgcttcctgagcccaatcacgtcatgctgaaccacctatacgcgctgtctatcaaggatggagtgatggtgctcagcgcaacccaccggtacaagaagaagtacgtcaccaccttgttatacaagcccatatgaagagctgggggcggatggtggcccaggagacagcacaccaccaggctccacacgtgcatgctttccccaagagggaatggactgtacattgctcatttcacactcttcagaagacatttcatacctgccctggtcctgcttgaaggtttgtccaggcagagcagctcctgcagcgcctcggtctgtgacagtcctcctagcacccccatggctttgagcctcggggactcatcaagtccaagaaaagagggaggggtggcagaggatctgcagccctggccccgcggtgcatgaggctgggtgcagttctaaacctacattctcgatttttcttaagccaaaaatgaatgctaactcctttgccagtaaaattctgggaaacagggactgaggccacacatcatttccagtcatctgtgtgtttttaaggccagccacttgtccctgttgaggcctggctatggaactaaatacagtgttggtcttgcctgtccttcaaaatcaacaacagattgtctctcggctccagggaggtgtcatttctatagaaattagaagctttctgatttctagatgaggttttacaattgtttcttacagtcatgtgcactaagtactctttttgtaagcagaggtggctggctctgcagccttaaggccattttttaagtcaccacgtctagaagtcacatgaactctgctcagcaataatctgttctcagaacagacttttcaacctgctgccggatttctccattcagctggatgatcctcaggactgaccagttagctggcaggttgtccagctttttattccagtcataataggtgacagtgttaaccgtgaaaacttgagaggcactctgccctcttccctataaaatcacacagcgtgattttacaaggtcccgtggcaccttgctcaggacctctgcccctagttagcaagactgcagcagttgctgttgcttattctgaaaggaatgtagaacttgacagcagccttctgagtctgggtcaggaagatgtcctttggaccaaagcagacttctttatacgcagctcagtttcccgggagtcgccacagatgtacccactagcccaggttgctgtgagtcagcggaagctcccgttatgccctttgctcctggtgggagagggaggagtgagctccctgggttccagtatttacttggtatacctgagtttgggggtacccttttttgtgacttttcaaaacagtgaattactgtcaccttgatggacaagtttcaataaaactttgtaaaaata

SEQ ID NO: 328808 - DNA, 2450 bp, Homo sapiens
cgcccggctaattttttatatttttagtagagacggggtttcaccgtgttagccaggatggtctccatctcctgacctcaggagatccgcctgcctcggcctcccaaagtgctgggattacaggcgtgagccactgaacccaccctacttattttttttttttccttctttgagatggagtctcactctgttgcccaggctggagggcagtagcacaatctcggggcactgcaaccttcgtctcccggactcaaaccatcctgcctcagcctcccgagtagctgggactacaggcgtgtgccaccatgcctggctaattttgtgtatttttggtagaggtggggtttcgccatgttgcccaggttggtcttgaactcctgacctcaagtgatccgcccgcctgggccgcccaaagtgctgcgattacaggcatgagccaccactcccggcctcaccctgcttttttttaaagcgtacatagaaaagtctttcagcttctagaggcaccagagaaggaggaattcctggcctggcagcatgatctggaagtgaatgataaagctcccgcccaggctcggccaacggtgtttcgatggacggggggcggaaaggaagtttacttatctgggtccttcaacaactggagtaaacttcccctcaccagaagccacaataactttgtagccatcctggatctgccggaaggagagcatcagtacaagttctttgtggatggtcagtggacgcacgacccttccgagcccatagtaaccagccagcttggcacagttaacaacatcattcaagtgaagaaaactgactttgaagtatttgatgctttaatggtggattcccaaaagtgctccgatgtgtctgagctgtccagttctcccccaggaccctaccatcaggagccctacgtctgcaaacccgaagagcgctttcgggcaccccctattctccccccacatctcctccaggtcatcctgaacaaggacacggggatttcctgtgatccagctttgcttcctgagcccaatcacgtcatgctgaaccacctatacgcgctgtctatcaaggatggagtgatggtgctcagcgcaacccaccggtacaagaagaagtacgtcaccaccttgttatacaagcccatatgaagagctgggggcggatggtggcccaggagacagcacaccaccaggctccacacgtgcatgctttccccaagagggaatggactgtacattgctcatttcacactcttcagaagacatttcatacctgccctggtcctgcttgaaggtttgtccaggcagagcagctcctgcagcgcctcggtctgtgacagtcctcctagcacccccatggctttgagcctcggggactcatcaagtccaagaaaagagggaggggtggcagaggatctgcagccctggccccgcggtgcatgaggctgggtgcagttctaaacctacattctcgatttttcttaagccaaaaatgaatgctaactcctttgccagtaaaattctgggaaacagggactgaggccacacatcatttccagtcatctgtgtgtttttaaggccagccacttgtccctgttgaggcctggctatggaactaaatacagtgttggtcttgcctgtccttcaaaatcaacaacagattgtctctcggctccagggaggtgtcatttctatagaaattagaagctttctgatttctagatgaggttttacaattgtttcttacagtcatgtgcactaagtactctttttgtaagcagaggtggctggctctgcagccttaaggccattttttaagtcaccacgtctagaagtcacatgaactctgctcagcaataatctgttctcagaacagacttttcaacctgctgccggatttctccattcagctggatgatcctcaggactgaccagttagctggcaggttgtccagctttttattccagtcataataggtgacagtgttaaccgtgaaaacttgagaggcactctgccctcttccctataaaatcacacagcgtgattttacaaggtcccgtggcaccttgctcaggacctctgcccctagttagcaagactgcagcagttgctgttgcttattctgaaaggaatgtagaacttgacagcagccttctgagtctgggtcaggaagatgtcctttggaccaaagcagacttctttatacgcagctcagtttcccgggagtcgccacagatgtacccactagcccaggttgctgtgagtcagcggaagctcccgttatgccctttgctcctggtgggagagggaggagtgagctccctgggttccagtatttacttggtatacctgagtttgggggtacccttttttgtgacttttcaaaacagtgaattactgtcaccttgatggacaagtttcaataaaactttgtaaaaata

SEQ ID NO: 328809 - DNA, 1463 bp, Homo sapiens
atgggaaacctgatgctgttcagtgtgatccagctttgcttcctgagcccaatcacgtcatgctgaaccacctatacgcgctgtctatcaaggatggagtgatggtgctcagcgcaacccaccggtacaagaagaagtacgtcaccaccttgttatacaagcccatatgaagagctgggggcggatggtggcccaggagacagcacaccaccaggctccacacgtgcatgctttccccaagagggaatggactgtacattgctcatttcacactcttcagaagacatttcatacctgccctggtcctgcttgaaggtttgtccaggcagagcagctcctgcagcgcctcggtctgtgacagtcctcctagcacccccatggctttgagcctcggggactcatcaagtccaagaaaagagggaggggtggcagaggatctgcagccctggccccgcggtgcatgaggctgggtgcagttctaaacctacattctcgatttttcttaagccaaaaatgaatgctaactcctttgccagtaaaattctgggaaacagggactgaggccacacatcatttccagtcatctgtgtgtttttaaggccagccacttgtccctgttgaggcctggctatggaactaaatacagtgttggtcttgcctgtccttcaaaatcaacaacagattgtctctcggctccagggaggtgtcatttctatagaaattagaagctttctgatttctagatgaggttttacaattgtttcttacagtcatgtgcactaagtactctttttgtaagcagaggtggctggctctgcagccttaaggccattttttaagtcaccacgtctagaagtcacatgaactctgctcagcaataatctgttctcagaacagacttttcaacctgctgccggatttctccattcagctggatgatcctcaggactgaccagttagctggcaggttgtccagctttttattccagtcataataggtgacagtgttaaccgtgaaaacttgagaggcactctgccctcttccctataaaatcacacagcgtgattttacaaggtcccgtggcaccttgctcaggacctctgcccctagttagcaagactgcagcagttgctgttgcttattctgaaaggaatgtagaacttgacagcagccttctgagtctgggtcaggaagatgtcctttggaccaaagcagacttctttatacgcagctcagtttcccgggagtcgccacagatgtacccactagcccaggttgctgtgagtcagcggaagctcccgttatgccctttgctcctggtgggagagggaggagtgagctccctgggttccagtatttacttggtatacctgagtttgggggtacccttttttgtgacttttcaaaacagtgaattactgtcaccttgatggacaagtttcaataaaactttgtaaaaata

SEQ ID NO: 328810 - DNA, 1867 bp, Homo sapiens
gtggcccagggggctgggaatatgagaatgtcaggacccctctgtccaaggtagcactaagctctaatgtaaactgtggttacagttgtcactactaaagggttaacatttattttgccccaaactaatcttaagtgcttttcgtgtattcttattcaagcctcacaacaaccatgtgaagtaggtgcaattattacccccattttagggatggggaaactgaggcacagagcagtagggagaacacttaaaatctactgtcttagagattttcaagaatacattgttactaatagtcaccgtgttgtacagtggatctcttgaacgtattcctcctgtctaactgaaatgttgtattctttgaccagcatctccctacccccaccactcctagccgctggcaaccaccactctactctctacttcttgtgatccagctttgcttcctgagcccaatcacgtcatgctgaaccacctatacgcgctgtctatcaaggatggagtgatggtgctcagcgcaacccaccggtacaagaagaagtacgtcaccaccttgttatacaagcccatatgaagagctgggggcggatggtggcccaggagacagcacaccaccaggctccacacgtgcatgctttccccaagagggaatggactgtacattgctcatttcacactcttcagaagacatttcatacctgccctggtcctgcttgaaggtttgtccaggcagagcagctcctgcagcgcctcggtctgtgacagtcctcctagcacccccatggctttgagcctcggggactcatcaagtccaagaaaagagggaggggtggcagaggatctgcagccctggccccgcggtgcatgaggctgggtgcagttctaaacctacattctcgatttttcttaagccaaaaatgaatgctaactcctttgccagtaaaattctgggaaacagggactgaggccacacatcatttccagtcatctgtgtgtttttaaggccagccacttgtccctgttgaggcctggctatggaactaaatacagtgttggtcttgcctgtccttcaaaatcaacaacagattgtctctcggctccagggaggtgtcatttctatagaaattagaagctttctgatttctagatgaggttttacaattgtttcttacagtcatgtgcactaagtactctttttgtaagcagaggtggctggctctgcagccttaaggccattttttaagtcaccacgtctagaagtcacatgaactctgctcagcaataatctgttctcagaacagacttttcaacctgctgccggatttctccattcagctggatgatcctcaggactgaccagttagctggcaggttgtccagctttttattccagtcataataggtgacagtgttaaccgtgaaaacttgagaggcactctgccctcttccctataaaatcacacagcgtgattttacaaggtcccgtggcaccttgctcaggacctctgcccctagttagcaagactgcagcagttgctgttgcttattctgaaaggaatgtagaacttgacagcagccttctgagtctgggtcaggaagatgtcctttggaccaaagcagacttctttatacgcagctcagtttcccgggagtcgccacagatgtacccactagcccaggttgctgtgagtcagcggaagctcccgttatgccctttgctcctggtgggagagggaggagtgagctccctgggttccagtatttacttggtatacctgagtttgggggtacccttttttgtgacttttcaaaacagtgaattactgtcaccttgatggacaagtttcaataaaactttgtaaaaata

SEQ ID NO: 328811 - DNA, 1780 bp, Homo sapiens
cgcgcgtttagccggccgccgccacctccacgccctaggccgggccgacttacggagtcgccggaagcggaagtcgctgaggggtggtgaagcggttgggaaagtgtcggtttatcttcgcgccccttgcgttcttgccgcggcttgcctgggcaggtaaagcgcgattgcgagagctcggcaaccctgccgactcagccggaaccggctcccggcccgaggggcgtggtgtcctggtgctccgactccttccgcaggctccttgggacccgcggttccgggagtcccttgctcagggtccctttcctgcagtgaggcgccgtccgccttccctgtgtccccgcagacccccatcatgggcaataccagcagtgagcgcgccgcgctggagcggcatggtggccataagacgccccggagggacagctcggggggcaccaaggacggggacaggcccaagatcctgatggacagcaagcccatatgaagagctgggggcggatggtggcccaggagacagcacaccaccaggctccacacgtgcatgctttccccaagagggaatggactgtacattgctcatttcacactcttcagaagacatttcatacctgccctggtcctgcttgaaggtttgtccaggcagagcagctcctgcagcgcctcggtctgtgacagtcctcctagcacccccatggctttgagcctcggggactcatcaagtccaagaaaagagggaggggtggcagaggatctgcagccctggccccgcggtgcatgaggctgggtgcagttctaaacctacattctcgatttttcttaagccaaaaatgaatgctaactcctttgccagtaaaattctgggaaacagggactgaggccacacatcatttccagtcatctgtgtgtttttaaggccagccacttgtccctgttgaggcctggctatggaactaaatacagtgttggtcttgcctgtccttcaaaatcaacaacagattgtctctcggctccagggaggtgtcatttctatagaaattagaagctttctgatttctagatgaggttttacaattgtttcttacagtcatgtgcactaagtactctttttgtaagcagaggtggctggctctgcagccttaaggccattttttaagtcaccacgtctagaagtcacatgaactctgctcagcaataatctgttctcagaacagacttttcaacctgctgccggatttctccattcagctggatgatcctcaggactgaccagttagctggcaggttgtccagctttttattccagtcataataggtgacagtgttaaccgtgaaaacttgagaggcactctgccctcttccctataaaatcacacagcgtgattttacaaggtcccgtggcaccttgctcaggacctctgcccctagttagcaagactgcagcagttgctgttgcttattctgaaaggaatgtagaacttgacagcagccttctgagtctgggtcaggaagatgtcctttggaccaaagcagacttctttatacgcagctcagtttcccgggagtcgccacagatgtacccactagcccaggttgctgtgagtcagcggaagctcccgttatgccctttgctcctggtgggagagggaggagtgagctccctgggttccagtatttacttggtatacctgagtttgggggtacccttttttgtgacttttcaaaacagtgaattactgtcaccttgatggacaagtttcaataaaactttgtaaaaata

SEQ ID NO: 328812 - DNA, 1555 bp, Homo sapiens
cgcgcgtttagccggccgccgccacctccacgccctaggccgggccgacttacggagtcgccggaagcggaagtcgctgaggggtggtgaagcggttgggaaagtgtcggtttatcttcgcgccccttgcgttcttgccgcggcttgcctgggcaggtaaagcgcgattgcgagagctcggcaaccctgccgactcagccggaaccggctcccggcccgaggggcgtggtgtcctggtgctccgactccttccgcaggctccttgggacccgcggttccgggagtcccttgctcagggtccctttcctgcagtgaggcgccgtccgccttccctgtgtccccgcagacccccatcatgggcaataccagcagtgagcgcgccgcgctggagcggcatggtggccataagacgccccggagggacagctcggggggcaccaaggacggggacaggcccaagatcctgatggacagccccgaagacgccgacctcttccactccgaggaaatcaaggcaccagagaaggaggaattcctggcctggcagcatgatctggaagtgaatgataaagctcccgcccaggctcggccaacggtgtttcgatggacggggggcggaaaggaagtttacttatctgggtccttcaacaactggagtaaacttcccctcaccagaagccacaataactttgtagccatcctggatctgccggaaggagagcatcagtacaagttctttgtggatggtcagtggacgcacgacccttccgagcccatagtaaccagccagcttggcacagttaacaacatcattcaagtgaagaaaactgactttgaagtatttgatgctttaatggtggattcccaaaagtgctccgatgtgtctgagctgtccagttctcccccaggaccctaccatcaggagccctacgtctgcaaacccgaagagcgctttcgggcaccccctattctccccccacatctcctccaggtcatcctgaacaaggacacggggatttcctgtgatccagctttgcttcctgagcccaatcacgtcatgctgaaccacctatacgcgctgtctatcaaggatggagtgatggtgctcagcgcaacccaccggtacaagaagaagtacgtcaccaccttgttatacaagcccatatgaagagctgggggcggatggtggcccaggagacagcacaccaccaggctccacacgtgcatgctttccccaagagggaatggactgtacattgctcatttcacactcttcagaagacatttcatacctgccctggtcctgcttgaaggtttgtccaggcagagcagctcctgcagcgcctcggtctgtgacagtcctcctagcacccccatggctttgagcctcggggactcatcaagtccaagaaaagagggaggggtggcagaggatctgcagccctggccccgcggtgcatgaggctgggtgcagttctaaacctacattctcgatttttcttaagccaaaaatgaatgctaactcctttgccagtaaaattctgggaaacaggga

SEQ ID NO: 328813 - DNA, 1272 bp, Homo sapiens
cgcgcgtttagccggccgccgccacctccacgccctaggccgggccgacttacggagtcgccggaagcggaagtcgctgaggggtggtgaagcggttgggaaagtgtcggtttatcttcgcgccccttgcgttcttgccgcggcttgcctgggcagacccccatcatgggcaataccagcagtgagcgcgccgcgctggagcggcatggtggccataagacgccccggagggacagctcggggggcaccaaggacggggacaggcccaagatcctgatggacagccccgaagacgccgacctcttccactccgaggaaatcaaggcaccagagaaggaggaattcctggcctggcagcatgatctggaagtgaatgataaagctcccgcccaggctcggccaacggtgtttcgatggacggggggcggaaaggaagtttacttatctgggtccttcaacaactggagtaaacttcccctcaccagaagccacaataactttgtagccatcctggatctgccggaaggagagcatcagtacaagttctttgtggatggtcagtggacgcacgacccttccgagcccatagtaaccagccagcttggcacagttaacaacatcattcaagtgaagaaaactgactttgaagtatttgatgctttaatggtggattcccaaaagtgctccgatgtgtctgagctgtccagttctcccccaggaccctaccatcaggagccctacgtctgcaaacccgaagagcgctttcgggcaccccctattctccccccacatctcctccaggtcatcctgaacaaggacacggggatttcctgtgatccagctttgcttcctgagcccaatcacacacagcgtgattttacaaggtcccgtggcaccttgctcaggacctctgcccctagttagcaagactgcagcagttgctgttgcttattctgaaaggaatgtagaacttgacagcagccttctgagtctgggtcaggaagatgtcctttggaccaaagcagacttctttatacgcagctcagtttcccgggagtcgccacagatgtacccactagcccaggttgctgtgagtcagcggaagctcccgttatgccctttgctcctggtgggagagggaggagtgagctccctgggttccagtatttacttggtatacctgagtttgggggtacccttttttgtgacttttcaaaacagtgaattactgtcaccttgatggacaagtttcaataaaactttgtaaaaata

SEQ ID NO: 328814 - DNA, 340 bp, Homo sapiens
ctgaggcacagagcagtagggagaacacttaaaatctactgtcttagagattttcaagaatacattgttactaatagtcaccgtgttgtacagtggatctcttgaacgtattcctcctgtctaactgaaatgttgtattctttgaccagcatctccctacccccaccactcctagccgctggcaaccaccactctactctctacttctgtgagttcgactttcttggattccacataagtgacatcacatgggatttgtctttctgtgcctggctcatttcacttaatgtcctccaggtttatccatgctgtcacagatgacaagattccttttgtaagg

SEQ ID NO: 328815 - DNA, 511 bp, Homo sapiens
agagaatgtaaatctgcattgagggaacaagagacaaggaaaatgagatgatgacaacataagtaaggctgctcctagaatgcctgattttcaaagtaaagtcctgttaccatctcccaacagagctgtccagttctcccccaggaccctaccatcaggagccctacgtctgcaaacccgaagagcgctttcgggcaccccctattctccccccacatctcctccaggtcatcctgaacaaggacacggggatttccgtaagtatgtgggcatctgcccggaccatccgccgtgggtcatgttcagttgctttctttcctgtgtccacctcttgcaaagcagctggtgagcaagctcagtgtcaccccctagtgtgaactgtgccgttcacctctgctgtggggatgggctgataacaagaggttcccagtgtggacaccgctgcctcgtcttgcaaagcctttctgcactactcttccttgtccttcacgcctgcctcagtctaagccct

SEQ ID NO: 328816 - DNA, 300 bp, Homo sapiens
ggaaatggaatcgagatagcctcgcgcgtttagccggccgccgccacctccacgccctaggccgggccgacttacggagtcgccggaagcggaagtcgctgaggggtggtgaagcggttgggaaagtgtcggtttatcttcgcgccccttgcgttcttgccgcggcttgcctgggcaggtaaagcgcgattgcgagagctcggcaaccctgccgactcagccggaaccggctcccggcccgaggggcgtggtgtcctggtgctccgactccttccgcaggctccttgggacccgcggttc

SEQ ID NO: 328817 - DNA, 2420 bp, Homo sapiens
tcagtaagggagcatcagtaagcggagcggtcacgcctgctgggggtatgtcggttgggaaagtgtcggtttatcttcgcgccccttgcgttcttgccgcggcttgcctgggcaggtaaagcgcgattgcgagagctcggcaaccctgccgactcagccggaaccggctcccggcccgaggggcgtggtgtcctggtgctccgactccttccgcaggctccttgggacccgcggttccgggagtcccttgctcagggtccctttcctgcagtgaggcgccgtccgccttccctgtgtccccgcagacccccatcatgggcaataccagcagtgagcgcgccgcgctggagcggcatggtggccataagacgccccggagggacagctcggggggcaccaaggacggggacaggcccaagatcctgatggacagccccgaagacgccgacctcttccactccgaggaaatcaaggcaccagagaaggaggaattcctggcctggcagcatgatctggaagtgaatgataaagctcccgcccaggctcggccaacggtgtttcgatggacggggggcggaaaggaagtttacttatctgggtccttcaacaactggagtaaacttcccctcaccagaagccacaataactttgtagccatcctggatctgccggaaggagagcatcagtacaagttctttgtggatggtcagtggacgcacgacccttccgagcccatagtaaccagccagcttggcacagttaacaacatcattcaagtgaagaaaactgactttgaagtatttgatgctttaatggtggattcccaaaagtgctccgatgtgtctgagctgtccagttctcccccaggaccctaccatcaggagccctacgtctgcaaacccgaagagcgctttcgggcaccccctattctccccccacatctcctccaggtcatcctgaacaaggacacggggatttcctgtgatccagctttgcttcctgagcccaatcacgtcatgctgaaccacctatacgcgctgtctatcaaggatggagtgatggtgctcagcgcaacccaccggtacaagaagaagtacgtcaccaccttgttatacaagcccatatgaagagctgggggcggatggtggcccaggagacagcacaccaccaggctccacacgtgcatgctttccccaagagggaatggactgtacattgctcatttcacactcttcagaagacatttcatacctgccctggtcctgcttgaaggtttgtccaggcagagcagctcctgcagcgcctcggtctgtgacagtcctcctagcacccccatggctttgagcctcggggactcatcaagtccaagaaaagagggaggggtggcagaggatctgcagccctggccccgcggtgcatgaggctgggtgcagttctaaacctacattctcgatttttcttaagccaaaaatgaatgctaactcctttgccagtaaaattctgggaaacagggactgaggccacacatcatttccagtcatctgtgtgtttttaaggccagccacttgtccctgttgaggcctggctatggaactaaatacagtgttggtcttgcctgtccttcaaaatcaacaacagattgtctctcggctccagggaggtgtcatttctatagaaattagaagctttctgatttctagatgaggttttacaattgtttcttacagtcatgtgcactaagtactctttttgtaagcagaggtggctggctctgcagccttaaggccattttttaagtcaccacgtctagaagtcacatgaactctgctcagcaataatctgttctcagaacagacttttcaacctgctgccggatttctccattcagctggatgatcctcaggactgaccagttagctggcaggttgtccagctttttattccagtcataataggtgacagtgttaaccgtgaaaacttgagaggcactctgccctcttccctataaaatcacacagcgtgattttacaaggtcccgtggcaccttgctcaggacctctgcccctagttagcaagactgcagcagttgctgttgcttattctgaaaggaatgtagaacttgacagcagccttctgagtctgggtcaggaagatgtcctttggaccaaagcagacttctttatacgcagctcagtttcccgggagtcgccacagatgtacccactagcccaggttgctgtgagtcagcggaagctcccgttatgccctttgctcctggtgggagagggaggagtgagctccctgggttccagtatttacttggtatacctgagtttgggggtacccttttttgtgacttttcaaaacagtgaattactgtcaccttgatggacaagtttcaataaaactttgtaaaaata

SEQ ID NO: 328818 - DNA, 2635 bp, Homo sapiens
cgcgcgtttagccggccgccgccacctccacgccctaggccgggccgacttacggagtcgccggaagcggaagtcgctgaggggtggtgaagcggttgggaaagtgtcggtttatcttcgcgccccttgcgttcttgccgcggcttgcctgggcaggtaaagcgcgattgcgagagctcggcaaccctgccgactcagccggaaccggctcccggcccgaggggcgtggtgtcctggtgctccgactccttccgcaggctccttgggacccgcggttccgggagtcccttgctcagggtccctttcctgcagtgaggcgccgtccgccttccctgtgtccccgcagacccccatcatgggcaataccagcagtgagcgcgccgcgctggagcggcatggtggccataagacgccccggagggacagctcggggggcaccaaggacggggacaggcccaagatcctgatggacagccccgaagacgccgacctcttccactccgaggaaatcaaggacggcagaagagaatgagagcaagcaggggaaatgccagatgcttataaaaccatcagatctcatgagactcactcactgtcagagaacagcatggggaaaccgaccccatgatcgatacctccacctggtcctgcccttgacacgtggggattatggggattacaattcaaggcaccagagaaggaggaattcctggcctggcagcatgatctggaagtgaatgataaagctcccgcccaggctcggccaacggtgtttcgatggacggggggcggaaaggaagtttacttatctgggtccttcaacaactggagtaaacttcccctcaccagaagccacaataactttgtagccatcctggatctgccggaaggagagcatcagtacaagttctttgtggatggtcagtggacgcacgacccttccgagcccatagtaaccagccagcttggcacagttaacaacatcattcaagtgaagaaaactgactttgaagtatttgatgctttaatggtggattcccaaaagtgctccgatgtgtctgagctgtccagttctcccccaggaccctaccatcaggagccctacgtctgcaaacccgaagagcgctttcgggcaccccctattctccccccacatctcctccaggtcatcctgaacaaggacacggggatttcctgtgatccagctttgcttcctgagcccaatcacgtcatgctgaaccacctatacgcgctgtctatcaaggatggagtgatggtgctcagcgcaacccaccggtacaagaagaagtacgtcaccaccttgttatacaagcccatatgaagagctgggggcggatggtggcccaggagacagcacaccaccaggctccacacgtgcatgctttccccaagagggaatggactgtacattgctcatttcacactcttcagaagacatttcatacctgccctggtcctgcttgaaggtttgtccaggcagagcagctcctgcagcgcctcggtctgtgacagtcctcctagcacccccatggctttgagcctcggggactcatcaagtccaagaaaagagggaggggtggcagaggatctgcagccctggccccgcggtgcatgaggctgggtgcagttctaaacctacattctcgatttttcttaagccaaaaatgaatgctaactcctttgccagtaaaattctgggaaacagggactgaggccacacatcatttccagtcatctgtgtgtttttaaggccagccacttgtccctgttgaggcctggctatggaactaaatacagtgttggtcttgcctgtccttcaaaatcaacaacagattgtctctcggctccagggaggtgtcatttctatagaaattagaagctttctgatttctagatgaggttttacaattgtttcttacagtcatgtgcactaagtactctttttgtaagcagaggtggctggctctgcagccttaaggccattttttaagtcaccacgtctagaagtcacatgaactctgctcagcaataatctgttctcagaacagacttttcaacctgctgccggatttctccattcagctggatgatcctcaggactgaccagttagctggcaggttgtccagctttttattccagtcataataggtgacagtgttaaccgtgaaaacttgagaggcactctgccctcttccctataaaatcacacagcgtgattttacaaggtcccgtggcaccttgctcaggacctctgcccctagttagcaagactgcagcagttgctgttgcttattctgaaaggaatgtagaacttgacagcagccttctgagtctgggtcaggaagatgtcctttggaccaaagcagacttctttatacgcagctcagtttcccgggagtcgccacagatgtacccactagcccaggttgctgtgagtcagcggaagctcccgttatgccctttgctcctggtgggagagggaggagtgagctccctgggttccagtatttacttggtatacctgagtttgggggtacccttttttgtgacttttcaaaacagtgaattactgtcaccttgatggacaagtttcaataaaactttgtaaaaata

SEQ ID NO: 328819 - DNA, 2252 bp, Homo sapiens
cgcgcgtttagccggccgccgccacctccacgccctaggccgggccgacttacggagtcgccggaagcggaagtcgctgaggggtggtgaagcggttgggaaagtgtcggtttatcttcgcgccccttgcgttcttgccgcggcttgcctgggcaggtaaagcgcgattgcgagagctcggcaaccctgccgactcagccggaaccggctcccggcccgaggggcgtggtgtcctggtgctccgactccttccgcaggctccttgggacccgcggttccgggagtcccttgctcagggtccctttcctgcagtgaggcgccgtccgccttccctgtgtccccgcagacccccatcatgggcaataccagcagtgagcgcgccgcgctggagcggcatggtggccataagacgccccggagggacagctcggggggcaccaaggacggggacaggcccaagatcctgatggacagccccgaagacgccgacctcttccactccgaggaaatcaaggcaccagagaaggaggaattcctggcctggcagcatgatctggaagtgaatgataaagctcccgcccaggctcggccaacggtgtttcgatggacggggggcggaaaggaagtttacttatctgggtccttcaacaactggagtaaacttcccctcaccagaagagctgtccagttctcccccaggaccctaccatcaggagccctacgtctgcaaacccgaagagcgctttcgggcaccccctattctccccccacatctcctccaggtcatcctgaacaaggacacggggatttcctgtgatccagctttgcttcctgagcccaatcacgtcatgctgaaccacctatacgcgctgtctatcaaggatggagtgatggtgctcagcgcaacccaccggtacaagaagaagtacgtcaccaccttgttatacaagcccatatgaagagctgggggcggatggtggcccaggagacagcacaccaccaggctccacacgtgcatgctttccccaagagggaatggactgtacattgctcatttcacactcttcagaagacatttcatacctgccctggtcctgcttgaaggtttgtccaggcagagcagctcctgcagcgcctcggtctgtgacagtcctcctagcacccccatggctttgagcctcggggactcatcaagtccaagaaaagagggaggggtggcagaggatctgcagccctggccccgcggtgcatgaggctgggtgcagttctaaacctacattctcgatttttcttaagccaaaaatgaatgctaactcctttgccagtaaaattctgggaaacagggactgaggccacacatcatttccagtcatctgtgtgtttttaaggccagccacttgtccctgttgaggcctggctatggaactaaatacagtgttggtcttgcctgtccttcaaaatcaacaacagattgtctctcggctccagggaggtgtcatttctatagaaattagaagctttctgatttctagatgaggttttacaattgtttcttacagtcatgtgcactaagtactctttttgtaagcagaggtggctggctctgcagccttaaggccattttttaagtcaccacgtctagaagtcacatgaactctgctcagcaataatctgttctcagaacagacttttcaacctgctgccggatttctccattcagctggatgatcctcaggactgaccagttagctggcaggttgtccagctttttattccagtcataataggtgacagtgttaaccgtgaaaacttgagaggcactctgccctcttccctataaaatcacacagcgtgattttacaaggtcccgtggcaccttgctcaggacctctgcccctagttagcaagactgcagcagttgctgttgcttattctgaaaggaatgtagaacttgacagcagccttctgagtctgggtcaggaagatgtcctttggaccaaagcagacttctttatacgcagctcagtttcccgggagtcgccacagatgtacccactagcccaggttgctgtgagtcagcggaagctcccgttatgccctttgctcctggtgggagagggaggagtgagctccctgggttccagtatttacttggtatacctgagtttgggggtacccttttttgtgacttttcaaaacagtgaattactgtcaccttgatggacaagtttcaataaaactttgtaaaaata

SEQ ID NO: 328820 - DNA, 1462 bp, Homo sapiens
cgcgcgtttagccggccgccgccacctccacgccctaggccgggccgacttacggagtcgccggaagcggaagtcgctgaggggtggtgaagcggttgggaaagtgtcggtttatcttcgcgccccttgcgttcttgccgcggcttgcctgggcaggtaaagcgcgattgcgagagctcggcaaccctgccgactcagccggaaccggctcccggcccgaggggcgtggtgtcctggtgctccgactccttccgcaggctccttgggacccgcggttccgggagtcccttgctcagggtccctttcctgcagtgaggcgccgtccgccttccctgtgtccccgcagacccccatcatgggcaataccagcagtgagcgcgccgcgctggagcggcatggtggccataagacgccccggagggacagctcggggggcaccaaggacggggacaggcccaagatcctgatggacagccccgaagacgccgacctcttccactccgaggaaatcaaggcaccagagaaggaggaattcctggcctggcagcatgatctggaagtgaatgataaagctcccgcccaggctcggccaacggtgtttcgatggacggggggcggaaaggaagtttacttatctgggtccttcaacaactggagtaaacttcccctcaccagaagccacaataactttgtagccatcctggatctgccggaaggagagcatcagtacaagttctttgtggatggtcagtggacgcacgacccttccgagcccatagtaaccagccagcttggcacagttaacaacatcattcaagtgaagaaaactgactttgaagtatttgatgctttaatggtggattcccaaaagtgctccgatgtgtctgagctgtccagttctcccccaggaccctaccatcaggagccctacgtctgcaaacccgaagagcgctttcgggcaccccctattctccccccacatctcctccaggtcatcctgaacaaggacacggggatttcctgtgatccagctttgcttcctgagcccaatcacacacagcgtgattttacaaggtcccgtggcaccttgctcaggacctctgcccctagttagcaagactgcagcagttgctgttgcttattctgaaaggaatgtagaacttgacagcagccttctgagtctgggtcaggaagatgtcctttggaccaaagcagacttctttatacgcagctcagtttcccgggagtcgccacagatgtacccactagcccaggttgctgtgagtcagcggaagctcccgttatgccctttgctcctggtgggagagggaggagtgagctccctgggttccagtatttacttggtatacctgagtttgggggtacccttttttgtgacttttcaaaacagtgaattactgtcaccttgatggacaagtttcaataaaactttgtaaaaata

SEQ ID NO: 328821 - DNA, 1909 bp, Homo sapiens
gcactgcgggctccggcgctgcgggctggccgggcgctgcgggctgaccgggcgctccgggaactcggctcgggaacctcgtctgcggtgggcggggccggcccggagccccgccccggctcagtccctgaaacccaggcgcggaccggctgcagtcccagaagggagctgctgtctgcggaggaaactgcatcgacggacggccgcccagctacgggaggacctggagtggcactgggcgcccgacggaccatccccgggacccgcctgcccctcggcgccccgccccgccgggccgctccccgtcgggttccccagccacagccttacctacgggctcctgactccgcaaggcttccagaagatgctcgaaccaccggccggggcctcggggcagcagtgagggaggcgtccagccccccactcagctcttctcctcctgtgccaggggctccccgggggatgagcatggtggttttccctcggagccccctggctcgggacgtctgagaagatgccggtcatgaggctgttcccttgcttcctgcagctcctggccgggctggcgctgcctgctgtgcccccccagcagtgggccttgtctgctgggaacggctcgtcagaggtggaagtggtacccttccaggaagtgtggggccgcagctactgccgggcgctggagaggctggtggacgtcgtgtccgagtaccccagcgaggtggagcacatgttcagcccatcctgtgtctccctgctgcgctgcaccggctgctgcggcgatgagaatctgcactgtgtgccggtggagacggccaatgtcaccatgcagctcctaaagatccgttctggggaccggccctcctacgtggagctgacgttctctcagcacgttcgctgcgaatgccggcctctgcgggagaagatgaagccggaaaggaggagacccaagggcagggggaagaggaggagagagaagcagagacccacagactgccacctgtgcggcgatgctgttccccggaggtaacccaccccttggaggagagagaccccgcacccggctcgtgtatttattaccgtcacactcttcagtgactcctgctggtacctgccctctatttattagccaactgtttccctgctgaatgcctcgctcccttcaagacgaggggcagggaaggacaggaccctcaggaattcagtgccttcaacaacgtgagagaaagagagaagccagccacagacccctgggagcttccgctttgaaagaagcaagacacgtggcctcgtgaggggcaagctaggccccagaggccctggaggtctccaggggcctgcagaaggaaagaagggggccctgctacctgttcttgggcctcaggctctgcacagtcaagcagcccttgctttcggagctcctgtccaaaagtagggatgcggatcctgctggggccgccacggcctggctggtgggaaggccggcagcgggcggaggggatccagccacttccccctcttcttctgaagatcagaacattcagctctggagaacagtggttgcctgggggcttttgccactccttgtcccccgtgatctcccctcacactttgccatttgcttgtactgggacattgttctttccggccaaggtgccaccaccctgccccccctaagagacacatacagagtgggccccgggctggagaaagagctgcctggatgagaaacagctcagccagtggggatgaggtcaccaggggaggagcctgtgcgtcccagctgaaggcagtggcaggggagcaggttccccaagggccctggcacccccacaagctgtccctgcagggccatctgactgccaagccagattctcttgaataaagtattctagtgtggaaaaaaaaaata

SEQ ID NO: 328822 - DNA, 3544 bp, Homo sapiens
  misc_feature (1429)..(1429): n is a, c, g, or t
  misc_feature (1909)..(1909): n is a, c, g, or t
tgcgtgtcgttccccttctctgggatgggaggcagctgccacgggcctctgaaagaggtgcctggaggcaaagacattgcaagtccgaacttcgttctgggccaagctgtgtgcccacaggagcgggcaaacggggctgagaagcagcaagaaggacaagctcgggtaggagaaaaggggcagaagaagagtgacactgtggcttccttgatgttgcagcacccctctacggcccctcccaatccacagagcctctgaccagcaccagtcttgctgcctgtgctgggggcacttggaacattggttagcaggagcaacaggcctggcactgccagctaggttcagggaagagagaaatgggctgagctgctgctcctggtactactgggccatggatgaaggcaccagactagaagtccagagccctagccaggggcggcaggagggaagactaccacttattgtgtacctattctgtgcctagccccgcaggaggcacttgaatgtttctcatttagtcacatacatttattgagcacctaccacatgccaggcattgtcctgatgggatgcagtggtgagcaaggttcctgctctcataacaaccctgggaggtaggccctattgtcatccccattttacagatgagaaaatcaaggctcaatacagtttcatgatttatcacagctagtgagtgtgggaggagggattctgggccctgacctaactcgtaagccttcgtttttcaggctacctttcatggccatgaccacttttctaatagcccccaggcttagccttgcctcctgggcagggctatggctgccccttttgttggagtgttggagaccctgcctcaacttgtttccacccatccctccaagccagagcttagccatataacaagagctcaggtaatgaaccctcctgggtgcaatgctgggtggtgacccagagtcaccttctccatcccctttgccctgacagccactcttttggggcaggcagatgaagagactgaggttccaagagtgtctgtcacttgcccaatatggagaggtacaaccagacagtcccaagaggccctggtaccttgccctggctcccaagggaggaaccagctgagggtagcatgtcctggccccaaagctgactgctaccatgctgtcccatgtctctacccactgttcccagtgaagactgaggccctatcccctgccaggggccaggcaacagggacacctttcttcttgcttctgggccaacagccacagccctgggaggcagagcccagacatgcctggtgacttcagggctgatgctccctccttcctcccaccccgtcgctcactccccatgttgttccggatggagtggggctgtgccctgacaggcagccagtccgctgtctggccatcatctcctgtcnctgaggaaattcccagaatgcaccctggaaggaacggaaaaaagcagcaaagaaagtgagaaagaaaaagcaacagagaacagacagaaacaaccaaatttgatgccaagaggctgagaagtgcagaagcgggtggcaggggtccccaggaggttgatttgtccctctcgtggtggggtcaccagagcctggagtgggagtgaagccttgaggctctggccacctctcccttgccaactccatgctaccccctagtggcctcagtgtcagctgcaggaccaggactggggatgtcggaggggacctgtccgggcggcagggagccccacttattgctttcctaacgttcctctgcccctctctctgtctgtttccctaggcctctgcgggagaagatgaagccggaaaggaggagacccaagggcagggggaagaggaggagagagaagcagagacccacagactgccacctgtgagtgngcggggtcccagggatggcgaggaggctgggcccgaggggagccccgccttgccgccagggttaggttggggagggggagaggcaggactgaggccagtcttgggggcagaacgggagctgcacctcctcaagactctagggcccaggaagcatcagtggaccttggtttttgtcccggcttagccctaggtttccattgaccttcaacaaatcatttcacctttgtcagcctagcttttctctgtgtagaatgaggggcaggaggtccagcaaacattcagtcactctacaaacatttactgagcacttactgtgtgtcaggtacatctgtgagcaaacaaacaggattcctgcacattagtgtttaccttttagtgattaaaagtctgtcatcagctgagacgttatctggggccacttcctagtagccccggggaacatgtgcccctcgccactgtctcccaggagtatttttgcctgtgggtccccttgctgcttctaacccacttcgtaccttgtgggcagcagaatggagccccaggcctgagtgtggctgggagagaaggatgagaggagggaaaacccaaatctgtgagagtaaatagaaaaaataaaatatttcacgtgcacagtcaatcagtcactgaagagaggtggctctccttcaggggctaagcctcccccacgcacgtgactccaggaagtcatttcgtgctatggagtggagttgacccaagccctgaccccatgagccccactccatgaagacagggatcctggggactgcgccccctaggggtttatgctttcatctcttttctgggcccgcgcggcaatttgggaaacaagctggcagggaagtccatccaggcccgagttacccgccggcagccggaggcagaaagtgtcccgtggctcctgttcccaaggcagcagtcttcagacatttcactcgggaatctcctgaaagaatttcaaaagtggccgggcgcagtggctaacacctgtaatcccagcactttgggaggccgaagtgggtagatcacttgaggtcagaagttcgaggccagcctgaccaacacggtgaaaccacatctctactaaaaatacaaaattagctgggcgtgttggtgcatgcctgtaatctcagctacttgggaggctgaggcaggagaatcgcttgaacccgggaggcggaggttgcagtgagccgagatcacgccactgcactccagcctgggtgacagagcaagactccgtctcaaaaaaaaaaaagaattccaaaagcccatgtgctcccttgcccattcttaagttgacattgaacattttcatcagaattataagtcaagccaggctcagtacctcatgcctgtaattctagcactttgggaggccgaggcgagtggatcgcttgaggccaggagttcaagcctagccggggcaacatggcgaaacctcgtctctacaaaaaaaatacaaaaactagctggacgtggtgccatgtgcctatagtcccaactactcaggaggctgaggtggaatgatcacctgagcctgggaggtcaaggctgcagtgagccgagatagatccactgcacctcagcctgggtgacagagtaagaacctgtctc

SEQ ID NO: 328823 - DNA, 2280 bp, Homo sapiens
tgcgtgtcgttccccttctctgggatgggaggcagctgccacgggcctctgaaagaggtgcctggaggcaaagacattgcaagtccgaacttcgttctgggccaagctgtgtgcccacaggagcgggcaaacggggctgagaagcagcaagaaggacaagctcgggtaggagaaaaggggcagaagaagagtgacactgtggcttccttgatgttgcagcacccctctacggcccctcccaatccacagagcctctgaccagcaccagtcttgctgcctgtgctgggggcacttggaacattggttagcaggagcaacaggcctggcactgccagctaggttcagggaagagagaaatgggctgagctgctgctcctggtactactgggccatggatgaaggcaccagactagaagtccagagccctagccaggggcggcaggagggaagactaccacttattgtgtacctattctgtgcctagccccgcaggaggcacttgaatgtttctcatttagtcacatacatttattgagcacctaccacatgccaggcattgtcctgatgggatgcagtggtgagcaaggttcctgctctcataacaaccctgggaggtaggccctattgtcatccccattttacagatgagaaaatcaaggctcaatacagtttcatgatttatcacagctagtgagtgtgggaggagggattctgggccctgacctaactcgtaagccttcgtttttcaggctacctttcatggccatgaccacttttctaatagcccccaggcttagccttgcctcctgggcagggctatggctgccccttttgttggagtgttggagaccctgcctcaacttgtttccacccatccctccaagccagagcttagccatataacaagagctcagaatgcaccctggaaggaacggaaaaaagcagcaaagaaagtgagaaagaaaaagcaacagagaacagacagaaacaaccaaatttgatgccaagaggctgagaagtgcagaagcgggtggcaggggtccccaggaggttgatttgtccctctcgtggtggggtcaccagagcctggagtgggagtgaagccttgaggctctggccacctctcccttgccaactccatgctaccccctagtggcctcagtgtcagctgcaggaccaggactggggatgtcggaggggacctgtccgggcggcagggagccccacttattgctttcctaacgttcctctgcccctctctctgtctgtttccctaggcctctgcgggagaagatgaagccggaaaggaggagacccaagggcagggggaagaggaggagagagaagcagagacccacagactgccacctgtgcggcgatgctgttccccggaggtaacccaccccttggaggagagagaccccgcacccggctcgtgtatttattaccgtcacactcttcagtgactcctgctggtacctgccctctatttattagccaactgtttccctgctgaatgcctcgctcccttcaagacgaggggcagggaaggacaggaccctcaggaattcagtgccttcaacaacgtgagagaaagagagaagccagccacagacccctgggagcttccgctttgaaagaagcaagacacgtggcctcgtgaggggcaagctaggccccagaggccctggaggtctccaggggcctgcagaaggaaagaagggggccctgctacctgttcttgggcctcaggctctgcacagtcaagcagcccttgctttcggagctcctgtccaaaagtagggatgcggatcctgctggggccgccacggcctggctggtgggaaggccggcagcgggcggaggggatccagccacttccccctcttcttctgaagatcagaacattcagctctggagaacagtggttgcctgggggcttttgccactccttgtcccccgtgatctcccctcacactttgccatttgcttgtactgggacattgttctttccggccaaggtgccaccaccctgccccccctaagagacacatacagagtgggccccgggctggagaaagagctgcctggatgagaaacagctcagccagtggggatgaggtcaccaggggaggagcctgtgcgtcccagctgaaggcagtggcaggggagcaggttccccaagggccctggcacccccacaagctgtccctgcagggccatctgactgccaagccagattctcttgaataaagtattctagtgtggaaaaaaaaaata

SEQ ID NO: 328824 - DNA, 2191 bp, Homo sapiens
  misc_feature (809)..(809): n is a, c, g, or t
cgtaaatctaacgttcttcccacatcttcgccgtgtgcgaagactgtggatcatgcgaatactctagctagtgagtgtgggaggagggattctgggccctgacctaactcgtaagccttcgtttttcaggctacctttcatggccatgaccacttttctaatagcccccaggcttagccttgcctcctgggcagggctatggctgccccttttgttggagtgttggagaccctgcctcaacttgtttccacccatccctccaagccagagcttagccatataacaagagctcaggtaatgaaccctcctgggtgcaatgctgggtggtgacccagagtcaccttctccatcccctttgccctgacagccactcttttggggcaggcagatgaagagactgaggttccaagagtgtctgtcacttgcccaatatggagaggtacaaccagacagtcccaagaggccctggtaccttgccctggctcccaagggaggaaccagctgagggtagcatgtcctggccccaaagctgactgctaccatgctgtcccatgtctctacccactgttcccagtgaagactgaggccctatcccctgccaggggccaggcaacagggacacctttcttcttgcttctgggccaacagccacagccctgggaggcagagcccagacatgcctggtgacttcagggctgatgctccctccttcctcccaccccgtcgctcactccccatgttgttccggatggagtggggctgtgccctgacaggcagccagtccgctgtctggccatcatctcctgtcnctgaggaaattcccagaatgcaccctggaaggaacggaaaaaagcagcaaagaaagtgagaaagaaaaagcaacagagaacagacagaaacaaccaaatttgatgccaagaggctgagaagtgcagaagcgggtggcaggggtccccaggaggttgatttgtccctctcgtggtggggtcaccagagcctggagtgggagtgaagccttgaggctctggccacctctcccttgccaactccatgctaccccctagtggcctcagtgtcagctgcaggaccaggactggggatgtcggaggggacctgtccgggcggcagggagccccacttattgctttcctaacgttcctctgcccctctctctgtctgtttccctaggcctctgcgggagaagatgaagccggaaaggaggagacccaagggcagggggaagaggaggagagagaagcagagacccacagactgccacctgtgcggcgatgctgttccccggaggtaacccaccccttggaggagagagaccccgcacccggctcgtgtatttattaccgtcacactcttcagtgactcctgctggtacctgccctctatttattagccaactgtttccctgctgaatgcctcgctcccttcaagacgaggggcagggaaggacaggaccctcaggaattcagtgccttcaacaacgtgagagaaagagagaagccagccacagacccctgggagcttccgctttgaaagaagcaagacacgtggcctcgtgaggggcaagctaggccccagaggccctggaggtctccaggggcctgcagaaggaaagaagggggccctgctacctgttcttgggcctcaggctctgcacagtcaagcagcccttgctttcggagctcctgtccaaaagtagggatgcggatcctgctggggccgccacggcctggctggtgggaaggccggcagcgggcggaggggatccagccacttccccctcttcttctgaagatcagaacattcagctctggagaacagtggttgcctgggggcttttgccactccttgtcccccgtgatctcccctcacactttgccatttgcttgtactgggacattgttctttccggccaaggtgccaccaccctgccccccctaagagacacatacagagtgggccccgggctggagaaagagctgcctggatgagaaacagctcagccagtggggatgaggtcaccaggggaggagcctgtgcgtcccagctgaaggcagtggcaggggagcaggttccccaagggccctggcacccccacaagctgtccctgcagggccatctgactgccaagccagattctcttgaataaagtattctagtgtggaaaaaaaaaata

SEQ ID NO: 328825 - DNA, 1820 bp, Homo sapiens
gcactgcgggctccggcgctgcgggctggccgggcgctgcgggctgaccgggcgctccgggaactcggctcgggaacctcgtctgcggtgggcggggccggcccggagccccgccccggctcagtccctgaaacccaggcgcggaccggctgcagtcccagaagggagctgctgtctgcggaggaaactgcatcgacggacggccgcccagctacgggaggacctggagtggcactgggcgcccgacggaccatccccgggacccgcctgcccctcggcgccccgccccgccgggccgctccccgtcgggttccccagccacagccttacctacgggctcctgactccgcaaggcttccagaagatgctcgaaccaccggccggggcctcggggcagcagtgagggaggcgtccagccccccactcagctcttctcctcctgtgccaggggctccccgggggatgagcatggtggttttccctcggagccccctggctcgggacgtctgagaagatgccggtcatgaggctgttcccttgcttcctgcagctcctggccgggctggcgctgcctgctgtgcccccccagcagtgggccttgtctgctgggaacggctcgtcagaggtggaagtggtacccttccaggaagtgtggggccgcagctactgccgggcgctggagaggctggtggacgtcgtgtccgagtaccccagcgaggtggagcacatgttcagcccatcctgtgtctccctgctgcgctgcaccggctgctgcggcgatgagaatctgcactgtgtgccggtggagacggccaatgtcaccatgcagctcctaaagatccgttctggggaccggccctcctacgtggagctgacgttctctcagcacgttcgctgcgaatgccggcctctgcgggagaagatgaagccggaaaggaggagacccaagggcagggggaagaggaggagagagaagcagagacccacagactgccacctgtgcggcgatgctgttccccggaggtaacccaccccttggaggagagagaccccgcacccggctcgtgtatttattaccgtcacactcttcagtgactcctgctggtacctgccctctatttattagccaactgtttccctgctgaatgcctcgctcccttcaagacgaggggcagggaaggacaggaccctcaggaattcagtgccttcaacaacgtgagagaaagagagaagccagccacagacccctgggagcttccgctttgaaagaagcaagacacgtggcctcgtgaggggcaagctaggccccagaggccctggaggtctccaggggcctgcagaaggaaagaagggggccctgctacctgttcttgggcctcaggctctgcacagtcaagcagcccttgctttcggagcacttccccctcttcttctgaagatcagaacattcagctctggagaacagtggttgcctgggggcttttgccactccttgtcccccgtgatctcccctcacactttgccatttgcttgtactgggacattgttctttccggccaaggtgccaccaccctgccccccctaagagacacatacagagtgggccccgggctggagaaagagctgcctggatgagaaacagctcagccagtggggatgaggtcaccaggggaggagcctgtgcgtcccagctgaaggcagtggcaggggagcaggttccccaagggccctggcacccccacaagctgtccctgcagggccatctgactgccaagccagattctcttgaataaagtattctagtgtggaaaaaaaaaata

SEQ ID NO: 328826 - DNA, 1531 bp, Homo sapiens
ctttgggatgcagcaggccaagggtctccaaaagcttctagcctcccatccttttccaaatgaggaaaactgaggccagagaggggtgggacctaacctacccagggtccagtgagtttttagtggtactcaggctgctctgagacagggcagagcatgtgcagcaagtgggaaggaacccagaggggcccctaccttcttgccatcacacttggcccaagagtgcagagctccaaggtacccccagctcacctctgcacttttctgtccatagcagtgggccttgtctgctgggaacggctcgtcagaggtggaagtggtacccttccaggaagtgtggggccgcagctactgccgggcgctggagaggctggtggacgtcgtgtccgagtaccccagcgaggtggagcacatgttcagcccatcctgtgtctccctgctgcgctgcaccggctgctgcggcgatgagaatctgcactgtgtgccggtggagacggccaatgtcaccatgcagctcctaaagatccgttctggggaccggccctcctacgtggagctgacgttctctcagcacgttcgctgcgaatgccggcctctgcgggagaagatgaagccggaaaggtgcggcgatgctgttccccggaggtaacccaccccttggaggagagagaccccgcacccggctcgtgtatttattaccgtcacactcttcagtgactcctgctggtacctgccctctatttattagccaactgtttccctgctgaatgcctcgctcccttcaagacgaggggcagggaaggacaggaccctcaggaattcagtgccttcaacaacgtgagagaaagagagaagccagccacagacccctgggagcttccgctttgaaagaagcaagacacgtggcctcgtgaggggcaagctaggccccagaggccctggaggtctccaggggcctgcagaaggaaagaagggggccctgctacctgttcttgggcctcaggctctgcacagtcaagcagcccttgctttcggagctcctgtccaaaagtagggatgcggatcctgctggggccgccacggcctggctggtgggaaggccggcagcgggcggaggggatccagccacttccccctcttcttctgaagatcagaacattcagctctggagaacagtggttgcctgggggcttttgccactccttgtcccccgtgatctcccctcacactttgccatttgcttgtactgggacattgttctttccggccaaggtgccaccaccctgccccccctaagagacacatacagagtgggccccgggctggagaaagagctgcctggatgagaaacagctcagccagtggggatgaggtcaccaggggaggagcctgtgcgtcccagctgaaggcagtggcaggggagcaggttccccaagggccctggcacccccacaagctgtccctgcagggccatctgactgccaagccagattctcttgaataaagtattctagtgtggaaaaaaaaaata

SEQ ID NO: 328827 - DNA, 1846 bp, Homo sapiens
gcactgcgggctccggcgctgcgggctggccgggcgctgcgggctgaccgggcgctccgggaactcggctcgggaacctcgtctgcggtgggcggggccggcccggagccccgccccggctcagtccctgaaacccaggcgcggaccggctgcagtcccagaagggagctgctgtctgcggaggaaactgcatcgacggacggccgcccagctacgggaggacctggagtggcactgggcgcccgacggaccatccccgggacccgcctgcccctcggcgccccgccccgccgggccgctccccgtcgggttccccagccacagccttacctacgggctcctgactccgcaaggcttccagaagatgctcgaaccaccggccggggcctcggggcagcagtgagggaggcgtccagccccccactcagctcttctcctcctgtgccaggggctccccgggggatgagcatggtggttttccctcggagccccctggctcgggacgtctgagaagatgccggtcatgaggctgttcccttgcttcctgcagctcctggccgggctggcgctgcctgctgtgcccccccagcagtgggccttgtctgctgggaacggctcgtcagaggtggaagtggtacccttccaggaagtgtggggccgcagctactgccgggcgctggagaggctggtggacgtcgtgtccgagtaccccagcgaggtggagcacatgttcagcccatcctgtgtctccctgctgcgctgcaccggctgctgcggcgatgagaatctgcactgtgtgccggtggagacggccaatgtcaccatgcagctcctaaagatccgttctggggaccggccctcctacgtggagctgacgttctctcagcacgttcgctgcgaatgccggcctctgcgggagaagatgaagccggaaaggtgcggcgatgctgttccccggaggtaacccaccccttggaggagagagaccccgcacccggctcgtgtatttattaccgtcacactcttcagtgactcctgctggtacctgccctctatttattagccaactgtttccctgctgaatgcctcgctcccttcaagacgaggggcagggaaggacaggaccctcaggaattcagtgccttcaacaacgtgagagaaagagagaagccagccacagacccctgggagcttccgctttgaaagaagcaagacacgtggcctcgtgaggggcaagctaggccccagaggccctggaggtctccaggggcctgcagaaggaaagaagggggccctgctacctgttcttgggcctcaggctctgcacagtcaagcagcccttgctttcggagctcctgtccaaaagtagggatgcggatcctgctggggccgccacggcctggctggtgggaaggccggcagcgggcggaggggatccagccacttccccctcttcttctgaagatcagaacattcagctctggagaacagtggttgcctgggggcttttgccactccttgtcccccgtgatctcccctcacactttgccatttgcttgtactgggacattgttctttccggccaaggtgccaccaccctgccccccctaagagacacatacagagtgggccccgggctggagaaagagctgcctggatgagaaacagctcagccagtggggatgaggtcaccaggggaggagcctgtgcgtcccagctgaaggcagtggcaggggagcaggttccccaagggccctggcacccccacaagctgtccctgcagggccatctgactgccaagccagattctcttgaataaagtattctagtgtggaaaaaaaaaata

SEQ ID NO: 328828 - DNA, 925 bp, Homo sapiens
gcactgcgggctccggcgctgcgggctggccgggcgctgcgggctgaccgggcgctccgggaactcggctcgggaacctcgtctgcggtgggcggggccggcccggagccccgccccggctcagtccctgaaacccaggcgcggaccggctgcagtcccagaagggagctgctgtctgcggaggaaactgcatcgacggacggccgcccagctacgggaggacctggagtggcactgggcgcccgacggaccatccccgggacccgcctgcccctcggcgccccgccccgccgggccgctccccgtcgggttccccagccacagccttacctacgggctcctgactccgcaaggcttccagaagatgctcgaaccaccggccggggcctcggggcagcagtgagggaggcgtccagccccccactcagctcttctcctcctgtgccaggggctccccgggggatgagcatggtggttttccctcggagccccctggctcgggacgtctgagaagatgccggtcatgaggctgttcccttgcttcctgcagctcctggccgggctggcgctgcctgctgtgcccccccagcagtgggccttgtctgctgggaacggctcgtcagaggtggaagtggtacccttccaggaagtgtggggccgcagctactgccgggcgctggagaggctggtggacgtcgtgtccgagtaccccagcgaggtggagcacatgttcagcccatcctgtgtctccctgctgcgctgcaccggctgctgcggcgatgagaatctgcactgtgtgccggtggagacggccaatgtcaccatgcagctctctaaagatccattctggggacacggccctcaatacgtggtgacgttctctcacacacgttcgcaactacagcgaggctacggtaccgactga

SEQ ID NO: 328829 - DNA, 2811 bp, Homo sapiens
  misc_feature (1429)..(1429): n is a, c, g, or t
tgcgtgtcgttccccttctctgggatgggaggcagctgccacgggcctctgaaagaggtgcctggaggcaaagacattgcaagtccgaacttcgttctgggccaagctgtgtgcccacaggagcgggcaaacggggctgagaagcagcaagaaggacaagctcgggtaggagaaaaggggcagaagaagagtgacactgtggcttccttgatgttgcagcacccctctacggcccctcccaatccacagagcctctgaccagcaccagtcttgctgcctgtgctgggggcacttggaacattggttagcaggagcaacaggcctggcactgccagctaggttcagggaagagagaaatgggctgagctgctgctcctggtactactgggccatggatgaaggcaccagactagaagtccagagccctagccaggggcggcaggagggaagactaccacttattgtgtacctattctgtgcctagccccgcaggaggcacttgaatgtttctcatttagtcacatacatttattgagcacctaccacatgccaggcattgtcctgatgggatgcagtggtgagcaaggttcctgctctcataacaaccctgggaggtaggccctattgtcatccccattttacagatgagaaaatcaaggctcaatacagtttcatgatttatcacagctagtgagtgtgggaggagggattctgggccctgacctaactcgtaagccttcgtttttcaggctacctttcatggccatgaccacttttctaatagcccccaggcttagccttgcctcctgggcagggctatggctgccccttttgttggagtgttggagaccctgcctcaacttgtttccacccatccctccaagccagagcttagccatataacaagagctcaggtaatgaaccctcctgggtgcaatgctgggtggtgacccagagtcaccttctccatcccctttgccctgacagccactcttttggggcaggcagatgaagagactgaggttccaagagtgtctgtcacttgcccaatatggagaggtacaaccagacagtcccaagaggccctggtaccttgccctggctcccaagggaggaaccagctgagggtagcatgtcctggccccaaagctgactgctaccatgctgtcccatgtctctacccactgttcccagtgaagactgaggccctatcccctgccaggggccaggcaacagggacacctttcttcttgcttctgggccaacagccacagccctgggaggcagagcccagacatgcctggtgacttcagggctgatgctccctccttcctcccaccccgtcgctcactccccatgttgttccggatggagtggggctgtgccctgacaggcagccagtccgctgtctggccatcatctcctgtcnctgaggaaattcccagaatgcaccctggaaggaacggaaaaaagcagcaaagaaagtgagaaagaaaaagcaacagagaacagacagaaacaaccaaatttgatgccaagaggctgagaagtgcagaagcgggtggcaggggtccccaggaggttgatttgtccctctcgtggtggggtcaccagagcctggagtgggagtgaagccttgaggctctggccacctctcccttgccaactccatgctaccccctagtggcctcagtgtcagctgcaggaccaggactggggatgtcggaggggacctgtccgggcggcagggagccccacttattgctttcctaacgttcctctgcccctctctctgtctgtttccctaggcctctgcgggagaagatgaagccggaaaggaggagacccaagggcagggggaagaggaggagagagaagcagagacccacagactgccacctgtgcggcgatgctgttccccggaggtaacccaccccttggaggagagagaccccgcacccggctcgtgtatttattaccgtcacactcttcagtgactcctgctggtacctgccctctatttattagccaactgtttccctgctgaatgcctcgctcccttcaagacgaggggcagggaaggacaggaccctcaggaattcagtgccttcaacaacgtgagagaaagagagaagccagccacagacccctgggagcttccgctttgaaagaagcaagacacgtggcctcgtgaggggcaagctaggccccagaggccctggaggtctccaggggcctgcagaaggaaagaagggggccctgctacctgttcttgggcctcaggctctgcacagtcaagcagcccttgctttcggagctcctgtccaaaagtagggatgcggatcctgctggggccgccacggcctggctggtgggaaggccggcagcgggcggaggggatccagccacttccccctcttcttctgaagatcagaacattcagctctggagaacagtggttgcctgggggcttttgccactccttgtcccccgtgatctcccctcacactttgccatttgcttgtactgggacattgttctttccggccaaggtgccaccaccctgccccccctaagagacacatacagagtgggccccgggctggagaaagagctgcctggatgagaaacagctcagccagtggggatgaggtcaccaggggaggagcctgtgcgtcccagctgaaggcagtggcaggggagcaggttccccaagggccctggcacccccacaagctgtccctgcagggccatctgactgccaagccagattctcttgaataaagtattctagtgtggaaaaaaaaaata

SEQ ID NO: 328830 - DNA, 636 bp, Homo sapiens
agctcattgaaagccaaaagcaatgttaagtgtacaagctttaaataacttacaaagttaatgtcatgaatgtaagtgctatctgaaacccatcactcagtgtttgctgcagccccaagctgtgataaaacaccactcataaatttatattaaaactctgctcgatagcaattatttaccaacaaagatttatcgactgcattagagactgggggtcttaaccaggcaaatcagtctttgttttgagtctcagggaccaaatggtgccggcctctgctcgcacagggatcatcgttacacagagggaacatttcatggctaagctcctacggggtgatggagcaacagtctcaacgcaggcggcgccatgtcaagatcagattatcaacaggcacgtccacaaccactcgcctttgctctgcgggcagcattcctcatcggctttaacagacaccgggggccgtgcatgcatctgactgaatgtaaaggacggtgcacgtgtgatttcgcaatgagatcaaatgaatcctcttgctgctgcaggagcactaatagtttcctaattaccaagttttttaaaaaaagttttttctggcttaaaacatccatgcagttcaaaatgttctacttctaaaa

SEQ ID NO: 328831 - DNA, 369 bp, Homo sapiens
tatgtcacagtcacagtcctccctggaattcaagtcagagtacaaggttacatgatttgtgattattgcaaacctcaatttccacatttgtgcaatggactgtcagtactgactgcttaggaattttttttcgaacctcttgtgattgaggctcagctattgaaatgccaagcccaggtcagagattagtcagaggaaatgctaaattagagcccatttgacttttatgtatgacactaattaaacaataacaaaaaaactccaagaactctagatagtttgtccaggggacacctataggttatgataacatcaaaaccagaaccaaaaaagcccaaatatttttcctgggaacttttttttcctcac

SEQ ID NO: 328832 - DNA, 389 bp, Homo sapiens
tcacatgactggctcatgggaacaaccttcccgagttcttgcttgttcaaaacggcctggacccttcaccatgaaggtcggtttggctgaagatgccagtcttaactccacttccttcccccagtgctttttagggccctaccgggcactgtctggagggtgggtgtgtgtgcagaagtctggcgatgtctgagttctcgatctcatcagtgactcactgtcattgccgtgtcttggtgttggccgttacagggcattttcgccaatactccgggtgcttgttgaacgtgttgctggacttcagggaagttgtctgtttgaaacgtgtgtttggttctgtttggttttctgcttctgggctgcagtgtggcgtgaggtggctttctctg

SEQ ID NO: 328833 - DNA, 387 bp, Homo sapiens
ttgagtactcaggacaatttaagtaatttaaatctatttggtggtttctcagaaggttaataacttgccttctgactaatgcattctacattgtgatttaaaaataagagctcttgagagtctactttgtgataggagcacttcttaataagtctgtcctgtcccaacttaaatacatttttcatctccaaaaaagttttatgccccatgttggccaacacattacgtgattattttggtttatacatcagtatatgttgttgttgttttgagacagtgtctcaccttgtcacccaggaatgcaatagcacaaacatggctcactgcagccttgacctcccaggctcaagttatcctcttgcatcagccctgcaagtagctgggact

SEQ ID NO: 328834 - DNA, 611 bp, Homo sapiens
gaatccacccccatgacccaaacaccttccacaaagccctacccgcaacattggtgatcacatttcaacatgagttttggaggggacaaaacgtttaaactatatcacaaccttaacaaaattttaagaaattaaaaccagctatttgtaaataattatcattataaccaaatgaaatttacctgaaactatatcattgatttaaaatctaaaatcaatcattacattcaccacattatcagaataagtaaaaaacaaaaacaaaatacaaaaaagactgtaactatcaaaaaatcaaaaatatttaaaaattgatcatttttggtgtcatttgattgaatcatttgatacgattcaatactcattgagttaagaactctcagcaacctagaaacagaagagaacttcctcattctataaaaggcatctgagaaaaatctacagaggacatcatacttaatgatgaaacatttagtgacttcttactgggatcaagaacagatgtttactattacttctgctattcaacattgcactgtgtaatctaactagtgcaatagtgcaaaacatagatcaaagaaacaaatattgaaaagataggagtgaaatta

SEQ ID NO: 328835 - DNA, 286 bp, Homo sapiens
tccctatgctacttttatcctttctgccttcaaagtagcaatgaccataagactgaagagaagaacatggttaggtcccagttttctacacacgttcaccctgggataaaacagaaaatctaaaactctgcataatccaaatgcaccattgtagaaaagatccttgtgttgtcagacaggtgcctaatttggtttctactcccttccctattcacctttggtaaatgagctcaaactgggcaccctggccaaaatgctggtctgcgaggaaggagggaggatgaga

SEQ ID NO: 328836 - DNA, 512 bp, Homo sapiens
acagggacaacctgctgcagaccgggtaggagggaggcaggggcctcttcccctctccttcctggcctggccccacacccaccagtgttggtttcactctgtggctacgattcttcctgggtgccctttccattgcacaactcctctaggctctacgaacagaacttctccccgcccccaagcctcttagggtgagacatgttgtcggtctgccattgttgctggtccctaaatagcagcaccctttgaaggatccttgaaccatgaccacaccgcaacaaagagtccttcatcaaactcgcttccaaatcccctcccaagaacaccttcagtttcctgcaagaaccctgactgctgaagccggattttgactaagcttctaccttgtaaaccgtgactgtgggattggggtcgaggcgcaatcagaggttgtataaggcactagatcaaggctgcctgtctgtcaggagtgtctgctttattcagtagtaaatgtgaattgtttttcattc

SEQ ID NO: 328837 - DNA, 691 bp, Homo sapiens
acagggacaacctgctgcagaccgggtaggagggaggcaggggcctcttcccctctccttcctggcctggccccacacccaccagtgttggtttcactctgtggctacgattcttcctgggtgccctttccattgcacaactcctctaggctctacgaacagaacttctccccgcccccaagcctcttagggtgagacatgttgtcggtctgccattgttgctggtccctaaatagcagcaccctttgaaggatccttgaaccatgaccacaccgcaacaaagagtccttcatcaaactcgcttccaaatcccctcccaagaacaccttcagtttcctgcaagaaccctgactgctgaagccggattttgactaagcttctaccttgtaaaccgtgactgtgggattggggtcgaggcgcaatcagaggttgtataaggcactagatcaaggctgcctgtctgtcaggagtgtctgctttattcagcatggtggatcagcacccaagaggagtcactactgactggccccacatcttcctgtgcccaggaggagtttgtggggcagggcctctgattatttttgaaaatctagtttaatttggtcattacattggtgtcaaaaatggaataagttaaatttcattgtacttcttaataaaaaaatttgaatggcataagtgccaatctcaa

SEQ ID NO: 328838 - DNA, 188 bp, Homo sapiens
gaagaatcaacagcagcagcttggaaaatgataacctgcaattccaagaatgctagtgtttactgcatcggtctaattttgtacaaaagacatataggaaacacctgatctgtgtcaagctctgtgtccagctttggaggaatgaagaactagacaagattctgactctccagtgctcctggtggaag

SEQ ID NO: 328839 - DNA, 372 bp, Homo sapiens
gctggagtgcagtggcaacgatcatagctcacttcagcctcgacctcccaggctcagccattcctcccattccagcctcctgagtagctgggaacacaggcatatgccaccatgcctggctatgttttttcatttttagtagaggcaatgtctcactatgttatccaggcttgttattttcttttatttgtagcctataaataataacttacggcctattcatggcttcctcttactaattattttttaaaacatcaataggctatcatggtagggaaattattgttcatttcttattcctttctttaaaggtctatgtaatttaaaaaattatttttagcaactgcatcttttgaaagttggccaaggaag

SEQ ID NO: 328840 - DNA, 481 bp, Homo sapiens
  misc_feature (131)..(131): n is a, c, g, or t
ccccaccccccttggggcccccccccccgggaaaaccaaaaaacctctttcccccccttttggaaaaaccaaaaacccccccttttttttgatggtttggaaaaacaacggggcttgggtccttccccctnggaaagaaaacaaggcggctgggccttgattccctggcactctgaccttttgagcacagcagagtggggacagtttcgagcagagctgcaggtgggagctgggccagtaggcaccagtcaaggagtgggcagggtaccagcagcccccgcattagcttcctagggctactgtaacatgtgaccacagactgaatggcttaaaccacagaaacctactgtctccatcgttggattatctttgaacccccttgtgtggatcattttgagccgcctggccttgctcagtttattttaataaaagtatttctgggagggaaaaattctgggaacttgacagggtcctgaggagg

SEQ ID NO: 328841 - DNA, 1501 bp, Homo sapiens
tctcctgcgtggtcccgggagaggaaggggcctggcccggggcggggtgtggagagaggaggaagctcctgccggctgagcgggcctggaggaagtgagcagcggggctcctgcctcccggcctggtccccgaagaccccagaagaacccggaacttgcttccattcggaatccagggaccaccctttgcactcagtaggcctttgttttcctgcgtggaaagcggttgggcttgggaggcgatggagccggagttcttgtacgacctgctgcagctccccaagggggtggagcccccagcggaggaggagctctcaaaaggaggaaagaagaaatacctgccacccacttcccggaaggaccccaaatttgaagaactgcagaaggtgttgatggagtggatcaatgccactcttctccccgagcacattgtggtccgcagcctggaggaggacatgttcgacgggctcatcctacaccacctattccagaggctggcggcgctcaagctggaagcagaggacatcgccctgacagccacaagccagaagcacaagctcacagtggtgctggaggccgtgaaccggagtctgcagctggaggagtggcaggccaagtggagcgtggagagcatcttcaacaaggacctgttgtctaccctgcacctccttgtggccctggccaagcgcttccagcccgacctctccctcccaaccaacgtccaggtggaggtcatcactatcgagagcaccaaaagtggtctgaagtcagagaagttggtggaacagctcactgaatacagcacagacaaggacgagcctccaaaggacgtctttgatgaattatttaagctggctccggagaaagtgaacgcagtgaaagaggccatcgtgaactttgtcaaccagaagctggaccgcctgggcctgtctgtgcagaatctggacacccagtttgcagatggggtcatcttactcttgctgattggacaacttgaaggcttcttcctgcacttaaaggaattctacctcactcccaactctcctgcagaaatgctgcacaacgtcaccctggcgctggagctgctgaaggacgagggcctgctcagctgccctgtcagccctgaagatatcgtgaacaaggatgccaagagcacactgcgggtgctctatggtctgttctgcaagcacacgcagaaggcacacagggacaggacgccccatggagccccgaattgaccctcactgcctccaaagcccagagcctgcctgtcagcccagctggagggcccgaggctgcagggtgtcctcccacagtcccgctgtttcctgtgcattcgtgacccgcttccctcccaccctgtctcctgtctccatcgttggattatctttgaacccccttgtgtggatcattttgagccgcctggccttgctcagtttattttaataaaagtatttctgggagggaaaaattctgggaacttgacagggtcctgaggagg

SEQ ID NO: 328842 - DNA, 1700 bp, Homo sapiens
cgggaaattccccgggggaatgttgctgaagatcctcttccctttccttcgataaccccctggctttatgcctttgcatacgctgttttctccacctgccacgttctcaccccttcttcttccactgcaaactcctatgcagccgtcaaggccccattctcctctggaaagccttcccgatccccttggcaacaaccaccaccaatatttattcactgagcccactttgtgccaagcattgttctagacacggagaggaggaagctcctgccggctgagcgggcctggaggaagtgagcagcggggctcctgcctcccggcctggtccccgaagaccccagaagaacccggaacttgcttccattcggaatccagggaccaccctttgcactcagtaggcctttgttttcctgcgtggaaagcggttgggcttgggaggcgatggagccggagttcttgtacgacctgctgcagctccccaagggggtggagcccccagcggaggaggagctctcaaaaggaggaaagaagaaatacctgccacccacttcccggaaggaccccaaatttgaagaactgcagaaggtgttgatggagtggatcaatgccactcttctccccgagcacattgtggtccgcagcctggaggaggacatgttcgacgggctcatcctacaccacctattccagaggctggcggcgctcaagctggaagcagaggacatcgccctgacagccacaagccagaagcacaagctcacagtggtgctggaggccgtgaaccggagtctgcagctggaggagtggcaggccaagtggagcgtggagagcatcttcaacaaggacctgttgtctaccctgcacctccttgtggccctggccaagcgcttccagcccgacctctccctcccaaccaacgtccaggtggaggtcatcactatcgagagcaccaaaagtggtctgaagtcagagaagttggtggaacagctcactgaatacagcacagacaaggacgagcctccaaaggacgtctttgatgaattatttaagctggctccggagaaagtgaacgcagtgaaagaggccatcgtgaactttgtcaaccagaagctggaccgcctgggcctgtctgtgcagaatctggacacccagtttgcagatggggtcatcttactcttgctgattggacaacttgaaggcttcttcctgcacttaaaggaattctacctcactcccaactctcctgcagaaatgctgcacaacgtcaccctggcgctggagctgctgaaggacgagggcctgctcagctgccctgtcagccctgaagatatcgtgaacaaggatgccaagagcacactgcgggtgctctatggtctgttctgcaagcacacgcagaaggcacacagggacaggacgccccatggagccccgaattgaccctcactgcctccaaagcccagagcctgcctgtcagcccagctggagggcccgaggctgcagggtgtcctcccacagtcccgctgtttcctgtgcattcgtgacccgcttccctcccaccctgtctcctgtctccatcgttggattatctttgaacccccttgtgtggatcattttgagccgcctggccttgctcagtttattttaataaaagtatttctgggagggaaaaattctgggaacttgacagggtcctgaggagg

SEQ ID NO: 328843 - DNA, 1521 bp, Homo sapiens
tctcctgcgtggtcccgggagaggaaggggcctggcccggggcggggtgtggagagaggaggaagctcctgccggctgagcgggcctggaggaagtgagcagcggggctcctgcctcccggcctggtccccgaagaccccagaagaacccggaacttgcttccattcggaatccagggaccaccctttgcactcagtaggcctttgttttcctgcgtggaaagcggttgggcttgggaggcgatggagccggagttcttgtacgacctgctgcagctccccaagggggtggagcccccagcggaggaggagctctcaaaaggaggaaagaagaaatacctgccacccacttcccggaaggaccccaaatttgaagaactgcagaaggtgttgatggagtggatcaatgccactcttctccccgagcacattgtggtccgcagcctggaggaggacatgttcgacgggctcatcctacaccacctattccagaggctggcggcgctcaagctggaagcagaggacatcgccctgacagccacaagccagaagcacaagctcacagtggtgctggaggccgtgaaccggagtctgcagctggaggagtggcaggccaagtggagcgtggagagcatcttcaacaaggacctgttgtctaccctgcacctccttgtggccctggccaagcgcttccagcccgacctctccctcccaaccaacgtccaggtggaggtcatcactatcgagagcaccaaaagtggtctgaagtcagagaagttggtggaacagctcactgaatacagcacagacaaggacgagcctccaaaggacgtctttgatgaattatttaagctggctccggagaaagtgaacgcagtgaaagaggccatcgtgaactttgtcaaccagaagctggaccgcctgggcctgtctgtgcagaatctggacacccagtttgcagatggggtcatcttactcttgctgattggacaacttgaaggcttcttcctgcacttaaaggaattctacctcactcccaactctcctgcagaaatgctgcacaacgtcaccctggcgctggagctgctgaaggacgagggcctgctcagctgccctgtcagccctgaagtcggtcactgccacccaggcctgactggctgccctgccctcctttggcccgcagatatcgtgaacaaggatgccaagagcacactgcgggtgctctatggtctgttctgcaagcacacgcagaaggcacacagggacaggacgccccatggagccccgaattgaccctcactgcctccaaagcccagagcctgcctgtcagcccagctggagggcccgaggctgcagggtgtcctcccacagtcccgctgtttcctgtgcattcgtgacccgcttccctcccaccctgtctcctgtctccatcgttggattatctttgaacccccttgtgtggatcattttgagccgcctggccttgctcagtttattttaataaaagtatttctgggaggga

SEQ ID NO: 328844 - DNA, 1580 bp, Homo sapiens
cgggaaattccccgggggaatgttgctgaagatcctcttccctttccttcgataaccccctggctttatgcctttgcatacgctgttttctccacctgccacgttctcaccccttcttcttccactgcaaactcctatgcagccgtcaaggccccattctcctctggaaagccttcccgatccccttggcaacaaccaccaccaatatttattcactgagcccactttgtgccaagcattgttctagacacggagggaccaccctttgcactcagtaggcctttgttttcctgcgtggaaagcggttgggcttgggaggcgatggagccggagttcttgtacgacctgctgcagctccccaagggggtggagcccccagcggaggaggagctctcaaaaggaggaaagaagaaatacctgccacccacttcccggaaggaccccaaatttgaagaactgcagaaggtgttgatggagtggatcaatgccactcttctccccgagcacattgtggtccgcagcctggaggaggacatgttcgacgggctcatcctacaccacctattccagaggctggcggcgctcaagctggaagcagaggacatcgccctgacagccacaagccagaagcacaagctcacagtggtgctggaggccgtgaaccggagtctgcagctggaggagtggcaggccaagtggagcgtggagagcatcttcaacaaggacctgttgtctaccctgcacctccttgtggccctggccaagcgcttccagcccgacctctccctcccaaccaacgtccaggtggaggtcatcactatcgagagcaccaaaagtggtctgaagtcagagaagttggtggaacagctcactgaatacagcacagacaaggacgagcctccaaaggacgtctttgatgaattatttaagctggctccggagaaagtgaacgcagtgaaagaggccatcgtgaactttgtcaaccagaagctggaccgcctgggcctgtctgtgcagaatctggacacccagtttgcagatggggtcatcttactcttgctgattggacaacttgaaggcttcttcctgcacttaaaggaattctacctcactcccaactctcctgcagaaatgctgcacaacgtcaccctggcgctggagctgctgaaggacgagggcctgctcagctgccctgtcagccctgaagatatcgtgaacaaggatgccaagagcacactgcgggtgctctatggtctgttctgcaagcacacgcagaaggcacacagggacaggacgccccatggagccccgaattgaccctcactgcctccaaagcccagagcctgcctgtcagcccagctggagggcccgaggctgcagggtgtcctcccacagtcccgctgtttcctgtgcattcgtgacccgcttccctcccaccctgtctcctgtctccatcgttggattatctttgaacccccttgtgtggatcattttgagccgcctggccttgctcagtttattttaataaaagtatttctgggagggaaaaattctgggaacttgacagggtcctgaggagg

SEQ ID NO: 328845 - DNA, 1805 bp, Homo sapiens
cgggaaattccccgggggaatgttgctgaagatcctcttccctttccttcgataaccccctggctttatgcctttgcatacgctgttttctccacctgccacgttctcaccccttcttcttccactgcaaactcctatgcagccgtcaaggccccattctcctctggaaagccttcccgatccccttggcaacaaccaccaccaatatttattcactgagcccactttgtgccaagcattgttctagacacggagaggaggaagctcctgccggctgagcgggcctggaggaagtgagcagcggggctcctgcctcccggcctggtccccgaagaccccagaagaacccggaacttgcttccattcggaatccagggaccaccctttgcactcagtaggcctttgttttcctgcgtggaaagcggttgggcttgggaggcgatggagccggagttcttgtacgacctgctgcagctccccaagggggtggagcccccagcggaggaggagctctcaaaaggaggaaagaagaaatacctgccacccacttcccggaaggaccccaaatttgaagaactgcagaaggtgttgatggagtggatcaatgccactcttctccccgagcacattgtggtccgcagcctggaggaggacatgttcgacgggctcatcctacaccacctattccagaggctggcggcgctcaagctggaagcagaggacatcgccctgacagccacaagccagaagcacaagctcacagtggtgctggaggccgtgaaccggagtctgcagctggaggagtggcaggccaagtggagcgtggagagcatcttcaacaaggacctgttgtctaccctgcacctccttgtggccctggccaagcgcttccagcccgacctctccctcccaaccaacgtccaggtggaggtcatcactatcgaggtagcagcctgggccccagggatttgtaagcagaagctgagcctcttgggcccccattgccgtaccctgcatgggtggagctggctggggcggggctgacccaggagcaccaaaagtggtctgaagtcagagaagttggtggaacagctcactgaatacagcacagacaaggacgagcctccaaaggacgtctttgatgaattatttaagctggctccggagaaagtgaacgcagtgaaagaggccatcgtgaactttgtcaaccagaagctggaccgcctgggcctgtctgtgcagaatctggacacccagtttgcagatggggtcatcttactcttgctgattggacaacttgaaggcttcttcctgcacttaaaggaattctacctcactcccaactctcctgcagaaatgctgcacaacgtcaccctggcgctggagctgctgaaggacgagggcctgctcagctgccctgtcagccctgaagatatcgtgaacaaggatgccaagagcacactgcgggtgctctatggtctgttctgcaagcacacgcagaaggcacacagggacaggacgccccatggagccccgaattgaccctcactgcctccaaagcccagagcctgcctgtcagcccagctggagggcccgaggctgcagggtgtcctcccacagtcccgctgtttcctgtgcattcgtgacccgcttccctcccaccctgtctcctgtctccatcgttggattatctttgaacccccttgtgtggatcattttgagccgcctggccttgctcagtttattttaataaaagtatttctgggagggaaaaattctgggaacttgacagggtcctgaggagg

SEQ ID NO: 328846 - DNA, 1020 bp, Homo sapiens
tatctgccactgactcaggcaactgcaaacgtcctcatgctcaactgtgggggaaaggggccctttccctcacagtgagaactctggggatgccttggggagtgaggcagacacatccccaacctcaagactcctggggaagaaagacaattaagccagaggctgtcctgaggagggatgatacagagcaaacggatcactggggcttctttgggccccagagttttctggattatttaatttcttccccctttatttttcttagagcaccaaaagtggtctgaagtcagagaagttggtggaacagctcactgaatacagcacagacaaggacgagcctccaaaggacgtctttgatgaattatttaagctggctccggagaaagtgaacgcagtgaaagaggccatcgtgaactttgtcaaccagaagctggaccgcctgggcctgtctgtgcagaatctggacacccagtttgcagatggggtcatcttactcttgctgattggacaacttgaaggcttcttcctgcacttaaaggaattctacctcactcccaactctcctgcagaaatgctgcacaacgtcaccctggcgctggagctgctgaaggacgagggcctgctcagctgccctgtcagccctgaagatatcgtgaacaaggatgccaagagcacactgcgggtgctctatggtctgttctgcaagcacacgcagaaggcacacagggacaggacgccccatggagccccgaattgaccctcactgcctccaaagcccagagcctgcctgtcagcccagctggagggcccgaggctgcagggtgtcctcccacagtcccgctgtttcctgtgcattcgtgacccgcttccctcccaccctgtctcctgtctccatcgttggattatctttgaacccccttgtgtggatcattttgagccgcctggccttgctcagtttattttaataaaagtatttctgggagggaaaaattctgggaacttgacagggtcctgaggagg

SEQ ID NO: 328847 - DNA, 793 bp, Homo sapiens
cgctagcggcattaagtgaacgggcctagctccgaaaccgcacaaaacgcgctgctaggagctgcattctgcaaagggaaactgggctcggggaacaaacctcagccccgatgcggcttggctcaggagcgcagcgcctgcctggttctcacctggcgttcacttaatgccgctaggcgctagcggcattaagtgaacgcagtgaaagaggccatcgtgaactttgtcaaccagaagctggaccgcctgggcctgtctgtgcagaatctggacacccagtttgcagatggggtcatcttactcttgctgattggacaacttgaaggcttcttcctgcacttaaaggaattctacctcactcccaactctcctgcagaaatgctgcacaacgtcaccctggcgctggagctgctgaaggacgagggcctgctcagctgccctgtcagccctgaagatatcgtgaacaaggatgccaagagcacactgcgggtgctctatggtctgttctgcaagcacacgcagaaggcacacagggacaggacgccccatggagccccgaattgaccctcactgcctccaaagcccagagcctgcctgtcagcccagctggagggcccgaggctgcagggtgtcctcccacagtcccgctgtttcctgtgcattcgtgacccgcttccctcccaccctgtctcctgtctccatcgttggattatctttgaacccccttgtgtggatcattttgagccgcctggccttgctcagtttattttaataaaagtatttctgggaggga

SEQ ID NO: 328848 - DNA, 1071 bp, Homo sapiens
cgggaaattccccgggggaatgttgctgaagatcctcttccctttccttcgataaccccctggctttatgcctttgcatacgctgttttctccacctgccacgttctcaccccttcttcttccactgcaaactcctatgcagccgtcaaggccccattctcctctggaaagccttcccgatccccttggcaacaaccaccaccaatatttattcactgagcccactttgtgccaagcattgttctagacacggagggaccaccctttgcactcagtaggcctttgttttcctgcgtggaaagcggttgggcttgggaggcgatggagccggagttcttgtacgacctgctgcagctccccaagggggtggagcccccagcggaggaggagctctcaaaagagctagaacctcttctctccagatgagagacggtgtggattacgatggtgaatactgattgctctcatcctgtgagccttctgagtgcccctactgcaccagcacctcttaccaatagcaactcatttattctcaagggcgggcatcagtgcctgctttatacagatgaggaaactgaggcacaaggggtgacgtgccacagtaacaggaaactcttagcaagtggtggacctgggttctgagcccaaggagggtggtcccagaactgaggttccacacggaccacgcagcgatgcccaccatggagtgatactttgcagggtgtggggctcctgacgtgctcccctcacacgtgtgggtccctttcaaaagtggggtgagcataggatggagcaattcaacgactataggtcgccctttcagtaaagctctgtgtcatgagccctttggggggttggcggccacagttcctgcaacctcccttctaggagatggctcaaaagaaggacatgggcaggtacccagagctgtcaccctctctgtgttctctgaaagaaacaaatgaacaacagcttgcaaggaagcagcgagatgtcccagtggggaagggctttaggtgaactcattggaatttatgtaaccacaaaaacataaatgtgctgacaaagaaa

SEQ ID NO: 328849 - DNA, 466 bp, Homo sapiens
ccctcgtccttcagcagctccagcgccagggtgacgttgtgcagcatttctgcaggagagttgggagtgaggtagaattcctttaagtgcaggaagaagccttcaagttgtcctgtcagccctgaagatatcgtgaacaaggatgccaagagcacactgcgggtgctctatggtctgttctgcaagcacacgcagaaggcacacagggacaggacgccccatggagccccgaattgaccctcactgcctccaaagcccagagcctgcctgtcagcccagctggagggcccgaggctgcagggtgtcctcccacagtcccgctgtttcctgtgcattcgtgacccgcttccctcccaccctgtctcctgtctccatcgttggattatctttgaacccccttgtgtggatcattttgagccgcctggccttgctcagtttattttaataaaagtatttctgggaggga

SEQ ID NO: 328850 - DNA, 909 bp, Homo sapiens
cgggaaattccccgggggaatgttgctgaagatcctcttccctttccttcgataaccccctggctttatgcctttgcatacgctgttttctccacctgccacgttctcaccccttcttcttccactgcaaactcctatgcagccgtcaaggccccattctcctctggaaagccttcccgatccccttggcaacaaccaccaccaatatttattcactgagcccactttgtgccaagcattgttctagacacggagggaccaccctttgcactcagtaggcctttgttttcctgcgtggaaagcggttgggcttgggaggcgatggagccggagttcttgtacgacctgctgcagctccccaagggggtggagcccccagcggaggaggagctctcaaaaggtgtgtgcccacgcaggtctgagggtggagggtgaaggtctgtgtggcaagagtgagcctggccatgcctgggacttgcagcaccttcccagctgtcagctgagcgcccaattctgctcacccctgcctccaccttctgctttatgcttgacctaactcctcctcctgggaccttctacagagctagaacctcttctctccagatgagagacggtgtggattacgatggagcaattcaacgactataggtcgccctttcagtaaagctctgtgtcatgagccctttggggggttggcggccacagttcctgcaacctcccttctaggagatggctcaaaagaaggacatgggcaggtacccagagctgtcaccctctctgtgttctctgaaagaaacaaatgaacaacagcttgcaaggaagcagcgagatgtcccagtggggaagggctttaggtgaactcattggaatttatgtaaccacaaaaacataaatgtgctgacaaagaaa

SEQ ID NO: 328851 - DNA, 1294 bp, Homo sapiens
cgggaaattccccgggggaatgttgctgaagatcctcttccctttccttcgataaccccctggctttatgcctttgcatacgctgttttctccacctgccacgttctcaccccttcttcttccactgcaaactcctatgcagccgtcaaggccccattctcctctggaaagccttcccgatccccttggcaacaaccaccaccaatatttattcactgagcccactttgtgccaagcattgttctagacacggagaggaggaagctcctgccggctgagcgggcctggaggaagtgagcagcggggctcctgcctcccggcctggtccccgaagaccccagaagaacccggaacttgcttccattcggaatccagggaccaccctttgcactcagtaggcctttgttttcctgcgtggaaagcggttgggcttgggaggcgatggagccggagttcttgtacgacctgctgcagctccccaagggggtggagcccccagcggaggaggagctctcaaaaggaggaaagaagaaatacctgccacccacttcccggaaggaccccaaatttgaagaactgcagaagcacacctggcccagccctgtgactggcactggggacaccatctgtggtcttgcccggaagacctggtgaggtgctgacatgtcgtctcagctcggtctcctccacaggctgatccagagacaaggatttggatgccagtagttgagttgggaggttatcccaggggtcatgggagggaaggggccaacacatggttagtgatggagctggtcatggttctgggggctcaagcctgctgggtaccctggagccagcatagagcaagttcagtgcattcctgcccaaggggcgatggagctggggtatttatacaccaccacccctgccccgacaacctcctgacaacctttagtgaacagctgctccctgagaaagggctgggccttgattccctggcactctgaccttttgagcacagcagagtggggacagtttcgagcagagctgcaggtgggagctgggccagtaggcaccagtcaaggagtgggcagggtaccagcagcccccgcattagcttcctagggctactgtaacatgtgaccacagactgaatggcttaaaccacagaaacctactgtctccatcgttggattatctttgaacccccttgtgtggatcattttgagccgcctggccttgctcagtttattttaataaaagtatttctgggagggaaaaattctgggaacttgacagggtcctgaggagg

SEQ ID NO: 328852 - DNA, 1505 bp, Homo sapiens
gatctctccttctcgaaccctgctatgcctttgcatacgctgttttctccacctgccacgttctcaccccttcttcttccactgcaaactcctatgcagccgtcaaggccccattctcctctggaaagccttcccgatccccttggcaacaaccaccaccaatatttattcactgagcccactttgtgccaagcattgttctagacacggagggaccaccctttgcactcagtaggcctttgttttcctgcgtggaaagcggttgggcttgggaggcgatggagccggagttcttgtacgacctgctgcagctccccaagggggtggagcccccagcggaggaggagctctcaaaaggaggaaagaagaaatacctgccacccacttcccggaaggaccccaaatttgaagaactgcagaaggtgttgatggagtggatcaatgccactcttctccccgagcacattgtggtccgcagcctggaggaggacatgttcgacgggctcatcctacaccacctattccagaggctggcggcgctcaagctggaagcagaggacatcgccctgacagccacaagccagaagcacaagctcacagtggtgctggaggccgtgaaccggagtctgcagctggaggagtggcaggccaagtggagcgtggagagcatcttcaacaaggacctgttgtctaccctgcacctccttgtggccctggccaagcgcttccagcccgacctctccctcccaaccaacgtccaggtggaggtcatcactatcgagagcaccaaaagtggtctgaagtcagagaagttggtggaacagctcactgaatacagcacagacaaggacgagcctccaaagaggacgtctttgatgaattatttaagctggctccggagaaagtgaacgcagtgaaagaggccatcgtgaactttgtcaaccagaagctggaccgcctgggcctgtctgtgcagaatctggacacccagtttgcagatggggtcatcttactcttgctgattggacaacttgaaggcttcttcctgcacttaaaggaattctacctcactcccaactctcctgcagaaatgctgcacaacgtcaccctggcgctggagctgctgaaggacgagggcctgctcagctgccctgtcagccctgaagatatcgtgaacaaggatgccaagagcacactgcgggtgctctatggtctgttctgcaagcacacgcagaaggcacacagggacaggacgccccatggagccccgaattgaccctcactgcctccaaagcccagagcctgcctgtcagcccagctggagggcccgaggctgcagggtgtcctcccacagtcccgctgtttcctgtgcattcgtgacccgcttccctcccaccctgtctcctgtctccatcgttggattatctttgaacccccttgtgtggatcattttgagccgcctggccttgctcagtttattttaataaaagtatttctgggaggga

SEQ ID NO: 328853 - DNA, 1467 bp, Homo sapiens
tctcctgcgtggtcccgggagaggaaggggcctggcccggggcggggtgtggagagaggaggaagctcctgccggctgagcgggcctggaggaagtgagcagcggggctcctgcctcccggcctggtccccgaagaccccagaagaacccggaacttgcttccattcggaatccagggaccaccctttgcactcagtaggcctttgttttcctgcgtggaaagcggttgggcttgggaggcgatggagccggagttcttgtacgacctgctgcagctccccaagggggtggagcccccagcggaggaggagctctcaaaaggaggaaagaagaaatacctgccacccacttcccggaaggaccccaaatttgaagaactgcagaaggtgttgatggagtggatcaatgccactcttctccccgagcacattgtggtccgcagcctggaggaggacatgttcgacgggctcatcctacaccacctattccagaggctggcggcgctcaagctggaagcagaggacatcgccctgacagccacaagccagaagcacaagctcacagtggtgctggaggccgtgaaccggagtctgcagctggaggagtggcaggccaagtggagcgtggagagcatcttcaacaaggacctgttgtctaccctgcacctccttgtggccctggccaagcgcttccagcccgacctctccctcccaaccaacgtccaggtggaggtcatcactatcgagagcaccaaaagtggtctgaagtcagagaagttggtggaacagctcactgaatacagcacagacaaggacgagcctccaaaggacgtctttgatgaattatttaagctggctccggagaaagtgaacgcagtgaaagaggccatcgtgaactttgtcaaccagaagctggaccgcctgggcctgtctgtgcagaatctggacacccagtttgcagatggggtcatcttactcttgctgattggacaacttgaaggcttcttcctgcacttaaaggaattctacctcactcccaactctcctgcagaaatgctgcacaacgtcaccctggcgctggagctgctgaaggacgagggcctgctcagctgccctgtcagccctgaagatatcgtgaacaaggatgccaagagcacactgcgggtgctctatggtctgttctgcaagcacacgcagaaggcacacagggacaggacgccccatggagccccgaattgaccctcactgcctccaaagcccagagcctgcctgtcagcccagctggagggcccgaggctgcagggtgtcctcccacagtcccgctgtttcctgtgcattcgtgacccgcttccctcccaccctgtctcctgtctccatcgttggattatctttgaacccccttgtgtggatcattttgagccgcctggccttgctcagtttattttaataaaagtatttctgggaggga

SEQ ID NO: 328854 - DNA, 1657 bp, Homo sapiens
gatctctccttctcgaaccctgctatgcctttgcatacgctgttttctccacctgccacgttctcaccccttcttcttccactgcaaactcctatgcagccgtcaaggccccattctcctctggaaagccttcccgatccccttggcaacaaccaccaccaatatttattcactgagcccactttgtgccaagcattgttctagacacggagaggaggaagctcctgccggctgagcgggcctggaggaagtgagcagcggggctcctgcctcccggcctggtccccgaagaccccagaagaacccggaacttgcttccattcggaatccagggaccaccctttgcactcagtaggcctttgttttcctgcgtggaaagcggttgggcttgggaggcgatggagccggagttcttgtacgacctgctgcagctccccaagggggtggagcccccagcggaggaggagctctcaaaaggaggaaagaagaaatacctgccacccacttcccggaaggaccccaaatttgaagaactgcagaaggtgttgatggagtggatcaatgccactcttctccccgagcacattgtggtccgcagcctggaggaggacatgttcgacgggctcatcctacaccacctattccagaggctggcggcgctcaagctggaagcagaggacatcgccctgacagccacaagccagaagcacaagctcacagtggtgctggaggccgtgaaccggagtctgcagctggaggagtggcaggccaagtggagcgtggagagcatcttcaacaaggacctgttgtctaccctgcacctccttgtggccctggccaagcgcttccagcccgacctctccctcccaaccaacgtccaggtggaggtcatcactatcgagagcaccaaaagtggtctgaagtcagagaagttggtggaacagctcactgaatacagcacagacaaggacgagcctccaaaggacgtctttgatgaattatttaagctggctccggagaaagtgaacgcagtgaaagaggccatcgtgaactttgtcaaccagaagctggaccgcctgggcctgtctgtgcagaatctggacacccagtttgcagatggggtcatcttactcttgctgattggacaacttgaaggcttcttcctgcacttaaaggaattctacctcactcccaactctcctgcagaaatgctgcacaacgtcaccctggcgctggagctgctgaaggacgagggcctgctcagctgccctgtcagccctgaagatatcgtgaacaaggatgccaagagcacactgcgggtgctctatggtctgttctgcaagcacacgcagaaggcacacagggacaggacgccccatggagccccgaattgaccctcactgcctccaaagcccagagcctgcctgtcagcccagctggagggcccgaggctgcagggtgtcctcccacagtcccgctgtttcctgtgcattcgtgacccgcttccctcccaccctgtctcctgtctccatcgttggattatctttgaacccccttgtgtggatcattttgagccgcctggccttgctcagtttattttaataaaagtatttctgggagggaaaaattctgggaacttgacagggtcctgaggagg

SEQ ID NO: 328855 - DNA, 1720 bp, Homo sapiens
cgggaaattccccgggggaatgttgctgaagatcctcttccctttccttcgataaccccctggctttatgcctttgcatacgctgttttctccacctgccacgttctcaccccttcttcttccactgcaaactcctatgcagccgtcaaggccccattctcctctggaaagccttcccgatccccttggcaacaaccaccaccaatatttattcactgagcccactttgtgccaagcattgttctagacacggagggaccaccctttgcactcagtaggcctttgttttcctgcgtggaaagcggttgggcttgggaggcgatggagccggagttcttgtacgacctgctgcagctccccaagggggtggagcccccagcggaggaggagctctcaaaaggaggaaagaagaaatacctgccacccacttcccggaaggaccccaaatttgaagaactgcagaagcacacctggcccagccctgtgactggcactggggacaccatctgtggtcttgcccggaagacctggtgaggtgctgacatgtcgtctcagctcggtctcctccacaggctgatccagagacaaggatttggatgccagtagtgttgatggagtggatcaatgccactcttctccccgagcacattgtggtccgcagcctggaggaggacatgttcgacgggctcatcctacaccacctattccagaggctggcggcgctcaagctggaagcagaggacatcgccctgacagccacaagccagaagcacaagctcacagtggtgctggaggccgtgaaccggagtctgcagctggaggagtggcaggccaagtggagcgtggagagcatcttcaacaaggacctgttgtctaccctgcacctccttgtggccctggccaagcgcttccagcccgacctctccctcccaaccaacgtccaggtggaggtcatcactatcgagagcaccaaaagtggtctgaagtcagagaagttggtggaacagctcactgaatacagcacagacaaggacgagcctccaaaggacgtctttgatgaattatttaagctggctccggagaaagtgaacgcagtgaaagaggccatcgtgaactttgtcaaccagaagctggaccgcctgggcctgtctgtgcagaatctggacacccagtttgcagatggggtcatcttactcttgctgattggacaacttgaaggcttcttcctgcacttaaaggaattctacctcactcccaactctcctgcagaaatgctgcacaacgtcaccctggcgctggagctgctgaaggacgagggcctgctcagctgccctgtcagccctgaagatatcgtgaacaaggatgccaagagcacactgcgggtgctctatggtctgttctgcaagcacacgcagaaggcacacagggacaggacgccccatggagccccgaattgaccctcactgcctccaaagcccagagcctgcctgtcagcccagctggagggcccgaggctgcagggtgtcctcccacagtcccgctgtttcctgtgcattcgtgacccgcttccctcccaccctgtctcctgtctccatcgttggattatctttgaacccccttgtgtggatcattttgagccgcctggccttgctcagtttattttaataaaagtatttctgggagggaaaaattctgggaacttgacagggtcctgaggagg

SEQ ID NO: 328856 - DNA, 1207 bp, Homo sapiens
tctcctgcgtggtcccgggagaggaaggggcctggcccggggcggggtgtggagagaggaggaagctcctgccggctgagcgggcctggaggaagtgagcagcggggctcctgcctcccggcctggtccccgaagaccccagaagaacccggaacttgcttccattcggaatccagggaccaccctttgcactcagtaggcctttgttttcctgcgtggaaagcggttgggcttgggaggcgatggagccggagttcttgtacgacctgctgcagctccccaagggggtggagcccccagcggaggaggagctctcaaaaggaggaaagaagaaatacctgccacccacttcccggaaggaccccaaatttgaagaactgcagaaggtgttgatggagtggatcaatgccactcttctccccgagcacattgtggtccgcagcctggaggaggacatgttcgacgggctcatcctacaccacctattccagaggctggcggcgctcaagctggaagcagaggacatcgccctgacagccacaagccagaagcacaagctcacagtggtgctggaggccgtgaaccggagtctgcagctggaggagtggcaggccaagtggagcgtggagagcatcttcaacaaggacctgttgtctaccctgcacctccttgtggccctggccaagcgcttccagcccgacctctccctcccaaccaacgtccaggtggaggtcatcactatcgagagcaccaaaagtggtctgaagtcagagaagttggtggaacagctcactgaatacagcacagacaaggacgagcctccaaagaggacgtctttgatgaattatttaagctggctccggagaaagtgaacgcagtgaaagaggccatcgtgaactttgtcaaccagaagctggaccgcctgggcctgtctgtgcagaatctggacacccagtttgcagatggggtcatcttactcttgctgattggacaacttgaaggcttcttcctgcacttaaaggaattctacctcactcccaactctcctgcagaaatgctgcacaacgtcaccctggcgctggagctgctgaaggacgagggcctgctcagctgccctgtcagccctgaagtagatagtcgtgaatcaaggatgccaagatgctacactgctgctgcatcttatgtcgtgttccgcagtcaatatcgc

SEQ ID NO: 328857 - DNA, 752 bp, Homo sapiens
cacgttcgctgtcagggtccatgtgctgagttcgctagcggagttttttccctctcatttgaggacgcagaacgcgcctaataggcgcgttctgcgttcactttctccaaaggacgtctttgatgaattatttaagctggctccggagaaagtgaacgcagtgaaagaggccatcgtgaactttgtcaaccagaagctggaccgcctgggcctgtctgtgcagaatctggacacccagtttgcagatggggtcatcttactcttgctgattggacaacttgaaggcttcttcctgcacttaaaggaattctacctcactcccaactctcctgcagaaatgctgcacaacgtcaccctggcgctggagctgctgaaggacgagggcctgctcagctgccctgtcagccctgaagatatcgtgaacaaggatgccaagagcacactgcgggtgctctatggtctgttctgcaagcacacgcagaaggcacacagggacaggacgccccatggagccccgaattgaccctcactgcctccaaagcccagagcctgcctgtcagcccagctggagggcccgaggctgcagggtgtcctcccacagtcccgctgtttcctgtgcattcgtgacccgcttccctcccaccctgtctcctgtctccatcgttggattatctttgaacccccttgtgtggatcattttgagccgcctggccttgctcagtttattttaataaaagtatttctgggaggga

SEQ ID NO: 328858 - DNA, 905 bp, Homo sapiens
ccgagagtccaggtaggagtctcctgcgtggtcccgggagaggaaggggcctggcccggggcggggtgtggaggtgggaggacggcggtgcgggatggagggtggaggccaggctgacagggtgctggtggtgggttgcgggggtcgaccccaggctctggcctatgtagctgccattttggaggtgaacagcctgcggggaaactggcatggtttggggaaggcggggagagggggagaaatgaaagcattgagtttaagtggcctgcagaaccccgggggcccaggcggcacggcgggcgctggggctccgggcagagctttctggaggtttgtggcagcttcactttcacggcatccacccccctcgggccctgccgcagagaggaggaagctcctgccggctgagcgggcctggaggaagtgagcagcggggctcctgcctcccggcctggtccccgaagaccccagaagaacccggaacttgcttccattcggaatccagggaccaccctttgcactcagtaggcctttgttttcctgcgtggaaagcggttgggtgagttctggcatcggggccaccatacttgagtgttgggggtcacggagggaggggcccagacaccacctgggaaggatcccagagtgcagtcccagcccaggccacccggggaagggagtcggtaaagtgggaccttgagtccccacggcccctccggctgcccctgctcagaggctgctcggcgtcctccctccctgttctactgaggagttgccgcctctgaacttcagccaacccctccgtctccaggtgaagaaactgaggccctggggccaggaaggggcttgcccaggctgctgatccctttgggcagcatcgagtccaggccctccttgtaaccatg

SEQ ID NO: 328859 - DNA, 4228 bp, Homo sapiens
agcggactctcgcacgcgcgcgcgcggcggccccaggtacgcggacaagatggcggcggcagcagtcgacagcgcgatggaggtggtgccggcgctggcggaggaggccgcgccggaggtagcgggcctcagctgcctcgtcaacctgccgggtgaggtgctggagtacatcctgtgctgcggctcgctgacggccgccgacatcggccgtgtctccagcacctgccggcggctgcgcgagctgtgccagagcagcgggaaggtgtggaaggagcagttccgggtgaggtggccttcccttatgaaacactacagccccaccgactacgtcaattggttggaagagtataaagttcggcaaaaagctgggttagaagcgcggaagattgtagcctcgttctcaaagaggttcttttcagagcacgttccttgtaatggcttcagtgacattgagaaccttgaaggaccagagattttttttgaggatgaactggtgtgtatcctaaatatggaaggaagaaaagctttgacctggaaatactacgcaaaaaaaattctttactacctgcggcaacagaagatcttaaataatcttaaggcctttcttcagcagccagatgactatgagtcgtatcttgaaggtgctgtatatattgaccagtactgcaatcctctctccgacatcagcctcaaagacatccaggcccaaattgacagcatcgtggagcttgtttgcaaaacccttcggggcataaacagtcgccaccccagcttggccttcaaggcaggtgaatcatccatgataatggaaatagaactccagagccaggtgctggatgccatgaactatgtcctttacgaccaactgaagttcaaggggaatcgaatggattactataatgccctcaacttatatatgcatcaggttttgattcgcagaacaggaatcccaatcagcatgtctctgctctatttgacaattgctcggcagttgggagtcccactggagcctgtcaacttcccaagtcacttcttattaaggtggtgccaaggcgcagaaggggcgaccctggacatctttgactacatctacatagatgcttttgggaaaggcaagcagctgacagtgaaagaatgcgagtacttgatcggccagcacgtgactgcagcactgtatggggtggtcaatgtcaagaaggtgttacagagaatggtgggaaacctgttaagcctggggaagcgggaaggcatcgaccagtcataccagctcctgagagactcgctggatctctatctggcaatgtacccggaccaggtgcagcttctcctcctccaagccaggctttacttccacctgggaatctggccagagaaggtgcttgacatcctccagcacatccaaaccctagacccggggcagcacggggcggtgggctacctggtgcagcacactctagagcacattgagcgcaaaaaggaggaggtgggcgtagaggtgaagctgcgctccgatgagaagcacagagatgtctgctactccatcgggctcattatgaagcataagaggtatggctataactgtgtgatctacggctgggaccccacctgcatgatgggacacgagtggatccggaacatgaacgtccacagcctgccgcacggccaccaccagcctttctataacgtgctggtggaggacggctcctgtcgatacgcagcccaagaaaacttggaatataacgtggagcctcaagaaatctcacaccctgacgtgggacgctatttctcagagtttactggcactcactacatcccaaacgcagagctggagatccggtatccagaagatctggagtttgtctatgaaacggtgcagaatatttacagtgcaaagaaagagaacatagatgagtaaagtctagagaggacattgcacctttgctgctgctgctatcttccaagagaacgggactccggaagaagacgtctccacggagccctcgggacctgctgcaccaggaaagccactccaccagtagtgctggttgcctcctactaagtttaaataccgtgtgctcttccccagctgcaaagacaatgttgctctccgcctacactagtgaattaatctgaaaggcactgtgtcagtggcatggcttgtatgcttgtcctgtggtgacagtttgtgacattctgtcttcatgaggtctcacagtcgacgctcctgtaatcattctttgtattcactccattcccctgtctgtctgcatttgtctcagaacatttccttggctggacagatggggttatgcatttgcaataatttccttctgatttctctgtggaacgtgttcggtcccgagtgaggactgtgtgtctttttaccctgaagttagttgcatattcagaggtaaagttgtgtgctatcttggcagcatcttagagatggagacattaacaagctaatggtaattagaatcatttgaatttatttttttctaatatgtgaaacacagatttcaagtgttttatcttttttttttaaatttaaatgggaatataacacagttttcccttccatattcctctcttgagtttatgcacatctctataaatcattagttttctattttattacataaaattcttttagaaaatgcaaatagtgaactttgtgaatggatttttccatactcatctacaattcctccattttaaatgactacttttattttttaatttaaaaaatctacttcagtatcatgagtaggtcttacatcagtgatgggttctttttgtagtgagacatacaaatctgatgttaatgtttgctcttagaagtcatactccatggtcttcaaagaccaaaaaatgaggttttgcttttgtaatcaggaaaaaaaaaaattaatgaaccttaaaaaaaaaaaaaaaggttttgaagggaaaaaaagtggtttcacacctcttgttattccttagagtcacttcaaggcctgtttgaatgtggcaggttagaaagagagagaatgtctttcatttgaagagtgttggacttgtgtgaaaggagatgtgcgtgttggaatctgcttttccaagccgccagggtcctgacggcagcaggacgaagcctgttgtggcgtcttctgggaaagcctgaccgtgtgttcggacggcactggctcctttacgaagttctcagtaactgagcccagagtaactgcacgcctttgtgcagctctggagctccaccaactctcggcctgccagttctcaagcgagctaatcttgtcattaatcgatagaagctaacttccgaagttaggacctagttactttgctctcaacatttaaaataatgcagttgctctagtgaatggggcgttaggggcctgtctctgcacctgtctgtccatctgcatgcagtattctcacccatgttgaatgcctgctgcttgtttaccctttggaaaccctggggtgaccaaggtttggaaagccacctgagaccacttcatagcaagggaaggctttaagcagttactagaaagagatggggatttggcccctggctcctccagcctgaatgagctatttaatccactgtccatgttcctcatcagtcaaatccaaagtcaaaggatttgaacctgcatctggaaacgtaaccactcacagcacctggcccgccaaggttgggaggattgtacactactttcatttaaaggggaaagtttgataatacggaattaattaatatgaatgagatgcattaataagaacctgagcatgctgagagttgcaattgttggttttctggtttgattgatttccttttttcttagacacatcaaagtcaagaaagatggttttacctttactgacccagctgtacatatgtatctagactgtttttaaatgtctttcttcatgaatgcttcatggggctccaggaagcctgtatcacctgtgtaagttggtatttgggcactttatatttttctaaaaacgtgttttggatcctgtactctaataaatcataagtttctttttaaaaattttccaaaacttttctccattttaaaaagccctgttataaacgttgaactttcacaatgttaaaatgttaaatatttggatatagcaacttcttttctcttcaaatgaatgccaagatttttttgtacaatgattaataaatggaacttatccagagaaaccacgcaaa

SEQ ID NO: 328860 - DNA, 6001 bp, Homo sapiens
  misc_feature (5094)..(5094): n is a, c, g, or t
agcggactctcgcacgcgcgcgcgcggcggccccaggtacgcggacaagatggcggcggcagcagtcgacagcgcgatggaggtggtgccggcgctggcggaggaggccgcgccggaggtagcgggcctcagctgcctcgtcaacctgccgggtgaggtgctggagtacatcctgtgctgcggctcgctgacggccgccgacatcggccgtgtctccagcacctgccggcggctgcgcgagctgtgccagagcagcgggaaggtgtggaaggagcagttccgggtgaggtggccttcccttatgaaacactacagccccaccgactacgtcaattggttggaagagtataaagttcggcaaaaagctgggttagaagcgcggaagattgtagcctcgttctcaaagaggttcttttcagagcacgttccttgtaatggcttcagtgacattgagaaccttgaaggaccagagattttttttgaggatgaactggtgtgtatcctaaatatggaaggaagaaaagctttgacctggaaatactacgcaaaaaaaattctttactacctgcggcaacagaagatcttaaataatcttaaggcctttcttcagcagccagatgactatgagtcgtatcttgaaggtgctgtatatattgaccagtactgcaatcctctctccgacatcagcctcaaagacatccaggcccaaattgacagcatcgtggagcttgtttgcaaaacccttcggggcataaacagtcgccaccccagcttggccttcaaggcaggtgaatcatccatgataatggaaatagaactccagagccaggtgctggatgccatgaactatgtcctttacgaccaactgaagttcaaggggaatcgaatggattactataatgccctcaacttatatatgcatcaggttttgattcgcagaacaggaatcccaatcagcatgtctctgctctatttgacaattgctcggcagttgggagtcccactggagcctgtcaacttcccaagtcacttcttattaaggtggtgccaaggcgcagaaggggcgaccctggacatctttgactacatctacatagatgcttttgggaaaggcaagcagctgacagtgaaagaatgcgagtacttgatcggccagcacgtgactgcagcactgtatggggtggtcaatgtcaagaaggtgttacagagaatggtgggaaacctgttaagcctggggaagcgggaaggcatcgaccagtcataccagctcctgagagactcgctggatctctatctggcaatgtacccggaccaggtgcagcttctcctcctccaagccaggctttacttccacctgggaatctggccagagaaggtgcttgacatcctccagcacatccaaaccctagacccggggcagcacggggcggtgggctacctggtgcagcacactctagagcacattgagcgcaaaaaggaggaggtgggcgtagaggtgaagctgcgctccgatgagaagcacagagatgtctgctactccatcgggctcattatgaagcataagaggtatggctataactgtgtgatctacggctgggaccccacctgcatgatgggacacgagtggatccggaacatgaacgtccacagcctgccgcacggccaccaccagcctttctataacgtgctggtggaggacggctcctgtcgatacgcagcccaagaaaacttggaatataacgtggagcctcaagaaatctcacaccctgacgtgggacgctatttctcagagtttactggcactcactacatcccaaacgcagagctggagatccggtatccagaagatctggagtttgtctatgaaacggtgcagaatatttacagtgcaaagaaagagaacatagatgagtaaagtctagagaggacattgcacctttgctgctgctgctatcttccaagagaacgggactccggaagaagacgtctccacggagccctcgggacctgctgcaccaggaaagccactccaccagtagtgctggttgcctcctactaagtttaaataccgtgtgctcttccccagctgcaaagacaatgttgctctccgcctacactagtgaattaatctgaaaggcactgtgtcagtggcatggcttgtatgcttgtcctgtggtgacagtttgtgacattctgtcttcatgaggtctcacagtcgacgctcctgtaatcattctttgtattcactccattcccctgtctgtctgcatttgtctcagaacatttccttggctggacagatggggttatgcatttgcaataatttccttctgatttctctgtggaacgtgttcggtcccgagtgaggactgtgtgtctttttaccctgaagttagttgcatattcagaggtaaagttgtgtgctatcttggcagcatcttagagatggagacattaacaagctaatggtaattagaatcatttgaatttatttttttctaatatgtgaaacacagatttcaagtgttttatcttttttttttaaatttaaatgggaatataacacagttttcccttccatattcctctcttgagtttatgcacatctctataaatcattagttttctattttattacataaaattcttttagaaaatgcaaatagtgaactttgtgaatggatttttccatactcatctacaattcctccattttaaatgactacttttattttttaatttaaaaaatctacttcagtatcatgagtaggtcttacatcagtgatgggttctttttgtagtgagacatacaaatctgatgttaatgtttgctcttagaagtcatactccatggtcttcaaagaccaaaaaatgaggttttgcttttgtaatcaggaaaaaaaaaaattaatgaaccttaaaaaaaaaaaaaaaggttttgaagggaaaaaaagtggtttcacacctcttgttattccttagagtcacttcaaggcctgtttgaatgtggcaggttagaaagagagagaatgtctttcatttgaagagtgttggacttgtgtgaaaggagatgtgcgtgttggaatctgcttttccaagccgccagggtcctgacggcagcaggacgaagcctgttgtggcgtcttctgggaaagcctgaccgtgtgttcggacggcactggctcctttacgaagttctcagtaactgagcccagagtaactgcacgcctttgtgcagctctggagctccaccaactctcggcctgccagttctcaagcgagctaatcttgtcattaatcgatagaagctaacttccgaagttaggacctagttactttgctctcaacatttaaaataatgcagttgctctagtgaatggggcgttaggggcctgtctctgcacctgtctgtccatctgcatgcagtattctcacccatgttgaatgcctgctgcttgtttaccctttggaaaccctggggtgaccaaggtttggaaagccacctgagaccacttcatagcaagggaaggctttaagcagttactagaaagagatggggatttggcccctggctcctccagcctgaatgagctatttaatccactgtccatgttcctcatcagtcaaatccaaagtcaaaggatttgaacctgcatctggaaacgtaaccactcacagcacctggcccgccaaggttgggaggattgtacactactttcatttaaaggggaaagtttgataatacggaattaattaatatgaatgagatgcattaataagaacctgagcatgctgagagttgcaattgttggttttctggtttgattgatttccttttttcttagacacatcaaagtcaagaaagatggttttacctttactgacccagctgtacatatgtatctagactgtttttaaatgtctttcttcatgaatgcttcatggggctccaggaagcctgtatcacctgtgtaagttggtatttgggcactttatatttttctaaaaacgtgttttggatcctgtactctaataaatcataagtttctttttaaaaattttccaaaacttttctccattttaaaaagccctgttataaacgttgaactttcacaatgttaaaatgttaaatatttggatatagcaacttcttttctcttcaaatgaatgccaagatttttttgtacaatgattaataaatggaacttatccagagaaaccacgcaaatggcctgcccaatttcgtttgaggacagaaagcccagccatgacttgagtagaatgtctctcacctctcttcggatctaaatatgaaaagtatgttctgctgaatttttctgagcattggtgagcggacagcctacctgtaaaccatgacctccttgccaaacgttaattttatcagctcactagtaacctttgagaattatctggttgtcatgcaaagattgcactttctgaattatgttaaaacacatgttgtaaaatgagaactgctcatgctttgaaagaaaaccaggttcttcgtgcgttctgttgccgttgatttgaatggctgtgctgtatacgatgtgtccagaatgtcttcagagcactgtttccgtgtgatgttactacctactatgtgggaggaaaaaaggttataggttaaacaaagtcaattgactctatggtggtgtttctcaatacctgtgacgcacagtactgtgcgtcgtgactttctaagagaagtgtgcagcgggtgtgtcatcttgatatatgaaaccctggaatttccctcccctacacgcacgcaccgtccccgggggtccggtgtttgcagacatgctttgaaaagctgtctcagtgagacatcagttatgtccaaaatgagtttaccttagaatcagaccggttttgccaggcgtcatgtttgcaaacattatccacctaatcagattttgaaaggccggctttcatgtcgcctgcctgagactcataacagatccccattataagcgcgtttacacagcaaaatgattttattgagaaaaccagcattaagtactgttgccggctcagttttccattgcatactatctacttaaagtcccnttctcatttgtaagtgttccgatctttccccacggagaaaactgagcagagctgccgtgtcgcaggctttctgctgctgatgtcgcatctctttgctttcccctccttagtccatactccaagtaagtgaactcagactaccagcaactttttaactgaaaagtatctgtccatgatgatcaagatgcagctcttcgtgtttttattttgtctttttttttttttttttttggagggaaggagagacatcaactggacaaaatgcaaaatttggatgtgggacaattgctttttggagacgtgaatagctgtactgtacgtattattttgtgtggcatgctaactttgagccgggcactggcctaataaagtctttgtaatcctcccagcaatcctataaagcagacgcagatagtaaagattttaggctttgcaggccacgtacagactgtcacatgttctctgtttttaaaagtgtcaacaacattcttagctcaaaaacaggctgcaggtgggatggtgcccacaggccatagttggctgaccccggctagggtgtaggcacttagcattccactgtataaaggggaaacccaggtcatactgcgtgtgcgtgggtgggaagccggatgtggaatacaggtggtccctgagtctccaggaaccactgagctccagctgttcacacccacactctgcggcgcaagcaactacctcgccacggtttagccttggtctagcagcgactttaaccttgaatgttgcatttctgaaaaatttagaatctttaaaggacgtccctccggtgaataaaattaggcgcaattatagaatacatgtattatggccacgtagcaatgactgtattagggctctgctagttctgtaataaatagacccgaaaagc

SEQ ID NO: 328861 - DNA, 6248 bp, Homo sapiens
  misc_feature (5094)..(5094): n is a, c, g, or t
agcggactctcgcacgcgcgcgcgcggcggccccaggtacgcggacaagatggcggcggcagcagtcgacagcgcgatggaggtggtgccggcgctggcggaggaggccgcgccggaggtagcgggcctcagctgcctcgtcaacctgccgggtgaggtgctggagtacatcctgtgctgcggctcgctgacggccgccgacatcggccgtgtctccagcacctgccggcggctgcgcgagctgtgccagagcagcgggaaggtgtggaaggagcagttccgggtgaggtggccttcccttatgaaacactacagccccaccgactacgtcaattggttggaagagtataaagttcggcaaaaagctgggttagaagcgcggaagattgtagcctcgttctcaaagaggttcttttcagagcacgttccttgtaatggcttcagtgacattgagaaccttgaaggaccagagattttttttgaggatgaactggtgtgtatcctaaatatggaaggaagaaaagctttgacctggaaatactacgcaaaaaaaattctttactacctgcggcaacagaagatcttaaataatcttaaggcctttcttcagcagccagatgactatgagtcgtatcttgaaggtgctgtatatattgaccagtactgcaatcctctctccgacatcagcctcaaagacatccaggcccaaattgacagcatcgtggagcttgtttgcaaaacccttcggggcataaacagtcgccaccccagcttggccttcaaggcaggtgaatcatccatgataatggaaatagaactccagagccaggtgctggatgccatgaactatgtcctttacgaccaactgaagttcaaggggaatcgaatggattactataatgccctcaacttatatatgcatcaggttttgattcgcagaacaggaatcccaatcagcatgtctctgctctatttgacaattgctcggcagttgggagtcccactggagcctgtcaacttcccaagtcacttcttattaaggtggtgccaaggcgcagaaggggcgaccctggacatctttgactacatctacatagatgcttttgggaaaggcaagcagctgacagtgaaagaatgcgagtacttgatcggccagcacgtgactgcagcactgtatggggtggtcaatgtcaagaaggtgttacagagaatggtgggaaacctgttaagcctggggaagcgggaaggcatcgaccagtcataccagctcctgagagactcgctggatctctatctggcaatgtacccggaccaggtgcagcttctcctcctccaagccaggctttacttccacctgggaatctggccagagaaggtgcttgacatcctccagcacatccaaaccctagacccggggcagcacggggcggtgggctacctggtgcagcacactctagagcacattgagcgcaaaaaggaggaggtgggcgtagaggtgaagctgcgctccgatgagaagcacagagatgtctgctactccatcgggctcattatgaagcataagaggtatggctataactgtgtgatctacggctgggaccccacctgcatgatgggacacgagtggatccggaacatgaacgtccacagcctgccgcacggccaccaccagcctttctataacgtgctggtggaggacggctcctgtcgatacgcagcccaagaaaacttggaatataacgtggagcctcaagaaatctcacaccctgacgtgggacgctatttctcagagtttactggcactcactacatcccaaacgcagagctggagatccggtatccagaagatctggagtttgtctatgaaacggtgcagaatatttacagtgcaaagaaagagaacatagatgagtaaagtctagagaggacattgcacctttgctgctgctgctatcttccaagagaacgggactccggaagaagacgtctccacggagccctcgggacctgctgcaccaggaaagccactccaccagtagtgctggttgcctcctactaagtttaaataccgtgtgctcttccccagctgcaaagacaatgttgctctccgcctacactagtgaattaatctgaaaggcactgtgtcagtggcatggcttgtatgcttgtcctgtggtgacagtttgtgacattctgtcttcatgaggtctcacagtcgacgctcctgtaatcattctttgtattcactccattcccctgtctgtctgcatttgtctcagaacatttccttggctggacagatggggttatgcatttgcaataatttccttctgatttctctgtggaacgtgttcggtcccgagtgaggactgtgtgtctttttaccctgaagttagttgcatattcagaggtaaagttgtgtgctatcttggcagcatcttagagatggagacattaacaagctaatggtaattagaatcatttgaatttatttttttctaatatgtgaaacacagatttcaagtgttttatcttttttttttaaatttaaatgggaatataacacagttttcccttccatattcctctcttgagtttatgcacatctctataaatcattagttttctattttattacataaaattcttttagaaaatgcaaatagtgaactttgtgaatggatttttccatactcatctacaattcctccattttaaatgactacttttattttttaatttaaaaaatctacttcagtatcatgagtaggtcttacatcagtgatgggttctttttgtagtgagacatacaaatctgatgttaatgtttgctcttagaagtcatactccatggtcttcaaagaccaaaaaatgaggttttgcttttgtaatcaggaaaaaaaaaaattaatgaaccttaaaaaaaaaaaaaaaggttttgaagggaaaaaaagtggtttcacacctcttgttattccttagagtcacttcaaggcctgtttgaatgtggcaggttagaaagagagagaatgtctttcatttgaagagtgttggacttgtgtgaaaggagatgtgcgtgttggaatctgcttttccaagccgccagggtcctgacggcagcaggacgaagcctgttgtggcgtcttctgggaaagcctgaccgtgtgttcggacggcactggctcctttacgaagttctcagtaactgagcccagagtaactgcacgcctttgtgcagctctggagctccaccaactctcggcctgccagttctcaagcgagctaatcttgtcattaatcgatagaagctaacttccgaagttaggacctagttactttgctctcaacatttaaaataatgcagttgctctagtgaatggggcgttaggggcctgtctctgcacctgtctgtccatctgcatgcagtattctcacccatgttgaatgcctgctgcttgtttaccctttggaaaccctggggtgaccaaggtttggaaagccacctgagaccacttcatagcaagggaaggctttaagcagttactagaaagagatggggatttggcccctggctcctccagcctgaatgagctatttaatccactgtccatgttcctcatcagtcaaatccaaagtcaaaggatttgaacctgcatctggaaacgtaaccactcacagcacctggcccgccaaggttgggaggattgtacactactttcatttaaaggggaaagtttgataatacggaattaattaatatgaatgagatgcattaataagaacctgagcatgctgagagttgcaattgttggttttctggtttgattgatttccttttttcttagacacatcaaagtcaagaaagatggttttacctttactgacccagctgtacatatgtatctagactgtttttaaatgtctttcttcatgaatgcttcatggggctccaggaagcctgtatcacctgtgtaagttggtatttgggcactttatatttttctaaaaacgtgttttggatcctgtactctaataaatcataagtttctttttaaaaattttccaaaacttttctccattttaaaaagccctgttataaacgttgaactttcacaatgttaaaatgttaaatatttggatatagcaacttcttttctcttcaaatgaatgccaagatttttttgtacaatgattaataaatggaacttatccagagaaaccacgcaaatggcctgcccaatttcgtttgaggacagaaagcccagccatgacttgagtagaatgtctctcacctctcttcggatctaaatatgaaaagtatgttctgctgaatttttctgagcattggtgagcggacagcctacctgtaaaccatgacctccttgccaaacgttaattttatcagctcactagtaacctttgagaattatctggttgtcatgcaaagattgcactttctgaattatgttaaaacacatgttgtaaaatgagaactgctcatgctttgaaagaaaaccaggttcttcgtgcgttctgttgccgttgatttgaatggctgtgctgtatacgatgtgtccagaatgtcttcagagcactgtttccgtgtgatgttactacctactatgtgggaggaaaaaaggttataggttaaacaaagtcaattgactctatggtggtgtttctcaatacctgtgacgcacagtactgtgcgtcgtgactttctaagagaagtgtgcagcgggtgtgtcatcttgatatatgaaaccctggaatttccctcccctacacgcacgcaccgtccccgggggtccggtgtttgcagacatgctttgaaaagctgtctcagtgagacatcagttatgtccaaaatgagtttaccttagaatcagaccggttttgccaggcgtcatgtttgcaaacattatccacctaatcagattttgaaaggccggctttcatgtcgcctgcctgagactcataacagatccccattataagcgcgtttacacagcaaaatgattttattgagaaaaccagcattaagtactgttgccggctcagttttccattgcatactatctacttaaagtcccnttctcatttgtaagtgttccgatctttccccacggagaaaactgagcagagctgccgtgtcgcaggctttctgctgctgatgtcgcatctctttgctttcccctccttagtccatactccaagtaagtgaactcagactaccagcaactttttaactgaaaagtatctgtccatgatgatcaagatgcagctcttcgtgtttttattttgtctttttttttttttttttttggagggaaggagagacatcaactggacaaaatgcaaaatttggatgtgggacaattgctttttggagacgtgaatagctgtactgtacgtattattttgtgtggcatgctaactttgagccgggcactggcctaataaagtctttgtaatcctcccagcaatcctataaagcagacgcagatagtaaagattttaggctttgcaggccacgtacagactgtcacatgttctctgtttttaaaagtgtcaacaacattcttagctcaaaaacaggctgcaggtgggatggtgcccacaggccatagttggctgaccccggctagggtgtaggcacttagcattccactgtataaaggggaaacccaggtcatactgcgtgtgcgtgggtgggaagccggatgtggaatacaggtggtccctgagtctccaggaaccactgagctccagctgttcacacccacactctgcggcgcaagcaactacctcgccacggtttagccttggtctagcagcgactttaaccttgaatgttgcatttctgaaaaatttagaatctttaaaggacgtccctccggtgaataaaattaggcgcaattatagaatacatgtattatggccacgtagcaatgactgtattagggctctgctagttctgtaataaatagacccgaaaagcaacaatggctcaaacaccatagaacgtttttgcttccataatattgggcaggggaatgggctggcagggcagcccttatgcaggcaggcatcagagcaacctgagccgtccatctccatcccgcctgaagtagcggggagcatggagggctgagaccatctgggagcttccatgagccaggtgtggaagtggcaccccttatgtccactcattttgcacggaggtgggaaacgtccagttgtgttct

SEQ ID NO: 328862 - DNA, 4716 bp, Homo sapiens
  misc_feature (4716)..(4716): n is a, c, g, or t
agcggactctcgcacgcgcgcgcgcggcggccccaggtacgcggacaagatggcggcggcagcagtcgacagcgcgatggaggtggtgccggcgctggcggaggaggccgcgccggaggtagcgggcctcagctgcctcgtcaacctgccgggtgaggtgctggagtacatcctgtgctgcggctcgctgacggccgccgacatcggccgtgtctccagcacctgccggcggctgcgcgagctgtgccagagcagcgggaaggtgtggaaggagcagttccgggtgaggtggccttcccttatgaaacactacagccccaccgactacgtcaattggttggaagagtataaagttcggcaaaaagctgggttagaagcgcggaagattgtagcctcgttctcaaagaggttcttttcagagcacgttccttgtaatggcttcagtgacattgagaaccttgaaggaccagagattttttttgaggatgaactggtgtgtatcctaaatatggaaggaagaaaagctttgacctggaaatactacgcaaaaaaaattctttactacctgcggcaacagaagatcttaaataatcttaaggcctttcttcagcagccagatgactatgagtcgtatcttgaaggtgctgtatatattgaccagtactgcaatcctctctccgacatcagcctcaaagacatccaggcccaaattgacagcatcgtggagcttgtttgcaaaacccttcggggcataaacagtcgccaccccagcttggccttcaaggcaggtgaatcatccatgataatggaaatagaactccagagccaggtgctggatgccatgaactatgtcctttacgaccaactgaagttcaaggggaatcgaatggattactataatgccctcaacttatatatgcatcaggttttgattcgcagaacaggaatcccaatcagcatgtctctgctctatttgacaattgctcggcagttgggagtcccactggagcctgtcaacttcccaagtcacttcttattaaggtggtgccaaggcgcagaaggggcgaccctggacatctttgactacatctacatagatgcttttgggaaaggcaagcagctgacagtgaaagaatgcgagtacttgatcggccagcacgtgactgcagcactgtatggggtggtcaatgtcaagaaggtgttacagagaatggtgggaaacctgttaagcctggggaagcgggaaggcatcgaccagtcataccagctcctgagagactcgctggatctctatctggcaatgtacccggaccaggtgcagcttctcctcctccaagccaggctttacttccacctgggaatctggccagagaaggtgcttgacatcctccagcacatccaaaccctagacccggggcagcacggggcggtgggctacctggtgcagcacactctagagcacattgagcgcaaaaaggaggaggtgggcgtagaggtgaagctgcgctccgatgagaagcacagagatgtctgctactccatcgggctcattatgaagcataagaggtatggctataactgtgtgatctacggctgggaccccacctgcatgatgggacacgagtggatccggaacatgaacgtccacagcctgccgcacggccaccaccagcctttctataacgtgctggtggaggacggctcctgtcgatacgcagcccaagaaaacttggaatataacgtggagcctcaagaaatctcacaccctgacgtgggacgctatttctcagagtttactggcactcactacatcccaaacgcagagctggagatccggtatccagaagatctggagtttgtctatgaaacggtgcagaatatttacagtgcaaagaaagagaacatagatgagtaaagtctagagaggacattgcacctttgctgctgctgctatcttccaagagaacgggactccggaagaagacgtctccacggagccctcgggacctgctgcaccaggaaagccactccaccagtagtgctggttgcctcctactaagtttaaataccgtgtgctcttccccagctgcaaagacaatgttgctctccgcctacactagtgaattaatctgaaaggcactgtgtcagtggcatggcttgtatgcttgtcctgtggtgacagtttgtgacattctgtcttcatgaggtctcacagtcgacgctcctgtaatcattctttgtattcactccattcccctgtctgtctgcatttgtctcagaacatttccttggctggacagatggggttatgcatttgcaataatttccttctgatttctctgtggaacgtgttcggtcccgagtgaggactgtgtgtctttttaccctgaagttagttgcatattcagaggtaaagttgtgtgctatcttggcagcatcttagagatggagacattaacaagctaatggtaattagaatcatttgaatttatttttttctaatatgtgaaacacagatttcaagtgttttatcttttttttttaaatttaaatgggaatataacacagttttcccttccatattcctctcttgagtttatgcacatctctataaatcattagttttctattttattacataaaattcttttagaaaatgcaaatagtgaactttgtgaatggatttttccatactcatctacaattcctccattttaaatgactacttttattttttaatttaaaaaatctacttcagtatcatgagtaggtcttacatcagtgatgggttctttttgtagtgagacatacaaatctgatgttaatgtttgctcttagaagtcatactccatggtcttcaaagaccaaaaaatgaggttttgcttttgtaatcaggaaaaaaaaaaattaatgaaccttaaaaaaaaaaaaaaaggttttgaagggaaaaaaagtggtttcacacctcttgttattccttagagtcacttcaaggcctgtttgaatgtggcaggttagaaagagagagaatgtctttcatttgaagagtgttggacttgtgtgaaaggagatgtgcgtgttggaatctgcttttccaagccgccagggtcctgacggcagcaggacgaagcctgttgtggcgtcttctgggaaagcctgaccgtgtgttcggacggcactggctcctttacgaagttctcagtaactgagcccagagtaactgcacgcctttgtgcagctctggagctccaccaactctcggcctgccagttctcaagcgagctaatcttgtcattaatcgatagaagctaacttccgaagttaggacctagttactttgctctcaacatttaaaataatgcagttgctctagtgaatggggcgttaggggcctgtctctgcacctgtctgtccatctgcatgcagtattctcacccatgttgaatgcctgctgcttgtttaccctttggaaaccctggggtgaccaaggtttggaaagccacctgagaccacttcatagcaagggaaggctttaagcagttactagaaagagatggggatttggcccctggctcctccagcctgaatgagctatttaatccactgtccatgttcctcatcagtcaaatccaaagtcaaaggatttgaacctgcatctggaaacgtaaccactcacagcacctggcccgccaaggttgggaggattgtacactactttcatttaaaggggaaagtttgataatacggaattaattaatatgaatgagatgcattaataagaacctgagcatgctgagagttgcaattgttggttttctggtttgattgatttccttttttcttagacacatcaaagtcaagaaagatggttttacctttactgacccagctgtacatatgtatctagactgtttttaaatgtctttcttcatgaatgcttcatggggctccaggaagcctgtatcacctgtgtaagttggtatttgggcactttatatttttctaaaaacgtgttttggatcctgtactctaataaatcataagtttctttttaaaaattttccaaaacttttctccattttaaaaagccctgttataaacgttgaactttcacaatgttaaaatgttaaatatttggatatagcaacttcttttctcttcaaatgaatgccaagatttttttgtacaatgattaataaatggaacttatccagagaaaccacgcaaaaaaaaaaaaaaaaaaaaaaaaaaaaaaaaaaaaaaaaaaaaaaaaaaaacaaaaaaaaaaacaaaaaacaaacaaaaaacaacaaaaaacaaaaagggggggggggggaaaataaccccccggggggccccaatccccccttttttaaaaaagggggcccccaaggggcttaaaaaagggcgggcgggcaacaaaccaaggacgcgagggaaaaaaagcgtcggctacttatcaggagagacccccctcggggcgggggccaacgagggacaaccccccaaggaatagacgcccgccaacaaacacgtggtctagtcggaccccagccccttcgcgcgatattgttcacttatttattagccgggctgatcagtagcccagaaagcaaagtgaacgacagatagagaccgcgacatcatgacagacgtcaacacacgcaataagaactcacacacagatgatcgatcgaaaacagcagtcaccattcn

SEQ ID NO: 328863 - DNA, 4145 bp, Homo sapiens
agcggactctcgcacgcgcgcgcgcggcggccccaggtacgcggacaagatggcggcggcagcagtcgacagcgcgatggaggtggtgccggcgctggcggaggaggccgcgccggaggtagcgggcctcagctgcctcgtcaacgcggctgcgcgagctgtgccagagcagcgggaaggtgtggaaggagcagttccgggtgaggtggccttcccttatgaaacactacagccccaccgactacgtcaattggttggaagagtataaagttcggcaaaaagctgggttagaagcgcggaagattgtagcctcgttctcaaagaggttcttttcagagcacgttccttgtaatggcttcagtgacattgagaaccttgaaggaccagagattttttttgaggatgaactggtgtgtatcctaaatatggaaggaagaaaagctttgacctggaaatactacgcaaaaaaaattctttactacctgcggcaacagaagatcttaaataatcttaaggcctttcttcagcagccagatgactatgagtcgtatcttgaaggtgctgtatatattgaccagtactgcaatcctctctccgacatcagcctcaaagacatccaggcccaaattgacagcatcgtggagcttgtttgcaaaacccttcggggcataaacagtcgccaccccagcttggccttcaaggcaggtgaatcatccatgataatggaaatagaactccagagccaggtgctggatgccatgaactatgtcctttacgaccaactgaagttcaaggggaatcgaatggattactataatgccctcaacttatatatgcatcaggttttgattcgcagaacaggaatcccaatcagcatgtctctgctctatttgacaattgctcggcagttgggagtcccactggagcctgtcaacttcccaagtcacttcttattaaggtggtgccaaggcgcagaaggggcgaccctggacatctttgactacatctacatagatgcttttgggaaaggcaagcagctgacagtgaaagaatgcgagtacttgatcggccagcacgtgactgcagcactgtatggggtggtcaatgtcaagaaggtgttacagagaatggtgggaaacctgttaagcctggggaagcgggaaggcatcgaccagtcataccagctcctgagagactcgctggatctctatctggcaatgtacccggaccaggtgcagcttctcctcctccaagccaggctttacttccacctgggaatctggccagagaaggtgcttgacatcctccagcacatccaaaccctagacccggggcagcacggggcggtgggctacctggtgcagcacactctagagcacattgagcgcaaaaaggaggaggtgggcgtagaggtgaagctgcgctccgatgagaagcacagagatgtctgctactccatcgggctcattatgaagcataagaggtatggctataactgtgtgatctacggctgggaccccacctgcatgatgggacacgagtggatccggaacatgaacgtccacagcctgccgcacggccaccaccagcctttctataacgtgctggtggaggacggctcctgtcgatacgcagcccaagaaaacttggaatataacgtggagcctcaagaaatctcacaccctgacgtgggacgctatttctcagagtttactggcactcactacatcccaaacgcagagctggagatccggtatccagaagatctggagtttgtctatgaaacggtgcagaatatttacagtgcaaagaaagagaacatagatgagtaaagtctagagaggacattgcacctttgctgctgctgctatcttccaagagaacgggactccggaagaagacgtctccacggagccctcgggacctgctgcaccaggaaagccactccaccagtagtgctggttgcctcctactaagtttaaataccgtgtgctcttccccagctgcaaagacaatgttgctctccgcctacactagtgaattaatctgaaaggcactgtgtcagtggcatggcttgtatgcttgtcctgtggtgacagtttgtgacattctgtcttcatgaggtctcacagtcgacgctcctgtaatcattctttgtattcactccattcccctgtctgtctgcatttgtctcagaacatttccttggctggacagatggggttatgcatttgcaataatttccttctgatttctctgtggaacgtgttcggtcccgagtgaggactgtgtgtctttttaccctgaagttagttgcatattcagaggtaaagttgtgtgctatcttggcagcatcttagagatggagacattaacaagctaatggtaattagaatcatttgaatttatttttttctaatatgtgaaacacagatttcaagtgttttatcttttttttttaaatttaaatgggaatataacacagttttcccttccatattcctctcttgagtttatgcacatctctataaatcattagttttctattttattacataaaattcttttagaaaatgcaaatagtgaactttgtgaatggatttttccatactcatctacaattcctccattttaaatgactacttttattttttaatttaaaaaatctacttcagtatcatgagtaggtcttacatcagtgatgggttctttttgtagtgagacatacaaatctgatgttaatgtttgctcttagaagtcatactccatggtcttcaaagaccaaaaaatgaggttttgcttttgtaatcaggaaaaaaaaaaattaatgaaccttaaaaaaaaaaaaaaaggttttgaagggaaaaaaagtggtttcacacctcttgttattccttagagtcacttcaaggcctgtttgaatgtggcaggttagaaagagagagaatgtctttcatttgaagagtgttggacttgtgtgaaaggagatgtgcgtgttggaatctgcttttccaagccgccagggtcctgacggcagcaggacgaagcctgttgtggcgtcttctgggaaagcctgaccgtgtgttcggacggcactggctcctttacgaagttctcagtaactgagcccagagtaactgcacgcctttgtgcagctctggagctccaccaactctcggcctgccagttctcaagcgagctaatcttgtcattaatcgatagaagctaacttccgaagttaggacctagttactttgctctcaacatttaaaataatgcagttgctctagtgaatggggcgttaggggcctgtctctgcacctgtctgtccatctgcatgcagtattctcacccatgttgaatgcctgctgcttgtttaccctttggaaaccctggggtgaccaaggtttggaaagccacctgagaccacttcatagcaagggaaggctttaagcagttactagaaagagatggggatttggcccctggctcctccagcctgaatgagctatttaatccactgtccatgttcctcatcagtcaaatccaaagtcaaaggatttgaacctgcatctggaaacgtaaccactcacagcacctggcccgccaaggttgggaggattgtacactactttcatttaaaggggaaagtttgataatacggaattaattaatatgaatgagatgcattaataagaacctgagcatgctgagagttgcaattgttggttttctggtttgattgatttccttttttcttagacacatcaaagtcaagaaagatggttttacctttactgacccagctgtacatatgtatctagactgtttttaaatgtctttcttcatgaatgcttcatggggctccaggaagcctgtatcacctgtgtaagttggtatttgggcactttatatttttctaaaaacgtgttttggatcctgtactctaataaatcataagtttctttttaaaaattttccaaaacttttctccattttaaaaagccctgttataaacgttgaactttcacaatgttaaaatgttaaatatttggatatagcaacttcttttctcttcaaatgaatgccaagatttttttgtacaatgattaataaatggaacttatccagagaaaccacgcaaa

SEQ ID NO: 328864 - DNA, 4077 bp, Homo sapiens
gctttacttttctaaagccagagagagagtgggggtggagggagcagggagggacccacgcagcacaatgtagacggagtccagatcagcattatttctcaaatgggttcaacggattttttttgcaacccctccgttatttggggaatcatcaatgattgaacactgtaaatttctcccggttgttttcccagaagggttgacgaaattaatgtggttcttctctctggctttgcaggttctacccagtagtgaactgcattatttgttaaggttccttgtaatggcttcagtgacattgagaaccttgaaggaccagagattttttttgaggatgaactggtgtgtatcctaaatatggaaggaagaaaagctttgacctggaaatactacgcaaaaaaaattctttactacctgcggcaacagaagatcttaaataatcttaaggcctttcttcagcagccagatgactatgagtcgtatcttgaaggtgctgtatatattgaccagtactgcaatcctctctccgacatcagcctcaaagacatccaggcccaaattgacagcatcgtggagcttgtttgcaaaacccttcggggcataaacagtcgccaccccagcttggccttcaaggcaggtgaatcatccatgataatggaaatagaactccagagccaggtgctggatgccatgaactatgtcctttacgaccaactgaagttcaaggggaatcgaatggattactataatgccctcaacttatatatgcatcaggttttgattcgcagaacaggaatcccaatcagcatgtctctgctctatttgacaattgctcggcagttgggagtcccactggagcctgtcaacttcccaagtcacttcttattaaggtggtgccaaggcgcagaaggggcgaccctggacatctttgactacatctacatagatgcttttgggaaaggcaagcagctgacagtgaaagaatgcgagtacttgatcggccagcacgtgactgcagcactgtatggggtggtcaatgtcaagaaggtgttacagagaatggtgggaaacctgttaagcctggggaagcgggaaggcatcgaccagtcataccagctcctgagagactcgctggatctctatctggcaatgtacccggaccaggtgcagcttctcctcctccaagccaggctttacttccacctgggaatctggccagagaaggtgcttgacatcctccagcacatccaaaccctagacccggggcagcacggggcggtgggctacctggtgcagcacactctagagcacattgagcgcaaaaaggaggaggtgggcgtagaggtgaagctgcgctccgatgagaagcacagagatgtctgctactccatcgggctcattatgaagcataagaggtatggctataactgtgtgatctacggctgggaccccacctgcatgatgggacacgagtggatccggaacatgaacgtccacagcctgccgcacggccaccaccagcctttctataacgtgctggtggaggacggctcctgtcgatacgcagcccaagaaaacttggaatataacgtggagcctcaagaaatctcacaccctgacgtgggacgctatttctcagagtttactggcactcactacatcccaaacgcagagctggagatccggtatccagaagatctggagtttgtctatgaaacggtgcagaatatttacagtgcaaagaaagagaacatagatgagtaaagtctagagaggacattgcacctttgctgctgctgctatcttccaagagaacgggactccggaagaagacgtctccacggagccctcgggacctgctgcaccaggaaagccactccaccagtagtgctggttgcctcctactaagtttaaataccgtgtgctcttccccagctgcaaagacaatgttgctctccgcctacactagtgaattaatctgaaaggcactgtgtcagtggcatggcttgtatgcttgtcctgtggtgacagtttgtgacattctgtcttcatgaggtctcacagtcgacgctcctgtaatcattctttgtattcactccattcccctgtctgtctgcatttgtctcagaacatttccttggctggacagatggggttatgcatttgcaataatttccttctgatttctctgtggaacgtgttcggtcccgagtgaggactgtgtgtctttttaccctgaagttagttgcatattcagaggtaaagttgtgtgctatcttggcagcatcttagagatggagacattaacaagctaatggtaattagaatcatttgaatttatttttttctaatatgtgaaacacagatttcaagtgttttatcttttttttttaaatttaaatgggaatataacacagttttcccttccatattcctctcttgagtttatgcacatctctataaatcattagttttctattttattacataaaattcttttagaaaatgcaaatagtgaactttgtgaatggatttttccatactcatctacaattcctccattttaaatgactacttttattttttaatttaaaaaatctacttcagtatcatgagtaggtcttacatcagtgatgggttctttttgtagtgagacatacaaatctgatgttaatgtttgctcttagaagtcatactccatggtcttcaaagaccaaaaaatgaggttttgcttttgtaatcaggaaaaaaaaaaattaatgaaccttaaaaaaaaaaaaaaaggttttgaagggaaaaaaagtggtttcacacctcttgttattccttagagtcacttcaaggcctgtttgaatgtggcaggttagaaagagagagaatgtctttcatttgaagagtgttggacttgtgtgaaaggagatgtgcgtgttggaatctgcttttccaagccgccagggtcctgacggcagcaggacgaagcctgttgtggcgtcttctgggaaagcctgaccgtgtgttcggacggcactggctcctttacgaagttctcagtaactgagcccagagtaactgcacgcctttgtgcagctctggagctccaccaactctcggcctgccagttctcaagcgagctaatcttgtcattaatcgatagaagctaacttccgaagttaggacctagttactttgctctcaacatttaaaataatgcagttgctctagtgaatggggcgttaggggcctgtctctgcacctgtctgtccatctgcatgcagtattctcacccatgttgaatgcctgctgcttgtttaccctttggaaaccctggggtgaccaaggtttggaaagccacctgagaccacttcatagcaagggaaggctttaagcagttactagaaagagatggggatttggcccctggctcctccagcctgaatgagctatttaatccactgtccatgttcctcatcagtcaaatccaaagtcaaaggatttgaacctgcatctggaaacgtaaccactcacagcacctggcccgccaaggttgggaggattgtacactactttcatttaaaggggaaagtttgataatacggaattaattaatatgaatgagatgcattaataagaacctgagcatgctgagagttgcaattgttggttttctggtttgattgatttccttttttcttagacacatcaaagtcaagaaagatggttttacctttactgacccagctgtacatatgtatctagactgtttttaaatgtctttcttcatgaatgcttcatggggctccaggaagcctgtatcacctgtgtaagttggtatttgggcactttatatttttctaaaaacgtgttttggatcctgtactctaataaatcataagtttctttttaaaaattttccaaaacttttctccattttaaaaagccctgttataaacgttgaactttcacaatgttaaaatgttaaatatttggatatagcaacttcttttctcttcaaatgaatgccaagatttttttgtacaatgattaataaatggaacttatccagagaaaccacgcaaa

SEQ ID NO: 328865 - DNA, 1844 bp, Homo sapiens
agcggactctcgcacgcgcgcgcgcggcggccccaggtacgcggacaagatggcggcggcagcagtcgacagcgcgatggaggtggtgccggcgctggcggaggaggccgcgccggaggtagcgggcctcagctgcctcgtcaacctgccgggtgaggtgctggagtacatcctgtgctgcggctcgctgacggccgccgacatcggccgtgtctccagcacctgccggcggctgcgcgagctgtgccagagcagcgggaaggtgtggaaggagcagttccgggtgaggtggccttcccttatgaaacactacagccccaccgactacgtcaattggttggaagagtataaagttcggcaaaaagctgggttagaagcgcggaagattgtagcctcgttctcaaagaggttcttttcagagcacgttccttgtaatggcttcagtgacattgagaaccttgaaggaccagagattttttttgaggatgaactggtgtgtatcctaaatatggaaggaagaaaagctttgacctggaaatactacgcaaaaagttttgaagggaaaaaaagtggtttcacacctcttgttattccttagagtcacttcaaggcctgtttgaatgtggcaggttagaaagagagagaatgtctttcatttgaagagtgttggacttgtgtgaaaggagatgtgcgtgttggaatctgcttttccaagccgccagggtcctgacggcagcaggacgaagcctgttgtggcgtcttctgggaaagcctgaccgtgtgttcggacggcactggctcctttacgaagttctcagtaactgagcccagagtaactgcacgcctttgtgcagctctggagctccaccaactctcggcctgccagttctcaagcgagctaatcttgtcattaatcgatagaagctaacttccgaagttaggacctagttactttgctctcaacatttaaaataatgcagttgctctagtgaatggggcgttaggggcctgtctctgcacctgtctgtccatctgcatgcagtattctcacccatgttgaatgcctgctgcttgtttaccctttggaaaccctggggtgaccaaggtttggaaagccacctgagaccacttcatagcaagggaaggctttaagcagttactagaaagagatggggatttggcccctggctcctccagcctgaatgagctatttaatccactgtccatgttcctcatcagtcaaatccaaagtcaaaggatttgaacctgcatctggaaacgtaaccactcacagcacctggcccgccaaggttgggaggattgtacactactttcatttaaaggggaaagtttgataatacggaattaattaatatgaatgagatgcattaataagaacctgagcatgctgagagttgcaattgttggttttctggtttgattgatttccttttttcttagacacatcaaagtcaagaaagatggttttacctttactgacccagctgtacatatgtatctagactgtttttaaatgtctttcttcatgaatgcttcatggggctccaggaagcctgtatcacctgtgtaagttggtatttgggcactttatatttttctaaaaacgtgttttggatcctgtactctaataaatcataagtttctttttaaaaattttccaaaacttttctccattttaaaaagccctgttataaacgttgaactttcacaatgttaaaatgttaaatatttggatatagcaacttcttttctcttcaaatgaatgccaagatttttttgtacaatgattaataaatggaacttatccagagaaaccacgcaaa

SEQ ID NO: 328866 - DNA, 1295 bp, Homo sapiens
ttttcgttgtctagaggatcccatgggttacgctcttgttattccttagagtcacttcaaggcctgtttgaatgtggcaggttagaaagagagagaatgtctttcatttgaagagtgttggacttgtgtgaaaggagatgtgcgtgttggaatctgcttttccaagccgccagggtcctgacggcagcaggacgaagcctgttgtggcgtcttctgggaaagcctgaccgtgtgttcggacggcactggctcctttacgaagttctcagtaactgagcccagagtaactgcacgcctttgtgcagctctggagctccaccaactctcggcctgccagttctcaagcgagctaatcttgtcattaatcgatagaagctaacttccgaagttaggacctagttactttgctctcaacatttaaaataatgcagttgctctagtgaatggggcgttaggggcctgtctctgcacctgtctgtccatctgcatgcagtattctcacccatgttgaatgcctgctgcttgtttaccctttggaaaccctggggtgaccaaggtttggaaagccacctgagaccacttcatagcaagggaaggctttaagcagttactagaaagagatggggatttggcccctggctcctccagcctgaatgagctatttaatccactgtccatgttcctcatcagtcaaatccaaagtcaaaggatttgaacctgcatctggaaacgtaaccactcacagcacctggcccgccaaggttgggaggattgtacactactttcatttaaaggggaaagtttgataatacggaattaattaatatgaatgagatgcattaataagaacctgagcatgctgagagttgcaattgttggttttctggtttgattgatttccttttttcttagacacatcaaagtcaagaaagatggttttacctttactgacccagctgtacatatgtatctagactgtttttaaatgtctttcttcatgaatgcttcatggggctccaggaagcctgtatcacctgtgtaagttggtatttgggcactttatatttttctaaaaacgtgttttggatcctgtactctaataaatcataagtttctttttaaaaattttccaaaacttttctccattttaaaaagccctgttataaacgttgaactttcacaatgttaaaatgttaaatatttggatatagcaacttcttttctcttcaaatgaatgccaagatttttttgtacaatgattaataaatggaacttatccagagaaaccacgcaaa

SEQ ID NO: 328867 - DNA, 1130 bp, Homo sapiens
agcggactctcgcacgcgcgcgcgcggcggccccaggtacgcggacaagatggcggcggcagcagtcgacagcgcgatggaggtggtgccggcgctggcggaggaggccgcgccggaggtagcgggcctcagctgcctcgtcaacctgccgggtgaggtgctggagtacatcctgtgctgcggctcgctgacggccgccgacatcggccgtgtctccagcacctgccggcggctgcgcgagctgtgccagagcagcgggaaggtgtggaaggagcagttccgggtgaggtggccttcccttatgaaacactacagccccaccgactacgtcaattggttggaagagtataaagttcggcaaaaagctgggttagaagcgcggaagattgtagcctcgttctcaaagaggttcttttcagagcacgttccttgtaatggcttcagtgacattgagaaccttgaaggaccagagattttttttgaggatgaactggtgtgtatcctaaatatggaaggaagaaaagctttgacctggaaatactacgcaaaaaaaattctttactacctgcggcaacagaagatcttaaataatcttaaggcctttcttcagcagccagatgactatgagtcgtatcttgaaggtgctgtatatattgaccagtactgcaatcctctctccgacatcagcctcaaagacatccaggcccaaattgacagcatcgtggagcttgtttgcaaaacccttcggggcataaacagtcgccaccccagcttggccttcaaggcaggtgaatcatccatgataatggaaatagaactccagagccaggtgctggatgccatgaactatgtcctttacgaccaactgaagttcaaggggaatcgaatggattactataatgccctcaacttatatatgcatcaggttttgattcgcagaacaggaatcccaatcagcatgtctctgctctatttgacaattgctcggcagttgggagtcccactggagcctgtcaacttcccaagtcacttcttattaaggtggtgccaaggcgcagaagggtgagcatccgtgacacattatctgtggtcctgaagatttggtccctctgtgctgagaggcagtctga

SEQ ID NO: 328868 - DNA, 380 bp, Homo sapiens
gcaagtaagtctgaagccaggcagataactgttcctcagatttcagtacaactaatttagtattatattacaattcaaagactgctatttccattataattattataagagaatgaaccaattatatttttcttgttaagcaaactacatggtatgttagtgtaatgtgaaaaatagataactgaaagttttcaaatcttaattcttactgactttttgtttccagaaaagctttgacctggaaatactacgcaaaaaaaattctttactacctgcggcaacagaagatcttaaataatcttaaggcctttcttcagcagccagatgactatgagtcgtatcttgaagtgggtcttttcccatatatgtggacagtagta

SEQ ID NO: 328869 - DNA, 750 bp, Homo sapiens
ggcaggggtgctctctccttctctgtcttttcatatttaacatcttattatcacatctagaaaaccccagttccttaacttcatgcagtatctaatgagagttcctatttccccagttgtctcatatttttacatgtttggatcaggatttgttagtctcttggttttagtgatgtcagattggttagtcttttcctttacggctgtatttttagtgccttgttttaacaaaccttccctatcttgagtcatgaagatactttctattttagaagttctgcatttaacacctgagtctttgctgtactgagaattgaatttggtgtgctgttgtcaggccaggtccccatacctttttcttttgggtaaccagttgtcatctaatcactttttgttgaaaagtttattcttttccagataaagtgctatgttgataataagaggtgtttataaaaggggttaggggtgtcctgaaaaatgattcaccgtggagtaaagcaggtaactgaggatgtgagctgagaagccacgcggttgtctggaggttgttgcggccgggtctgcagggactgactgctcctcctgtgttaactaggtatggctataactgtgtgatctacggctgggaccccacctgcatgatgggacacgagtggatccggaacatgaacgtccacagcctgccgcacggccaccaccagcctttctataacgtgctggtggaggacggctcctgtcgatacgcagccc

SEQ ID NO: 328870 - DNA, 5946 bp, Homo sapiens
  misc_feature (5039)..(5039): n is a, c, g, or t
agcggactctcgcacgcgcgcgcgcggcggccccaggtacgcggacaagatggcggcggcagcagtcgacagcgcgatggaggtggtgccggcgctggcggaggaggccgcgccggaggtagcgggcctcagctgcctcgtcaacctgccgggtgaggtgctggagtacatcctgtgctgcggctcgctgacggccgccgacatcggccgtgtctccagcacctgccggcggctgcgcgagctgtgccagagcagcgggaaggtgtggaaggagcagttccgggtgaggtggccttcccttatgaaacactacagccccaccgactacgtcaattggttggaagagtataaagttcggcaaaaagctgggttagaagcgcggaagattgtagcctcgttctcaaagaggttcttttcagagcacgttccttgtaatggcttcagtgacattgagaaccttgaaggaccagagattttttttgaggatgaactggtgtgtatcctaaatatggaaggaagaaaagctttgacctggaaatactacgcaaaaaaaattctttactacctgcggcaacagaagatcttaaataatcttaaggcctttcttcagcagccagatgactatgagtcgtatcttgaaggtgctgtatatattgaccagtactgcaatcctctctccgacatcagcctcaaagacatccaggcccaaattgacagcatcgtggagcttgtttgcaaaacccttcggggcataaacagtcgccaccccagcttggccttcaaggcaggtgaatcatccatgataatggaaatagaactccagagccaggtgctggatgccatgaactatgtcctttacgaccaactgaagttcaaggggaatcgaatggattactataatgccctcaacttatatatgcatcaggttttgattcgcagaacaggaatcccaatcagcatgtctctgctctatttgacaattgctcggcagttgggagtcccactggagcctgtcaacttcccaagtcacttcttattaaggtggtgccaaggcgcagaaggggcgaccctggacatctttgactacatctacatagatgcttttgggaaaggcaagcagctgacagtgaaagaatgcgagtacttgatcggccagcacgtgactgcagcactgtatggggtggtcaatgtcaagaaggtgttacagagaatggtgggaaacctgttaagcctggggaagcgggaaggcatcgaccagtcataccagctcctgagagactcgctggatctctatctggcaatgtacccggaccaggtgcagcttctcctcctccaagccaggctttacttccacctgggaatctggccagagaaggtgcttgacatcctccagcacatccaaaccctagacccggggcagcacggggcggtgggctacctggtgcagcacactctagagcacattgagcgcaaaaaggaggaggtgggcgtagaggtgaagctgcgctccgatgagaagcacagagatgtctgctactccatcgggctcattatgaagcataagaggtatggctataactgtgtgatctacggctgggaccccacctgcatgatgggacacgagtggatccggaacatgaacgtccacagcctgccgcacggccaccaccagcctttctataacgtgctggtggaggacggctcctgtcgatacgcagcccaagaaaacttggaatataacgtggagcctcaagaaatctcacaccctgacgtgggacgctatttctcagagtttactggcactcactacatcccaaacgcagagctggagatccggtatccagaagatctggagtttgtctatgaaacggtgcagaatatttacagtgcaaagaaagagaacatagatgagtaaagtctagagaggacattgcacctttgctgctgctgctatcttccaagagaacgggactccggaagaagacgtctccacggagccctcgggacctgctgcaccaggaaagccactccaccagtagtgctggttgcctcctactaagtttaaataccgtgtgctcttccccagctgcaaagacaatgttgctctccgcctacactagtgaattaatctgaaaggcactgtgtcagtggcatggcttgtatgcttgtcctgtggtgacagtttgtgacattctgtcttcatgaggtctcacagtcgacgctcctgtaatcattctttgtattcactccattcccctgtctgtctgcatttgtctcagaacatttccttggctggacagatggggttatgcatttgcaataatttccttctgatttctctgtggaacgtgttcggtcccgagtgaggactgtgtgtctttttaccctgaagttagttgcatattcagaggtaaagttgtgtgctatcttggcagcatcttagagatggagacattaacaagctaatggtaattagaatcatttgaatttatttttttctaatatgtgaaacacagatttcaagtgttttatcttttttttttaaatttaaatgggaatataacacagttttcccttccatattcctctcttgagtttatgcacatctctataaatcattagttttctattttattacataaaattcttttagaaaatgcaaatagtgaactttgtgaatggatttttccatactcatctacaattcctccattttaaatgactacttttattttttaatttaaaaaatctacttcagtatcatgagtaggtcttacatcagtgatgggttctttttgtagtgagacatacaaatctgatgttaatgtttgctcttagaagtcatactccatggtcttcaaagaccaaaaaatgaggttttgcttttgtaatcaggaaaaaaaaaaattaatgaaccttaaaaaaaaaaaaaaaggttttgaagggaaaaaaagtggtttcacacctcttgttattccttagagtcacttcaaggcctgtttgaatgtggcaggttagaaagagagagaatgtctttcatttgaagagtgttggacttgtgtgaaaggagatgtgcgtgttggaatctgcttttccaagccgccagggtcctgacggcagcaggacgaagcctgttgtggcgtcttctgggaaagcctgaccgtgtgttcggacggcactggctcctttacgaagttctcagtaactgagcccagagtaactgcacgcctttgtgcagctctggagctccaccaactctcggcctgccagttctcaagcgagctaatcttgtcattaatcgatagaagctaacttccgaagttaggacctagttactttgctctcaacatttaaaataatgcagttgctctagtgaatggggcgttaggggcctgtctctgcacctgtctgtccatctgcatgcagtattctcacccatgttgaatgcctgctgcttgtttaccctttggaaaccctggggtgaccaaggtttggaaagccacctgagaccacttcatagcaagggaaggctttaagcagttactagaaagagatggggatttggcccctggctcctccagcctgaatgagctatttaatccactgtccatgttcctcatcagtcaaatccaaagtcaaaggatttgaacctgcatctggaaacgtaaccactcacagcacctggcccgccaaggttgggaggattgtacactactttcatttaaaggggaaagtttgataatacggaattaattaatatgaatgagatgcattaataagaacctgagcatgctgagagttgcaattgttggttttctggtttgattgatttccttttttcttagacacatcaaagtcaagaaagatggttttacctttactgacccagctgtacatatgtatctagactgtttttaaatgtctttcttcatgaatgcttcatggggctccaggaagcctgtatcacctgtgtaagttggtatttgggcactttatatttttctaaaaacgtgttttggatcctgtactctaataaatcataagtttctttttaaaaattttccaaaacttttctccattttaaaaagccctgttataaacgttgaactttcacaatgttaaaatgttaaatatttggatatagcaacttcttttctcttcaaatgaatgccaagatttttttgtacaatgattaataaatggaacttatccagagaaaccacgcaaatggcctgcccaatttcgtttgaggacagaaagcccagccatgacttgagtagaatgtctctcacctctcttcggatctaaatatgaaaacatgacctccttgccaaacgttaattttatcagctcactagtaacctttgagaattatctggttgtcatgcaaagattgcactttctgaattatgttaaaacacatgttgtaaaatgagaactgctcatgctttgaaagaaaaccaggttcttcgtgcgttctgttgccgttgatttgaatggctgtgctgtatacgatgtgtccagaatgtcttcagagcactgtttccgtgtgatgttactacctactatgtgggaggaaaaaaggttataggttaaacaaagtcaattgactctatggtggtgtttctcaatacctgtgacgcacagtactgtgcgtcgtgactttctaagagaagtgtgcagcgggtgtgtcatcttgatatatgaaaccctggaatttccctcccctacacgcacgcaccgtccccgggggtccggtgtttgcagacatgctttgaaaagctgtctcagtgagacatcagttatgtccaaaatgagtttaccttagaatcagaccggttttgccaggcgtcatgtttgcaaacattatccacctaatcagattttgaaaggccggctttcatgtcgcctgcctgagactcataacagatccccattataagcgcgtttacacagcaaaatgattttattgagaaaaccagcattaagtactgttgccggctcagttttccattgcatactatctacttaaagtcccnttctcatttgtaagtgttccgatctttccccacggagaaaactgagcagagctgccgtgtcgcaggctttctgctgctgatgtcgcatctctttgctttcccctccttagtccatactccaagtaagtgaactcagactaccagcaactttttaactgaaaagtatctgtccatgatgatcaagatgcagctcttcgtgtttttattttgtctttttttttttttttttttggagggaaggagagacatcaactggacaaaatgcaaaatttggatgtgggacaattgctttttggagacgtgaatagctgtactgtacgtattattttgtgtggcatgctaactttgagccgggcactggcctaataaagtctttgtaatcctcccagcaatcctataaagcagacgcagatagtaaagattttaggctttgcaggccacgtacagactgtcacatgttctctgtttttaaaagtgtcaacaacattcttagctcaaaaacaggctgcaggtgggatggtgcccacaggccatagttggctgaccccggctagggtgtaggcacttagcattccactgtataaaggggaaacccaggtcatactgcgtgtgcgtgggtgggaagccggatgtggaatacaggtggtccctgagtctccaggaaccactgagctccagctgttcacacccacactctgcggcgcaagcaactacctcgccacggtttagccttggtctagcagcgactttaaccttgaatgttgcatttctgaaaaatttagaatctttaaaggacgtccctccggtgaataaaattaggcgcaattatagaatacatgtattatggccacgtagcaatgactgtattagggctctgctagttctgtaataaatagacccgaaaagc

SEQ ID NO: 328871 - DNA, 4249 bp, Homo sapiens
agcggactctcgcacgcgcgcgcgcggcggccccaggtacgcggacaagatggcggcggcagcagtcgacagcgcgatggaggtggtgccggcgctggcggaggaggccgcgccggaggtagcgggcctcagctgcctcgtcaacctgccgggtgaggtgctggagtacatcctgtgctgcggctcgctgacggccgccgacatcggccgtgtctccagcacctgccggcggctgcgcgagctgtgccagagcagcgggaaggtgtggaaggagcagttccgggtgaggtggccttcccttatgaaacactacagccccaccgactacgtcaattggttggaagagtataaagttcggcaaaaagctgggttagaagcgcggaagattgtagcctcgttctcaaagaggttcttttcagagcacgttccttgtaatggcttcagtgacattgagaaccttgaaggaccagagattttttttgaggatgaactggtgtgtatcctaaatatggaaggaagaaaagctttgacctggaaatactacgcaaaaaaaattctttactacctgcggcaacagaagatcttaaataatcttaaggcctttcttcagcagccagatgactatgagtcgtatcttgaaggtgctgtatatattgaccagtactgcaatcctctctccgacatcagcctcaaagacatccaggcccaaattgacagcatcgtggagcttgtttgcaaaacccttcggggcataaacagtcgccaccccagcttggccttcaaggcaggtgaatcatccatgataatggaaatagaactccagagccaggtgctggatgccatgaactatgtcctttacgaccaactgaagttcaaggggaatcgaatggattactataatgccctcaacttatatatgcatcaggttttgattcgcagaacaggaatcccaatcagcatgtctctgctctatttgacaattgctcggcagttgggagtcccactggagcctgtcaacttcccaagtcacttcttattaaggtggtgccaaggcgcagaaggggcgaccctggacatctttgactacatctacatagatgcttttgggaaaggcaagcagctgacagtgaaagaatgcgagtacttgatcggccagcacgtgactgcagcactgtatggggtggtcaatgtcaagaaggtgttacagagaatggtgggaaacctgttaagcctggggaagcgggaaggcatcgaccagtcataccagctcctgagagactcgctggatctctatctggcaatgtacccggaccaggtgcagcttctcctcctccaagccaggctttacttccacctgggaatctggccagagaagtctttctgtcttgttttgaaggtgcttgacatcctccagcacatccaaaccctagacccggggcagcacggggcggtgggctacctggtgcagcacactctagagcacattgagcgcaaaaaggaggaggtgggcgtagaggtgaagctgcgctccgatgagaagcacagagatgtctgctactccatcgggctcattatgaagcataagaggtatggctataactgtgtgatctacggctgggaccccacctgcatgatgggacacgagtggatccggaacatgaacgtccacagcctgccgcacggccaccaccagcctttctataacgtgctggtggaggacggctcctgtcgatacgcagcccaagaaaacttggaatataacgtggagcctcaagaaatctcacaccctgacgtgggacgctatttctcagagtttactggcactcactacatcccaaacgcagagctggagatccggtatccagaagatctggagtttgtctatgaaacggtgcagaatatttacagtgcaaagaaagagaacatagatgagtaaagtctagagaggacattgcacctttgctgctgctgctatcttccaagagaacgggactccggaagaagacgtctccacggagccctcgggacctgctgcaccaggaaagccactccaccagtagtgctggttgcctcctactaagtttaaataccgtgtgctcttccccagctgcaaagacaatgttgctctccgcctacactagtgaattaatctgaaaggcactgtgtcagtggcatggcttgtatgcttgtcctgtggtgacagtttgtgacattctgtcttcatgaggtctcacagtcgacgctcctgtaatcattctttgtattcactccattcccctgtctgtctgcatttgtctcagaacatttccttggctggacagatggggttatgcatttgcaataatttccttctgatttctctgtggaacgtgttcggtcccgagtgaggactgtgtgtctttttaccctgaagttagttgcatattcagaggtaaagttgtgtgctatcttggcagcatcttagagatggagacattaacaagctaatggtaattagaatcatttgaatttatttttttctaatatgtgaaacacagatttcaagtgttttatcttttttttttaaatttaaatgggaatataacacagttttcccttccatattcctctcttgagtttatgcacatctctataaatcattagttttctattttattacataaaattcttttagaaaatgcaaatagtgaactttgtgaatggatttttccatactcatctacaattcctccattttaaatgactacttttattttttaatttaaaaaatctacttcagtatcatgagtaggtcttacatcagtgatgggttctttttgtagtgagacatacaaatctgatgttaatgtttgctcttagaagtcatactccatggtcttcaaagaccaaaaaatgaggttttgcttttgtaatcaggaaaaaaaaaaattaatgaaccttaaaaaaaaaaaaaaaggttttgaagggaaaaaaagtggtttcacacctcttgttattccttagagtcacttcaaggcctgtttgaatgtggcaggttagaaagagagagaatgtctttcatttgaagagtgttggacttgtgtgaaaggagatgtgcgtgttggaatctgcttttccaagccgccagggtcctgacggcagcaggacgaagcctgttgtggcgtcttctgggaaagcctgaccgtgtgttcggacggcactggctcctttacgaagttctcagtaactgagcccagagtaactgcacgcctttgtgcagctctggagctccaccaactctcggcctgccagttctcaagcgagctaatcttgtcattaatcgatagaagctaacttccgaagttaggacctagttactttgctctcaacatttaaaataatgcagttgctctagtgaatggggcgttaggggcctgtctctgcacctgtctgtccatctgcatgcagtattctcacccatgttgaatgcctgctgcttgtttaccctttggaaaccctggggtgaccaaggtttggaaagccacctgagaccacttcatagcaagggaaggctttaagcagttactagaaagagatggggatttggcccctggctcctccagcctgaatgagctatttaatccactgtccatgttcctcatcagtcaaatccaaagtcaaaggatttgaacctgcatctggaaacgtaaccactcacagcacctggcccgccaaggttgggaggattgtacactactttcatttaaaggggaaagtttgataatacggaattaattaatatgaatgagatgcattaataagaacctgagcatgctgagagttgcaattgttggttttctggtttgattgatttccttttttcttagacacatcaaagtcaagaaagatggttttacctttactgacccagctgtacatatgtatctagactgtttttaaatgtctttcttcatgaatgcttcatggggctccaggaagcctgtatcacctgtgtaagttggtatttgggcactttatatttttctaaaaacgtgttttggatcctgtactctaataaatcataagtttctttttaaaaattttccaaaacttttctccattttaaaaagccctgttataaacgttgaactttcacaatgttaaaatgttaaatatttggatatagcaacttcttttctcttcaaatgaatgccaagatttttttgtacaatgattaataaatggaacttatccagagaaaccacgcaaa

SEQ ID NO: 328872 - DNA, 4185 bp, Homo sapiens
agcggactctcgcacgcgcgcgcgcggcggccccaggtacgcggacaagatggcggcggcagcagtcgacagcgcgatggaggtggtgccggcgctggcggaggaggccgcgccggaggtagcgggcctcagctgcctcgtcaacctgccgggtgaggtgctggagtacatcctgtgctgcggctgcggctgcgcgagctgtgccagagcagcgggaaggtgtggaaggagcagttccgggtgaggtggccttcccttatgaaacactacagccccaccgactacgtcaattggttggaagagtataaagttcggcaaaaagctgggttagaagcgcggaagattgtagcctcgttctcaaagaggttcttttcagagcacgttccttgtaatggcttcagtgacattgagaaccttgaaggaccagagattttttttgaggatgaactggtgtgtatcctaaatatggaaggaagaaaagctttgacctggaaatactacgcaaaaaaaattctttactacctgcggcaacagaagatcttaaataatcttaaggcctttcttcagcagccagatgactatgagtcgtatcttgaaggtgctgtatatattgaccagtactgcaatcctctctccgacatcagcctcaaagacatccaggcccaaattgacagcatcgtggagcttgtttgcaaaacccttcggggcataaacagtcgccaccccagcttggccttcaaggcaggtgaatcatccatgataatggaaatagaactccagagccaggtgctggatgccatgaactatgtcctttacgaccaactgaagttcaaggggaatcgaatggattactataatgccctcaacttatatatgcatcaggttttgattcgcagaacaggaatcccaatcagcatgtctctgctctatttgacaattgctcggcagttgggagtcccactggagcctgtcaacttcccaagtcacttcttattaaggtggtgccaaggcgcagaaggggcgaccctggacatctttgactacatctacatagatgcttttgggaaaggcaagcagctgacagtgaaagaatgcgagtacttgatcggccagcacgtgactgcagcactgtatggggtggtcaatgtcaagaaggtgttacagagaatggtgggaaacctgttaagcctggggaagcgggaaggcatcgaccagtcataccagctcctgagagactcgctggatctctatctggcaatgtacccggaccaggtgcagcttctcctcctccaagccaggctttacttccacctgggaatctggccagagaaggtgcttgacatcctccagcacatccaaaccctagacccggggcagcacggggcggtgggctacctggtgcagcacactctagagcacattgagcgcaaaaaggaggaggtgggcgtagaggtgaagctgcgctccgatgagaagcacagagatgtctgctactccatcgggctcattatgaagcataagaggtatggctataactgtgtgatctacggctgggaccccacctgcatgatgggacacgagtggatccggaacatgaacgtccacagcctgccgcacggccaccaccagcctttctataacgtgctggtggaggacggctcctgtcgatacgcagcccaagaaaacttggaatataacgtggagcctcaagaaatctcacaccctgacgtgggacgctatttctcagagtttactggcactcactacatcccaaacgcagagctggagatccggtatccagaagatctggagtttgtctatgaaacggtgcagaatatttacagtgcaaagaaagagaacatagatgagtaaagtctagagaggacattgcacctttgctgctgctgctatcttccaagagaacgggactccggaagaagacgtctccacggagccctcgggacctgctgcaccaggaaagccactccaccagtagtgctggttgcctcctactaagtttaaataccgtgtgctcttccccagctgcaaagacaatgttgctctccgcctacactagtgaattaatctgaaaggcactgtgtcagtggcatggcttgtatgcttgtcctgtggtgacagtttgtgacattctgtcttcatgaggtctcacagtcgacgctcctgtaatcattctttgtattcactccattcccctgtctgtctgcatttgtctcagaacatttccttggctggacagatggggttatgcatttgcaataatttccttctgatttctctgtggaacgtgttcggtcccgagtgaggactgtgtgtctttttaccctgaagttagttgcatattcagaggtaaagttgtgtgctatcttggcagcatcttagagatggagacattaacaagctaatggtaattagaatcatttgaatttatttttttctaatatgtgaaacacagatttcaagtgttttatcttttttttttaaatttaaatgggaatataacacagttttcccttccatattcctctcttgagtttatgcacatctctataaatcattagttttctattttattacataaaattcttttagaaaatgcaaatagtgaactttgtgaatggatttttccatactcatctacaattcctccattttaaatgactacttttattttttaatttaaaaaatctacttcagtatcatgagtaggtcttacatcagtgatgggttctttttgtagtgagacatacaaatctgatgttaatgtttgctcttagaagtcatactccatggtcttcaaagaccaaaaaatgaggttttgcttttgtaatcaggaaaaaaaaaaattaatgaaccttaaaaaaaaaaaaaaaggttttgaagggaaaaaaagtggtttcacacctcttgttattccttagagtcacttcaaggcctgtttgaatgtggcaggttagaaagagagagaatgtctttcatttgaagagtgttggacttgtgtgaaaggagatgtgcgtgttggaatctgcttttccaagccgccagggtcctgacggcagcaggacgaagcctgttgtggcgtcttctgggaaagcctgaccgtgtgttcggacggcactggctcctttacgaagttctcagtaactgagcccagagtaactgcacgcctttgtgcagctctggagctccaccaactctcggcctgccagttctcaagcgagctaatcttgtcattaatcgatagaagctaacttccgaagttaggacctagttactttgctctcaacatttaaaataatgcagttgctctagtgaatggggcgttaggggcctgtctctgcacctgtctgtccatctgcatgcagtattctcacccatgttgaatgcctgctgcttgtttaccctttggaaaccctggggtgaccaaggtttggaaagccacctgagaccacttcatagcaagggaaggctttaagcagttactagaaagagatggggatttggcccctggctcctccagcctgaatgagctatttaatccactgtccatgttcctcatcagtcaaatccaaagtcaaaggatttgaacctgcatctggaaacgtaaccactcacagcacctggcccgccaaggttgggaggattgtacactactttcatttaaaggggaaagtttgataatacggaattaattaatatgaatgagatgcattaataagaacctgagcatgctgagagttgcaattgttggttttctggtttgattgatttccttttttcttagacacatcaaagtcaagaaagatggttttacctttactgacccagctgtacatatgtatctagactgtttttaaatgtctttcttcatgaatgcttcatggggctccaggaagcctgtatcacctgtgtaagttggtatttgggcactttatatttttctaaaaacgtgttttggatcctgtactctaataaatcataagtttctttttaaaaattttccaaaacttttctccattttaaaaagccctgttataaacgttgaactttcacaatgttaaaatgttaaatatttggatatagcaacttcttttctcttcaaatgaatgccaagatttttttgtacaatgattaataaatggaacttatccagagaaaccacgcaaa

SEQ ID NO: 328873 - DNA, 2862 bp, Homo sapiens
agcggactctcgcacgcgcgcgcgcggcggccccaggtacgcggacaagatggcggcggcagcagtcgacagcgcgatggaggtggtgccggcgctggcggaggaggccgcgccggaggtagcgggcctcagctgcctcgtcaacctgccgggtgaggtgctggagtacatcctgtgctgcggctcgctgacggccgccgacatcggccgtgtctccagcacctgccggcggctgcgcgagctgtgccagagcagcgggaaggtgtggaaggagcagttccgggtgaggtggccttcccttatgaaacactacagccccaccgactacgtcaattggttggaagagtataaagttcggcaaaaagctgggttagaagcgcggaagattgtagcctcgttctcaaagaggttcttttcagagcacgttccttgtaatggcttcagtgacattgagaaccttgaaggaccagagattttttttgaggatgaactggtgtgtatcctaaatatggaaggaagaaaagctttgacctggaaatactacgcaaaaaaaattctttactacctgcggcaacagaagatcttaaataatcttaaggcctttcttcagcagccagatgactatgagtcgtatcttgaagctgctgcaccaggaaagccactccaccagtagtgctggttgcctcctactaagtttaaataccgtgtgctcttccccagctgcaaagacaatgttgctctccgcctacactagtgaattaatctgaaaggcactgtgtcagtggcatggcttgtatgcttgtcctgtggtgacagtttgtgacattctgtcttcatgaggtctcacagtcgacgctcctgtaatcattctttgtattcactccattcccctgtctgtctgcatttgtctcagaacatttccttggctggacagatggggttatgcatttgcaataatttccttctgatttctctgtggaacgtgttcggtcccgagtgaggactgtgtgtctttttaccctgaagttagttgcatattcagaggtaaagttgtgtgctatcttggcagcatcttagagatggagacattaacaagctaatggtaattagaatcatttgaatttatttttttctaatatgtgaaacacagatttcaagtgttttatcttttttttttaaatttaaatgggaatataacacagttttcccttccatattcctctcttgagtttatgcacatctctataaatcattagttttctattttattacataaaattcttttagaaaatgcaaatagtgaactttgtgaatggatttttccatactcatctacaattcctccattttaaatgactacttttattttttaatttaaaaaatctacttcagtatcatgagtaggtcttacatcagtgatgggttctttttgtagtgagacatacaaatctgatgttaatgtttgctcttagaagtcatactccatggtcttcaaagaccaaaaaatgaggttttgcttttgtaatcaggaaaaaaaaaaattaatgaaccttaaaaaaaaaaaaaaaggttttgaagggaaaaaaagtggtttcacacctcttgttattccttagagtcacttcaaggcctgtttgaatgtggcaggttagaaagagagagaatgtctttcatttgaagagtgttggacttgtgtgaaaggagatgtgcgtgttggaatctgcttttccaagccgccagggtcctgacggcagcaggacgaagcctgttgtggcgtcttctgggaaagcctgaccgtgtgttcggacggcactggctcctttacgaagttctcagtaactgagcccagagtaactgcacgcctttgtgcagctctggagctccaccaactctcggcctgccagttctcaagcgagctaatcttgtcattaatcgatagaagctaacttccgaagttaggacctagttactttgctctcaacatttaaaataatgcagttgctctagtgaatggggcgttaggggcctgtctctgcacctgtctgtccatctgcatgcagtattctcacccatgttgaatgcctgctgcttgtttaccctttggaaaccctggggtgaccaaggtttggaaagccacctgagaccacttcatagcaagggaaggctttaagcagttactagaaagagatggggatttggcccctggctcctccagcctgaatgagctatttaatccactgtccatgttcctcatcagtcaaatccaaagtcaaaggatttgaacctgcatctggaaacgtaaccactcacagcacctggcccgccaaggttgggaggattgtacactactttcatttaaaggggaaagtttgataatacggaattaattaatatgaatgagatgcattaataagaacctgagcatgctgagagttgcaattgttggttttctggtttgattgatttccttttttcttagacacatcaaagtcaagaaagatggttttacctttactgacccagctgtacatatgtatctagactgtttttaaatgtctttcttcatgaatgcttcatggggctccaggaagcctgtatcacctgtgtaagttggtatttgggcactttatatttttctaaaaacgtgttttggatcctgtactctaataaatcataagtttctttttaaaaattttccaaaacttttctccattttaaaaagccctgttataaacgttgaactttcacaatgttaaaatgttaaatatttggatatagcaacttcttttctcttcaaatgaatgccaagatttttttgtacaatgattaataaatggaacttatccagagaaaccacgcaaa

SEQ ID NO: 328874 - DNA, 1777 bp, Homo sapiens
agcggactctcgcacgcgcgcgcgcggcggccccaggtacgcggacaagatggcggcggcagcagtcgacagcgcgatggaggtggtgccggcgctggcggaggaggccgcgccggaggtagcgggcctcagctgcctcgtcaacctgccgggtgaggtgctggagtacatcctgtgctgcggctcgctgacggccgccgacatcggccgtgtctccagcacctgccggcggctgcgcgagctgtgccagagcagcgggaaggtgtggaaggagcagttccgggtgaggtggccttcccttatgaaacactacagccccaccgactacgtcaattggttggaagagtataaagttcggcaaaaagctgggttagaagcgcggaagattgtagcctcgttctcaaagaggttcttttcagagcacgttccttgtaatggcttcagtgacattgagaaccttgaaggaccagagattttttttgaggatgaactggtgtgtatcctaaatatggaaggaagaaaagctttgacctggaaatactacgcaaaaaaaattctttactacctgcggcaacagaagatcttaaataatcttaaggcctttcttcagcagccagatgactatgagtcgtatcttgaaggtgctgtatatattgaccagtactgcaatcctctctccgacatcagcctcaaagacatccaggcccaaattgacagcatcgtggagcttgtttgcaaaacccttcggggcataaacagtcgccaccccagcttggccttcaaggcaggtgaatcatccatgataatggaaatagaactccagagccaggtgctggatgccatgaactatgtcctttacgaccaactgaagttcaaggggaatcgaatggattactataatgccctcaacttatatatgcatcaggttttgattcgcagaacaggaatcccaatcagcatgtctctgctctatttgacaattgctcggcagttgggagtcccactggagcctgtcaacttcccaagtcacttcttattaaggtggtgccaaggcgcagaaggggcgaccctggacatctttgactacatctacatagatgcttttgggaaaggcaagcagctgacagtgaaagaatgcgagtacttgatcggccagcacgtgactgcagcactgtatggggtggtcaatgtcaagaaggtgttacagagaatggtgggaaacctgttaagcctggggaagcgggaaggcatcgaccagtcataccagctcctgagagactcgctggatctctatctggcaatgtacccggaccaggtgcagcttctcctcctccaagccaggctttacttccacctgggaatctggccagagaaggtgcttgacatcctccagcacatccaaaccctagacccggggcagcacggggcggtgggctacctggtgcagcacactctagagcacattgagcgcaaaaaggaggaggtgggcgtagaggtgaagctgcgctccgatgagaagcacagagatgtctgctactccatcgggctcattatgaagcataagaggtatggctataactgtgtgatctacggctgggaccccacctgcatgatgggacacgagtggatccggaacatgaacgtccacagcctgccgcacggccaccaccagcctttctataacgtgctggtggaggacggctcctgtcgatacgcagcccaaggtcgcttgccctgtctcagtgtgatggggatggtgtaaggggtttctgtgctc

SEQ ID NO: 328875 - DNA, 325 bp, Homo sapiens
ccatgctatcctgatctccgtcagtcctcgctggctgctccctcccagtccccttggctccttctttagactctcttctttgacttccaggtgctgacatgcccagggcccaatgctagcaacactttcttattcatgtgattttatccagtccgaagcttcagcatgccatcaatatttggaaagctcctaaatgtccatatttcccacctggaactctcccctcaactcccaaaacacatttccaactgctgattttgtctctacatgagaggtccctgtgtttacagggcagaaatgtagaccgtcccattctaagcggcca

SEQ ID NO: 328876 - DNA, 245 bp, Homo sapiens
atctagaggatgctgttatacaccctataccacctatgtggaattcatctgagatgagtggtatttgcactaatgccttaaacataacagtactagctggataatagccaccactgtggaggcccttaggcctaatgatgctaggagctttgtgcaagttattttggctgtcatttaaaaaaaaaaggccgggcacagtggctcatgcctgtaatcccagcactttgggaggctgaggtgggtgg

SEQ ID NO: 328877 - DNA, 1089 bp, Homo sapiens
tcattcattcattcattcattcattcattcatcattcattcattcattcattcattcattcatcattcattcattcattcattcattcattcatcattcattcattcattcattcattcattcatcattcattcattcattcattcattcattcatcattcattcattcattcattcattcattcatcattcattcattcattcattcattcattcatcattcattcattcattcattcattcattcatcattcattcattcattcattcattcattcatcattcattcattcattcattcattcattcatcattcattcattcattcattcattcattcatcattcattcattcattcattcattcattcatcattcattcattcattcattcattcattcatcattcattcattcattcattcattcattcatcattcattcattcattcattcattcattcatcattcattcattcattcattcattcattcatcattcattcattcattcattcattcattcatcattcattcattcattcattcattcattcatcattcattcattcattcattcattcattcatcattcattcattcattcattcattcattcatcattcattcattcattcattcattcattcatcattcattcattcattcattcattcattctcattcattcattcattcattcattcattatatcagaatgatgttcagtataacactatctgatttttagattggtcgatttctgttgtaatcaagtatttaggatgtaatctttttaaagtcattgctttaatctgaaaagccattagaagggagaggaatcactgttccacaggatatttaaaactcaggagttcaaataacctcacatattgaacataaactgttaacttattccacaactaaattctaacctgatacttatgaattgcaaagtgattgctgcaaactttttctaaggtggctgaagatttaaaatagatcattctaaagggaaatcagtaaaatgtcttgataattggtatccaaatcacttgtgtgcctgagaaaataaaaggtaatatttta

SEQ ID NO: 328878 - DNA, 316 bp, Homo sapiens
tgaacttaatagcttcacaagaaaaatgttttatagtcatatacttgaccctatcagggaatagccacctaaaagcatgtgtagctggttacaaagtgcatcaagggagagaatggctggctctgaataaactgttaacttattccacaactaaattctaacctgatacttatgaattgcaaagtgattgctgcaaactttttctaaggtggctgaagatttaaaatagatcattctaaagggaaatcagtaaaatgtcttgataattggtatccaaatcacttgtgtgcctgagaaaataaaaggtaatatttta

SEQ ID NO: 328879 - DNA, 4617 bp, Homo sapiens
  misc_feature (659)..(659): n is a, c, g, or t
ctcggcgcctatctggagcgccacggtccgcccgaggcttcggagctgccggagccgggcggggccttggcgggcggccccgggagtggcggcggcggcgtggtggtcggcgtggctgaggtgagaaactggcgctgctgctgcctcggcagcacctgttggtgccggagcctcgtgctggtctgcgtgttggccgccctgtgcttcgcttccctggccctggtccgccgctaccttcaccacctcctgctgtgggtggagagccttgactcgctgctgggggtcctgctcttcgtcgtgggcttcatcgtggtctctttcccctgcggctggggctacatcgtgctcaacgtggccgctggctacctgtacggcttcgtgctgggcatgggtctgatgatggtgggcgtcctcatcggcaccttcatcgcccatgtggtctgcaagcggctcctcaccgcctgggtggccgccaggatccagagcagcgagaagctgagcgcggttattcgcgtagtggagggaggaagcggcctgaaagtggtggcgctggccagactgacacccataccttttgggcttcagaatgcagtgttttcgattactgatctctcattacccaactatctgatggcatcttcggttggactgcttcctanccagcttctgaattcttacttgggtaccaccctgcggacaatggaagatgtcattgcagaacagagtgttagtggatatattgtgttttggttacagattattataagtataggcctcatgttttatgtagttcatcgagctcaagtggaattgaatgcagctattgtagcttgtgaaatggaactgaaatcttctctggttaaaggcaatcaaccaaataccagtggctcttcattctacaacaagaggaccctaacattttctggaggtggaatcaatgttgtatgattctaatgagatacgtgattgtcaagagcctagtgtgctatctaaggtctagcagtcacttcactagtgggcagagacaagttctaattgtattacagcacaaacaaaactgactagtttttaaattgcacaattttttttttttaaagcaagaatcattttctgggtatgtaagtgtaaatgtagatgcaaatttggctgcacctctttatcatgcctgtattggcctataggtctgcactttagtgttttttaattgttttatttctgtgtatttacgaacagagaaataacccaaatattatttctgcttagtgtctttatttataaagcccatgagtagtttgtatgcatctttcctacttgtaaagatgagtaaaagtatgcagttttaaatttataatattattggatgttcttggcttgggtagtctttccagaaaggataaacagtggtttttgttttgttttgttttattgtttaagtgggaccacttagcttcccgtttccttactagttaaagaacagacattaattttcagttgaatgtatttttgcaggcatcatattgttacagggccatttacacctattcacaaagcttaaatcctaccttgtgggactgaagtgctcttaatataactgtttattttcactgtgtaatatgcaaagcaaaagggaaattatttggtggatggtagctcaaaattggaactcttgttctaattcagttacattggctttaccctccttagatttttcatcaaagggctgtcccattgcaatcttactaaaacattttgttaaaataaactcttttcctttttatattaataattaggcttttaaataaagatgttattcctttaaaatggtgggcttaccatcattgaagatgtcactcaggtggccttgtttgatcaaaacgccttttttaaaaaccaagctttaaaaacatgtttataatttcatgaagtacatatatattgttcccatagtcttcagctttaaaactataaatatgcccaaatttgttatttgccctactttaagtaggtttattgtgttgttttttcagtacttgtttttctctgataagactcaggaattctgaaatgtgaaattgtctcaattctttctcttgtagcatgaatcaaatgtatttattaatagcacttatgactatagaatataatttggcatatgattcatattacatatgtattcgttttatttttaaaatagtttataaacttaatgatttttttttacaaatgaggttatagatattaatgcaaattttctggtaggtatctctttttttgctatgatgattccaacttatcagagacctcccatttgccttttcattacggtgaaagctttgccctcatctactaaagtacaaaggaattctttggaagcagattattctagtcttatgctagagatgaatttgatcattttaatgtgtgatctttttgctctatcaggtataattgttttcctttcctttataatgggtaagttttctcacctttgagtaacagtaaagttcatttatatgtccatacctagaagaccagtgcaaatactttgagagcacctgggtctacaggacataattggcatctaaatcctcatttcttgctattagtaggaaaacagatatagtattgtaatacccttattctttttgaatcctaattactcatttcggttttttttctctcttttgaatctagttgctggttttcgtttaatgattttagtttaacaatcccaaccaacaatacatttgatttatttttttctgtctaacctgacaacctttttcttgtgcttcttgtttgttggttagtttttgtgaaaggaatcattgtttaagatcactgttttcatacttgttttacacttcacgtattttgaagtacatttatttactaagcatttgtgacttgaataatttcaccaaatgaatacattttggtagtttgtaatgagttcttctaattgttacactttgcttggtacttaacaataaatatgtaaaggtaaaagaaataattttctgtattctgccaatcttaattttatataataaatcatccatttttttcttaaaatagtatggattgactgtttctaaaataccaatctgtggctgtggtttttcttttcttcagcatttccagcatccaagtaaacaatagtcccttatagtcctgctacttgatgggtaaatttggttgctgggtttttaagttgcactcacaataaatcgtgcaaagcattgtcatgccttatttactccatttttaatcctgcatcccagatttatggcagcaacacatatctacaggatacttttatgttgtccaaatattgctgtcagtcatatgtacttataaaatgtctccactcatgtatatttatagaaatgaaatgtcaaatttctcagactgttaaagtgcagtataaagttgcttaatgcacacttaaaaatgatatataatttctgaatcctatgaaatatgtgttcttttttaattctttgggagttttcttaagttttacatgttttttggtttattgttaatgattttgtttactctttgccaaattttgtcatgtaggttattttacaatagcacctttaaaaaaaatgtatatgctaatttactaagcatattcatgtccatttttatttgatcatctgatttgtgaaataacttgaaatttgtactgtttggtttgtgaaaataatattaccaaatctctgtcattagaatgtgtactttatgttcagaagtgactgtgggtttattcagagccagccattctctcccttgatgcactttgtaaccagctacacatgcttttaggtggcttttccctgatagggtcaagtatatgactataaaacatttttcttgtgaagctattaagttcattagttactcttatttccccttgttgtaactaagtggtgcaggtataagcatatccccagcattcctgtgtgtgtgaatgtgcactgctgatttggactgttcttgagaaaggtgctgtgacatatgtcaatatttgttagctctggggatatctttagaatgcttgagaaagttgctaggtgtgtgccacattggtgcaggtaaatccatgctgttcacagccaagcagcatttgcagagaaaaggagagttttacatagaccccaggaaaaacagtactaacctggttgatggccttggtggtggaattttgtttcagccagaggctactcattatatcagaatgatgttcagtataacactatctgatttttagattggtcgatttctgttgtaatcaagtatttaggatgtaatctttttaaagtcattgctttaatctgaaaagccattagaagggagaggaatcactgttccacaggatatttaaaactcaggagttcaaataacctcacatattgaacataaactgttaacttattccacaactaaattctaacctgatacttatgaattgcaaagtgattgctgcaaactttttctaaggtggctgaagatttaaaatagatcattctaaagggaaatcagtaaaatgtcttgataattggtatccaaatcacttgtgtgcctgagaaaataaaaggtaatatttta

SEQ ID NO: 328880 - DNA, 4565 bp, Homo sapiens
  misc_feature (659)..(659): n is a, c, g, or t
ctcggcgcctatctggagcgccacggtccgcccgaggcttcggagctgccggagccgggcggggccttggcgggcggccccgggagtggcggcggcggcgtggtggtcggcgtggctgaggtgagaaactggcgctgctgctgcctcggcagcacctgttggtgccggagcctcgtgctggtctgcgtgttggccgccctgtgcttcgcttccctggccctggtccgccgctaccttcaccacctcctgctgtgggtggagagccttgactcgctgctgggggtcctgctcttcgtcgtgggcttcatcgtggtctctttcccctgcggctggggctacatcgtgctcaacgtggccgctggctacctgtacggcttcgtgctgggcatgggtctgatgatggtgggcgtcctcatcggcaccttcatcgcccatgtggtctgcaagcggctcctcaccgcctgggtggccgccaggatccagagcagcgagaagctgagcgcggttattcgcgtagtggagggaggaagcggcctgaaagtggtggcgctggccagactgacacccataccttttgggcttcagaatgcagtgttttcgattactgatctctcattacccaactatctgatggcatcttcggttggactgcttcctanccagcttctgaattcttacttgggtaccaccctgcggacaatggaagatgtcattgcagaacagagtgttagtggatatattgtgttttggttacagattattataagtataggcctcatgttttatgtagttcatcgagctcaagtggaattgaatgcagctattgtagcttgtgaaatggaactgaaatcttctctggttaaaggcaatcaaccaaataccagtggctcttcattctacaacaagaggaccctaacattttctggaggtggaatcaatgttgtatgattctaatgagatacgtgattgtcaagagcctagtgtgctatctaaggtctagcagtcacttcactagtgggcagagacaagttctaattgtattacagcacaaacaaaactgactagtttttaaattgcacaattttttttttttaaagcaagaatcattttctgggtatgtaagtgtaaatgtagatgcaaatttggctgcacctctttatcatgcctgtattggcctataggtctgcactttagtgttttttaattgttttatttctgtgtatttacgaacagagaaataacccaaatattatttctgcttagtgtctttatttataaagcccatgagtagtttgtatgcatctttcctacttgtaaagatgagtaaaagtatgcagttttaaatttataatattattggatgttcttggcttgggtagtctttccagaaaggataaacagtggtttttgttttgttttgttttattgtttaagtgggaccacttagcttcccgtttccttactagttaaagaacagacattaattttcagttgaatgtatttttgcaggcatcatattgttacagggccatttacacctattcacaaagcttaaatcctaccttgtgggactgaagtgctcttaatataactgtttattttcactgtgtaatatgcaaagcaaaagggaaattatttggtggatggtagctcaaaattggaactcttgttctaattcagttacattggctttaccctccttagatttttcatcaaagggctgtcccattgcaatcttactaaaacattttgttaaaataaactcttttcctttttatattaataattaggcttttaaataaagatgttattcctttaaaatggtgggcttaccatcattgaagatgtcactcaggtggccttgtttgatcaaaacgccttttttaaaaaccaagctttaaaaacatgtttataatttcatgaagtacatatatattgttcccatagtcttcagtttattgtgttgttttttcagtacttgtttttctctgataagactcaggaattctgaaatgtgaaattgtctcaattctttctcttgtagcatgaatcaaatgtatttattaatagcacttatgactatagaatataatttggcatatgattcatattacatatgtattcgttttatttttaaaatagtttataaacttaatgatttttttttacaaatgaggttatagatattaatgcaaattttctggtaggtatctctttttttgctatgatgattccaacttatcagagacctcccatttgccttttcattacggtgaaagctttgccctcatctactaaagtacaaaggaattctttggaagcagattattctagtcttatgctagagatgaatttgatcattttaatgtgtgatctttttgctctatcaggtataattgttttcctttcctttataatgggtaagttttctcacctttgagtaacagtaaagttcatttatatgtccatacctagaagaccagtgcaaatactttgagagcacctgggtctacaggacataattggcatctaaatcctcatttcttgctattagtaggaaaacagatatagtattgtaatacccttattctttttgaatcctaattactcatttcggttttttttctctcttttgaatctagttgctggttttcgtttaatgattttagtttaacaatcccaaccaacaatacatttgatttatttttttctgtctaacctgacaacctttttcttgtgcttcttgtttgttggttagtttttgtgaaaggaatcattgtttaagatcactgttttcatacttgttttacacttcacgtattttgaagtacatttatttactaagcatttgtgacttgaataatttcaccaaatgaatacattttggtagtttgtaatgagttcttctaattgttacactttgcttggtacttaacaataaatatgtaaaggtaaaagaaataattttctgtattctgccaatcttaattttatataataaatcatccatttttttcttaaaatagtatggattgactgtttctaaaataccaatctgtggctgtggtttttcttttcttcagcatttccagcatccaagtaaacaatagtcccttatagtcctgctacttgatgggtaaatttggttgctgggtttttaagttgcactcacaataaatcgtgcaaagcattgtcatgccttatttactccatttttaatcctgcatcccagatttatggcagcaacacatatctacaggatacttttatgttgtccaaatattgctgtcagtcatatgtacttataaaatgtctccactcatgtatatttatagaaatgaaatgtcaaatttctcagactgttaaagtgcagtataaagttgcttaatgcacacttaaaaatgatatataatttctgaatcctatgaaatatgtgttcttttttaattctttgggagttttcttaagttttacatgttttttggtttattgttaatgattttgtttactctttgccaaattttgtcatgtaggttattttacaatagcacctttaaaaaaaatgtatatgctaatttactaagcatattcatgtccatttttatttgatcatctgatttgtgaaataacttgaaatttgtactgtttggtttgtgaaaataatattaccaaatctctgtcattagaatgtgtactttatgttcagaagtgactgtgggtttattcagagccagccattctctcccttgatgcactttgtaaccagctacacatgcttttaggtggcttttccctgatagggtcaagtatatgactataaaacatttttcttgtgaagctattaagttcattagttactcttatttccccttgttgtaactaagtggtgcaggtataagcatatccccagcattcctgtgtgtgtgaatgtgcactgctgatttggactgttcttgagaaaggtgctgtgacatatgtcaatatttgttagctctggggatatctttagaatgcttgagaaagttgctaggtgtgtgccacattggtgcaggtaaatccatgctgttcacagccaagcagcatttgcagagaaaaggagagttttacatagaccccaggaaaaacagtactaacctggttgatggccttggtggtggaattttgtttcagccagaggctactcattatatcagaatgatgttcagtataacactatctgatttttagattggtcgatttctgttgtaatcaagtatttaggatgtaatctttttaaagtcattgctttaatctgaaaagccattagaagggagaggaatcactgttccacaggatatttaaaactcaggagttcaaataacctcacatattgaacataaactgttaacttattccacaactaaattctaacctgatacttatgaattgcaaagtgattgctgcaaactttttctaaggtggctgaagatttaaaatagatcattctaaagggaaatcagtaaaatgtcttgataattggtatccaaatcacttgtgtgcctgagaaaataaaaggtaatatttta

SEQ ID NO: 328881 - DNA, 877 bp, Homo sapiens
  misc_feature (659)..(659): n is a, c, g, or t
ctcggcgcctatctggagcgccacggtccgcccgaggcttcggagctgccggagccgggcggggccttggcgggcggccccgggagtggcggcggcggcgtggtggtcggcgtggctgaggtgagaaactggcgctgctgctgcctcggcagcacctgttggtgccggagcctcgtgctggtctgcgtgttggccgccctgtgcttcgcttccctggccctggtccgccgctaccttcaccacctcctgctgtgggtggagagccttgactcgctgctgggggtcctgctcttcgtcgtgggcttcatcgtggtctctttcccctgcggctggggctacatcgtgctcaacgtggccgctggctacctgtacggcttcgtgctgggcatgggtctgatgatggtgggcgtcctcatcggcaccttcatcgcccatgtggtctgcaagcggctcctcaccgcctgggtggccgccaggatccagagcagcgagaagctgagcgcggttattcgcgtagtggagggaggaagcggcctgaaagtggtggcgctggccagactgacacccataccttttgggcttcagaatgcagtgttttcgattactgatctctcattacccaactatctgatggcatcttcggttggactgcttcctanccagcttctgaattcttacttgggtaaacaacccaaagaaaaaggagaatcatatgaaacgaaatacaagaaaataagacatgggttcacaataaaaaaatagcccccgacaaatgaaccacgaccaagtaatgatgcgtaggactgtaatgacgactcggtaaggcccaaacgtgtcctacaaaacacatcggggaaccattactcacaccggttcc

SEQ ID NO: 328882 - DNA, 3072 bp, Homo sapiens
  misc_feature (659)..(659): n is a, c, g, or t
ctcggcgcctatctggagcgccacggtccgcccgaggcttcggagctgccggagccgggcggggccttggcgggcggccccgggagtggcggcggcggcgtggtggtcggcgtggctgaggtgagaaactggcgctgctgctgcctcggcagcacctgttggtgccggagcctcgtgctggtctgcgtgttggccgccctgtgcttcgcttccctggccctggtccgccgctaccttcaccacctcctgctgtgggtggagagccttgactcgctgctgggggtcctgctcttcgtcgtgggcttcatcgtggtctctttcccctgcggctggggctacatcgtgctcaacgtggccgctggctacctgtacggcttcgtgctgggcatgggtctgatgatggtgggcgtcctcatcggcaccttcatcgcccatgtggtctgcaagcggctcctcaccgcctgggtggccgccaggatccagagcagcgagaagctgagcgcggttattcgcgtagtggagggaggaagcggcctgaaagtggtggcgctggccagactgacacccataccttttgggcttcagaatgcagtgttttcgattactgatctctcattacccaactatctgatggcatcttcggttggactgcttcctanccagcttctgaattcttacttgggtaccaccctgcggacaatggaagatgtcattgcagaacagagtgttagtggatatattgtgttttggttacagattattataagtataggcctcatgttttatgtagttcatcgagctcaagtggaattgaatgcagctattgtagcttgtgaaatggaactgaaatcttctctggttaaaggcaatcaaccaaataccagtggctcttcattctacaacaagaggaccctaacattttctggaggtggaatcaatgttgtatgattctaatgagatacgtgattgtcaagagcctagtgtgctatctaaggtctagcagtcacttcactagtgggcagagacaagttctaattgtattacagcacaaacaaaactgactagtttttaaattgcacaattttttttttttaaagcaagaatcattttctgggtatgtaagtgtaaatgtagatgcaaatttggctgcacctctttatcatgcctgtattggcctataggtctgcactttagtgttttttaattgttttatttctgtgtatttacgaacagagaaataacccaaatattatttctgcttagtgtctttatttataaagcccatgagtagtttgtatgcatctttcctacttgtaaagatgagtaaaagtatgcagttttaaatttataatattattggatgttcttggcttgggtagtctttccagaaaggataaacagtggtttttgttttgttttgttttattgtttaagtgggaccacttagcttcccgtttccttactagttaaagaacagacattaattttcagttgaatgtatttttgcaggcatcatattgttacagggccatttacacctattcacaaagcttaaatcctaccttgtgggactgaagtgctcttaatataactgtttattttcactgtgtaatatgcaaagcaaaagggaaattatttggtggatggtagctcaaaattggaactcttgttctaattcagttacattggctttaccctccttagatttttcatcaaagggctgtcccattgcaatcttactaaaacattttgttaaaataaactcttttcctttttatattaataattaggcttttaaataaagatgttattcctttaaaatggtgggcttaccatcattgaagatgtcactcaggtggccttgtttgatcaaaacgccttttttaaaaaccaagctttaaaaacatgtttataatttcatgaagtacatatatattgttcccatagtcttcagctttaaaactataaatatgcccaaatttgttatttgccctactttaagtaggtttattgtgttgttttttcagtacttgtttttctctgataagactcaggaattctgaaatgtgaaattgtctcaattctttctcttgtagcatgaatcaaatgtatttattaatagcacttatgactatagaatataatttggcatatgattcatattacatatgtattcgttttatttttaaaatagtttataaacttaatgatttttttttacaaatgaggttatagatattaatgcaaattttctggtaggtatctctttttttgctatgatgattccaacttatcagagacctcccatttgccttttcattacggtgaaagctttgccctcatctactaaagtacaaaggaattctttggaagcagattattctagtcttatgctagagatgaatttgatcattttaatgtgtgatctttttgctctatcaggtataattgttttcctttcctttataatgggtaagttttctcacctttgagtaacagtaaagttcatttatatgtccatacctagaagaccagtgcaaatactttgagagcacctgggtctacaggacataattggcatctaaatcctcatttcttgctattagtaggaaaacagatatagtattgtaatacccttattctttttgaatcctaattactcatttcggttttttttctctcttttgaatctagttgctggttttcgtttaatgattttagtttaacaatcccaaccaacaatacatttgatttatttttttctgtctaacctgacaacctttttcttgtgcttcttgtttgttggttagtttttgtgaaaggaatcattgtttaagatcactgttttcatacttgttttacacttcacgtattttgaagtacatttatttactaagcatttgtgacttgaataatttcaccaaatgaatacattttggtagtttgtaatgagttcttctaattgttacactttgcttggtacttaacaataaatatgtaaaggtaaaagaaataattttctgtattctgccaatcttaattttatataataaatcatccatttttttctta

SEQ ID NO: 328883 - DNA, 196 bp, Homo sapiens
ggtgccaggaggggtcgggtgctgcggcagtcctcgcgcagacctccgttttgagcacccccacccttgtttccaggggaccctgggccatgaggcgtggggtgcgtgcccgccaccaccatccgtgtctctgctgggaatggctccctggtggccgtccgtctgctcgccacgtcccacccccagcctgctgtcg

SEQ ID NO: 328884 - DNA, 1726 bp, Homo sapiens
tgagacagattttcgctcttgttgcccaggctgcagtgcagtggtgtgatctcggctcactgcaacctccgcctcccgggttcaagcgattctcctacctcagcctcccgagtagctaggattacaggcgcccgccaccatgcccggctaattcctggcattttaaatacgataaattacttcaacctatgaccacctcaagctgaatataagtagccgcagacaccgtttgcatgacccaggaaccacaaacacggagcgaaggcctgccgggaccacgctgagcttcactactggcagccaactcacttccgggggtgcactcagcacagcagtggcccaacccgccctcaaccggaagtcttttgggctccggcttcgccgtcgccccgccccctggcctttgccccggtcgggcgggacttcctgtgtcgtatttccaaggactccaaagcgaggccggggactgaaggtgtgggtgtcgagccctctggcagagggttaacctgggtcaaatgcacggattctcacctcgtacagttacgctctcccgcggcacgtccgcgaggacttgaagtcctgagcgctcaagtttgtccgtaggtcgagagaaggccatggaggtgccgccaccggcaccgcggagctttctctgtagagcattgtgcctatttccccgagtctttgctgccgaagctgtgactgccgattcggaagtccttgaggagcgtcagaagcggcttccctacgtcccagagccctattacccggaatctggatgggaccgcctccgggagctgtttggcaaagatgaacagcagagaatttcaaaggaccttgctaatatctgtaagacggcagctacagcaggcatcattggctgggtgtatgggggaataccagcttttattcatgctaaacaacaatacattgagcagagccaggcagaaatttatcataaccggtttgatgctgtgcaatctgcacatcgtgctgccacacgaggcttcattcgttatggctggcgctggggttggagaactgcagtgtttgtgactatattcaacacagtgaacactagtctgaatgtataccgaaataaagatgccttaagccattttgtaattgcaggagcactcctgtaggaggcctgctgatggcatttcagaagtactctggtgagactgttcaggaaagaaaacagaaggatcgaaaggcactccatgagctaaaactggaagagtggaaaggcagactacaagttactgagcacctccctgagaaaattgaaagtagtttacaggaagatgaacctgagaatgatgctaagaaaattgaagcactgctaaaccttcctagaaacccttcagtaatagataaacaagacaaggactgaaagtgctctgaacttgaaactcactggagagctgaagggagctgccatgtccgatgaatgccaacagacaggccactctttggtcagcctgctgacaaatttaagtgctggtacctgtggtggcagtggcttgctcttgtctttttcttttctttttaactaagaatggggctgttgtactctcactttacttatccttaaatttaaatacatacttatgtttgtattaatctatcaatatatgcatacatgaatatatccacccacctagattttaagcagtaaataaaacatttcgcaaaagattaaagttgaattttacagttcgta

SEQ ID NO: 328885 - DNA, 1550 bp, Homo sapiens
tgagacagattttcgctcttgttgcccaggctgcagtgcagtggtgtgatctcggctcactgcaacctccgcctcccgggttcaagcgattctcctacctcagcctcccgagtagctaggattacaggcgcccgccaccatgcccggctaattcctggcattttaaatacgataaattacttcaacctatgaccacctcaagctgaatataagtagccgcagacaccgtttgcatgacccaggaaccacaaacacggagcgaaggcctgccgggaccacgctgagcttcactactggcagccaactcacttccgggggtgcactcagcacagcagtggcccaacccgccctcaaccggaagtcttttgggctccggcttcgccgtcgccccgccccctggcctttgccccggtcgggcgggacttcctgtgtcgtatttccaaggactccaaagcgaggccggggactgaaggtgtgggtgtcgagccctctggcagagggttaacctgggtcaaatgcacggattctcacctcgtacagttacgctctcccgcggcacgtccgcgaggacttgaagtcctgagcgctcaagtttgtccgtaggtcgagagaaggccatggaggtgccgccaccggcaccgcggagctttctctgtagagcattgtgcctatttccccgagtctttgctgccgaagctgtgactgccgattcggaagtccttgaggagcgtcagaagcggcttccctacgtcccagagccctattacccggaatctggatgggaccgcctccgggagctgtttggcaaagacacagtgaacactagtctgaatgtataccgaaataaagatgccttaagccattttgtaattgcaggagctgtcacgggaagtctttttaggataaacgtaggcctgcgtggcctggtggctggtggcataattggagccttgctgggcactcctgtaggaggcctgctgatggcatttcagaagtactctggtgagactgttcaggaaagaaaacagaaggatcgaaaggcactccatgagctaaaactggaagagtggaaaggcagactacaagttactgagcacctccctgagaaaattgaaagtagtttacaggaagatgaacctgagaatgatgctaagaaaattgaagcactgctaaaccttcctagaaacccttcagtaatagataaacaagacaaggactgaaagtgctctgaacttgaaactcactggagagctgaagggagctgccatgtccgatgaatgccaacagacaggccactctttggtcagcctgctgacaaatttaagtgctggtacctgtggtggcagtggcttgctcttgtctttttcttttctttttaactaagaatggggctgttgtactctcactttacttatccttaaatttaaatacatacttatgtttgtattaatctatcaatatatgcatacatgaatatatccacccacctagattttaagcagtaaataaaacatttcgcaaaagattaaagttgaattttacagttcgta

SEQ ID NO: 328886 - DNA, 1226 bp, Homo sapiens
attttcacaaactgaacatagctgtacccagcactaagaaagaaatggcaactattgtaacatcccaaaagctccccttgtgccttttccggtcattgtcttttcaggagttgccactatcctaattctaacaccatagcttcgttttgtctgagactacgttccttttaatataactgaactgtttaattcatctgagaattctacctatgatgaaaaatgttgtggtggtagcatttgggttaattctgattatagagtctcttggagagcaatgtccataaactaatcccaaacaacattgtctttttgatgttgtagtgaacagcagagaatttcaaaggaccttgctaatatctgtaagacggcagctacagcaggcatcattggctgggtgtatgggggaataccagcttttattcatgctaaacaacaatacattgagcagagccaggcagaaatttatcataaccggtttgatgctgtgcacagtgaacactagtctgaatgtataccgaaataaagatgccttaagccattttgtaattgcaggagctgtcacgggaagtctttttaggataaacgtaggcctgcgtggcctggtggctggtggcataattggagccttgctgggcactcctgtaggaggcctgctgatggcatttcagaagtactctggtgagactgttcaggaaagaaaacagaaggatcgaaaggcactccatgagctaaaactggaagagtggaaaggcagactacaagttactgagcacctccctgagaaaattgaaagtagtttacaggaagatgaacctgagaatgatgctaagaaaattgaagcactgctaaaccttcctagaaacccttcagtaatagataaacaagacaaggactgaaagtgctctgaacttgaaactcactggagagctgaagggagctgccatgtccgatgaatgccaacagacaggccactctttggtcagcctgctgacaaatttaagtgctggtacctgtggtggcagtggcttgctcttgtctttttcttttctttttaactaagaatggggctgttgtactctcactttacttatccttaaatttaaatacatacttatgtttgtattaatctatcaatatatgcatacatgaatatatccacccacctagattttaagcagtaaataaaacatttcgcaaaagattaaagttgaattttacagttcgta

SEQ ID NO: 328887 - DNA, 1482 bp, Homo sapiens
tgagacagattttcgctcttgttgcccaggctgcagtgcagtggtgtgatctcggctcactgcaacctccgcctcccgggttcaagcgattctcctacctcagcctcccgagtagctaggattacaggcgcccgccaccatgcccggctaattcctggcattttaaatacgataaattacttcaacctatgaccacctcaagctgaatataagtagccgcagacaccgtttgcatgacccaggaaccacaaacacggagcgaaggcctgccgggaccacgctgagcttcactactggcagccaactcacttccgggggtgcactcagcacagcagtggcccaacccgccctcaaccggaagtcttttgggctccggcttcgccgtcgccccgccccctggcctttgccccggtcgggcgggacttcctgtgtcgtatttccaaggactccaaagcgaggccggggactgaaggtgtgggtgtcgagccctctggcagagggttaacctgggtcaaatgcacggattctcacctcgtacagttacgctctcccgcggcacgtccgcgaggacttgaagtcctgagcgctcaagtttgtccgtaggtcgagagaaggccatggaggtgccgccaccggcaccgcggagctttctctgtagagcattgtgcctatttccccgagtctttgctgccgaagctgtgactgccgattcggaagtccttgaggagcgtcagaagcggcttccctacgtcccagagccctattacccggaatctggatgggaccgcctccgggagctgtttggcaaagactgtcacgggaagtctttttaggataaacgtaggcctgcgtggcctggtggctggtggcataattggagccttgctgggcactcctgtaggaggcctgctgatggcatttcagaagtactctggtgagactgttcaggaaagaaaacagaaggatcgaaaggcactccatgagctaaaactggaagagtggaaaggcagactacaagttactgagcacctccctgagaaaattgaaagtagtttacaggaagatgaacctgagaatgatgctaagaaaattgaagcactgctaaaccttcctagaaacccttcagtaatagataaacaagacaaggactgaaagtgctctgaacttgaaactcactggagagctgaagggagctgccatgtccgatgaatgccaacagacaggccactctttggtcagcctgctgacaaatttaagtgctggtacctgtggtggcagtggcttgctcttgtctttttcttttctttttaactaagaatggggctgttgtactctcactttacttatccttaaatttaaatacatacttatgtttgtattaatctatcaatatatgcatacatgaatatatccacccacctagattttaagcagtaaataaaacatttcgcaaaagattaaagttgaattttacagttcgta

SEQ ID NO: 328888 - DNA, 747 bp, Homo sapiens
ttggatagctgttctagaggatcccagtgtcatgtataccgaaataaagatgcttagccatttgtaattgcaggagctgtcacgggaagtctttttaggataaacgtaggcctgcgtggcctggtggctggtggcataattggagccttgctgggcactcctgtaggaggcctgctgatggcatttcagaagtactctggtgagactgttcaggaaagaaaacagaaggatcgaaaggcactccatgagctaaaactggaagagtggaaaggcagactacaagttactgagcacctccctgagaaaattgaaagtagtttacaggaagatgaacctgagaatgatgctaagaaaattgaagcactgctaaaccttcctagaaacccttcagtaatagataaacaagacaaggactgaaagtgctctgaacttgaaactcactggagagctgaagggagctgccatgtccgatgaatgccaacagacaggccactctttggtcagcctgctgacaaatttaagtgctggtacctgtggtggcagtggcttgctcttgtctttttcttttctttttaactaagaatggggctgttgtactctcactttacttatccttaaatttaaatacatacttatgtttgtattaatctatcaatatatgcatacatgaatatatccacccacctagattttaagcagtaaataaaacatttcgcaaaagattaaagttgaattttacagttcgta

SEQ ID NO: 328889 - DNA, 2205 bp, Homo sapiens
tgagacagattttcgctcttgttgcccaggctgcagtgcagtggtgtgatctcggctcactgcaacctccgcctcccgggttcaagcgattctcctacctcagcctcccgagtagctaggattacaggcgcccgccaccatgcccggctaattcctggcattttaaatacgataaattacttcaacctatgaccacctcaagctgaatataagtagccgcagacaccgtttgcatgacccaggaaccacaaacacggagcgaaggcctgccgggaccacgctgagcttcactactggcagccaactcacttccgggggtgcactcagcacagcagtggcccaacccgccctcaaccggaagtcttttgggctccggcttcgccgtcgccccgccccctggcctttgccccggtcgggcgggacttcctgtgtcgtatttccaaggactccaaagcgaggccggggactgaaggtgtgggtgtcgagccctctggcagagggttaacctgggtcaaatgcacggattctcacctcgtacagttacgctctcccgcggcacgtccgcgaggacttgaagtcctgagcgctcaagtttgtccgtaggtcgagagaaggccatggaggtgccgccaccggcaccgcggagctttctctgtagagcattgtgcctatttccccgagtctttgctgccgaagctgtgactgccgattcggaagtccttgaggagcgtcagaagcggcttccctacgtcccagagccctattacccggaatctggatgggaccgcctccgggagctgtttggcaaagatgaacagcagagaatttcaaaggaccttgctaatatctgtaagacggcagctacagcaggcatcattggctgggtgtatgggggaataccagcttttattcatgctaaacaacaatacattgagcagagccaggcagaaatttatcataaccggtttgatgctgtgcaatctgcacatcgtgctgccacacgaggcttcattcgttatggctggcgctggggttggagaactgcagtgtttgtgactatattcaacacagtgaacactagtctgaatgtataccgaaataaagatgccttaagccattttgtaattgcaggagctgtcacgggaagtctttttaggataaacgtaggcctgcgtggcctggtggctggtggcataattggagccttgctgggcactcctgtaggaggcctgctgatggcatttcagaagtactctggtgagactgttcaggaaagaaaacagaaggatcgaaaggcactccatgagctaaaactggaagagtggaaaggcagactacaagttactgagcacctccctgagaaaattgaaagtagtttacaggaagatgaacctgagaatgatgctaagaaaattgaagcactgctaaaccttcctagaaacccttcagtaatagataaacaagacaaggactgaaagtgctctgaacttgaaactcactggagagctgaagggagctgccatgtccgatgaatgccaacagacaggccactctttggtcagcctgctgacaaatttaagtgctggtacctgtggtggcagtggcttgctcttgtctttttcttttctttttaactaagaatggggctgttgtactctcactttacttatccttaaatttaaatacatacttatgtttgtattaatctatcaatatatgcatacatgaatatatccacccacctagattttaagcagtaaataaaacatttcgcaaaagattaaagttgaattttacagttcgtaaaaaaaaaaaaaaaaaaaaaaaaaacaaaacaaaaaaaaaacaaaagaaaagtaaaaaaaaaaaaaaaaaagaggggggcggccgccgactaaaatacaatctcccccgagggggggcggcccacgaatatgaaccgcgtacaccccccctctcttgcgagagacacaaacaagaggggcgcccacccaatgaagagcgaggagcgaccacataacgatagacaggagaagacggaggagcgccgcgcgtgtagaaaaaaaacacgacccatcacgcaggcgggcagaaaaacgacgcgcccccgagggagaaccatcgagcggagcaacaagagaaacgccacaacagaaccggcggcgggcgcacacacactctcgggcacacccaccccgccataaa

SEQ ID NO: 328890 - DNA, 1804 bp, Homo sapiens
  misc_feature (1770)..(1770): n is a, c, g, or t
tgagacagattttcgctcttgttgcccaggctgcagtgcagtggtgtgatctcggctcactgcaacctccgcctcccgggttcaagcgattctcctacctcagcctcccgagtagctaggattacaggcgcccgccaccatgcccggctaattcctggcattttaaatacgataaattacttcaacctatgaccacctcaagctgaatataagtagccgcagacaccgtttgcatgacccaggaaccacaaacacggagcgaaggcctgccgggaccacgctgagcttcactactggcagccaactcacttccgggggtgcactcagcacagcagtggcccaacccgccctcaaccggaagtcttttgggctccggcttcgccgtcgccccgccccctggcctttgccccggtcgggcgggacttcctgtgtcgtatttccaaggactccaaagcgaggccggggactgaaggtgtgggtgtcgagccctctggcagagggttaacctgggtcaaatgcacggattctcacctcgtacagttacgctctcccgcggcacgtccgcgaggacttgaagtcctgagcgctcaagtttgtccgtaggtcgagagaaggccatggaggtgccgccaccggcaccgcggagctttctctgtagagcattgtgcctatttccccgagtctttgctgccgaagctgtgactgccgattcggaagtccttgaggagcgtcagaagcggcttccctacgtcccagagccctattacccggaatctggatgggaccgcctccgggagctgtttggcaaagatgaacagcagagaatttcaaaggaccttgctaatatctgtaagacggcagctacagcaggcatcattggctgggtgtatgggggaataccagcttttattcatgctaaacaacaatacattgagcagagccaggcagaaatttatcataaccggtttgatgctgtgcaatctgcacatcgtgctgccacacgaggcttcattcgttatggctggcgctggggttggagaactgcagtgtttgtgactatattcaacacagtgaacactagtctgaatgtataccgaaataaagatgccttaagccattttgtaattgcaggagctgtcacgggaagtctttttaggataaacgtaggcctgcgtggcctggtggctggtggcataattggagccttgctgggcactcctgtaggaggcctgctgatggcatttcagaagtactctggtgagactgttcaggaaagaaaacagaaggatcgaaaggcactccatgagctaaaactggaagagtggaaaggcagactacaagttactgagcacctccctgagaaaattgaaagtagtttacaggaagatgaacctgagaatgatgctaagaaaattgaagcactgctaaaccttcctagaaacccttcagtaatagataaacaagacaaggactgaaagtgctctgaacttgaaactcactggagagctgaagggagctgccatgtccgatgaatgccaacagacaggccactctttggtcagcctgctgacaaatttaagtgctggtacctgtggtggcagtggcttgctcttgtctttttcttttctttttaactaagaatggggctgttgtactctcactttacttatccttaaatttaaatacatacttatgtttgtattaatctatcaatatatgcatacatgaatatatccacccacctagattttaagcagtaaataaaagtgngagtacaacagccccattcttagttaaaaaaaaa

SEQ ID NO: 328891 - DNA, 1548 bp, Homo sapiens
tgagacagattttcgctcttgttgcccaggctgcagtgcagtggtgtgatctcggctcactgcaacctccgcctcccgggttcaagcgattctcctacctcagcctcccgagtagctaggattacaggcgcccgccaccatgcccggctaattcctggcattttaaatacgataaattacttcaacctatgaccacctcaagctgaatataagtagccgcagacaccgtttgcatgacccaggaaccacaaacacggagcgaaggcctgccgggaccacgctgagcttcactactggcagccaactcacttccgggggtgcactcagcacagcagtggcccaacccgccctcaaccggaagtcttttgggctccggcttcgccgtcgccccgccccctggcctttgccccggtcgggcgggacttcctgtgtcgtatttccaaggactccaaagcgaggccggggactgaaggtgtgggtgtcgagccctctggcagagggttaacctgggtcaaatgcacggattctcacctcgtacagttacgctctcccgcggcacgtccgcgaggacttgaagtcctgagcgctcaagtttgtccgtaggtcgagagaaggccatggaggtgccgccaccggcaccgcggagctttctctgtagagcattgtgcctatttccccgagtctttgctgccgaagctgtgactgccgattcggaagtccttgaggagcgtcagaagcggcttccctacgtcccagagccctattacccggaatctggatgggaccgcctccgggagctgtttggcaaagatgaacagcagagaatttcaaaggaccttgctaatatctgtaagacggcagctacagcaggcatcattggctgggtgtatgggggaataccagcttttattcatgctaaacaacaatacattgagcagagccaggcagaaatttatcataaccggtttgatgctgtgcaatctgcacatcgtgctgccacacgaggcttcattcgttatggctggcgctggggttggagaactgcagtgtttgtgactatattcaacacagtgaacactagtctgaatgtataccgaaataaagatgccttaagccattttgtaattgcaggagctgtcacgggaagtctttttaggataaacgtaggcctgcgtggcctggtggctggtggcataattggagccttgctgggcactcctgtaggaggcctgctgatggcatttcagaactgaagggagctgccatgtccgatgaatgccaacagacaggccactctttggtcagcctgctgacaaatttaagtgctggtacctgtggtggcagtggcttgctcttgtctttttcttttctttttaactaagaatggggctgttgtactctcactttacttatccttaaatttaaatacatacttatgtttgtattaatctatcaatatatgcatacatgaatatatccacccacctagattttaagcagtaaataaaacatttcgcaaaagattaaagttgaattttacagttcgta

SEQ ID NO: 328892 - DNA, 1805 bp, Homo sapiens
tgagacagattttcgctcttgttgcccaggctgcagtgcagtggtgtgatctcggctcactgcaacctccgcctcccgggttcaagcgattctcctacctcagcctcccgagtagctaggattacaggcgcccgccaccatgcccggctaattcctggcattttaaatacgataaattacttcaacctatgaccacctcaagctgaatataagtagccgcagacaccgtttgcatgacccaggaaccacaaacacggagcgaaggcctgccgggaccacgctgagcttcactactggcagccaactcacttccgggggtgcactcagcacagcagtggcccaacccgccctcaaccggaagtcttttgggctccggcttcgccgtcgccccgccccctggcctttgccccggtcgggcgggacttcctgtgtcgtatttccaaggactccaaagcgaggccggggactgaaggtgtgggtgtcgagccctctggcagagggttaacctgggtcaaatgcacggattctcacctcgtacagttacgctctcccgcggcacgtccgcgaggacttgaagtcctgagcgctcaagtttgtccgtaggtcgagagaaggccatggaggtgccgccaccggcaccgcggagctttctctgtagagcattgtgcctatttccccgagtctttgctgccgaagctgtgactgccgattcggaagtccttgaggagcgtcagaagcggcttccctacgtcccagagccctattacccggaatctggatgggaccgcctccgggagctgtttggcaaagatgaacagcagagaatttcaaaggaccttgctaatatctgtaagacggcagctacagcaggcatcattggctgggtgtatgggggaataccagcttttattcatgctaaacaacaatacattgagcagagccaggcagaaatttatcataaccggtttgatgctgtgcaatctgcacatcgtgctgccacacgaggcttcattcgttatggctggcgctggggttggagaactgcagtgtttgtgactatattcaacacagtgaacactagtctgaatgtataccgaaataaagatgccttaagccattttgtaattgcaggagctgtcacgggaagtctttttaggataaacgtaggcctgcgtggcctggtggctggtggcataattggagccttgctgggcactcctgtaggaggcctgctgatggcatttcagaagtactctggtgagactgttcaggaaagaaaacagaaggatcgaaaggcactccatgagctaaaactggaagagtggaaaggcagactacaagttactgagcacctccctgagaaaattgaaagtagtttacaggaagatgaacctgagaatgatgctaagaaaattgaagcactgctaaaccttcctagaaacccttcagtaatagataaacaagacaaggactgaaagtgctctgaacttgaaactcactggagagctgaagggagctgccatgtccgatgaatgccaacagacaggccactctttggtcagcctgctgacaaatttaagtgctggtacctgtggtggcagtggcttgctcttgtctttttcttttctttttaactaagaatggggctgttgtactctcactttacttatccttaaatttaaatacatacttatgtttgtattaatctatcaatatatgcatacatgaatatatccacccacctagattttaagcagtaaataaaacatttcgcaaaagattaaagttgaattttacagttcgta

SEQ ID NO: 328893 - DNA, 1648 bp, Homo sapiens
tgagacagattttcgctcttgttgcccaggctgcagtgcagtggtgtgatctcggctcactgcaacctccgcctcccgggttcaagcgattctcctacctcagcctcccgagtagctaggattacaggcgcccgccaccatgcccggctaattcctggcattttaaatacgataaattacttcaacctatgaccacctcaagctgaatataagtagccgcagacaccgtttgcatgacccaggaaccacaaacacggagcgaaggcctgccgggaccacgctgagcttcactactggcagccaactcacttccgggggtgcactcagcacagcagtggcccaacccgccctcaaccggaagtcttttgggctccggcttcgccgtcgccccgccccctggcctttgccccggtcgggcgggacttcctgtgtcgtatttccaaggactccaaagcgaggccggggactgaaggtgtgggtgtcgagccctctggcagagggttaacctgggtcaaatgcacggattctcacctcgtacagttacgctctcccgcggcacgtccgcgaggacttgaagtcctgagcgctcaagtttgtccgtaggtcgagagaaggccatggaggtgccgccaccggcaccgcggagctttctctgtagagcattgtgcctatttccccgagtctttgctgccgaagctgtgactgccgattcggaagtccttgaggagcgtcagaagcggcttccctacgtcccagagccctattacccggaatctggatgggaccgcctccgggagctgtttggcaaagatgaacagcagagaatttcaaaggaccttgctaatatctgtaagacggcagctacagcaggcatcattggctgggtgtatgggggaataccagcttttattcatgctaaacaacaatacattgagcagagccaggcagaaatttatcataaccggtttgatgctgtgctgtcacgggaagtctttttaggataaacgtaggcctgcgtggcctggtggctggtggcataattggagccttgctgggcactcctgtaggaggcctgctgatggcatttcagaagtactctggtgagactgttcaggaaagaaaacagaaggatcgaaaggcactccatgagctaaaactggaagagtggaaaggcagactacaagttactgagcacctccctgagaaaattgaaagtagtttacaggaagatgaacctgagaatgatgctaagaaaattgaagcactgctaaaccttcctagaaacccttcagtaatagataaacaagacaaggactgaaagtgctctgaacttgaaactcactggagagctgaagggagctgccatgtccgatgaatgccaacagacaggccactctttggtcagcctgctgacaaatttaagtgctggtacctgtggtggcagtggcttgctcttgtctttttcttttctttttaactaagaatggggctgttgtactctcactttacttatccttaaatttaaatacatacttatgtttgtattaatctatcaatatatgcatacatgaatatatccacccacctagattttaagcagtaaataaaacatttcgcaaaagattaaagttgaattttacagttcgta

SEQ ID NO: 328894 - DNA, 2765 bp, Homo sapiens
tgagacagattttcgctcttgttgcccaggctgcagtgcagtggtgtgatctcggctcactgcaacctccgcctcccgggttcaagcgattctcctacctcagcctcccgagtagctaggattacaggcgcccgccaccatgcccggctaattcctggcattttaaatacgataaattacttcaacctatgaccacctcaagctgaatataagtagccgcagacaccgtttgcatgacccaggaaccacaaacacggagcgaaggcctgccgggaccacgctgagcttcactactggcagccaactcacttccgggggtgcactcagcacagcagtggcccaacccgccctcaaccggaagtcttttgggctccggcttcgccgtcgccccgccccctggcctttgccccggtcgggcgggacttcctgtgtcgtatttccaaggactccaaagcgaggccggggactgaaggtgtgggtgtcgagccctctggcagagggttaacctgggtcaaatgcacggattctcacctcgtacagttacgctctcccgcggcacgtccgcgaggacttgaagtcctgagcgctcaagtttgtccgtaggtcgagagaaggccatggaggtgccgccaccggcaccgcggagctttctctgtagagcattgtgcctatttccccgagtctttgctgccgaagctgtgactgccgattcggaagtccttgaggagcgtcagaagcggcttccctacgtcccagagccctattacccggaatctggatgggaccgcctccgggagctgtttggcaaagatgaacagcagagaatttcaaaggaccttgctaatatctgtaagacggcagctacagcaggcatcattggctgggtgtatgggggaataccagcttttattcatgctaaacaacaatacattgagcagagccaggcagaaatttatcataaccggtttgatgctgtgcaatctgcacatcgtgctgccacacgaggcttcattcgttatggctggcgctggggttggagaactgcagtgtttgtgactatattcaacacagtgaacactagtctgaatgtataccgaaataaagatgccttaagccattttgtaattgcaggagctgtcacgggaagtctttttaggataaacgtaggcctgcgtggcctggtggctggtggcataattggagccttgctgggcactcctgtaggaggcctgctgatggcatttcagaagtactctggtgagactgttcaggaaagaaaacagaaggatcgaaaggcactccatgagctaaaactggaagagtggaaaggcagactacaagttactgagcacctccctgagaaaattgaaagtagtttacaggaagatgaacctgagaatgatgctaagaaaattgaagcactgctaaaccttcctagaaacccttcagtaatagataaacaagacaaggactgaaagtgctctgaacttgaaactcactggagagctgaagggagctgccatgtccgatgaatgccaacagacaggccactctttggtcagcctgctgacaaatttaagtgctggtacctgtggtggcagtggcttgctcttgtctttttcttttctttttaactaagaatggggctgttgtactctcactttacttatccttaaatttaaatacatacttatgtttgtattaatctatcaatatatgcatacatgaatatatccacccacctagattttaagcagtaaataaaacatttcgcaaaagattaaagttgaattttacagttcgtatattcatgtggtcctttgaaagggtattctagaaatcactggaaagaggagaggaaagaaccaggtaggcaaatggtctgtgaaacccttgggtcctggaagcagtgtgagtgtaaatgtgtagtgtttggtttcatctaaataaacaaagatgatttctttgacacttgaaataaaatacaaattcaacaaaaagtagatcagcattattaaagaaacggttcaactttgtttcttcccttagtattgctgacaaagtatctgctgtagaatacaggaattacttagaatagaaacatagtcatcacaactgttactaaatggaaaagaaaagaattattgagttaagtattcctgtcaatacgggaaacactgctagtaccttatgttggtgttagacctctctgccctacactgagaatatagttttacacaggagcaaggtttgtgaagcagcatagtgaggtagctaaagccatgggctggctctaaaggctttaaatcccagccatgtggcttagctgccatgagatgtgcatttgagaaatgttgtcttcttttgctgttcaactccagattttcagatgataatgtgattatcccagcttaagttgcgtccacttctggtctagtgaattgtggaaggcagttttagagaaaggagtcatgagtaacatgaacagcagttggctatgtctttccagttctctgctgatgtcagaaagacccagaaataccaaggagaaaaagccatcttagggatctaaggaggccctatggaaagttactaccttagacatttgaagatagcttactgcttagtacatacactgtaaacaacgatctcattttaaatgagaactttctcataaatattttacaaatgaggtcaaactagcataaagccatttaaagagattatcagtccaatatgaaccagttaagtctttggactatccc

SEQ ID NO: 328895 - DNA, 623 bp, Homo sapiens
tcgctctagaggatcctagaggctgaatgggcactcctgtaggaggcctgctgatggcatttcagaagtactctggtgagactgttcaggaaagaaaacagaaggatcgaaaggcactccatgagctaaaactggaagagtggaaaggcagactacaagttactgagcacctccctgagaaaattgaaagtagtttacaggaagatgaacctgagaatgatgctaagaaaattgaagcactgctaaaccttcctagaaacccttcagtaatagataaacaagacaaggactgaaagtgctctgaacttgaaactcactggagagctgaagggagctgccatgtccgatgaatgccaacagacaggccactctttggtcagcctgctgacaaatttaagtgctggtacctgtggtggcagtggcttgctcttgtctttttcttttctttttaactaagaatggggctgttgtactctcactttacttatccttaaatttaaatacatacttatgtttgtattaatctatcaatatatgcatacatgaatatatccacccacctagattttaagcagtaaataaaacatttcgcaaaagattaaagttgaattttacagttcgta

SEQ ID NO: 328896 - DNA, 1300 bp, Homo sapiens
tgagacagattttcgctcttgttgcccaggctgcagtgcagtggtgtgatctcggctcactgcaacctccgcctcccgggttcaagcgattctcctacctcagcctcccgagtagctaggattacaggcgcccgccaccatgcccggctaattcctggcattttaaatacgataaattacttcaacctatgaccacctcaagctgaatataagtagccgcagacaccgtttgcatgacccaggaaccacaaacacggagcgaaggcctgccgggaccacgctgagcttcactactggcagccaactcacttccgggggtgcactcagcacagcagtggcccaacccgccctcaaccggaagtcttttgggctccggcttcgccgtcgccccgccccctggcctttgccccggtcgggcgggacttcctgtgtcgtatttccaaggactccaaagcgaggccggggactgaaggtgtgggtgtcgagccctctggcagagggttaacctgggtcaaatgcacggattctcacctcgtacagttacgctctcccgcggcacgtccgcgaggacttgaagtcctgagcgctcaagtttgtccgtaggtcgagagaaggccatggaggtgccgccaccggcaccgcggagctttctctgtagagcattgtgcctatttccccgagtctttgctgccgaagctgtgactgccgattcggaagtccttgaggagcgtcagaagcggcttccctacgtcccagagccctattacccggaatctggatgggaccgcctccgggagctgtttggcaaagatgaacagcagagaatttcaaaggaccttgctaatatctgtaagacggcagctacagcaggcatcattggctgggtgtatgggggaataccagcttttattcatgctaaacaacaatacattgagcagagccaggcagaaatttatcataaccggtttgatgctgtgcaatctgcacatcgtgctgccacacgaggcttcattcgttatggctggcgctggggttggagaactgcagtgtttgtgactatattcaagtaagttcactctgaattgtgagatagtgaattttcttgatattgttttaggagtgtgtcttttgagcaggtggggttatgaaaactgaatacccacatgaaagtgattaataatgccttttttttttttcaagaacttttctctgtgtaaaagactggtgtagttatggttttacaaccatgtctggaacacattgaaggggcctaggctaggaacagggattgatatagtag

SEQ ID NO: 328897 - DNA, 469 bp, Homo sapiens
taagacatgggtttccagagtttagagtctcactatgtgataggtgaaagctgtgttgttgatgaggatttgcacagcctcctcccggttgcctgctactgaccatcccatttcactgtgggcagctccagtgggtaagagggttcttcacagtgtggtgagctactcctttctagcctccatccattttttgctgttcttctggaagctatataggcttgtctattggactttatagtcttcaaataattgaagatactaaaatgactattatgtctaccctgctctgctacacacataaatcttgtccagacaaataggtctgtttaccagtactttctcatcagaagtcatttgaagacacagaaagtaaaaaccacaaagaaaaaaaaaactatattaaagtgaaagctcaacagtaacaccccataaccatagcaaaacaaaacaaaacaaaacaaaacaaaac

SEQ ID NO: 328898 - DNA, 406 bp, Homo sapiens
gacaggaagaaaatattagagctgtcattaagctgttctaagaaataagctaaaatgtactaatatttaatatttgattgaaactgggaaccttgctcatgtcatctgtcagatgacaagtgtcctattttgaatgcagctatcctgggattatgtggaacttccatagtgcaaagggtcctgcattcccttgtttgctttcagcctgttgtgacatgctacatttactcatcagacttacagattatgttaaccagttttaattaaagcaacagctgcaaaattgacacttggcttataaagattcctacagagaattatgggttgaaggtaacgtagataatgcaaataaaaatgagccgtaaatagttggcagagctgagacttctcccagtacaagctatga

SEQ ID NO: 328899 - DNA, 310 bp, Homo sapiens
acagctagactacatttcctgaccactcttacagctggatatggccaagtaaccaagttctggacaatggaggtaaagtgtggctgttctaggcccaaactggtgaaaagtgaatgattcccctctgtgctttcttctctcccccaactagttggatgcagagggtagtccctaaggcatggaatagtcagaagatagaggaagtttgggtccctgagagagacacagacttctactatcttatgacactttaatcttggctacaggctaggcatggtggctcaggcctgtaatcccagcactttgggag

SEQ ID NO: 328900 - DNA, 805 bp, Homo sapiens
ggagggttggcccctgtgaaaccaactgatctgggtttgccactggggcttaccgaagtcaggcccccaacctcccacagagactgggagacaggggccccatcctcaggtgttggctggaacacacaggaaattcttgtggcagccttgaacttctcaggcaggcactttagagggggctaggatcgttctgggaatgtggccttgagctgttaggagctatgttagtgttcgttccagcctagataggccagggtgaggcccagtggagaaggggactctaaggagcctggctggagtgtggggagggagggtctttgtcagcactccccctgtgcaagaagagcagagacctgcttctttcctctcaacagtccccgtccattttctgttctgtgttgtgttcataaactaccagcgggaccatctgttgagacttggtagcaaaggatttttgctggatgatgcaagcagtcaagcatttaatgaggaaacaaaaataacaggccaggcacagtggctcatgtctgtaatcccagcacttttggaggccgaggaggatcacttgaggccaggagtttgaaacaagcctgggcaacataaagaccccatctctacaaaaaatttaaaaattagcccggcgtggtggcatgggcctatagttccagctacttgggaggctgaggtgaaaagatcgtttgagcctgggaggcggaggctgccatgagccatgatcttgcctctatactccagcctgagcaacagagagcccctatctttaaaaaaaaaaaataataataaaata

SEQ ID NO: 328901 - DNA, 981 bp, Homo sapiens
attaactgaaaatggatcagagacctaaatgtaaaatacaaaactgtaaaactcttaggcaatagcataggaggaaacctagattaccttttgtgtggtgataatattttaggtacaacagcaaaggcatgatccatgaaggagagaattgataagctggacttcgttaaaatttaatacttttgttctgtcaaagataatgtcaagaaaaatttaatacttttgttctgtcaaagataatgtcaagaaattgtgatgacaggctacagactgggagaaaatatttgcaaaagacacatctgataaaggaccatcaagcaaaacatacaaagaacgtctaacattaaataataagaaaatgaagaacatgttctagaaatggacagaagggcaaaggtgggaggatcacttgaggcccagaattggagaccaacctgggtaacatagcataatcctgcctctccaaaacattaacaaataaaacatgagcagggcatggtggtgcatgcctgtagtcctagctactctagagtctaaggaggatcgcttgagcccaggaatttgaggttatagttagctttgactgcacttcagactgggtgacagagtgagaccctgtttcaaaaatactaaaaaaaaaatttttttaagggcaaaagacctggctggacacctcaccaaagaaatacagatgacacataaacatatgaaaatacattcaatatcatatatcattagggaattaaaaattaaaacatcaatgaggtattaccacatacttataagaatggctcagatccaaaacactgacaataccaaatgttgatgaggatgtggaacaatagaagcgctcagtcattgctggtggaagtgcaaaatggtccggtcacttgggaagacagtttggcaggttgttatacaactgaacattttctaaccgtacgaaccagcagctacactccttggtatttacccttatga

SEQ ID NO: 328902 - DNA, 673 bp, Homo sapiens
tctctcacgaagcatgactcacttggtaactttaaaggagtcagttttatttggtctcagtttctctgccactaaaatgggttttgtgatatacgtagggaaagacaaggccttctgattaaacattctgaaatctgaaacgggatagtattaatttttttggttgggtgctgtggttggttaaaatgaccaactattttgcagcccctcctttcaataggttgattctattctcctactctttgaagctgagttgccttatgacttgcattaaccaatgaatgtggtggaagtgacgttggagagttctagacttaagcctcaagaagccttgcagcttccaccttccttctcttagaatgttccctttaccagctaagaatgcaaaaaagaccagctaggtttctgaacaacaagagaccgtagtgaagaagggaaagctcagccaacagtcagcaccaaggtcctggacttgtgagtgagcccatcttagaccctacagcttcacttgagccacccgataatggcagccatgtgaatgtctacaggaagaccagcagaataactgtccagctgagcccagcccaaattgccaacccacagaattgtgagaaataataatggctgttttaagtcactaaactttggggtggtttgttagtttcccaggact

SEQ ID NO: 328903 - DNA, 523 bp, Homo sapiens
ttaaattttaagtttctcaaagggtgtccattccctgctgctaatattttcttcactatagatgtctttgtgagaaggtttggtacttttcaaaacctgttggtcttagaaagaagaaggtaagaattgtgaaaagctgattgcgactggtgcccttgtaggtcaataatgtctattttgatgtggcctgaatatttcacttcattttatatggtcggatgctccatgttaggattaaggggtaattaatagtaatgtatgtggaattcagtgtgagttgattcattcatctgattctgtatttaatatctaaatgggatcagtgacactggtaggatgggtgagagaagaaaattggctaaaattgcatcatggaagatcaggcttggatggggtgccataggtgggcctgaggggcaacatgagatcccaggagcacaaacttagaggggtgttgaaagataccaagacaaactgtctgctttaacattttgccaacagcccttctgagcctcaagaaaaa

SEQ ID NO: 328904 - DNA, 315 bp, Homo sapiens
gttgtggcatgtattggtacttcattcctttttattgctgaaaaacagttttggtgaatgttcattttcattttgggggatatctatgtgggagtagagttactgagtcataaggtaactctatatttgtgattttgaggaaataccatattgttgcttgatgttagctgcagcattttaaattcccaccagcaatgtataagggttccaatttctctgcatcctccctaatacttgttattgtctggcttttaattatagttctcctatctcactgtggctttgacttgcatattcctaatgactcaatgtaag

SEQ ID NO: 328905 - DNA, 112 bp, Homo sapiens
ctcccaaagtgctgggattacaggcatgagccaccacgcctggcccaatcttttcttctctccatatcgagtgatcttccttaatctctagtgctttctccttgttctcagg

SEQ ID NO: 328906 - DNA, 198 bp, Homo sapiens
gcggccgcctactactactactgctcgaattcaagcttctaacgatgtacggggacatggccacactgtcagtgagtgttctttaggtggtaggactatggttgatatttttcttcttcctatcttcctgcctttttcagattttcaatattaaacttgttattcttacattggaaaaaaataaattgtttttaaaaa

SEQ ID NO: 328907 - DNA, 2583 bp, Homo sapiens
cttctcagaataagcaggtgagaatcacctttgggttctcttgcaagaatagtaaccagtttggaataatgatgtatcataacaaccgactcataaaatcttttgagaaggtggggtgccaggtgaagccaactcgtggagaaggtgtaggagtaattggagtcattgagtgcaatttcctaaaacctgcctacaacaaacaagactttgagtataccaaggagtaccggctaacaataaatgcccttgcccagaagctcaatgcttactggaaggaaaaaacatctcaagataattttgagacctcaactgtagccaggccaataccgaaggttcctgaccagacatgggttcagtgtgatgagtgtcttaaatggagaaagcttcctgggaagattgatccatccatgttacctgcaagatggttttgttattataattcccatccaaagtacaggagatgctctgttccagaggaacaagaactcactgatgaagacctgtgcttgagcaaagctaagaaacaagaacaaactgttgaggagaagaagaagatgcctatggaaaatgagaaccaccaggtattcagtaatccaccaaagatccttactgttcaagaaatggctggattgaataacaagacaattggatatgagggaattcatagccctagtgtgcttccttctggtggagaagaaagcagatcaccatctcttcaacttaagcctctggattccagtgttttacagttttccagtaagtacaaatggatcctaggtgaagaaccggtggagaaacgaagaaggctccagaatgagatgacaacaccttctctagattattccatgcctgctccttacaggagggtagaagcacctgttgcctacccagaaggggagaacagccatgataaatcgagttctgagagaagtacaccaccataccttttcccagaatacccagaagcaagcaagaatacaggtcagaatagggaggtttcaattctgtatccaggggccaaagaccaacgccaggggtccctgcttcctgaagaattagaagatcagatgccaagattggtggcagaagaatctaacagaggtagcacaaccataaacaaagaagaagtcaacaagggaccttttgtagctgttgtgggtgttgccaaaggtgttagagattcaggagctcccattcagctgatcccttttaacagagaggagcttgctgagagacgaaaagcagttgaatcctggaacccagtgccttattctgtggcctctgctgcaatccctgctgcagccattggggagaaagcaagaggctatgaggagagcgaaggtcataatacaccaaagttgaagaaccagagagagctggaagaattgaagagaaccacagaaaaattggaacgtgttttggctgaaaggaatttgttccagcaaaaggtggaggagctggaacaggagaggaatcactggcagtctgaattcaagaaagtccaacatgaattggtgatctacagtacccaggaggcggaaggcttgtactggagcaagaaacacatgggttatcgccaagctgaattccagattctgaaagctgagctggaaagaaccaaagaggaaaagcaagagttaaaagagaaactgaaggaaacagagacacacctggaaatgctgcagaaggctcagggctttggcaaagcttacgcggctacgtatccacgtcagctatctccttacttctgtcctccctcacttggagcttcgtgagatcgggtatgactcagaacaagtggatgggatcctgtacacggtgctggaggcaaatcacatactggattgagcaccagactgtatacccttctcttctcttatcttctgtctgttctcttttctctccctccctcacgtctctctctctctctctctctctctctctctctctcaccctcacctttatgccttatatagagaatctctgtgtaaatcctggctcataatcagtctcctttttatcagttttggtgtggagaaagaggccagtttaaataggctttcaagagtctagggtcagaaaagcaatagtcactaagctaggtgacctgaaagctttaattttcatgacctggatatgtggtctattgtatatctttttctgaaatggtttgtattcatttaggttagatcaatcagcagatattgggtccggtataccaggtattattttggggtaagctaacaagtacaactcatgtttgcagccttcgaagatgtaacaatctcgttggaaacataagacatacatcacattatacacaaaagtgtatgatatgtacaactgagtggtacagatatgacatggaagatctgggggaggaagttcaaggaaggcaccacaccagaaatgggacctaaattaaggcttaaagaatgagcatggccacactgtcagtgagtgttctttaggtggtaggactatggttgatatttttcttcttcctatcttcctgcctttttcagattttcaatattaaacttgttattcttacattggaaaaaaataaattgtttttaaaaa

SEQ ID NO: 328908 - DNA, 2926 bp, Homo sapiens
cttctcagaataagcaggtgagaatcacctttgggttctcttgcaagaatagtaaccagtttggaataatgatgtatcataacaaccgactcataaaatcttttgagaaggtggggtgccaggtgaagccaactcgtggagaaggtgtaggagtaattggagtcattgagtgcaatttcctaaaacctgcctacaacaaacaagactttgagtataccaaggagtaccggctaacaataaatgcccttgcccagaagctcaatgcttactggaaggaaaaaacatctcaagataattttgagacctcaactgtagccaggccaataccgaaggttcctgaccagacatgggttcagtgtgatgagtgtcttaaatggagaaagcttcctgggaagattgatccatccatgttacctgcaagatggttttgttattataattcccatccaaagtacaggagatgctctgttccagaggaacaagaactcactgatgaagacctgtgcttgagcaaagctaagaaacaagaacaaactgttgaggagaagaagaagatgcctatggaaaatgagaaccaccaggtattcagtaatccaccaaagatccttactgttcaagaaatggctggattgaataacaagacaattggatatgagggaattcatagccctagtgtgcttccttctggtggagaagaaagcagatcaccatctcttcaacttaagcctctggattccagtgttttacagttttccagtaagtacaaatggatcctaggtgaagaaccggtggagaaacgaagaaggctccagaatgagatgacaacaccttctctagattattccatgcctgctccttacaggagggtagaagcacctgttgcctacccagaaggggagaacagccatgataaatcgagttctgagagaagtacaccaccataccttttcccagaatacccagaagcaagcaagaatacaggtcagaatagggaggtttcaattctgtatccaggggccaaagaccaacgccaggggtccctgcttcctgaagaattagaagatcagatgccaagattggtggcagaagaatctaacagaggtagcacaaccataaacaaagaagaagtcaacaagggaccttttgtagctgttgtgggtgttgccaaaggtgttagagattcaggagctcccattcagctgatcccttttaacagagaggagcttgctgagagacgaaaagcagttgaatcctggaacccagtgccttattctgtggcctctgctgcaatccctgctgcagccattggggagaaagcaagaggctatgaggagagcgaaggtcataatacaccaaagttgaagaaccagagagagctggaagaattgaagagaaccacagaaaaattggaacgtgttttggctgaaaggaatttgttccagcaaaaggtggaggagctggaacaggagaggaatcactggcagtctgaattcaagaaagtccaacatgaattggtgatctacagtacccaggaggcggaaggcttgtactggagcaagaaacacatgggttatcgccaagctgaattccagattctgaaagctgagctggaaagaaccaaagaggaaaagcaagagttaaaagagaaactgaaggaaacagagacacacctggaaatgctgcagaaggctcaggtctcctaccggaccccagagggagatgacctagaaaggttaattactagggtttagttatcagcttgtgagtgctaatgggaagcatcccttaggacccccacttactggccgtagacaaaggaggaagccttaattcacaggccaccaagaattgagtaattacttcttagaaagctgcagccagtctccctgtgcttggtggcgttgtgctttcttctttctagctaatgaaaacataactgttgagaaatgtggttccattttgaaggggcttcattttattctgttggttaatgacttcatgtcatctcttctcctgccccctcactccttcatacagggctttggcaaagcttacgcggctacgtatccacgtcagctatctccttacttctgtcctccctcacttggagcttcgtgagatcgggtatgactcagaacaagtggatgggatcctgtacacggtgctggaggcaaatcacatactggattgagcaccagactgtatacccttctcttctcttatcttctgtctgttctcttttctctccctccctcacgtctctctctctctctctctctctctctctctctctcaccctcacctttatgccttatatagagaatctctgtgtaaatcctggctcataatcagtctcctttttatcagttttggtgtggagaaagaggccagtttaaataggctttcaagagtctagggtcagaaaagcaatagtcactaagctaggtgacctgaaagctttaattttcatgacctggatatgtggtctattgtatatctttttctgaaatggtttgtattcatttaggttagatcaatcagcagatattgggtccggtataccaggtattattttggggtaagctaacaagtacaactcatgtttgcagccttcgaagatgtaacaatctcgttggaaacataagacatacatcacattatacacaaaagtgtatgatatgtacaactgagtggtacagatatgacatggaagatctgggggaggaagttcaaggaaggcaccacaccagaaatgggacctaaattaaggcttaaagaatgagcatggccacactgtcagtgagtgttctttaggtggtaggactatggttgatatttttcttcttcctatcttcctgcctttttcagattttcaatattaaacttgttattcttacattggaaaaaaataaattgtttttaaaaa

SEQ ID NO: 328909 - DNA, 2621 bp, Homo sapiens
cttctcagaataagcaggtgagaatcacctttgggttctcttgcaagaatagtaaccagtttggaataatgatgtatcataacaaccgactcataaaatcttttgagaaggtggggtgccaggtgaagccaactcgtggagaaggtgtaggagtaattggagtcattgagtgcaatttcctaaaacctgcctacaacaaacaagactttgagtataccaaggagtaccggctaacaataaatgcccttgcccagaagctcaatgcttactggaaggaaaaaacatctcaagataattttgagacctcaactgtagccaggccaataccgaaggttcctgaccagacatgggttcagtgtgatgagtgtcttaaatggagaaagcttcctgggaagattgatccatccatgttacctgcaagatggttttgttattataattcccatccaaagtacaggagatgctctgttccagaggaacaagaactcactgatgaagacctgtgcttgagcaaagctaagaaacaagaacaaactgttgaggagaagaagaagatgcctatggaaaatgagaaccaccaggtattcagtaatccaccaaagatccttactgttcaagaaatggctggattgaataacaagacaattggatatgagggaattcatagccctagtgtgcttccttctggtggagaagaaagcagatcaccatctcttcaacttaagcctctggattccagtgttttacagttttccagtaagtacaaatggatcctaggtgaagaaccggtggagaaacgaagaaggctccagaatgagatgacaacaccttctctagattattccatgcctgctccttacaggagggtagaagcacctgttgcctacccagaaggggagaacagccatgataaatcgagttctgagagaagtacaccaccataccttttcccagaatacccagaagcaagcaagaatacaggtcagaatagggaggtttcaattctgtatccaggggccaaagaccaacgccaggggtccctgcttcctgaagaattagaagatcagatgccaagattggtggcagaagaatctaacagaggtagcacaaccataaacaaagaagaagtcaacaagggaccttttgtagctgttgtgggtgttgccaaaggtgttagagattcaggagctcccattcagctgatcccttttaacagagaggagcttgctgagagacgaaaagcagttgaatcctggaacccagtgccttattctgtggcctctgctgcaatccctgctgcagccattggggagaaagcaagaggctatgaggagagcgaaggtcataatacaccaaagttgaagaaccagagagagctggaagaattgaagagaaccacagaaaaattggaacgtgttttggctgaaaggaatttgttccagcaaaaggtggaggagctggaacaggagaggaatcactggcagtctgaattcaagaaagtccaacatgaattggtgatctacagtacccaggaggcggaaggcttgtactggagcaagaaacacatgggttatcgccaagctgaattccagattctgaaagctgagctggaaagaaccaaagaggaaaagcaagagttaaaagagaaactgaaggaaacagagacacacctggaaatgctgcagaaggctcaggtctcctaccggaccccagagggagatgacctagaaagggctttggcaaagcttacgcggctacgtatccacgtcagctatctccttacttctgtcctccctcacttggagcttcgtgagatcgggtatgactcagaacaagtggatgggatcctgtacacggtgctggaggcaaatcacatactggattgagcaccagactgtatacccttctcttctcttatcttctgtctgttctcttttctctccctccctcacgtctctctctctctctctctctctctctctctctctcaccctcacctttatgccttatatagagaatctctgtgtaaatcctggctcataatcagtctcctttttatcagttttggtgtggagaaagaggccagtttaaataggctttcaagagtctagggtcagaaaagcaatagtcactaagctaggtgacctgaaagctttaattttcatgacctggatatgtggtctattgtatatctttttctgaaatggtttgtattcatttaggttagatcaatcagcagatattgggtccggtataccaggtattattttggggtaagctaacaagtacaactcatgtttgcagccttcgaagatgtaacaatctcgttggaaacataagacatacatcacattatacacaaaagtgtatgatatgtacaactgagtggtacagatatgacatggaagatctgggggaggaagttcaaggaaggcaccacaccagaaatgggacctaaattaaggcttaaagaatgagcatggccacactgtcagtgagtgttctttaggtggtaggactatggttgatatttttcttcttcctatcttcctgcctttttcagattttcaatattaaacttgttattcttacattggaaaaaaataaattgtttttaaaaa

SEQ ID NO: 328910 - DNA, 2029 bp, Homo sapiens
cttctcagaataagcaggtgagaatcacctttgggttctcttgcaagaatagtaaccagtttggaataatgatgtatcataacaaccgactcataaaatcttttgagaaggtggggtgccaggtgaagccaactcgtggagaaggtgtaggagtaattggagtcattgagtgcaatttcctaaaacctgcctacaacaaacaagactttgagtataccaaggagtaccggctaacaataaatgcccttgcccagaagctcaatgcttactggaaggaaaaaacatctcaagataattttgagacctcaactgtagccaggccaataccgaaggttcctgaccagacatgggttcagtgtgatgagtgtcttaaatggagaaagcttcctgggaagattgatccatccatgttacctgcaagatggttttgttattataattcccatccaaagtacaggagatgctctgttccagaggaacaagaactcactgatgaagacctgtgcttgagcaaagctaagaaacaagaacaaactgttgaggagaagaagaagatgcctatggaaaatgagaaccaccaggtattcagtaatccaccaaagatccttactgttcaagaaatggctggattgaataacaagacaattggatatgagggaattcatagccctagtgtgcttccttctggtggagaagaaagcagatcaccatctcttcaacttaagcctctggattccagtgttttacagttttccagtaagtacaaatggatcctaggtgaagaaccggtggagaaacgaagaaggctccagaatgagatgacaacaccttctctagattattccatgcctgctccttacaggagggtagaagcacctgttgcctacccagaaggggagaacagccatgataaatcgagttctgagagaagtacaccaccataccttttcccagaatacccagaagcaagcaagaatacaggtcagaatagggaggtttcaattctgtatccaggggccaaagaccaacgccaggggtccctgcttcctgaagaattagaagatcagatgccaagattggtggcagaagaatctaacagaggtagcacaaccataaacaaagaagaagtcaacaagggaccttttgtagctgttgtgggtgttgccaaaggtgttagagattcaggagctcccattcagctgatcccttttaacagagaggagcttgctgagagacgaaaagcagttgaatcctggaacccagtgccttattctgtggcctctgctgcaatccctgctgcagccattggggagaaagcaagaggctatgaggagagcgaaggtcataatacaccaaagttgaagaaccagagagagctggaagaattgaagagaaccacagaaaaattggaacgtgttttggctgaaaggaatttgttccagcaaaaggtggaggagctggaacaggagaggaatcactggcagtctgaattcaagaaagtccaacatgaattggtgatctacagtacccaggaggcggaaggcttgtactggagcaagaaacacatgggttatcgccaagctgaattccagattctgaaagctgagctggaaagaaccaaagaggaaaagcaagagttaaaagagaaactgaaggaaacagagacacacctggaaatgctgcagaaggctcagggctttggcaaagcttacgcggctacgtatccacgtcagctatctccttacttctgtcctccctcacttggagcttcgtgagatcgggtatgactcagaacaagtggatgggatcctgtacacggtgctggaggcaaatcacatactggattgagcaccagactgtatacccttctcttctcttacccttttttgcccttacagatacttccctctgcttagaatgtccttcctctattgtccacctagaaaacttttccttcatatttaatatcaaatataatctgctttgtgaagccttccctgactcccttaagcatatttaaaggtcgagc

SEQ ID NO: 328911 - DNA, 472 bp, Homo sapiens
tgtctctatgtcttaaaagaagcaaactcaacttcaaagtattcatcaatatgactgtaagggtgcattaggcaactcatgcaaagttcaaattgtgaaacagattatgttttaattacaagataatgaaatggtcactatatttaatttttaaagtattgtttctgaattatacaggctgccatgaaacaccgtctaacttctaggtcaagattgaagattttgtctttctttaaaacaaaaacttcagagttgtaatatcaacattttgaaatagcagtctacttcaaatataagtctaaatatcagggaatttccttccctagcccctcccaatttaagttctttgaggtaaagacaaatggatgcccagccccacacccctttttccatagcgtgggtgtgggtctcagcccctttctagccacattctatctggtgaatgaggatccagctctcataaaagctccca

SEQ ID NO: 328912 - DNA, 468 bp, Homo sapiens
taaaaagtagattttcatacccaaattgttccaacattcttaaaagttctttagtcacactggttcatttcaggggtttaataaccacatgtggctagtggcttctatattggacagcacagctgtatactgtcagcataactagagtaaaatttcatcttggaactgacagtgacaaatgtgtgattacagaggagacacaccttgaagaaacaacagagagccaacagaatggtgaagaaggcacgtctactcctgaggacaaggagagtgggcaggagggggtcgacagtatggcagaggaaggaaccagtgatagtaacactggctcggagagcaacagtgcaacagtggaggagccaccaacagatcccataccagaagatgagaaaaaagaataagtgttgccttgttttgtgtgttctaaatactttttttaatgaaaaaatgttttttggttttaatggt

SEQ ID NO: 328913 - DNA, 4662 bp, Homo sapiens
  misc_feature (2190)..(2190): n is a, c, g, or t
  misc_feature (4655)..(4655): n is a, c, g, or t
gaaagggcctctgtcacccagggtggagtgcagtggcatgatcatggctcactgcagccttgacctcccaggctcaagcgatcctcccacctcagcgtcccaaataactgagaccacaaatgtgcaccaccgcacctggctaattttttttttaagagatggggtctccctatgttgccaggctggtgtttcttaatttttcaaatctttggtagagaaagaaccaagcgaagaaaatgagtcattcatttatttactccacaagtattgagcatctaaatgtgctgtgtactgttccagatgtcaaaatctccaccctgatgggaaaaaaaagacggctgggtgcggtggctcatgcctgtaatccagcactttgggaggccgaggcggtggatcacttgaggtcaggagtccaagaccagcctgaccaacatggtgaaacctcgtctctactaaaaatacaaaattagcagggtgtggtggcacatgccgtaatcccagctacttgggagctgggaccacaggcgcccgccgccacgcccggctaattttgtttttgtatttttagtagggacggggtttcaccgtgttagccaggatggtctcgatctcctgacctagtaatctgcccgcctcggcctcccaaaagagctgggattacaggcgtgaatattttttaacaagcaatttcatgtacattttctcaagcaccactcaagctgcctgtccacggggcagacgacttctcctttagtctttctcttgaatatgctcttcaatttcattaatctctattcatgagtataacaatattggaaaaattggacagagtatcacttgttcctcgctttgcagactagagatgcttctagtccctgttggcacactcaggatgggggctacgggaagcccaagaattcagcctctctctaaatgtcaactgttttccagtaaccacaggtcagggatcccatacgttcattctccctccacagtgacccacaatatccatcgggtgtttatgtatccaaagaagaggctactcattccatctggtaaaccaacatactcatgatttagtggaaagagccctggagtggcacagagggctgcctcaatacacacttactgagcgtctaacaatgaatgggtcaagcccttcgtaggcactggcaatgggaagatgaccaatacagacggctgaaccttgctttcaaggccttcataaagcactggagatgacaaacacggtccgatacaaagggtcgggttcaggactccaaccattattatcaaagagccacgggaatacaaaggaaggattactaggggggaagttccaggagggcatcacaaagagacctctgagctggatccagaaggacagatgagtttaagctgaaagtggggacggtcgttcccgctggtgggaaccgaaggagccgaggcagcgctgaggcggagaccaggtggcacccgcggcgctgcaaggacacacaagctgttgcgagggggtcaactctccgggccttggcttagaaacctgggacgattacaccctaaaagcgcttggaaaaactgcagaactcgtgctgattttcgccaaagctactcccccgccgtgagggcaggaagccctgcgaggcgcctgcgaggacgcaaacgccgcgaagcaagtcctccacgcctccatcccaggtttagtgaagtgtagactctgacccacagcctaaaggaaagcaagaccggagtcggggagggcccctccaggagcgggctcagcgggagtctggccgaactgcttgctgccacagtggttccgcggcctcgcgctgagcgccatccgccgtctcccaccgcggcccccaccgcccctccgcaaggctcggcacctcccgccacttcctcggtcgctgcggcggctccggctcctcacagccgctaaacccaggcctattctgtgttaggtcgggcctcctcggccctcttcgccgtgacgaatcagcgcccggctgggaaagtatcaaaattcggggagttttgaggatccaatgggtcctgaaaaaaatccctgagtgtgctaagcatcaccgcatcttcactagaaggttattttttctaaagagggtcgggtggggcccggaaaaaaaaaaaattaagaagagtgtggaaagtgcgagtgcggaagcnccggacgcgaggggcggggcgagcgcgggacaaagggaagcgaagccggagctgcgggcgctttttctgcccgcggtgtctcagattcattcttaaggaactgagaacttaatcttccaaaatgtcaaaaagaccatcttatgccccacctcccaccccagctcctgcaacacaaatgcccagcacaccagggtttgtgggatacaatccatacagtcatctcgcctacaacaactacaggctgggagggaacccgggcaccaacagccgggtcacggcatcctctggtatcacgattccaaaacccccaaagccaccagataagccgctgatgccctacatgaggtacagcagaaaggtctgggaccaagtaaaggcttccaaccctgacctaaagttgtgggagattggcaagattattggtggcatgtggcgagatctcactgatgaagaaaaacaagaatatttaaacgaatacgaagcagaaaagatagagtacaatgaatctatgaaggcctatcataattcccccgcgtaccttgcttacataaatgcaaaaagtcgtgcagaagctgctttagaggaagaaagtcgacagagacaatctcgcatggagaaaggagaaccgtacatgagcattcagcctgctgaagatccagatgattatgatgatggcttttcaatgaagcatacagccaccgcccgtttccagagaaaccaccgcctcatcagtgaaattcttagtgagagtgtggtgccagacgttcggtcagttgtcacaacagctagaatgcaggtcctcaaacggcaggtccagtccttaatggttcatcagcgaaaactagaagctgaacttcttcaaatagaggaacgacaccaggagaagaagaggaaattcctggaaagcacagattcatttaacaatgaacttaaaaggttgtgcggtctgaaagtagaagtggatatggagaaaattgcagctgagattgcacaggcagaggaacaggcccgcaaaaggcaggaggaaagggagaaggaggccgcagagcaagctgagcgcagtcagagcagcatcgttcctgaggaagaacaagcagctaacaaaggcgaggagaagaaagacgacgagaacattccgatggagacagaggagacacaccttgaagaaacaacagagagccaacagaatggtgaagaaggcacgtctactcctgaggacaaggagagtgggcaggagggggtcgacagtatggcagaggaaggaaccagtgatagtaacactggctcggagagcaacagtgcaacagtggaggagccaccaacagatcccataccagaagatgagaaaaaagaataagtgttgccttgttttgtgtgttctaaatactttttttaatgaaaaaatgttttttggttttaatggtgttacgtggtttgtgtattaattttttttcttgtccatatcacaccaccaaaggcttttggaccatttagcatcatgagcctaatggctcagtcagtcacctttcttaagtgttgtgaagatggctcttttctttggatcttgtttctagccctcaactgctgaaagcctcagaatttagattaattgagaaaacacccacctcttttagagaattatcctttgatgctgcagaatctactcttacaatgccttcctacagctcactggggtgcttaccaaagccatagctttaaaccttcccagtccccatcagtagcttcctgaaagtctcctctcttgtttacttctgcaaagggtagcttcttaaaaacgtgatcatgtatgagtatgtatttgttcacttacccttttttacttttaatcaatgtcagataccaagagttgtgttaagctgagtgtagtgtgtaactaactacacttggatcttactgatccagaaatagtccccatagttagagtagttacttatgaagtggttattaaagtgaacacagcacatatacattatctatactgctttttgttatgattaatactgggtatgttctggtaaatccatccttattgtatagaaaaaaaattacttttttaccaggttttccaaagacagaatagatcacaaagctcaaggaatttaatattcttgtaatggactagataattcaaactgattagcccattccagaagaaaaacagctgggaattaagttaatccacttgaaattgttttacaataatcagaacatccaaacctcaaggctcaggatcccatagaccagagcccacctttttgataaacttagtaaagtcttggagactagaagcaagatagtttgtgacacataagcttcccaaaaactagaatagatttttactgaatagtggtatatctgatggtatatgtttcttaaaggtccaaatgtaataaaaaaaaaaatgaaaaaaaaaaaaaaaaaaaaaaaaaaaaaaaaaaaagggngggggcg

SEQ ID NO: 328914 - DNA, 4343 bp, Homo sapiens
  misc_feature (1871)..(1871): n is a, c, g, or t
  misc_feature (4336)..(4336): n is a, c, g, or t
gcctttgtgtatcgtactttaatcctttacatgtctctgatggatatatacatatatatatatataatttttttttttttgagacagagtctcgctctctcgcccaggctggagtgcagtggcgccatctccgttcactgcaagctccgcctcccgggttcacgccattctcctgcctcagcctccccaatagctgggaccacaggcgcccgccgccacgcccggctaattttgtttttgtatttttagtagggacggggtttcaccgtgttagccaggatggtctcgatctcctgacctagtaatctgcccgcctcggcctcccaaaagagctgggattacaggcgtgaatattttttaacaagcaatttcatgtacattttctcaagcaccactcaagctgcctgtccacggggcagacgacttctcctttagtctttctcttgaatatgctcttcaatttcattaatctctattcatgagtataacaatattggaaaaattggacagagtatcacttgttcctcgctttgcagactagagatgcttctagtccctgttggcacactcaggatgggggctacgggaagcccaagaattcagcctctctctaaatgtcaactgttttccagtaaccacaggtcagggatcccatacgttcattctccctccacagtgacccacaatatccatcgggtgtttatgtatccaaagaagaggctactcattccatctggtaaaccaacatactcatgatttagtggaaagagccctggagtggcacagagggctgcctcaatacacacttactgagcgtctaacaatgaatgggtcaagcccttcgtaggcactggcaatgggaagatgaccaatacagacggctgaaccttgctttcaaggccttcataaagcactggagatgacaaacacggtccgatacaaagggtcgggttcaggactccaaccattattatcaaagagccacgggaatacaaaggaaggattactaggggggaagttccaggagggcatcacaaagagacctctgagctggatccagaaggacagatgagtttaagctgaaagtggggacggtcgttcccgctggtgggaaccgaaggagccgaggcagcgctgaggcggagaccaggtggcacccgcggcgctgcaaggacacacaagctgttgcgagggggtcaactctccgggccttggcttagaaacctgggacgattacaccctaaaagcgcttggaaaaactgcagaactcgtgctgattttcgccaaagctactcccccgccgtgagggcaggaagccctgcgaggcgcctgcgaggacgcaaacgccgcgaagcaagtcctccacgcctccatcccaggtttagtgaagtgtagactctgacccacagcctaaaggaaagcaagaccggagtcggggagggcccctccaggagcgggctcagcgggagtctggccgaactgcttgctgccacagtggttccgcggcctcgcgctgagcgccatccgccgtctcccaccgcggcccccaccgcccctccgcaaggctcggcacctcccgccacttcctcggtcgctgcggcggctccggctcctcacagccgctaaacccaggcctattctgtgttaggtcgggcctcctcggccctcttcgccgtgacgaatcagcgcccggctgggaaagtatcaaaattcggggagttttgaggatccaatgggtcctgaaaaaaatccctgagtgtgctaagcatcaccgcatcttcactagaaggttattttttctaaagagggtcgggtggggcccggaaaaaaaaaaaattaagaagagtgtggaaagtgcgagtgcggaagcnccggacgcgaggggcggggcgagcgcgggacaaagggaagcgaagccggagctgcgggcgctttttctgcccgcggtgtctcagattcattcttaaggaactgagaacttaatcttccaaaatgtcaaaaagaccatcttatgccccacctcccaccccagctcctgcaacacaaatgcccagcacaccagggtttgtgggatacaatccatacagtcatctcgcctacaacaactacaggctgggagggaacccgggcaccaacagccgggtcacggcatcctctggtatcacgattccaaaacccccaaagccaccagataagccgctgatgccctacatgaggtacagcagaaaggtctgggaccaagtaaaggcttccaaccctgacctaaagttgtgggagattggcaagattattggtggcatgtggcgagatctcactgatgaagaaaaacaagaatatttaaacgaatacgaagcagaaaagatagagtacaatgaatctatgaaggcctatcataattcccccgcgtaccttgcttacataaatgcaaaaagtcgtgcagaagctgctttagaggaagaaagtcgacagagacaatctcgcatggagaaaggagaaccgtacatgagcattcagcctgctgaagatccagatgattatgatgatggcttttcaatgaagcatacagccaccgcccgtttccagagaaaccaccgcctcatcagtgaaattcttagtgagagtgtggtgccagacgttcggtcagttgtcacaacagctagaatgcaggtcctcaaacggcaggtccagtccttaatggttcatcagcgaaaactagaagctgaacttcttcaaatagaggaacgacaccaggagaagaagaggaaattcctggaaagcacagattcatttaacaatgaacttaaaaggttgtgcggtctgaaagtagaagtggatatggagaaaattgcagctgagattgcacaggcagaggaacaggcccgcaaaaggcaggaggaaagggagaaggaggccgcagagcaagctgagcgcagtcagagcagcatcgttcctgaggaagaacaagcagctaacaaaggcgaggagaagaaagacgacgagaacattccgatggagacagaggagacacaccttgaagaaacaacagagagccaacagaatggtgaagaaggcacgtctactcctgaggacaaggagagtgggcaggagggggtcgacagtatggcagaggaaggaaccagtgatagtaacactggctcggagagcaacagtgcaacagtggaggagccaccaacagatcccataccagaagatgagaaaaaagaataagtgttgccttgttttgtgtgttctaaatactttttttaatgaaaaaatgttttttggttttaatggtgttacgtggtttgtgtattaattttttttcttgtccatatcacaccaccaaaggcttttggaccatttagcatcatgagcctaatggctcagtcagtcacctttcttaagtgttgtgaagatggctcttttctttggatcttgtttctagccctcaactgctgaaagcctcagaatttagattaattgagaaaacacccacctcttttagagaattatcctttgatgctgcagaatctactcttacaatgccttcctacagctcactggggtgcttaccaaagccatagctttaaaccttcccagtccccatcagtagcttcctgaaagtctcctctcttgtttacttctgcaaagggtagcttcttaaaaacgtgatcatgtatgagtatgtatttgttcacttacccttttttacttttaatcaatgtcagataccaagagttgtgttaagctgagtgtagtgtgtaactaactacacttggatcttactgatccagaaatagtccccatagttagagtagttacttatgaagtggttattaaagtgaacacagcacatatacattatctatactgctttttgttatgattaatactgggtatgttctggtaaatccatccttattgtatagaaaaaaaattacttttttaccaggttttccaaagacagaatagatcacaaagctcaaggaatttaatattcttgtaatggactagataattcaaactgattagcccattccagaagaaaaacagctgggaattaagttaatccacttgaaattgttttacaataatcagaacatccaaacctcaaggctcaggatcccatagaccagagcccacctttttgataaacttagtaaagtcttggagactagaagcaagatagtttgtgacacataagcttcccaaaaactagaatagatttttactgaatagtggtatatctgatggtatatgtttcttaaaggtccaaatgtaataaaaaaaaaaatgaaaaaaaaaaaaaaaaaaaaaaaaaaaaaaaaaaaagggngggggcg

SEQ ID NO: 328915 - DNA, 4635 bp, Homo sapiens
  misc_feature (2190)..(2190): n is a, c, g, or t
  misc_feature (4628)..(4628): n is a, c, g, or t
gaaagggcctctgtcacccagggtggagtgcagtggcatgatcatggctcactgcagccttgacctcccaggctcaagcgatcctcccacctcagcgtcccaaataactgagaccacaaatgtgcaccaccgcacctggctaattttttttttaagagatggggtctccctatgttgccaggctggtgtttcttaatttttcaaatctttggtagagaaagaaccaagcgaagaaaatgagtcattcatttatttactccacaagtattgagcatctaaatgtgctgtgtactgttccagatgtcaaaatctccaccctgatgggaaaaaaaagacggctgggtgcggtggctcatgcctgtaatccagcactttgggaggccgaggcggtggatcacttgaggtcaggagtccaagaccagcctgaccaacatggtgaaacctcgtctctactaaaaatacaaaattagcagggtgtggtggcacatgccgtaatcccagctacttgggagctgggaccacaggcgcccgccgccacgcccggctaattttgtttttgtatttttagtagggacggggtttcaccgtgttagccaggatggtctcgatctcctgacctagtaatctgcccgcctcggcctcccaaaagagctgggattacaggcgtgaatattttttaacaagcaatttcatgtacattttctcaagcaccactcaagctgcctgtccacggggcagacgacttctcctttagtctttctcttgaatatgctcttcaatttcattaatctctattcatgagtataacaatattggaaaaattggacagagtatcacttgttcctcgctttgcagactagagatgcttctagtccctgttggcacactcaggatgggggctacgggaagcccaagaattcagcctctctctaaatgtcaactgttttccagtaaccacaggtcagggatcccatacgttcattctccctccacagtgacccacaatatccatcgggtgtttatgtatccaaagaagaggctactcattccatctggtaaaccaacatactcatgatttagtggaaagagccctggagtggcacagagggctgcctcaatacacacttactgagcgtctaacaatgaatgggtcaagcccttcgtaggcactggcaatgggaagatgaccaatacagacggctgaaccttgctttcaaggccttcataaagcactggagatgacaaacacggtccgatacaaagggtcgggttcaggactccaaccattattatcaaagagccacgggaatacaaaggaaggattactaggggggaagttccaggagggcatcacaaagagacctctgagctggatccagaaggacagatgagtttaagctgaaagtggggacggtcgttcccgctggtgggaaccgaaggagccgaggcagcgctgaggcggagaccaggtggcacccgcggcgctgcaaggacacacaagctgttgcgagggggtcaactctccgggccttggcttagaaacctgggacgattacaccctaaaagcgcttggaaaaactgcagaactcgtgctgattttcgccaaagctactcccccgccgtgagggcaggaagccctgcgaggcgcctgcgaggacgcaaacgccgcgaagcaagtcctccacgcctccatcccaggtttagtgaagtgtagactctgacccacagcctaaaggaaagcaagaccggagtcggggagggcccctccaggagcgggctcagcgggagtctggccgaactgcttgctgccacagtggttccgcggcctcgcgctgagcgccatccgccgtctcccaccgcggcccccaccgcccctccgcaaggctcggcacctcccgccacttcctcggtcgctgcggcggctccggctcctcacagccgctaaacccaggcctattctgtgttaggtcgggcctcctcggccctcttcgccgtgacgaatcagcgcccggctgggaaagtatcaaaattcggggagttttgaggatccaatgggtcctgaaaaaaatccctgagtgtgctaagcatcaccgcatcttcactagaaggttattttttctaaagagggtcgggtggggcccggaaaaaaaaaaaattaagaagagtgtggaaagtgcgagtgcggaagcnccggacgcgaggggcggggcgagcgcgggacaaagggaagcgaagccggagctgcgggcgctttttctgcccgcggtgtctcagattcattcttaaggaactgagaacttaatcttccaaaatgtcaaaaagaccatcttatgccccacctcccaccccagctcctgcaacacaaatgcccagcacaccagggtttgtgggatacaatccatacagtcatctcgcctacaacaactacaggctgggagggaacccgggcaccaacagccgggtcacggcatcctctggtatcacgattccaaaacccccaaagccaccagataagccgctgatgccctacatgaggtacagcagaaaggtctgggaccaagtaaaggcttccaaccctgacctaaagttgtgggagattggcaagattattggtggcatgtggcgagatctcactgatgaagaaaaacaagaatatttaaacgaatacgaagcagaaaagatagagtacaatgaatctatgaaggcctatcataattcccccgcgtaccttgcttacataaatgcaaaaagtcgtgcagaagctgctttagaggaagaaagtcgacagagacaatctcgcatggagaaaggagaaccgtacatgagcattcagcctgctgaagatccagatgattatgatgatggcttttcaatgaagcatacagccaccgcccgtttccagagaaaccaccgcctcatcagtgaaattcttagtgagagtgtggtgccagacgttcggtcagttgtcacaacagctagaatgcaggtcctcaaacggcaggtccagtccttaatggttcatcagcgaaaactagaagctgaacttcttcaaatagaggaacgacaccaggagaagaagaggaaattcctggaaagcacagattcatttaacaatgaacttaaaaggttgtgcggtctgaaagtagaagtggatatggagaaaattgcagctgagattgcacaggcagaggaacaggcccgcaaaaggcaggaggaaagggagaaggaggccgcagagcaagctgagcgcagtcagagcagcatcgttcctgaggaagaacaagcagctaacaaaggcgaggagaagaaagacgacgagaacattccgatggagacagaggagacacaccttgaagaaacaacagagagccaacagaatggtgaagaaggcacgtctactcctgaggacaaggagagtgggcaggagggggtcgacagtatggcagaggaaggaaccagtgatagtaacactggctcggagagcaacagtgcaacagtggaggagccaccaacagatcccataccagaagatgagaaaaaagaataagtgttgccttgttttgtgtgttctaaatactttttttaatgaaaaaatgttttttggttttaatggtgttacgtggtttgtgtattaattttttttcttgtccatatcacaccaccaaaggcttttggaccatttatcacctttcttaagtgttgtgaagatggctcttttctttggatcttgtttctagccctcaactgctgaaagcctcagaatttagattaattgagaaaacacccacctcttttagagaattatcctttgatgctgcagaatctactcttacaatgccttcctacagctcactggggtgcttaccaaagccatagctttaaaccttcccagtccccatcagtagcttcctgaaagtctcctctcttgtttacttctgcaaagggtagcttcttaaaaacgtgatcatgtatgagtatgtatttgttcacttacccttttttacttttaatcaatgtcagataccaagagttgtgttaagctgagtgtagtgtgtaactaactacacttggatcttactgatccagaaatagtccccatagttagagtagttacttatgaagtggttattaaagtgaacacagcacatatacattatctatactgctttttgttatgattaatactgggtatgttctggtaaatccatccttattgtatagaaaaaaaattacttttttaccaggttttccaaagacagaatagatcacaaagctcaaggaatttaatattcttgtaatggactagataattcaaactgattagcccattccagaagaaaaacagctgggaattaagttaatccacttgaaattgttttacaataatcagaacatccaaacctcaaggctcaggatcccatagaccagagcccacctttttgataaacttagtaaagtcttggagactagaagcaagatagtttgtgacacataagcttcccaaaaactagaatagatttttactgaatagtggtatatctgatggtatatgtttcttaaaggtccaaatgtaataaaaaaaaaaatgaaaaaaaaaaaaaaaaaaaaaaaaaaaaaaaaaaaagggngggggcg

SEQ ID NO: 328916 - DNA, 3614 bp, Homo sapiens
  misc_feature (2190)..(2190): n is a, c, g, or t
gaaagggcctctgtcacccagggtggagtgcagtggcatgatcatggctcactgcagccttgacctcccaggctcaagcgatcctcccacctcagcgtcccaaataactgagaccacaaatgtgcaccaccgcacctggctaattttttttttaagagatggggtctccctatgttgccaggctggtgtttcttaatttttcaaatctttggtagagaaagaaccaagcgaagaaaatgagtcattcatttatttactccacaagtattgagcatctaaatgtgctgtgtactgttccagatgtcaaaatctccaccctgatgggaaaaaaaagacggctgggtgcggtggctcatgcctgtaatccagcactttgggaggccgaggcggtggatcacttgaggtcaggagtccaagaccagcctgaccaacatggtgaaacctcgtctctactaaaaatacaaaattagcagggtgtggtggcacatgccgtaatcccagctacttgggagctgggaccacaggcgcccgccgccacgcccggctaattttgtttttgtatttttagtagggacggggtttcaccgtgttagccaggatggtctcgatctcctgacctagtaatctgcccgcctcggcctcccaaaagagctgggattacaggcgtgaatattttttaacaagcaatttcatgtacattttctcaagcaccactcaagctgcctgtccacggggcagacgacttctcctttagtctttctcttgaatatgctcttcaatttcattaatctctattcatgagtataacaatattggaaaaattggacagagtatcacttgttcctcgctttgcagactagagatgcttctagtccctgttggcacactcaggatgggggctacgggaagcccaagaattcagcctctctctaaatgtcaactgttttccagtaaccacaggtcagggatcccatacgttcattctccctccacagtgacccacaatatccatcgggtgtttatgtatccaaagaagaggctactcattccatctggtaaaccaacatactcatgatttagtggaaagagccctggagtggcacagagggctgcctcaatacacacttactgagcgtctaacaatgaatgggtcaagcccttcgtaggcactggcaatgggaagatgaccaatacagacggctgaaccttgctttcaaggccttcataaagcactggagatgacaaacacggtccgatacaaagggtcgggttcaggactccaaccattattatcaaagagccacgggaatacaaaggaaggattactaggggggaagttccaggagggcatcacaaagagacctctgagctggatccagaaggacagatgagtttaagctgaaagtggggacggtcgttcccgctggtgggaaccgaaggagccgaggcagcgctgaggcggagaccaggtggcacccgcggcgctgcaaggacacacaagctgttgcgagggggtcaactctccgggccttggcttagaaacctgggacgattacaccctaaaagcgcttggaaaaactgcagaactcgtgctgattttcgccaaagctactcccccgccgtgagggcaggaagccctgcgaggcgcctgcgaggacgcaaacgccgcgaagcaagtcctccacgcctccatcccaggtttagtgaagtgtagactctgacccacagcctaaaggaaagcaagaccggagtcggggagggcccctccaggagcgggctcagcgggagtctggccgaactgcttgctgccacagtggttccgcggcctcgcgctgagcgccatccgccgtctcccaccgcggcccccaccgcccctccgcaaggctcggcacctcccgccacttcctcggtcgctgcggcggctccggctcctcacagccgctaaacccaggcctattctgtgttaggtcgggcctcctcggccctcttcgccgtgacgaatcagcgcccggctgggaaagtatcaaaattcggggagttttgaggatccaatgggtcctgaaaaaaatccctgagtgtgctaagcatcaccgcatcttcactagaaggttattttttctaaagagggtcgggtggggcccggaaaaaaaaaaaattaagaagagtgtggaaagtgcgagtgcggaagcnccggacgcgaggggcggggcgagcgcgggacaaagggaagcgaagccggagctgcgggcgctttttctgcccgcggtgtctcagattcattcttaaggaactgagaacttaatcttccaaaatgtcaaaaagaccatcttatgccccacctcccaccccagctcctgcaacacaaatgcccagcacaccagggtttgtgggatacaatccatacagtcatctcgcctacaacaactacaggctgggagggaacccgggcaccaacagccgggtcacggcatcctctggtatcacgattccaaaacccccaaagccaccagataagccgctgatgccctacatgaggtacagcagaaaggtctgggaccaagtaaaggcttccaaccctgacctaaagttgtgggagattggcaagattattggtggcatgtggcgagatctcactgatgaagaaaaacaagaatatttaaacgaatacgaagcagaaaagatagagtacaatgaatctatgaaggcctatcataattcccccgcgtaccttgcttacataaatgcaaaaagtcgtgcagaagctgctttagaggaagaaagtcgacagagacaatctcgcatggagaaaggagaaccgtacatgagcattcagcctgctgaagatccagatgattatgatgatggcttttcaatgaagcatacagccaccgcccgtttccagagaaaccaccgcctcatcagtgaaattcttagtgagagtgtggtgccagacgttcggtcagttgtcacaacagctagaatgcaggtcctcaaacggcaggtccagtccttaatggttcatcagcgaaaactagaagctgaacttcttcaaatagaggaacgacaccaggagaagaagaggaaattcctggaaagcacagattcatttaacaatgaacttaaaaggttgtgcggtctgaaagtagaagtggatatggagaaaattgcagctgagattgcacaggcagaggaacaggcccgcaaaaggcaggaggaaagggagaaggaggccgcagagcaagctgagcgcagtcagagcagcatcgttcctgaggaagaacaagcagctaacaaaggcgaggagaagaaagacgacgagaacattccgatggagacagaggagacacaccttgaagaaacaacagagagccaacagaatggtgaagaaggcacgtctactcctgaggacaaggagagtgggcaggagggggtcgacagtatggcagaggaaggaaccagtgatagtaacactggctcggagagcaacagtgcaacagtggaggagccaccaacagatcccataccagaagatgagaaaaaagaataagtgttgccttgttttgtgtgttctaaatactttttttaatgaaaaaatgttttttggttttaatggt

SEQ ID NO: 328917 - DNA, 3860 bp, Homo sapiens
  misc_feature (2190)..(2190): n is a, c, g, or t
  misc_feature (3853)..(3853): n is a, c, g, or t
gaaagggcctctgtcacccagggtggagtgcagtggcatgatcatggctcactgcagccttgacctcccaggctcaagcgatcctcccacctcagcgtcccaaataactgagaccacaaatgtgcaccaccgcacctggctaattttttttttaagagatggggtctccctatgttgccaggctggtgtttcttaatttttcaaatctttggtagagaaagaaccaagcgaagaaaatgagtcattcatttatttactccacaagtattgagcatctaaatgtgctgtgtactgttccagatgtcaaaatctccaccctgatgggaaaaaaaagacggctgggtgcggtggctcatgcctgtaatccagcactttgggaggccgaggcggtggatcacttgaggtcaggagtccaagaccagcctgaccaacatggtgaaacctcgtctctactaaaaatacaaaattagcagggtgtggtggcacatgccgtaatcccagctacttgggagctgggaccacaggcgcccgccgccacgcccggctaattttgtttttgtatttttagtagggacggggtttcaccgtgttagccaggatggtctcgatctcctgacctagtaatctgcccgcctcggcctcccaaaagagctgggattacaggcgtgaatattttttaacaagcaatttcatgtacattttctcaagcaccactcaagctgcctgtccacggggcagacgacttctcctttagtctttctcttgaatatgctcttcaatttcattaatctctattcatgagtataacaatattggaaaaattggacagagtatcacttgttcctcgctttgcagactagagatgcttctagtccctgttggcacactcaggatgggggctacgggaagcccaagaattcagcctctctctaaatgtcaactgttttccagtaaccacaggtcagggatcccatacgttcattctccctccacagtgacccacaatatccatcgggtgtttatgtatccaaagaagaggctactcattccatctggtaaaccaacatactcatgatttagtggaaagagccctggagtggcacagagggctgcctcaatacacacttactgagcgtctaacaatgaatgggtcaagcccttcgtaggcactggcaatgggaagatgaccaatacagacggctgaaccttgctttcaaggccttcataaagcactggagatgacaaacacggtccgatacaaagggtcgggttcaggactccaaccattattatcaaagagccacgggaatacaaaggaaggattactaggggggaagttccaggagggcatcacaaagagacctctgagctggatccagaaggacagatgagtttaagctgaaagtggggacggtcgttcccgctggtgggaaccgaaggagccgaggcagcgctgaggcggagaccaggtggcacccgcggcgctgcaaggacacacaagctgttgcgagggggtcaactctccgggccttggcttagaaacctgggacgattacaccctaaaagcgcttggaaaaactgcagaactcgtgctgattttcgccaaagctactcccccgccgtgagggcaggaagccctgcgaggcgcctgcgaggacgcaaacgccgcgaagcaagtcctccacgcctccatcccaggtttagtgaagtgtagactctgacccacagcctaaaggaaagcaagaccggagtcggggagggcccctccaggagcgggctcagcgggagtctggccgaactgcttgctgccacagtggttccgcggcctcgcgctgagcgccatccgccgtctcccaccgcggcccccaccgcccctccgcaaggctcggcacctcccgccacttcctcggtcgctgcggcggctccggctcctcacagccgctaaacccaggcctattctgtgttaggtcgggcctcctcggccctcttcgccgtgacgaatcagcgcccggctgggaaagtatcaaaattcggggagttttgaggatccaatgggtcctgaaaaaaatccctgagtgtgctaagcatcaccgcatcttcactagaaggttattttttctaaagagggtcgggtggggcccggaaaaaaaaaaaattaagaagagtgtggaaagtgcgagtgcggaagcnccggacgcgaggggcggggcgagcgcgggacaaagggaagcgaagccggagctgcgggcgctttttctgcccgcggtgtctcagattcattcttaaggaactgagaacttaatcttccaaaatgtcaaaaagaccatcttatgccccacctcccaccccagctcctgcaacacaaatgcccagcacaccagggtttgtgggatacaatccatacagtcatctcgcctacaacaactacaggctgggagggaacccgggcaccaacagccgggtcacggcatcctctggtatcacgattccaaaacccccaaagccaccagataagccgctgatgccctacatgaggtacagcagaaaggtctgggaccaagtaaaggcttccaaccctgacctaaagttgtgggagattggcaagattattggtggcatgtggcgagatctcactgatgaagaaaaacaagaatatttaaacgaatacgaagcagaaaagatagagtacaatgaatctatgaaggcctatcataattcccccgcgtaccttgcttacataaatgcaaaaagtcgtgcagaagctgctttagaggaagaaagtcgacagagacaatctcgcatggagaaaggagaaccgtacatgagcattcagcctgctgaagatccagatgattatgatgatggcttttcaatgaagcatacagccaccgcccgtttccagagaaaccaccgcctcatcagtgaaattcttagtgagagtgtggtgccagacgttcggtcagttgtcacaacagctagaatgcaggtcctcaaacggcaggtccagtccttaatggttcatcagcgaaaactagaagctgaacttcttcaaatagaggaacgacaccaggagaagaagaggaaattcctggaaagcacagattcatttaacaatgaacttaaaaggtagcttcctgaaagtctcctctcttgtttacttctgcaaagggtagcttcttaaaaacgtgatcatgtatgagtatgtatttgttcacttacccttttttacttttaatcaatgtcagataccaagagttgtgttaagctgagtgtagtgtgtaactaactacacttggatcttactgatccagaaatagtccccatagttagagtagttacttatgaagtggttattaaagtgaacacagcacatatacattatctatactgctttttgttatgattaatactgggtatgttctggtaaatccatccttattgtatagaaaaaaaattacttttttaccaggttttccaaagacagaatagatcacaaagctcaaggaatttaatattcttgtaatggactagataattcaaactgattagcccattccagaagaaaaacagctgggaattaagttaatccacttgaaattgttttacaataatcagaacatccaaacctcaaggctcaggatcccatagaccagagcccacctttttgataaacttagtaaagtcttggagactagaagcaagatagtttgtgacacataagcttcccaaaaactagaatagatttttactgaatagtggtatatctgatggtatatgtttcttaaaggtccaaatgtaataaaaaaaaaaatgaaaaaaaaaaaaaaaaaaaaaaaaaaaaaaaaaaaagggngggggcg

SEQ ID NO: 328918 - DNA, 3610 bp, Homo sapiens
  misc_feature (2190)..(2190): n is a, c, g, or t
gaaagggcctctgtcacccagggtggagtgcagtggcatgatcatggctcactgcagccttgacctcccaggctcaagcgatcctcccacctcagcgtcccaaataactgagaccacaaatgtgcaccaccgcacctggctaattttttttttaagagatggggtctccctatgttgccaggctggtgtttcttaatttttcaaatctttggtagagaaagaaccaagcgaagaaaatgagtcattcatttatttactccacaagtattgagcatctaaatgtgctgtgtactgttccagatgtcaaaatctccaccctgatgggaaaaaaaagacggctgggtgcggtggctcatgcctgtaatccagcactttgggaggccgaggcggtggatcacttgaggtcaggagtccaagaccagcctgaccaacatggtgaaacctcgtctctactaaaaatacaaaattagcagggtgtggtggcacatgccgtaatcccagctacttgggagctgggaccacaggcgcccgccgccacgcccggctaattttgtttttgtatttttagtagggacggggtttcaccgtgttagccaggatggtctcgatctcctgacctagtaatctgcccgcctcggcctcccaaaagagctgggattacaggcgtgaatattttttaacaagcaatttcatgtacattttctcaagcaccactcaagctgcctgtccacggggcagacgacttctcctttagtctttctcttgaatatgctcttcaatttcattaatctctattcatgagtataacaatattggaaaaattggacagagtatcacttgttcctcgctttgcagactagagatgcttctagtccctgttggcacactcaggatgggggctacgggaagcccaagaattcagcctctctctaaatgtcaactgttttccagtaaccacaggtcagggatcccatacgttcattctccctccacagtgacccacaatatccatcgggtgtttatgtatccaaagaagaggctactcattccatctggtaaaccaacatactcatgatttagtggaaagagccctggagtggcacagagggctgcctcaatacacacttactgagcgtctaacaatgaatgggtcaagcccttcgtaggcactggcaatgggaagatgaccaatacagacggctgaaccttgctttcaaggccttcataaagcactggagatgacaaacacggtccgatacaaagggtcgggttcaggactccaaccattattatcaaagagccacgggaatacaaaggaaggattactaggggggaagttccaggagggcatcacaaagagacctctgagctggatccagaaggacagatgagtttaagctgaaagtggggacggtcgttcccgctggtgggaaccgaaggagccgaggcagcgctgaggcggagaccaggtggcacccgcggcgctgcaaggacacacaagctgttgcgagggggtcaactctccgggccttggcttagaaacctgggacgattacaccctaaaagcgcttggaaaaactgcagaactcgtgctgattttcgccaaagctactcccccgccgtgagggcaggaagccctgcgaggcgcctgcgaggacgcaaacgccgcgaagcaagtcctccacgcctccatcccaggtttagtgaagtgtagactctgacccacagcctaaaggaaagcaagaccggagtcggggagggcccctccaggagcgggctcagcgggagtctggccgaactgcttgctgccacagtggttccgcggcctcgcgctgagcgccatccgccgtctcccaccgcggcccccaccgcccctccgcaaggctcggcacctcccgccacttcctcggtcgctgcggcggctccggctcctcacagccgctaaacccaggcctattctgtgttaggtcgggcctcctcggccctcttcgccgtgacgaatcagcgcccggctgggaaagtatcaaaattcggggagttttgaggatccaatgggtcctgaaaaaaatccctgagtgtgctaagcatcaccgcatcttcactagaaggttattttttctaaagagggtcgggtggggcccggaaaaaaaaaaaattaagaagagtgtggaaagtgcgagtgcggaagcnccggacgcgaggggcggggcgagcgcgggacaaagggaagcgaagccggagctgcgggcgctttttctgcccgcggtgtctcagattcattcttaaggaactgagaacttaatcttccaaaatgtcaaaaagaccatcttatgccccacctcccaccccagctcctgcaacacaaatgcccagcacaccagggtttgtgggatacaatccatacagtcatctcgcctacaacaactacaggctgggagggaacccgggcaccaacagccgggtcacggcatcctctggtatcacgattccaaaacccccaaagccaccagataagccgctgatgccctacatgaggtacagcagaaaggtctgggaccaagtaaaggcttccaaccctgacctaaagttgtgggagattggcaagattattggtggcatgtggcgagatctcactgatgaagaaaaacaagaatatttaaacgaatacgaagcagaaaagatagagtacaatgaatctatgaaggcctatcataattcccccgcgtaccttgcttacataaatgcaaaaagtcgtgcagaagctgctttagaggaagaaagtcgacagagacaatctcgcatggagaaaggagaaccgtacatgagcattcagcctgctgaagatccagatgattatgatgatggcttttcaatgaagcatacagccaccgcccgtttccagagaaaccaccgcctcatcagtgaaattcttagtgagagtgtggtgccagacgttcggtcagttgtcacaacagctagaatgcaggtcctcaaacggcaggtccagtccttaatggttcatcagcgaaaactagaagctgaacttcttcaaatagaggaacgacaccaggagaagaagaggaaattcctggaaagcacagattcatttaacaatgaacttaaaaggttgtgcggtctgaaagtagaagtggatatggagaaaattgcagctgagattgcacaggcagaggaacaggcccgcaaaaggcaggaggaaagggagaaggaggccgcagagcaagctgagcgcagtcagagcagcatcgttcctgaggaagaacaagcagctaacaaaggcgaggagaagaaagacgacgagaacattccgatggagacagaggagacacaacctctagcctagccgtttactcaatcctctgatcagggtgagcatcaaatcaaaatacgccctgatcggcgcaatgggaagccagtagcccaaacaaatctcatattgaagtcaccctagcaatcattctactatcaacattaactaataaagtgggttcctttaaaccttttccaccttttatcaaagaaagaaacactctggattaattcctggcattatgaaccttgggcattaaatatgattttatcttccacatta

SEQ ID NO: 328919 - DNA, 3365 bp, Homo sapiens
  misc_feature (2190)..(2190): n is a, c, g, or t
gaaagggcctctgtcacccagggtggagtgcagtggcatgatcatggctcactgcagccttgacctcccaggctcaagcgatcctcccacctcagcgtcccaaataactgagaccacaaatgtgcaccaccgcacctggctaattttttttttaagagatggggtctccctatgttgccaggctggtgtttcttaatttttcaaatctttggtagagaaagaaccaagcgaagaaaatgagtcattcatttatttactccacaagtattgagcatctaaatgtgctgtgtactgttccagatgtcaaaatctccaccctgatgggaaaaaaaagacggctgggtgcggtggctcatgcctgtaatccagcactttgggaggccgaggcggtggatcacttgaggtcaggagtccaagaccagcctgaccaacatggtgaaacctcgtctctactaaaaatacaaaattagcagggtgtggtggcacatgccgtaatcccagctacttgggagctgggaccacaggcgcccgccgccacgcccggctaattttgtttttgtatttttagtagggacggggtttcaccgtgttagccaggatggtctcgatctcctgacctagtaatctgcccgcctcggcctcccaaaagagctgggattacaggcgtgaatattttttaacaagcaatttcatgtacattttctcaagcaccactcaagctgcctgtccacggggcagacgacttctcctttagtctttctcttgaatatgctcttcaatttcattaatctctattcatgagtataacaatattggaaaaattggacagagtatcacttgttcctcgctttgcagactagagatgcttctagtccctgttggcacactcaggatgggggctacgggaagcccaagaattcagcctctctctaaatgtcaactgttttccagtaaccacaggtcagggatcccatacgttcattctccctccacagtgacccacaatatccatcgggtgtttatgtatccaaagaagaggctactcattccatctggtaaaccaacatactcatgatttagtggaaagagccctggagtggcacagagggctgcctcaatacacacttactgagcgtctaacaatgaatgggtcaagcccttcgtaggcactggcaatgggaagatgaccaatacagacggctgaaccttgctttcaaggccttcataaagcactggagatgacaaacacggtccgatacaaagggtcgggttcaggactccaaccattattatcaaagagccacgggaatacaaaggaaggattactaggggggaagttccaggagggcatcacaaagagacctctgagctggatccagaaggacagatgagtttaagctgaaagtggggacggtcgttcccgctggtgggaaccgaaggagccgaggcagcgctgaggcggagaccaggtggcacccgcggcgctgcaaggacacacaagctgttgcgagggggtcaactctccgggccttggcttagaaacctgggacgattacaccctaaaagcgcttggaaaaactgcagaactcgtgctgattttcgccaaagctactcccccgccgtgagggcaggaagccctgcgaggcgcctgcgaggacgcaaacgccgcgaagcaagtcctccacgcctccatcccaggtttagtgaagtgtagactctgacccacagcctaaaggaaagcaagaccggagtcggggagggcccctccaggagcgggctcagcgggagtctggccgaactgcttgctgccacagtggttccgcggcctcgcgctgagcgccatccgccgtctcccaccgcggcccccaccgcccctccgcaaggctcggcacctcccgccacttcctcggtcgctgcggcggctccggctcctcacagccgctaaacccaggcctattctgtgttaggtcgggcctcctcggccctcttcgccgtgacgaatcagcgcccggctgggaaagtatcaaaattcggggagttttgaggatccaatgggtcctgaaaaaaatccctgagtgtgctaagcatcaccgcatcttcactagaaggttattttttctaaagagggtcgggtggggcccggaaaaaaaaaaaattaagaagagtgtggaaagtgcgagtgcggaagcnccggacgcgaggggcggggcgagcgcgggacaaagggaagcgaagccggagctgcgggcgctttttctgcccgcggtgtctcagattcattcttaaggaactgagaacttaatcttccaaaatgtcaaaaagaccatcttatgccccacctcccaccccagctcctgcaacacaaatgcccagcacaccagggtttgtgggatacaatccatacagtcatctcgcctacaacaactacaggctgggagggaacccgggcaccaacagccgggtcacggcatcctctggtatcacgattccaaaacccccaaagccaccagataagccgctgatgccctacatgaggtacagcagaaaggtctgggaccaagtaaaggcttccaaccctgacctaaagttgtgggagattggcaagattattggtggcatgtggcgagatctcactgatgaagaaaaacaagaatatttaaacgaatacgaagcagaaaagatagagtacaatgaatctatgaaggcctatcataattcccccgcgtaccttgcttacataaatgcaaaaagtcgtgcagaagctgctttagaggaagaaagtcgacagagacaatctcgcatggagaaaggagaaccgtacatgagcattcagcctgctgaagatccagatgattatgatgatggcttttcaatgaagcatacagccaccgcccgtttccagagaaaccaccgcctcatcagtgaaattcttagtgagagtgtggtgccagacgttcggtcagttgtcacaacagctagaatgcaggtcctcaaacggcaggtccagtccttaatggttcatcagcgaaaactagaagctgaacttcttcaaatagaggaacgacaccaggagaagaagaggaaattcctggaaagcacagattcatttaacaatgaacttaaaaggttgtgcggtctgaaagtagaagtggatatggagaaaattgcagctgagattgcacaggcagaggaacaggcccgcaaaaggcaggaggaaagggagaaggaggccgcagagcaagctgagcgcagtcagagcagcatcgttcctgaggaagaacaagcagtacgaggttgttttacaagcaacggacgagtacataacgacctggagacagacggagacacgaccttggctaggcgac

SEQ ID NO: 328920 - DNA, 3222 bp, Homo sapiens
  misc_feature (2190)..(2190): n is a, c, g, or t
gaaagggcctctgtcacccagggtggagtgcagtggcatgatcatggctcactgcagccttgacctcccaggctcaagcgatcctcccacctcagcgtcccaaataactgagaccacaaatgtgcaccaccgcacctggctaattttttttttaagagatggggtctccctatgttgccaggctggtgtttcttaatttttcaaatctttggtagagaaagaaccaagcgaagaaaatgagtcattcatttatttactccacaagtattgagcatctaaatgtgctgtgtactgttccagatgtcaaaatctccaccctgatgggaaaaaaaagacggctgggtgcggtggctcatgcctgtaatccagcactttgggaggccgaggcggtggatcacttgaggtcaggagtccaagaccagcctgaccaacatggtgaaacctcgtctctactaaaaatacaaaattagcagggtgtggtggcacatgccgtaatcccagctacttgggagctgggaccacaggcgcccgccgccacgcccggctaattttgtttttgtatttttagtagggacggggtttcaccgtgttagccaggatggtctcgatctcctgacctagtaatctgcccgcctcggcctcccaaaagagctgggattacaggcgtgaatattttttaacaagcaatttcatgtacattttctcaagcaccactcaagctgcctgtccacggggcagacgacttctcctttagtctttctcttgaatatgctcttcaatttcattaatctctattcatgagtataacaatattggaaaaattggacagagtatcacttgttcctcgctttgcagactagagatgcttctagtccctgttggcacactcaggatgggggctacgggaagcccaagaattcagcctctctctaaatgtcaactgttttccagtaaccacaggtcagggatcccatacgttcattctccctccacagtgacccacaatatccatcgggtgtttatgtatccaaagaagaggctactcattccatctggtaaaccaacatactcatgatttagtggaaagagccctggagtggcacagagggctgcctcaatacacacttactgagcgtctaacaatgaatgggtcaagcccttcgtaggcactggcaatgggaagatgaccaatacagacggctgaaccttgctttcaaggccttcataaagcactggagatgacaaacacggtccgatacaaagggtcgggttcaggactccaaccattattatcaaagagccacgggaatacaaaggaaggattactaggggggaagttccaggagggcatcacaaagagacctctgagctggatccagaaggacagatgagtttaagctgaaagtggggacggtcgttcccgctggtgggaaccgaaggagccgaggcagcgctgaggcggagaccaggtggcacccgcggcgctgcaaggacacacaagctgttgcgagggggtcaactctccgggccttggcttagaaacctgggacgattacaccctaaaagcgcttggaaaaactgcagaactcgtgctgattttcgccaaagctactcccccgccgtgagggcaggaagccctgcgaggcgcctgcgaggacgcaaacgccgcgaagcaagtcctccacgcctccatcccaggtttagtgaagtgtagactctgacccacagcctaaaggaaagcaagaccggagtcggggagggcccctccaggagcgggctcagcgggagtctggccgaactgcttgctgccacagtggttccgcggcctcgcgctgagcgccatccgccgtctcccaccgcggcccccaccgcccctccgcaaggctcggcacctcccgccacttcctcggtcgctgcggcggctccggctcctcacagccgctaaacccaggcctattctgtgttaggtcgggcctcctcggccctcttcgccgtgacgaatcagcgcccggctgggaaagtatcaaaattcggggagttttgaggatccaatgggtcctgaaaaaaatccctgagtgtgctaagcatcaccgcatcttcactagaaggttattttttctaaagagggtcgggtggggcccggaaaaaaaaaaaattaagaagagtgtggaaagtgcgagtgcggaagcnccggacgcgaggggcggggcgagcgcgggacaaagggaagcgaagccggagctgcgggcgctttttctgcccgcggtgtctcagattcattcttaaggaactgagaacttaatcttccaaaatgtcaaaaagaccatcttatgccccacctcccaccccagctcctgcaacacaaatgcccagcacaccagggtttgtgggatacaatccatacagtcatctcgcctacaacaactacaggctgggagggaacccgggcaccaacagccgggtcacggcatcctctggtatcacgattccaaaacccccaaagccaccagataagccgctgatgccctacatgaggtacagcagaaaggtctgggaccaagtaaaggcttccaaccctgacctaaagttgtgggagattggcaagattattggtggcatgtggcgagatctcactgatgaagaaaaacaagaatatttaaacgaatacgaagcagaaaagatagagtacaatgaatctatgaaggcctatcataattcccccgcgtaccttgcttacataaatgcaaaaagtcgtgcagaagctgctttagaggaagaaagtcgacagagacaatctcgcatggagaaaggagaaccgtacatgagcattcagcctgctgaagatccagatgattatgatgatggcttttcaatgaagcatacagccaccgcccgtttccagagaaaccaccgcctcatcagtgaaattcttagtgagagtgtggtgccagacgttcggtcagttgtcacaacagctagaatgcaggtcctcaaacggcaggtccagtccttaatggttcatcagcgaaaactagaagctgaacttcttcaaatagaggaacgacaccaggagaagaagaggaaattcctggaaagcacagattcatttaacaatgaacttaaaaggttgtgcggtctgaaagtagaagtggatatggagaaaatttctgcacgacttttttgcatttatgtaagccaggtacgcgggagacaatgagtaca

SEQ ID NO: 328921 - DNA, 2331 bp, Homo sapiens
  misc_feature (2324)..(2324): n is a, c, g, or t
ttcgtgtttttgtctcatttgtttccatcagcaaatgcccagcacaccagggtttgtgggatacaatccatacagtcatctcgcctacaacaactacaggctgggagggaacccgggcaccaacagccgggtcacggcatcctctggtatcacgattccaaaacccccaaagccaccagataagccgctgatgccctacatgaggtacagcagaaaggtctgggaccaagtaaaggcttccaaccctgacctaaagttgtgggagattggcaagattattggtggcatgtggcgagatctcactgatgaagaaaaacaagaatatttaaacgaatacgaagcagaaaagatagagtacaatgaatctatgaaggcctatcataattcccccgcgtaccttgcttacataaatgcaaaaagtcgtgcagaagctgctttagaggaagaaagtcgacagagacaatctcgcatggagaaaggagaaccgtacatgagcattcagcctgctgaagatccagatgattatgatgatggcttttcaatgaagcatacagccaccgcccgtttccagagaaaccaccgcctcatcagtgaaattcttagtgagagtgtggtgccagacgttcggtcagttgtcacaacagctagaatgcaggtcctcaaacggcaggtccagtccttaatggttcatcagcgaaaactagaagctgaacttcttcaaatagaggaacgacaccaggagaagaagaggaaattcctggaaagcacagattcatttaacaatgaacttaaaaggttgtgcggtctgaaagtagaagtggatatggagaaaattgcagctgagattgcacaggcagaggaacaggcccgcaaaaggcaggaggaaagggagaaggaggccgcagagcaagctgagcgcagtcagagcagcatcgttcctgaggaagaacaagcagctaacaaaggcgaggagaagaaagacgacgagaacattccgatggagacagaggagacacaccttgaagaaacaacagagagccaacagaatggtgaagaaggcacgtctactcctgaggacaaggagagtgggcaggagggggtcgacagtatggcagaggaaggaaccagtgatagtaacactggctcggagagcaacagtgcaacagtggaggagccaccaacagatcccataccagaagatgagaaaaaagaataagtgttgccttgttttgtgtgttctaaatactttttttaatgaaaaaatgttttttggttttaatggtgttacgtggtttgtgtattaattttttttcttgtccatatcacaccaccaaaggcttttggaccatttagcatcatgagcctaatggctcagtcagtcacctttcttaagtgttgtgaagatggctcttttctttggatcttgtttctagccctcaactgctgaaagcctcagaatttagattaattgagaaaacacccacctcttttagagaattatcctttgatgctgcagaatctactcttacaatgccttcctacagctcactggggtgcttaccaaagccatagctttaaaccttcccagtccccatcagtagcttcctgaaagtctcctctcttgtttacttctgcaaagggtagcttcttaaaaacgtgatcatgtatgagtatgtatttgttcacttacccttttttacttttaatcaatgtcagataccaagagttgtgttaagctgagtgtagtgtgtaactaactacacttggatcttactgatccagaaatagtccccatagttagagtagttacttatgaagtggttattaaagtgaacacagcacatatacattatctatactgctttttgttatgattaatactgggtatgttctggtaaatccatccttattgtatagaaaaaaaattacttttttaccaggttttccaaagacagaatagatcacaaagctcaaggaatttaatattcttgtaatggactagataattcaaactgattagcccattccagaagaaaaacagctgggaattaagttaatccacttgaaattgttttacaataatcagaacatccaaacctcaaggctcaggatcccatagaccagagcccacctttttgataaacttagtaaagtcttggagactagaagcaagatagtttgtgacacataagcttcccaaaaactagaatagatttttactgaatagtggtatatctgatggtatatgtttcttaaaggtccaaatgtaataaaaaaaaaaatgaaaaaaaaaaaaaaaaaaaaaaaaaaaaaaaaaaaagggngggggcg

SEQ ID NO: 328922 - DNA, 1722 bp, Homo sapiens
  misc_feature (1715)..(1715): n is a, c, g, or t
accgatgaagatgcgtttcggagggtcaacccctttgaaattttcttggaagacgaatgggtggtggtagagattctgaagaaatggaaatagatggtgatccttttagtgccttggtttcagcatgaatggatatcccgatgaagatgccgttttcgcagattcatttaacaatgaacttaaaaggttgtgcggtctgaaagtagaagtggatatggagaaaattgcagctgagattgcacaggcagaggaacaggcccgcaaaaggcaggaggaaagggagaaggaggccgcagagcaagctgagcgcagtcagagcagcatcgttcctgaggaagaacaagcagctaacaaaggcgaggagaagaaagacgacgagaacattccgatggagacagaggagacacaccttgaagaaacaacagagagccaacagaatggtgaagaaggcacgtctactcctgaggacaaggagagtgggcaggagggggtcgacagtatggcagaggaaggaaccagtgatagtaacactggctcggagagcaacagtgcaacagtggaggagccaccaacagatcccataccagaagatgagaaaaaagaataagtgttgccttgttttgtgtgttctaaatactttttttaatgaaaaaatgttttttggttttaatggtgttacgtggtttgtgtattaattttttttcttgtccatatcacaccaccaaaggcttttggaccatttagcatcatgagcctaatggctcagtcagtcacctttcttaagtgttgtgaagatggctcttttctttggatcttgtttctagccctcaactgctgaaagcctcagaatttagattaattgagaaaacacccacctcttttagagaattatcctttgatgctgcagaatctactcttacaatgccttcctacagctcactggggtgcttaccaaagccatagctttaaaccttcccagtccccatcagtagcttcctgaaagtctcctctcttgtttacttctgcaaagggtagcttcttaaaaacgtgatcatgtatgagtatgtatttgttcacttacccttttttacttttaatcaatgtcagataccaagagttgtgttaagctgagtgtagtgtgtaactaactacacttggatcttactgatccagaaatagtccccatagttagagtagttacttatgaagtggttattaaagtgaacacagcacatatacattatctatactgctttttgttatgattaatactgggtatgttctggtaaatccatccttattgtatagaaaaaaaattacttttttaccaggttttccaaagacagaatagatcacaaagctcaaggaatttaatattcttgtaatggactagataattcaaactgattagcccattccagaagaaaaacagctgggaattaagttaatccacttgaaattgttttacaataatcagaacatccaaacctcaaggctcaggatcccatagaccagagcccacctttttgataaacttagtaaagtcttggagactagaagcaagatagtttgtgacacataagcttcccaaaaactagaatagatttttactgaatagtggtatatctgatggtatatgtttcttaaaggtccaaatgtaataaaaaaaaaaatgaaaaaaaaaaaaaaaaaaaaaaaaaaaaaaaaaaaagggngggggcg

SEQ ID NO: 328923 - DNA, 1516 bp, Homo sapiens
  misc_feature (1509)..(1509): n is a, c, g, or t
taaaaagtagattttcatacccaaattgttccaacattcttaaaagttctttagtcacactggttcatttcaggggtttaataaccacatgtggctagtggcttctatattggacagcacagctgtatactgtcagcataactagagtaaaatttcatcttggaactgacagtgacaaatgtgtgattacagaggagacacaccttgaagaaacaacagagagccaacagaatggtgaagaaggcacgtctactcctgaggacaaggagagtgggcaggagggggtcgacagtatggcagaggaaggaaccagtgatagtaacactggctcggagagcaacagtgcaacagtggaggagccaccaacagatcccataccagaagatgagaaaaaagaataagtgttgccttgttttgtgtgttctaaatactttttttaatgaaaaaatgttttttggttttaatggtgttacgtggtttgtgtattaattttttttcttgtccatatcacaccaccaaaggcttttggaccatttagcatcatgagcctaatggctcagtcagtcacctttcttaagtgttgtgaagatggctcttttctttggatcttgtttctagccctcaactgctgaaagcctcagaatttagattaattgagaaaacacccacctcttttagagaattatcctttgatgctgcagaatctactcttacaatgccttcctacagctcactggggtgcttaccaaagccatagctttaaaccttcccagtccccatcagtagcttcctgaaagtctcctctcttgtttacttctgcaaagggtagcttcttaaaaacgtgatcatgtatgagtatgtatttgttcacttacccttttttacttttaatcaatgtcagataccaagagttgtgttaagctgagtgtagtgtgtaactaactacacttggatcttactgatccagaaatagtccccatagttagagtagttacttatgaagtggttattaaagtgaacacagcacatatacattatctatactgctttttgttatgattaatactgggtatgttctggtaaatccatccttattgtatagaaaaaaaattacttttttaccaggttttccaaagacagaatagatcacaaagctcaaggaatttaatattcttgtaatggactagataattcaaactgattagcccattccagaagaaaaacagctgggaattaagttaatccacttgaaattgttttacaataatcagaacatccaaacctcaaggctcaggatcccatagaccagagcccacctttttgataaacttagtaaagtcttggagactagaagcaagatagtttgtgacacataagcttcccaaaaactagaatagatttttactgaatagtggtatatctgatggtatatgtttcttaaaggtccaaatgtaataaaaaaaaaaatgaaaaaaaaaaaaaaaaaaaaaaaaaaaaaaaaaaaagggngggggcg

SEQ ID NO: 328924 - DNA, 1358 bp, Homo sapiens
  misc_feature (1351)..(1351): n is a, c, g, or t
aaattaattatacaatctcctccccttcccttcctgaaaatacatggtttgtggaactggcttctatcctagtaatactgtttgcatgctgcaaagctaaggaaacaatgacctgtgatcccaggggtcgacagtatggcagaggaaggaaccagtgatagtaacactggctcggagagcaacagtgcaacagtggaggagccaccaacagatcccataccagaagatgagaaaaaagaataagtgttgccttgttttgtgtgttctaaatactttttttaatgaaaaaatgttttttggttttaatggtgttacgtggtttgtgtattaattttttttcttgtccatatcacaccaccaaaggcttttggaccatttagcatcatgagcctaatggctcagtcagtcacctttcttaagtgttgtgaagatggctcttttctttggatcttgtttctagccctcaactgctgaaagcctcagaatttagattaattgagaaaacacccacctcttttagagaattatcctttgatgctgcagaatctactcttacaatgccttcctacagctcactggggtgcttaccaaagccatagctttaaaccttcccagtccccatcagtagcttcctgaaagtctcctctcttgtttacttctgcaaagggtagcttcttaaaaacgtgatcatgtatgagtatgtatttgttcacttacccttttttacttttaatcaatgtcagataccaagagttgtgttaagctgagtgtagtgtgtaactaactacacttggatcttactgatccagaaatagtccccatagttagagtagttacttatgaagtggttattaaagtgaacacagcacatatacattatctatactgctttttgttatgattaatactgggtatgttctggtaaatccatccttattgtatagaaaaaaaattacttttttaccaggttttccaaagacagaatagatcacaaagctcaaggaatttaatattcttgtaatggactagataattcaaactgattagcccattccagaagaaaaacagctgggaattaagttaatccacttgaaattgttttacaataatcagaacatccaaacctcaaggctcaggatcccatagaccagagcccacctttttgataaacttagtaaagtcttggagactagaagcaagatagtttgtgacacataagcttcccaaaaactagaatagatttttactgaatagtggtatatctgatggtatatgtttcttaaaggtccaaatgtaataaaaaaaaaaatgaaaaaaaaaaaaaaaaaaaaaaaaaaaaaaaaaaaagggngggggcg

SEQ ID NO: 328925 - DNA, 4349 bp, Homo sapiens
  misc_feature (2190)..(2190): n is a, c, g, or t
gaaagggcctctgtcacccagggtggagtgcagtggcatgatcatggctcactgcagccttgacctcccaggctcaagcgatcctcccacctcagcgtcccaaataactgagaccacaaatgtgcaccaccgcacctggctaattttttttttaagagatggggtctccctatgttgccaggctggtgtttcttaatttttcaaatctttggtagagaaagaaccaagcgaagaaaatgagtcattcatttatttactccacaagtattgagcatctaaatgtgctgtgtactgttccagatgtcaaaatctccaccctgatgggaaaaaaaagacggctgggtgcggtggctcatgcctgtaatccagcactttgggaggccgaggcggtggatcacttgaggtcaggagtccaagaccagcctgaccaacatggtgaaacctcgtctctactaaaaatacaaaattagcagggtgtggtggcacatgccgtaatcccagctacttgggagctgggaccacaggcgcccgccgccacgcccggctaattttgtttttgtatttttagtagggacggggtttcaccgtgttagccaggatggtctcgatctcctgacctagtaatctgcccgcctcggcctcccaaaagagctgggattacaggcgtgaatattttttaacaagcaatttcatgtacattttctcaagcaccactcaagctgcctgtccacggggcagacgacttctcctttagtctttctcttgaatatgctcttcaatttcattaatctctattcatgagtataacaatattggaaaaattggacagagtatcacttgttcctcgctttgcagactagagatgcttctagtccctgttggcacactcaggatgggggctacgggaagcccaagaattcagcctctctctaaatgtcaactgttttccagtaaccacaggtcagggatcccatacgttcattctccctccacagtgacccacaatatccatcgggtgtttatgtatccaaagaagaggctactcattccatctggtaaaccaacatactcatgatttagtggaaagagccctggagtggcacagagggctgcctcaatacacacttactgagcgtctaacaatgaatgggtcaagcccttcgtaggcactggcaatgggaagatgaccaatacagacggctgaaccttgctttcaaggccttcataaagcactggagatgacaaacacggtccgatacaaagggtcgggttcaggactccaaccattattatcaaagagccacgggaatacaaaggaaggattactaggggggaagttccaggagggcatcacaaagagacctctgagctggatccagaaggacagatgagtttaagctgaaagtggggacggtcgttcccgctggtgggaaccgaaggagccgaggcagcgctgaggcggagaccaggtggcacccgcggcgctgcaaggacacacaagctgttgcgagggggtcaactctccgggccttggcttagaaacctgggacgattacaccctaaaagcgcttggaaaaactgcagaactcgtgctgattttcgccaaagctactcccccgccgtgagggcaggaagccctgcgaggcgcctgcgaggacgcaaacgccgcgaagcaagtcctccacgcctccatcccaggtttagtgaagtgtagactctgacccacagcctaaaggaaagcaagaccggagtcggggagggcccctccaggagcgggctcagcgggagtctggccgaactgcttgctgccacagtggttccgcggcctcgcgctgagcgccatccgccgtctcccaccgcggcccccaccgcccctccgcaaggctcggcacctcccgccacttcctcggtcgctgcggcggctccggctcctcacagccgctaaacccaggcctattctgtgttaggtcgggcctcctcggccctcttcgccgtgacgaatcagcgcccggctgggaaagtatcaaaattcggggagttttgaggatccaatgggtcctgaaaaaaatccctgagtgtgctaagcatcaccgcatcttcactagaaggttattttttctaaagagggtcgggtggggcccggaaaaaaaaaaaattaagaagagtgtggaaagtgcgagtgcggaagcnccggacgcgaggggcggggcgagcgcgggacaaagggaagcgaagccggagctgcgggcgctttttctgcccgcggtgtctcagattcattcttaaggaactgagaacttaatcttccaaaatgtcaaaaagaccatcttatgccccacctcccaccccagctcctgcaacacaaatgcccagcacaccagggtttgtgggatacaatccatacagtcatctcgcctacaacaactacaggctgggagggaacccgggcaccaacagccgggtcacggtaggagaatcaactattacagcatccggcaaacaactggaattgaccagaaatgccttcagaattaggtctttttgaatcataagcacagccatttaaaaaaaattttttaacctagctttttgagtattttcaacattcgttgtagcatctcacactgaaaaaataaatagtgagatctggaatgtatatagaagaaaagaaaaatccattctgtttggtggttggtagggttaaagccttgagcacttgatgcttatactgtatgtaaacaaacagaatttcttaaggtaaaaatatcctttttgacataaagagtatttttcatttttataaggtgattggcattagtctcaaggattgagtttctagtagaggctggtctttcagacctggctttttcagggctggaaagcttttggctggtacaccagtttgaatcgctacccatagttatttgtcttttggatttagtagttgaccttctaactaagactcatttctctacagtgaaaaagagaaaaacgttttaatgtcacctcaaagaaatgcagagtgaaggttgaatgaaattaatttgaagtatcagactagatatgtacaacgagaagtgcatttctaatccttagtataagagataggatttctgaaacttagcatgtttcatttaagtgatcagcctaagatatcaaaattggatgatacacttcaaatcttttagtttagaatcatcttaaatttcattcaaaaaagtttaagcaccaaaaaatgccaataattataaaaatgacttactaaagataaaaaatccaaaagtcaaatactacattggaatgtagtgttggtgagaatttatacaacccagaatggctgtaaagtttttaatacctggtttttgtttgctgtattcataaataacaagtgccttctattaatgtaacttcaaaaaagccctctcaccctgtagtcaagctggaactgaaagcttgtagctatcaaatgaatgtctatcttgataagcatattgcttagcttgataggttttgtttgtctaaatttttcattgtttctgcataatatgtacttcataagcatatcaagttttatgtgccatgcatatttcatggtatctgaaaaagaattctgacaaagtgtgtgtatgtatgcatttcacaatgcatacaatttttatgtgcatcaatacatgtttttccctggcctaaacatgttgtttcacagtgtaatggatggcaaggttttcaaatgataaagaacatttcagtttaaacaatgaacagaatcaatcatggatcttaatgttaatgcagcaattttttcacgggcagtaaacaagaatgattgcatttaatagctctatacagtcacctcttgattatctatgttaatggaatagaaatgataactataatattacagtaatttgtcttttggttttgtgtaagtattttgctcttaacttggatgtagctgtgggggattctcagttaaaaaagtgagattgttcgatggagactaggaagagaaagtgtactccctatctgaagtcactcatctgtttcttcccattccttcttggcgaatgttaagaactgaacatttggcgtggacactagctacatagtagattaattatagagagttgttggacatggaaaatttggtgttttggtcctttgtggacatttactttgtattattgtcctcttaacaccaaattgaagtataatcaaactgctatatgaagaagggcctagaaaatgtggaggttttacactacttgccctgctttctatatctagtttaagctgttaggactcaatggctctgattttgaccataataaaagcattttgattttaaa

SEQ ID NO: 328926 - DNA, 451 bp, Homo sapiens
ggttcagatcctgctgcagataatcaagtgttgactgtatgtgtaatggtaattgagcagaataagagggtaccaggtaatgtcctgaacttgagacggttgatatataaccatatattttcaatgtatgggttactgtgtaatattttatttgttcttgcagccaggttgtcaaagcattggcaataaactgctaagtaaaacatttaaaaattatgtgcttaaagtcattttcttttgaacatttctgaatttgcagtgatagctattttcagtgaagaaaatatttggacgaatagaagaaaggcgcattagaattttttaagggactctcttttcagtttgccagtgaactccttacagttgaataatgaatgtatttaactctttcgtaggcatcctctggtatcacgattccaaaacccccaaagccaccagataagccgctgat

SEQ ID NO: 328927 - DNA, 387 bp, Homo sapiens
tgtctcagattcattcttaaggaactgagaacttaatcttccaaaatgtcaagtaagtttcaatttttatatttatcaatctatgttaataagagactaatgccctagcaagtgggaattccaaaatactctcatttttttttcttcaaaacaggaccattggtagttttgttgcatagtattatatctcagttgtttacaagaagttatttattttctttcaaacagaaagaccatcttatgccccacctcccaccccagctcctgcaacagtaagttttaattttcttgttaatgtaatagccaactctggccttgatacaaaaacccagatgtcttccagtgacagtcactcaatcatcacagcaacaggatgaaattcagctt

SEQ ID NO: 328928 - DNA, 4922 bp, Homo sapiens
  misc_feature (2190)..(2190): n is a, c, g, or t
gaaagggcctctgtcacccagggtggagtgcagtggcatgatcatggctcactgcagccttgacctcccaggctcaagcgatcctcccacctcagcgtcccaaataactgagaccacaaatgtgcaccaccgcacctggctaattttttttttaagagatggggtctccctatgttgccaggctggtgtttcttaatttttcaaatctttggtagagaaagaaccaagcgaagaaaatgagtcattcatttatttactccacaagtattgagcatctaaatgtgctgtgtactgttccagatgtcaaaatctccaccctgatgggaaaaaaaagacggctgggtgcggtggctcatgcctgtaatccagcactttgggaggccgaggcggtggatcacttgaggtcaggagtccaagaccagcctgaccaacatggtgaaacctcgtctctactaaaaatacaaaattagcagggtgtggtggcacatgccgtaatcccagctacttgggagctgggaccacaggcgcccgccgccacgcccggctaattttgtttttgtatttttagtagggacggggtttcaccgtgttagccaggatggtctcgatctcctgacctagtaatctgcccgcctcggcctcccaaaagagctgggattacaggcgtgaatattttttaacaagcaatttcatgtacattttctcaagcaccactcaagctgcctgtccacggggcagacgacttctcctttagtctttctcttgaatatgctcttcaatttcattaatctctattcatgagtataacaatattggaaaaattggacagagtatcacttgttcctcgctttgcagactagagatgcttctagtccctgttggcacactcaggatgggggctacgggaagcccaagaattcagcctctctctaaatgtcaactgttttccagtaaccacaggtcagggatcccatacgttcattctccctccacagtgacccacaatatccatcgggtgtttatgtatccaaagaagaggctactcattccatctggtaaaccaacatactcatgatttagtggaaagagccctggagtggcacagagggctgcctcaatacacacttactgagcgtctaacaatgaatgggtcaagcccttcgtaggcactggcaatgggaagatgaccaatacagacggctgaaccttgctttcaaggccttcataaagcactggagatgacaaacacggtccgatacaaagggtcgggttcaggactccaaccattattatcaaagagccacgggaatacaaaggaaggattactaggggggaagttccaggagggcatcacaaagagacctctgagctggatccagaaggacagatgagtttaagctgaaagtggggacggtcgttcccgctggtgggaaccgaaggagccgaggcagcgctgaggcggagaccaggtggcacccgcggcgctgcaaggacacacaagctgttgcgagggggtcaactctccgggccttggcttagaaacctgggacgattacaccctaaaagcgcttggaaaaactgcagaactcgtgctgattttcgccaaagctactcccccgccgtgagggcaggaagccctgcgaggcgcctgcgaggacgcaaacgccgcgaagcaagtcctccacgcctccatcccaggtttagtgaagtgtagactctgacccacagcctaaaggaaagcaagaccggagtcggggagggcccctccaggagcgggctcagcgggagtctggccgaactgcttgctgccacagtggttccgcggcctcgcgctgagcgccatccgccgtctcccaccgcggcccccaccgcccctccgcaaggctcggcacctcccgccacttcctcggtcgctgcggcggctccggctcctcacagccgctaaacccaggcctattctgtgttaggtcgggcctcctcggccctcttcgccgtgacgaatcagcgcccggctgggaaagtatcaaaattcggggagttttgaggatccaatgggtcctgaaaaaaatccctgagtgtgctaagcatcaccgcatcttcactagaaggttattttttctaaagagggtcgggtggggcccggaaaaaaaaaaaattaagaagagtgtggaaagtgcgagtgcggaagcnccggacgcgaggggcggggcgagcgcgggacaaagggaagcgaagccggagctgcgggcgctttttctgcccgcggtgtctcagattcattcttaaggaactgagaacttaatcttccaaaatgtcaaaaagaccatcttatgccccacctcccaccccagctcctgcaacacaaatgcccagcacaccagggtttgtgggatacaatccatacagtcatctcgcctacaacaactacaggctgggagggaacccgggcaccaacagccgggtcacggcatcctctggtatcacgattccaaaacccccaaagccaccagataagccgctgatgccctacatgaggtacagcagaaaggtctgggaccaagtaaaggcttccaaccctgacctaaagttgtgggagattggcaagattattggtggcatgtggcgagatctcactgatgaagaaaaacaagaatatttaaacgaatacgaagcagaaaagatagagtacaatgaatctatgaaggcctatcataattcccccgcgtaccttgcttacataaatgcaaaaagtcgtgcagaagctgctttagaggaagaaagtcgacagagacaatctcgcatggagaaaggagaaccgtacatgagcattcagcctgctgaagatccagatgattatgatgatggcttttcaatgaagcatacagccaccgcccgtttccagagaaaccaccgcctcatcagtgaaattcttagtgagagtgtggtgccagacgttcggtcagttgtcacaacagctagaatgcaggtcctcaaacggcaggtccagtccttaatggttcatcagcgaaaactagaagctgaacttcttcaaatagaggaacgacaccaggagaagaagaggaaattcctggaaagcacagattcatttaacaatgaacttaaaaggttgtgcggtctgaaagtagaagtggatatggagaaaattgcagctgagattgcacaggcagaggaacaggcccgcaaaaggcaggaggaaagggagaaggaggccgcagagcaagctgagcgcagtcagagcagcatcgttcctgaggaagaacaagcagctaacaaaggcgaggagaagaaagacgacgagaacattccgatggagacagaggagacacaccttgaagaaacaacagagagccaacagaatggtgaagaaggcacgtctactcctgaggacaaggagagtgggcaggagggggtcgacagtatggcagaggaaggaaccagtgatagtaacactggctcggagagcaacagtgcaacagtggaggagccaccaacagatcccataccagaagatgagaaaaaagaataagtgttgccttgttttgtgtgttctaaatactttttttaatgaaaaaatgttttttggttttaatggtgttacgtggtttgtgtattaattttttttcttgtccatatcacaccaccaaaggcttttggaccatttagcatcatgagcctaatggctcagtcagtcacctttcttaagtgttgtgaagatggctcttttctttggatcttgtttctagccctcaactgctgaaagcctcagaatttagattaattgagaaaacacccacctcttttagagaattatcctttgatgctgcagaatctactcttacaatgccttcctacagctcactggggtgcttaccaaagccatagctttaaaccttcccagtccccatcagtagcttcctgaaagtctcctctcttgtttacttctgcaaagggtagcttcttaaaaacgtgatcatgtatgagtatgtatttgttcacttacccttttttacttttaatcaatgtcagataccaagagttgtgttaagctgagtgtagtgtgtaactaactacacttggatcttactgatccagaaatagtccccatagttagagtagttacttatgaagtggttattaaagtgaacacagcacatatacattatctatactgctttttgttatgattaatactgggtatgttctggtaaatccatccttattgtatagaaaaaaaattacttttttaccaggttttccaaagacagaatagatcacaaagctcaaggaatttaatattcttgtaatggactagataattcaaactgattagcccattccagaagaaaaacagctgggaattaagttaatccacttgaaattgttttacaataatcagaacatccaaacctcaaggctcaggatcccatagaccagagcccacctttttgataaacttagtaaagtcttggagactagaagcaagatagtttgtgacacataagcttcccaaaaactagaatagatttttactgaatagtggtatatctgatggtatatgtttcttaaaggtccaaatgtaataaaaaaaaaaatgaaaaaaaggtctcagtgtttttaatgcactacatatttgtatgcaagacaagcatccagtttttttctgtaatgcagtgacagtgtggaatgaccactcagccattataaatttgtgtactcagggcccttgtctcacccaactatctctataaactgctgcagtagcttatttgtacaagacacttgtgaaaatcagttttcttacattatagtcattgtcacatatggaagttggtctttgattccaaaagtaaagggaatatgtttctacattaacaggaatatggagaaatctgtaacgtttg

SEQ ID NO: 328929 - DNA, 4380 bp, Homo sapiens
  misc_feature (1908)..(1908): n is a, c, g, or t
  misc_feature (4373)..(4373): n is a, c, g, or t
gaaagggcctctgtcacccagggtggagtgcagtggcatgatcatggctcactgcagccttgacctcccaggctcaagcgatcctcccacctcagcgtcccaaataactgagaccacaaatgtgcaccaccgcacctggctaattttttttttaagagatggggtctccctatgttgccaggctggtgtttcttaatttttcaaatctttggtagagaaagaaccaagcgaagaaaatgagtcattcatttatttactccacaagtattgagcatctaaatgtgctgtgtactgttccagatgtcaaaatctccaccctgatgggaaaaaaaagacggctgggtgcggtggctcatgcctgtaatccagcactttgggaggccgagaatattttttaacaagcaatttcatgtacattttctcaagcaccactcaagctgcctgtccacggggcagacgacttctcctttagtctttctcttgaatatgctcttcaatttcattaatctctattcatgagtataacaatattggaaaaattggacagagtatcacttgttcctcgctttgcagactagagatgcttctagtccctgttggcacactcaggatgggggctacgggaagcccaagaattcagcctctctctaaatgtcaactgttttccagtaaccacaggtcagggatcccatacgttcattctccctccacagtgacccacaatatccatcgggtgtttatgtatccaaagaagaggctactcattccatctggtaaaccaacatactcatgatttagtggaaagagccctggagtggcacagagggctgcctcaatacacacttactgagcgtctaacaatgaatgggtcaagcccttcgtaggcactggcaatgggaagatgaccaatacagacggctgaaccttgctttcaaggccttcataaagcactggagatgacaaacacggtccgatacaaagggtcgggttcaggactccaaccattattatcaaagagccacgggaatacaaaggaaggattactaggggggaagttccaggagggcatcacaaagagacctctgagctggatccagaaggacagatgagtttaagctgaaagtggggacggtcgttcccgctggtgggaaccgaaggagccgaggcagcgctgaggcggagaccaggtggcacccgcggcgctgcaaggacacacaagctgttgcgagggggtcaactctccgggccttggcttagaaacctgggacgattacaccctaaaagcgcttggaaaaactgcagaactcgtgctgattttcgccaaagctactcccccgccgtgagggcaggaagccctgcgaggcgcctgcgaggacgcaaacgccgcgaagcaagtcctccacgcctccatcccaggtttagtgaagtgtagactctgacccacagcctaaaggaaagcaagaccggagtcggggagggcccctccaggagcgggctcagcgggagtctggccgaactgcttgctgccacagtggttccgcggcctcgcgctgagcgccatccgccgtctcccaccgcggcccccaccgcccctccgcaaggctcggcacctcccgccacttcctcggtcgctgcggcggctccggctcctcacagccgctaaacccaggcctattctgtgttaggtcgggcctcctcggccctcttcgccgtgacgaatcagcgcccggctgggaaagtatcaaaattcggggagttttgaggatccaatgggtcctgaaaaaaatccctgagtgtgctaagcatcaccgcatcttcactagaaggttattttttctaaagagggtcgggtggggcccggaaaaaaaaaaaattaagaagagtgtggaaagtgcgagtgcggaagcnccggacgcgaggggcggggcgagcgcgggacaaagggaagcgaagccggagctgcgggcgctttttctgcccgcggtgtctcagattcattcttaaggaactgagaacttaatcttccaaaatgtcaaaaagaccatcttatgccccacctcccaccccagctcctgcaacacaaatgcccagcacaccagggtttgtgggatacaatccatacagtcatctcgcctacaacaactacaggctgggagggaacccgggcaccaacagccgggtcacggcatcctctggtatcacgattccaaaacccccaaagccaccagataagccgctgatgccctacatgaggtacagcagaaaggtctgggaccaagtaaaggcttccaaccctgacctaaagttgtgggagattggcaagattattggtggcatgtggcgagatctcactgatgaagaaaaacaagaatatttaaacgaatacgaagcagaaaagatagagtacaatgaatctatgaaggcctatcataattcccccgcgtaccttgcttacataaatgcaaaaagtcgtgcagaagctgctttagaggaagaaagtcgacagagacaatctcgcatggagaaaggagaaccgtacatgagcattcagcctgctgaagatccagatgattatgatgatggcttttcaatgaagcatacagccaccgcccgtttccagagaaaccaccgcctcatcagtgaaattcttagtgagagtgtggtgccagacgttcggtcagttgtcacaacagctagaatgcaggtcctcaaacggcaggtccagtccttaatggttcatcagcgaaaactagaagctgaacttcttcaaatagaggaacgacaccaggagaagaagaggaaattcctggaaagcacagattcatttaacaatgaacttaaaaggttgtgcggtctgaaagtagaagtggatatggagaaaattgcagctgagattgcacaggcagaggaacaggcccgcaaaaggcaggaggaaagggagaaggaggccgcagagcaagctgagcgcagtcagagcagcatcgttcctgaggaagaacaagcagctaacaaaggcgaggagaagaaagacgacgagaacattccgatggagacagaggagacacaccttgaagaaacaacagagagccaacagaatggtgaagaaggcacgtctactcctgaggacaaggagagtgggcaggagggggtcgacagtatggcagaggaaggaaccagtgatagtaacactggctcggagagcaacagtgcaacagtggaggagccaccaacagatcccataccagaagatgagaaaaaagaataagtgttgccttgttttgtgtgttctaaatactttttttaatgaaaaaatgttttttggttttaatggtgttacgtggtttgtgtattaattttttttcttgtccatatcacaccaccaaaggcttttggaccatttagcatcatgagcctaatggctcagtcagtcacctttcttaagtgttgtgaagatggctcttttctttggatcttgtttctagccctcaactgctgaaagcctcagaatttagattaattgagaaaacacccacctcttttagagaattatcctttgatgctgcagaatctactcttacaatgccttcctacagctcactggggtgcttaccaaagccatagctttaaaccttcccagtccccatcagtagcttcctgaaagtctcctctcttgtttacttctgcaaagggtagcttcttaaaaacgtgatcatgtatgagtatgtatttgttcacttacccttttttacttttaatcaatgtcagataccaagagttgtgttaagctgagtgtagtgtgtaactaactacacttggatcttactgatccagaaatagtccccatagttagagtagttacttatgaagtggttattaaagtgaacacagcacatatacattatctatactgctttttgttatgattaatactgggtatgttctggtaaatccatccttattgtatagaaaaaaaattacttttttaccaggttttccaaagacagaatagatcacaaagctcaaggaatttaatattcttgtaatggactagataattcaaactgattagcccattccagaagaaaaacagctgggaattaagttaatccacttgaaattgttttacaataatcagaacatccaaacctcaaggctcaggatcccatagaccagagcccacctttttgataaacttagtaaagtcttggagactagaagcaagatagtttgtgacacataagcttcccaaaaactagaatagatttttactgaatagtggtatatctgatggtatatgtttcttaaaggtccaaatgtaataaaaaaaaaaatgaaaaaaaaaaaaaaaaaaaaaaaaaaaaaaaaaaaagggngggggcg

SEQ ID NO: 328930 - DNA, 4822 bp, Homo sapiens
  misc_feature (2190)..(2190): n is a, c, g, or t
gaaagggcctctgtcacccagggtggagtgcagtggcatgatcatggctcactgcagccttgacctcccaggctcaagcgatcctcccacctcagcgtcccaaataactgagaccacaaatgtgcaccaccgcacctggctaattttttttttaagagatggggtctccctatgttgccaggctggtgtttcttaatttttcaaatctttggtagagaaagaaccaagcgaagaaaatgagtcattcatttatttactccacaagtattgagcatctaaatgtgctgtgtactgttccagatgtcaaaatctccaccctgatgggaaaaaaaagacggctgggtgcggtggctcatgcctgtaatccagcactttgggaggccgaggcggtggatcacttgaggtcaggagtccaagaccagcctgaccaacatggtgaaacctcgtctctactaaaaatacaaaattagcagggtgtggtggcacatgccgtaatcccagctacttgggagctgggaccacaggcgcccgccgccacgcccggctaattttgtttttgtatttttagtagggacggggtttcaccgtgttagccaggatggtctcgatctcctgacctagtaatctgcccgcctcggcctcccaaaagagctgggattacaggcgtgaatattttttaacaagcaatttcatgtacattttctcaagcaccactcaagctgcctgtccacggggcagacgacttctcctttagtctttctcttgaatatgctcttcaatttcattaatctctattcatgagtataacaatattggaaaaattggacagagtatcacttgttcctcgctttgcagactagagatgcttctagtccctgttggcacactcaggatgggggctacgggaagcccaagaattcagcctctctctaaatgtcaactgttttccagtaaccacaggtcagggatcccatacgttcattctccctccacagtgacccacaatatccatcgggtgtttatgtatccaaagaagaggctactcattccatctggtaaaccaacatactcatgatttagtggaaagagccctggagtggcacagagggctgcctcaatacacacttactgagcgtctaacaatgaatgggtcaagcccttcgtaggcactggcaatgggaagatgaccaatacagacggctgaaccttgctttcaaggccttcataaagcactggagatgacaaacacggtccgatacaaagggtcgggttcaggactccaaccattattatcaaagagccacgggaatacaaaggaaggattactaggggggaagttccaggagggcatcacaaagagacctctgagctggatccagaaggacagatgagtttaagctgaaagtggggacggtcgttcccgctggtgggaaccgaaggagccgaggcagcgctgaggcggagaccaggtggcacccgcggcgctgcaaggacacacaagctgttgcgagggggtcaactctccgggccttggcttagaaacctgggacgattacaccctaaaagcgcttggaaaaactgcagaactcgtgctgattttcgccaaagctactcccccgccgtgagggcaggaagccctgcgaggcgcctgcgaggacgcaaacgccgcgaagcaagtcctccacgcctccatcccaggtttagtgaagtgtagactctgacccacagcctaaaggaaagcaagaccggagtcggggagggcccctccaggagcgggctcagcgggagtctggccgaactgcttgctgccacagtggttccgcggcctcgcgctgagcgccatccgccgtctcccaccgcggcccccaccgcccctccgcaaggctcggcacctcccgccacttcctcggtcgctgcggcggctccggctcctcacagccgctaaacccaggcctattctgtgttaggtcgggcctcctcggccctcttcgccgtgacgaatcagcgcccggctgggaaagtatcaaaattcggggagttttgaggatccaatgggtcctgaaaaaaatccctgagtgtgctaagcatcaccgcatcttcactagaaggttattttttctaaagagggtcgggtggggcccggaaaaaaaaaaaattaagaagagtgtggaaagtgcgagtgcggaagcnccggacgcgaggggcggggcgagcgcgggacaaagggaagcgaagccggagctgcgggcgctttttctgcccgcggtgtctcagattcattcttaaggaactgagaacttaatcttccaaaatgtcaaaaagaccatcttatgccccacctcccaccccagctcctgcaacacaaatgcccagcacaccagggtttgtgggatacaatccatacagtcatctcgcctacaacaactacaggctgggagggaacccgggcaccaacagccgggtcacggcatcctctggtatcacgattccaaaacccccaaagccaccagataagccgctgatgccctacatgaggtacagcagaaaggtctgggaccaagtaaaggcttccaaccctgacctaaagttgtgggagattggcaagattattggtggcatgtggcgagatctcactgatgaagaaaaacaagaatatttaaacgaatacgaagcagaaaagatagagtacaatgaatctatgaaggcctatcataattcccccgcgtaccttgcttacataaatgcaaaaagtcgtgcagaagctgctttagaggaagaaagtcgacagagacaatctcgcatggagaaaggagaaccgtacatgagcattcagcctgctgaagatccagatgattatgatgatggcttttcaatgaagcatacagccaccgcccgtttccagagaaaccaccgcctcatcagtgaaattcttagtgagagtgtggtgccagacgttcggtcagttgtcacaacagctagaatgcaggtcctcaaacggcaggtccagtccttaatggttcatcagcgaaaactagaagctgaacttcttcaaatagaggaacgacaccaggagaagaagaggaaattcctggaaagcacagattcatttaacaatgaacttaaaaggttgtgcggtctgaaagtagaagtggatatggagaaaattgcagctgagattgcacaggcagaggaacaggcccgcaaaaggcaggaggaaagggagaaggaggccgcagagcaagctgagcgcagtcagagcagcatcgttcctgaggaagaacaagcagctaacaaaggcgaggagaagaaagacgacgagaacattccgatggagacagaggagacacaccttgaagaaacaacagagagccaacagaatggtgaagaaggcacgtctactcctgaggacaaggagagtgggcaggagggggtcgacagtatggcagaggaaggaaccagtgatagtaacactggctcggagagcaacagtgcaacagtggaggagccaccaacagatcccataccagaagatgagaaaaaagaataagtgttgccttgttttgtgtgttctaaatactttttttaatgaaaaaatgttttttggttttaatggtgttacgtggtttgtgtattaattttttttcttgtccatatcacaccaccaaaggcttttggaccatttagcatcatgagcctaatggctcagtcagtcacctttcttaagtgttgtgaagatggctcttttctttggatcttgtttctagccctcaactgctgaaagcctcagaatttagattaattgagaaaacacccacctcttttagagaattatcctttgatgctgcagaatctactcttacaatgccttcctacagctcactggggtgcttaccaaagccatagctttaaaccttcccagtccccatcagtagcttcctgaaagtctcctctcttgtttacttctgcaaagggtagcttcttaaaaacgtgatcatgtatgagtatgtatttgttcacttacccttttttacttttaatcaatgtcagataccaagagttgtgttaagctgagtgtagtgtgtaactaactacacttggatcttactgatccagaaatagtccccatagttagagtagttacttatgaagtggttattaaagtgaacacagcacatatacattatctatactgctttttgttatgattaatactgggtatgttctggtaaatccatccttattgtatagaaaaaaaattacttttttaccaggttttccaaagacagaatagatcacaaagctcaaggaatttaatattcttgtaatggactagataattcaaactgattagcccattccagaagaaaaacagctgggaattaagttaatccacttgaaattgttttacaataatcagaacatccaaacctcaaggctcaggatcccatagaccagagcccacctttttgataaacttagtaaagtcttggagactagaagcaagatagtttgtgacacataagcttcccaaaaactagaatagatttttactgaatagtggtatatctgatggtatatgtttcttaaaggtccaaatgtactagcacacaactgaaactctctacaacaaaaaaggggggggggtttaaatttcttgagggggccaagttaggttaccagtttttgtaaaggggcccaaaggaggattaaagcacggaggcgggttaaaggtggagggaacggctgggattggaagacctttgggggattgcacactcagatagctggataataggttgtgaaagattcggggagagcgata

SEQ ID NO: 328931 - DNA, 2471 bp, Homo sapiens
  misc_feature (12)..(12): n is a, c, g, or t
  misc_feature (23)..(23): n is a, c, g, or t
  misc_feature (2464)..(2464): n is a, c, g, or t
aataggctagtncgggctgggtngtgaatcggccgaggacgaagccggagctgcgggcgctttttctgcccgcggtgtctcagattcattcttaaggaactgagaacttaatcttccaaaatgtcaaaaagaccatcttatgccccacctcccaccccagctcctgcaacacaaatgcccagcacaccagggtttgtgggatacaatccatacagtcatctcgcctacaacaactacaggctgggagggaacccgggcaccaacagccgggtcacggcatcctctggtatcacgattccaaaacccccaaagccaccagataagccgctgatgccctacatgaggtacagcagaaaggtctgggaccaagtaaaggcttccaaccctgacctaaagttgtgggagattggcaagattattggtggcatgtggcgagatctcactgatgaagaaaaacaagaatatttaaacgaatacgaagcagaaaagatagagtacaatgaatctatgaaggcctatcataattcccccgcgtaccttgcttacataaatgcaaaaagtcgtgcagaagctgctttagaggaagaaagtcgacagagacaatctcgcatggagaaaggagaaccgtacatgagcattcagcctgctgaagatccagatgattatgatgatggcttttcaatgaagcatacagccaccgcccgtttccagagaaaccaccgcctcatcagtgaaattcttagtgagagtgtggtgccagacgttcggtcagttgtcacaacagctagaatgcaggtcctcaaacggcaggtccagtccttaatggttcatcagcgaaaactagaagctgaacttcttcaaatagaggaacgacaccaggagaagaagaggaaattcctggaaagcacagattcatttaacaatgaacttaaaaggttgtgcggtctgaaagtagaagtggatatggagaaaattgcagctgagattgcacaggcagaggaacaggcccgcaaaaggcaggaggaaagggagaaggaggccgcagagcaagctgagcgcagtcagagcagcatcgttcctgaggaagaacaagcagctaacaaaggcgaggagaagaaagacgacgagaacattccgatggagacagaggagacacaccttgaagaaacaacagagagccaacagaatggtgaagaaggcacgtctactcctgaggacaaggagagtgggcaggagggggtcgacagtatggcagaggaaggaaccagtgatagtaacactggctcggagagcaacagtgcaacagtggaggagccaccaacagatcccataccagaagatgagaaaaaagaataagtgttgccttgttttgtgtgttctaaatactttttttaatgaaaaaatgttttttggttttaatggtgttacgtggtttgtgtattaattttttttcttgtccatatcacaccaccaaaggcttttggaccatttagcatcatgagcctaatggctcagtcagtcacctttcttaagtgttgtgaagatggctcttttctttggatcttgtttctagccctcaactgctgaaagcctcagaatttagattaattgagaaaacacccacctcttttagagaattatcctttgatgctgcagaatctactcttacaatgccttcctacagctcactggggtgcttaccaaagccatagctttaaaccttcccagtccccatcagtagcttcctgaaagtctcctctcttgtttacttctgcaaagggtagcttcttaaaaacgtgatcatgtatgagtatgtatttgttcacttacccttttttacttttaatcaatgtcagataccaagagttgtgttaagctgagtgtagtgtgtaactaactacacttggatcttactgatccagaaatagtccccatagttagagtagttacttatgaagtggttattaaagtgaacacagcacatatacattatctatactgctttttgttatgattaatactgggtatgttctggtaaatccatccttattgtatagaaaaaaaattacttttttaccaggttttccaaagacagaatagatcacaaagctcaaggaatttaatattcttgtaatggactagataattcaaactgattagcccattccagaagaaaaacagctgggaattaagttaatccacttgaaattgttttacaataatcagaacatccaaacctcaaggctcaggatcccatagaccagagcccacctttttgataaacttagtaaagtcttggagactagaagcaagatagtttgtgacacataagcttcccaaaaactagaatagatttttactgaatagtggtatatctgatggtatatgtttcttaaaggtccaaatgtaataaaaaaaaaaatgaaaaaaaaaaaaaaaaaaaaaaaaaaaaaaaaaaaagggngggggcg

SEQ ID NO: 328932 - DNA, 3502 bp, Homo sapiens
  misc_feature (2190)..(2190): n is a, c, g, or t
gaaagggcctctgtcacccagggtggagtgcagtggcatgatcatggctcactgcagccttgacctcccaggctcaagcgatcctcccacctcagcgtcccaaataactgagaccacaaatgtgcaccaccgcacctggctaattttttttttaagagatggggtctccctatgttgccaggctggtgtttcttaatttttcaaatctttggtagagaaagaaccaagcgaagaaaatgagtcattcatttatttactccacaagtattgagcatctaaatgtgctgtgtactgttccagatgtcaaaatctccaccctgatgggaaaaaaaagacggctgggtgcggtggctcatgcctgtaatccagcactttgggaggccgaggcggtggatcacttgaggtcaggagtccaagaccagcctgaccaacatggtgaaacctcgtctctactaaaaatacaaaattagcagggtgtggtggcacatgccgtaatcccagctacttgggagctgggaccacaggcgcccgccgccacgcccggctaattttgtttttgtatttttagtagggacggggtttcaccgtgttagccaggatggtctcgatctcctgacctagtaatctgcccgcctcggcctcccaaaagagctgggattacaggcgtgaatattttttaacaagcaatttcatgtacattttctcaagcaccactcaagctgcctgtccacggggcagacgacttctcctttagtctttctcttgaatatgctcttcaatttcattaatctctattcatgagtataacaatattggaaaaattggacagagtatcacttgttcctcgctttgcagactagagatgcttctagtccctgttggcacactcaggatgggggctacgggaagcccaagaattcagcctctctctaaatgtcaactgttttccagtaaccacaggtcagggatcccatacgttcattctccctccacagtgacccacaatatccatcgggtgtttatgtatccaaagaagaggctactcattccatctggtaaaccaacatactcatgatttagtggaaagagccctggagtggcacagagggctgcctcaatacacacttactgagcgtctaacaatgaatgggtcaagcccttcgtaggcactggcaatgggaagatgaccaatacagacggctgaaccttgctttcaaggccttcataaagcactggagatgacaaacacggtccgatacaaagggtcgggttcaggactccaaccattattatcaaagagccacgggaatacaaaggaaggattactaggggggaagttccaggagggcatcacaaagagacctctgagctggatccagaaggacagatgagtttaagctgaaagtggggacggtcgttcccgctggtgggaaccgaaggagccgaggcagcgctgaggcggagaccaggtggcacccgcggcgctgcaaggacacacaagctgttgcgagggggtcaactctccgggccttggcttagaaacctgggacgattacaccctaaaagcgcttggaaaaactgcagaactcgtgctgattttcgccaaagctactcccccgccgtgagggcaggaagccctgcgaggcgcctgcgaggacgcaaacgccgcgaagcaagtcctccacgcctccatcccaggtttagtgaagtgtagactctgacccacagcctaaaggaaagcaagaccggagtcggggagggcccctccaggagcgggctcagcgggagtctggccgaactgcttgctgccacagtggttccgcggcctcgcgctgagcgccatccgccgtctcccaccgcggcccccaccgcccctccgcaaggctcggcacctcccgccacttcctcggtcgctgcggcggctccggctcctcacagccgctaaacccaggcctattctgtgttaggtcgggcctcctcggccctcttcgccgtgacgaatcagcgcccggctgggaaagtatcaaaattcggggagttttgaggatccaatgggtcctgaaaaaaatccctgagtgtgctaagcatcaccgcatcttcactagaaggttattttttctaaagagggtcgggtggggcccggaaaaaaaaaaaattaagaagagtgtggaaagtgcgagtgcggaagcnccggacgcgaggggcggggcgagcgcgggacaaagggaagcgaagccggagctgcgggcgctttttctgcccgcggtgtctcagattcattcttaaggaactgagaacttaatcttccaaaatgtcaaaaagaccatcttatgccccacctcccaccccagctcctgcaacacaaatgcccagcacaccagggtttgtgggatacaatccatacagtcatctcgcctacaacaactacaggctgggagggaacccgggcaccaacagccgggtcacggcatcctctggtatcacgattccaaaacccccaaagccaccagataagccgctgatgccctacatgaggtacagcagaaaggtctgggaccaagtaaaggcttccaaccctgacctaaagttgtgggagattggcaagattattggtggcatgtggcgagatctcactgatgaagaaaaacaagaatatttaaacgaatacgaagcagaaaagatagagtacaatgaatctatgaaggcctatcataattcccccgcgtaccttgcttacataaatgcaaaaagtcgtgcagaagctgctttagaggaagaaagtcgacagagacaatctcgcatggagaaaggagaaccgtacatgagcattcagcctgctgaagatccagatgattatgatgatggcttttcaatgaagcatacagccaccgcccgtttccagagaaaccaccgcctcatcagtgaaattcttagtgagagtgtggtgccagacgttcggtcagttgtcacaacagctagaatgcaggtcctcaaacggcaggtccagtccttaatggttcatcagcgaaaactagaagctgaacttcttcaaatagaggaacgacaccaggagaagaagaggaaattcctggaaagcacagattcatttaacaatgaacttaaaaggttgtgcggtctgaaagtagaagtggatatggagaaaattgcagctgagattgcacaggcagaggaacaggcccgcaaaaggcaggaggaaagggagaaggaggccgcagagcaagctgagcgcagtcagagcagcatcgttcctgaggaagaacaagcagctaacaaaggcgaggagaagaaagacgacgagaacattccgatggagacagaaaaaaattgccagctctgtcctagaaaaacccttacttctaggtatactgattttcctgattaaaagcatccctcaaggaaacagcccagcatgactttaaacaaagtgtctaaaagaccaaccttatattatttctacaactgctttctcctcgtttaatcc

SEQ ID NO: 328933 - DNA, 2424 bp, Homo sapiens
  misc_feature (2417)..(2417): n is a, c, g, or t
acccactggggcatagaagtcaatgggggaacagaaagaggaaccaatgaaactgagaacttaatctgccaaaatgtcaaaaagaccatcttatgccccacctcccaccccagctcctgcaacacaaatgcccagcacaccagggtttgtgggatacaatccatacagtcatctcgcctacaacaactacaggctgggagggaacccgggcaccaacagccgggtcacggcatcctctggtatcacgattccaaaacccccaaagccaccagataagccgctgatgccctacatgaggtacagcagaaaggtctgggaccaagtaaaggcttccaaccctgacctaaagttgtgggagattggcaagattattggtggcatgtggcgagatctcactgatgaagaaaaacaagaatatttaaacgaatacgaagcagaaaagatagagtacaatgaatctatgaaggcctatcataattcccccgcgtaccttgcttacataaatgcaaaaagtcgtgcagaagctgctttagaggaagaaagtcgacagagacaatctcgcatggagaaaggagaaccgtacatgagcattcagcctgctgaagatccagatgattatgatgatggcttttcaatgaagcatacagccaccgcccgtttccagagaaaccaccgcctcatcagtgaaattcttagtgagagtgtggtgccagacgttcggtcagttgtcacaacagctagaatgcaggtcctcaaacggcaggtccagtccttaatggttcatcagcgaaaactagaagctgaacttcttcaaatagaggaacgacaccaggagaagaagaggaaattcctggaaagcacagattcatttaacaatgaacttaaaaggttgtgcggtctgaaagtagaagtggatatggagaaaattgcagctgagattgcacaggcagaggaacaggcccgcaaaaggcaggaggaaagggagaaggaggccgcagagcaagctgagcgcagtcagagcagcatcgttcctgaggaagaacaagcagctaacaaaggcgaggagaagaaagacgacgagaacattccgatggagacagaggagacacaccttgaagaaacaacagagagccaacagaatggtgaagaaggcacgtctactcctgaggacaaggagagtgggcaggagggggtcgacagtatggcagaggaaggaaccagtgatagtaacactggctcggagagcaacagtgcaacagtggaggagccaccaacagatcccataccagaagatgagaaaaaagaataagtgttgccttgttttgtgtgttctaaatactttttttaatgaaaaaatgttttttggttttaatggtgttacgtggtttgtgtattaattttttttcttgtccatatcacaccaccaaaggcttttggaccatttagcatcatgagcctaatggctcagtcagtcacctttcttaagtgttgtgaagatggctcttttctttggatcttgtttctagccctcaactgctgaaagcctcagaatttagattaattgagaaaacacccacctcttttagagaattatcctttgatgctgcagaatctactcttacaatgccttcctacagctcactggggtgcttaccaaagccatagctttaaaccttcccagtccccatcagtagcttcctgaaagtctcctctcttgtttacttctgcaaagggtagcttcttaaaaacgtgatcatgtatgagtatgtatttgttcacttacccttttttacttttaatcaatgtcagataccaagagttgtgttaagctgagtgtagtgtgtaactaactacacttggatcttactgatccagaaatagtccccatagttagagtagttacttatgaagtggttattaaagtgaacacagcacatatacattatctatactgctttttgttatgattaatactgggtatgttctggtaaatccatccttattgtatagaaaaaaaattacttttttaccaggttttccaaagacagaatagatcacaaagctcaaggaatttaatattcttgtaatggactagataattcaaactgattagcccattccagaagaaaaacagctgggaattaagttaatccacttgaaattgttttacaataatcagaacatccaaacctcaaggctcaggatcccatagaccagagcccacctttttgataaacttagtaaagtcttggagactagaagcaagatagtttgtgacacataagcttcccaaaaactagaatagatttttactgaatagtggtatatctgatggtatatgtttcttaaaggtccaaatgtaataaaaaaaaaaatgaaaaaaaaaaaaaaaaaaaaaaaaaaaaaaaaaaaagggngggggcg

SEQ ID NO: 328934 - DNA, 1738 bp, Homo sapiens
  misc_feature (12)..(12): n is a, c, g, or t
  misc_feature (23)..(23): n is a, c, g, or t
  misc_feature (1731)..(1731): n is a, c, g, or t
aataggctagtncgggctgggtngtgaatcggccgaggattgtcacaacagctagaatgcaggtcctcaaacggcaggtccagtccttaatggttcatcagcgaaaactagaagctgaacttcttcaaatagaggaacgacaccaggagaagaagaggaaattcctggaaagcacagattcatttaacaatgaacttaaaaggttgtgcggtctgaaagtagaagtggatatggagaaaattgcagctgagattgcacaggcagaggaacaggcccgcaaaaggcaggaggaaagggagaaggaggccgcagagcaagctgagcgcagtcagagcagcatcgttcctgaggaagaacaagcagctaacaaaggcgaggagaagaaagacgacgagaacattccgatggagacagaggagacacaccttgaagaaacaacagagagccaacagaatggtgaagaaggcacgtctactcctgaggacaaggagagtgggcaggagggggtcgacagtatggcagaggaaggaaccagtgatagtaacactggctcggagagcaacagtgcaacagtggaggagccaccaacagatcccataccagaagatgagaaaaaagaataagtgttgccttgttttgtgtgttctaaatactttttttaatgaaaaaatgttttttggttttaatggtgttacgtggtttgtgtattaattttttttcttgtccatatcacaccaccaaaggcttttggaccatttagcatcatgagcctaatggctcagtcagtcacctttcttaagtgttgtgaagatggctcttttctttggatcttgtttctagccctcaactgctgaaagcctcagaatttagattaattgagaaaacacccacctcttttagagaattatcctttgatgctgcagaatctactcttacaatgccttcctacagctcactggggtgcttaccaaagccatagctttaaaccttcccagtccccatcagtagcttcctgaaagtctcctctcttgtttacttctgcaaagggtagcttcttaaaaacgtgatcatgtatgagtatgtatttgttcacttacccttttttacttttaatcaatgtcagataccaagagttgtgttaagctgagtgtagtgtgtaactaactacacttggatcttactgatccagaaatagtccccatagttagagtagttacttatgaagtggttattaaagtgaacacagcacatatacattatctatactgctttttgttatgattaatactgggtatgttctggtaaatccatccttattgtatagaaaaaaaattacttttttaccaggttttccaaagacagaatagatcacaaagctcaaggaatttaatattcttgtaatggactagataattcaaactgattagcccattccagaagaaaaacagctgggaattaagttaatccacttgaaattgttttacaataatcagaacatccaaacctcaaggctcaggatcccatagaccagagcccacctttttgataaacttagtaaagtcttggagactagaagcaagatagtttgtgacacataagcttcccaaaaactagaatagatttttactgaatagtggtatatctgatggtatatgtttcttaaaggtccaaatgtaataaaaaaaaaaatgaaaaaaaaaaaaaaaaaaaaaaaaaaaaaaaaaaaagggngggggcg

SEQ ID NO: 328935 - DNA, 1661 bp, Homo sapiens
  misc_feature (1654)..(1654): n is a, c, g, or t
caacagaatggtgaagaaggcacgtctactcctgaggacaaggagagtgggcaggagggggtcgacagtatggcagaggaaggaaccagtgatagtaacactggctcggagagcaacagtgcaacagtggaggagccaccaacagatcccataccagaagatgaggcagctgagattgcacaggcagaggaacaggcccgcaaaaggcaggaggaaagggagaaggaggccgcagagcaagctgagcgcagtcagagcagcatcgttcctgaggaagaacaagcagctaacaaaggcgaggagaagaaagacgacgagaacattccgatggagacagaggagacacaccttgaagaaacaacagagagccaacagaatggtgaagaaggcacgtctactcctgaggacaaggagagtgggcaggagggggtcgacagtatggcagaggaaggaaccagtgatagtaacactggctcggagagcaacagtgcaacagtggaggagccaccaacagatcccataccagaagatgagaaaaaagaataagtgttgccttgttttgtgtgttctaaatactttttttaatgaaaaaatgttttttggttttaatggtgttacgtggtttgtgtattaattttttttcttgtccatatcacaccaccaaaggcttttggaccatttagcatcatgagcctaatggctcagtcagtcacctttcttaagtgttgtgaagatggctcttttctttggatcttgtttctagccctcaactgctgaaagcctcagaatttagattaattgagaaaacacccacctcttttagagaattatcctttgatgctgcagaatctactcttacaatgccttcctacagctcactggggtgcttaccaaagccatagctttaaaccttcccagtccccatcagtagcttcctgaaagtctcctctcttgtttacttctgcaaagggtagcttcttaaaaacgtgatcatgtatgagtatgtatttgttcacttacccttttttacttttaatcaatgtcagataccaagagttgtgttaagctgagtgtagtgtgtaactaactacacttggatcttactgatccagaaatagtccccatagttagagtagttacttatgaagtggttattaaagtgaacacagcacatatacattatctatactgctttttgttatgattaatactgggtatgttctggtaaatccatccttattgtatagaaaaaaaattacttttttaccaggttttccaaagacagaatagatcacaaagctcaaggaatttaatattcttgtaatggactagataattcaaactgattagcccattccagaagaaaaacagctgggaattaagttaatccacttgaaattgttttacaataatcagaacatccaaacctcaaggctcaggatcccatagaccagagcccacctttttgataaacttagtaaagtcttggagactagaagcaagatagtttgtgacacataagcttcccaaaaactagaatagatttttactgaatagtggtatatctgatggtatatgtttcttaaaggtccaaatgtaataaaaaaaaaaatgaaaaaaaaaaaaaaaaaaaaaaaaaaaaaaaaaaaagggngggggcg

SEQ ID NO: 328936 - DNA, 2949 bp, Homo sapiens
  misc_feature (2190)..(2190): n is a, c, g, or t
gaaagggcctctgtcacccagggtggagtgcagtggcatgatcatggctcactgcagccttgacctcccaggctcaagcgatcctcccacctcagcgtcccaaataactgagaccacaaatgtgcaccaccgcacctggctaattttttttttaagagatggggtctccctatgttgccaggctggtgtttcttaatttttcaaatctttggtagagaaagaaccaagcgaagaaaatgagtcattcatttatttactccacaagtattgagcatctaaatgtgctgtgtactgttccagatgtcaaaatctccaccctgatgggaaaaaaaagacggctgggtgcggtggctcatgcctgtaatccagcactttgggaggccgaggcggtggatcacttgaggtcaggagtccaagaccagcctgaccaacatggtgaaacctcgtctctactaaaaatacaaaattagcagggtgtggtggcacatgccgtaatcccagctacttgggagctgggaccacaggcgcccgccgccacgcccggctaattttgtttttgtatttttagtagggacggggtttcaccgtgttagccaggatggtctcgatctcctgacctagtaatctgcccgcctcggcctcccaaaagagctgggattacaggcgtgaatattttttaacaagcaatttcatgtacattttctcaagcaccactcaagctgcctgtccacggggcagacgacttctcctttagtctttctcttgaatatgctcttcaatttcattaatctctattcatgagtataacaatattggaaaaattggacagagtatcacttgttcctcgctttgcagactagagatgcttctagtccctgttggcacactcaggatgggggctacgggaagcccaagaattcagcctctctctaaatgtcaactgttttccagtaaccacaggtcagggatcccatacgttcattctccctccacagtgacccacaatatccatcgggtgtttatgtatccaaagaagaggctactcattccatctggtaaaccaacatactcatgatttagtggaaagagccctggagtggcacagagggctgcctcaatacacacttactgagcgtctaacaatgaatgggtcaagcccttcgtaggcactggcaatgggaagatgaccaatacagacggctgaaccttgctttcaaggccttcataaagcactggagatgacaaacacggtccgatacaaagggtcgggttcaggactccaaccattattatcaaagagccacgggaatacaaaggaaggattactaggggggaagttccaggagggcatcacaaagagacctctgagctggatccagaaggacagatgagtttaagctgaaagtggggacggtcgttcccgctggtgggaaccgaaggagccgaggcagcgctgaggcggagaccaggtggcacccgcggcgctgcaaggacacacaagctgttgcgagggggtcaactctccgggccttggcttagaaacctgggacgattacaccctaaaagcgcttggaaaaactgcagaactcgtgctgattttcgccaaagctactcccccgccgtgagggcaggaagccctgcgaggcgcctgcgaggacgcaaacgccgcgaagcaagtcctccacgcctccatcccaggtttagtgaagtgtagactctgacccacagcctaaaggaaagcaagaccggagtcggggagggcccctccaggagcgggctcagcgggagtctggccgaactgcttgctgccacagtggttccgcggcctcgcgctgagcgccatccgccgtctcccaccgcggcccccaccgcccctccgcaaggctcggcacctcccgccacttcctcggtcgctgcggcggctccggctcctcacagccgctaaacccaggcctattctgtgttaggtcgggcctcctcggccctcttcgccgtgacgaatcagcgcccggctgggaaagtatcaaaattcggggagttttgaggatccaatgggtcctgaaaaaaatccctgagtgtgctaagcatcaccgcatcttcactagaaggttattttttctaaagagggtcgggtggggcccggaaaaaaaaaaaattaagaagagtgtggaaagtgcgagtgcggaagcnccggacgcgaggggcggggcgagcgcgggacaaagggaagcgaagccggagctgcgggcgctttttctgcccgcggtgtctcagattcattcttaaggaactgagaacttaatcttccaaaatgtcaaaaagaccatcttatgccccacctcccaccccagctcctgcaacacaaatgcccagcacaccagggtttgtgggatacaatccatacagtcatctcgcctacaacaactacaggctgggagggaacccgggcaccaacagccgggtcacggcatcctctggtatcacgattccaaaacccccaaagccaccagataagccgctgatgccctacatgaggtacagcagaaaggtctgggaccaagtaaaggcttccaaccctgacctaaagttgtgggagattggcaagattattggtggcatgtggcgagatctcactgatgaagaaaaacaagaatatttaaacgaatacgaagcagaaaagatagagtacaatgaatctatgaaggcctatcataattcccccgcgtaccttgcttacataaatgcaaaaagtcgtgcagaagctgctttagaggaagaaagtcgacagagacaatctcgcatggagaaaggagaaccgtacatgagcattcagcctgctgaagatccagatgataaaagaaaaaaagtggggttttgtttatgctttctctgtgagttaagatatgagaaatctcttaagtataagtttttatttcttatcctaaatgg

SEQ ID NO: 328937 - DNA, 692 bp, Homo sapiens
tgaaatgaattccttagtcaaaaacaatgttgtatgggatatcatgatggtgaataacaaattatttaagttcactcatggtagtaccagcagaaaaattgcaaatgtaaaaggctgctcaacatgaatatgcagacgaagacctttatgatgatccactttcacttaatgaatagtaaacatattttctcctccttatgattttcttaatagaattttcttttctctttctttaagaatacagtatataattaacaaattatgcattaattgtttatttgatcagcaaagcttgcagttaagaataggctattagtagttaagtttggggatagcccagagttatatatggattttcaactgcacaggagctggtcccctaacccttgcactgttcaaggatcaacagtatttacaatactatacattttattcatattttagagtgtagtacttctactcatgaaaaataattaactataaaacagcgtcgggaaggtctttcaggagttcttccagaagaaagccttgttatcatagaagatgacagctgcatatatgttattgcccttgaagaccctgaagacctttcactgggacaagatttggagatggaagacagtgatattgattatcctgacccttacagggctaagctagtgtgtgtgtttgtatcttagtttttaacaaaa

SEQ ID NO: 328938 - DNA, 371 bp, Homo sapiens
  misc_feature (130)..(130): n is a, c, g, or t
aatgagaaatttataaaaaagttttattaagtgcgttaaccaccagagtttttcccatatcaacaatttttaaaaaaaaacgaccagtaaagcgcattaaaaacacccccaatataggggaaaatggaanactccccctcctaccccggcaggggcttccggggccttttcacctggagaaacattcccactcccctttggcctccctgtactctgagctgtgaatatttttaaccctgtaaatacggccagctcttgtgacacagagactattttatcaattgtcagtcccgttcctttaccataggattctccacagtggcttccgactcaggctccaatggaccaaataaaagcgttttgttttgtaa

SEQ ID NO: 328939 - DNA, 4868 bp, Homo sapiens
acagcgccgcgtgcgccccgggcgcgccgtagccgcggggcccgggccgggcgctacgctacgaaggcagcgtaaggcgggcgccggacgcgggcaggggccggggccggagccgggtcggggcgcaccgcggctgaggagcgggaggccgtccgggcagcgcggccggcggcgagaggggccccgccgctctccggaggcagaagttgtggatcggccggcgggggcgagcgggcccgggggccggggccgcgctgcccgggccgcgaggacgaggcggcgccgccgggctgtggaggcagcagcccagacgcggcacagagagggcctgggagcttgctgcagcttcagacagggagccaggatgggaaccacggactgacctgacctgcgtcctcggggccactgcactgggtgattcacgtgtgcccaggccctgaggtgggccggacctgggagtggcagccacacccactcgcccgggtctatggccacggtcggagagtggtcctgtgtgcgctgcaccttcctgaacccggccggccagcgccagtgctccatctgcgaggctccccggcacaagcccgacctcaaccacatcctgcggctcagcgtggaggagcagaaatggccctgcgcccgctgcaccttccgcaacttcctgggcaaggaggcctgcgaggtgtgcggcttcaccccggagcctgcgcctggggctgccttcctgccagtcctcaacggggtcctccccaagccacccgccatcctgggggagcccaagggcagctgccaggaggaagcaggtccagtgaggactgcggggctggtggccacggagcccgccagggggcagtgcgaggacaaggacgaggaggagaaggaggagcaggaggaggaggagggagcggcggagcccagagggggctgggcgtgtccgcgttgcacgctgcacaacacgcccgtggccagctcctgctccgtctgcgggggcccacgcaggctctcgctgccacggatccctcctgaggccctggtggtcccggaagtggtggccccggccggcttccacgtcgtgcctgccgcgcctccacctggcctccccggggaaggtgccgaggccaaccccccagccaccagccagggcccagctgccgaaccagagccgcccagggtcccgcccttcagccccttctcgtccaccctgcagaacaaccccgtgccgcgcagccgacgcgaggttcccccccagctgcagccaccggtgcctgaggctgcccagccgtcaccctctgccggctgcaggggagccccccagggctcgggctgggctggggcctcccgcctagcagagttgctgtctggcaagcggctgagtgtgctggaggaagaggccacggagggtggcaccagccgcgtagaggccggcagctccacctcgggcagtgacatcattgacctggccggagacaccgtgcgttacacgcccgccagcccctccagccccgacttcaccacctggtcatgtgccaagtgcacgctcagaaaccccacagtggcccccaggtgctcggcctgcggctgctccaaactgcacggcttccaggagcatggcgagccccccacccactgccccgactgtggggccgacaagcccagcccctgcggcagaagctgcggacgggtgtcctcggcccagaaggccgcccgcgtcctgcccgagcgcccgggccagtgggcctgccctgcctgtaccctgctcaacgcactgcgggccaagcactgcgccgcctgccacacgcctcagctcctggtggcccagcggcggggggccgcgcccctgaggcgcagggagagcatgcacgtggagcagcggcggcagacagacgagggcgaggccaaggcactctgggagaacatcgtggccttctgccgggagaacaatgtgagcttcgtggatgacagcttccctcccgggcccgagtctgtcggcttccccgcgggtgacagcgtgcagcagcgtgtgaggcagtggctgcgaccccaggagatcaactgctccgtcttcagggaccacagggccacgtggtctgtgttccacacactgcggccctcagacatcctgcaggggctgctggggaactgctggttcctgagcgccctggcggtgctggcggagcggccggacctggtggagcgggtgatggtcacgcgcagcctgtgtgcagagggcgcctaccaggtgcggctgtgcaaggacggcacgtggaccacggtgctggtggacgacatgctgccctgtgatgaggccggctgcctcctcttctcacaggcgcagcggaagcagctgtgggtggccctcatcgagaaggcgctggccaagctgcacggctcctactttgcgctccaggcgggccgcgccatcgaaggcctggccacgctcaccggcgccccctgtgagagcctggcgctgcagctcagctccactaacccccgcgaggagcccgttgacactgacctcatctgggccaaaatgctgagttctaaggaggctgggttcctcatgggtgcctcctgtggcgggggcaacatgaaggtggacgattcggcctacgagagcctgggcctgcgcccccggcatgcctactccatcctggatgtccgagatgtccagggcaccaggcttctgcggctccgaaacccgtggggccgtttctcctggaacggcagctggtccgacgagtggccacactggccggggcacctgcgtggcgagctcatgccgcacggcagcagtgagggtgtcttctggatggagtacggcgactttgtcaggtacttcgactccgtggacatctgtaaggtgcactcggactggcaggaggcgcgggtgcagggctgctttcccagctcggccagcgcgcccgtgggggtaacagcgctcacggtgctggagcgggcctcgctggagttcgcgctcttccaggagggcagcaggcgctcggacgccgtggacagccacctgctggacctgtgcatcctggtgttccgggccacgttcggcagcggcggccacctcagcctgggccgcctcctggcccacagtaagcgcgcggtcaagaagttcgtcagctgcgacgtcatgctggagcctggcgagtacgctgtggtgtgctgcgccttcaaccactgggggccgcccctgccgggcacccctgccccccaggcctccagcccctcggcaggggtcccgagagcctccccagagccgccgggccacgtgctggctgtgtacagctcgaggctggtcatggtggagcccgtggaagcccagccgaccacgctggccgacgccatcatcctgctcaccgagagccgcggagagcggcacgagggccgtgagggcatgacctgctactacctgacacacggttgggcggggctcatcgtggtggtggagaaccgacaccccaaggcctacctgcacgtgcagtgtgactgcaccgacagcttcaacgtggtgtccacacgcggcagcctgcgtacccaggatagcgtgccacccctgcacaggcaggtcctggtgatcttgtcccagctagagggcaacgccggcttctctatcacccaccgcctggcacatcgcaaggcagcccaggccttcctcagtgactggacagcctccaaggggacccacagccccccactcacgccagaggtcgccggtctgcatgggccccgaccgctgtgaccaccatgcctggggcaggggctgtgcacagacggaccccccacccccacacgcactttatgagggagaccccgacagaggacgcttgagccagaatctcaggaccccgcccagggagctgccagcccagggctcagcttcccatgggccccccgcccccctccttcccctccctgaaccccacagtccgcctggccaggcctcctggccgccacgcagaatacctcgaaccaggcgggctgtgaaccagccccgctcacctgccagccccaacacccgacgggggccgaggccaggctgcccctccctgtgggctcagggtctcctgcgggctaggcagccaggagctctgtccgcaaaaccaaatctgggtgtcagaggccaagaccctggggtgggatcagggaccacccctcacggggcataaggtcagttttcccccagagcccgggtccctgtcccccacagggcaggcggggtccctggagccctggtgtggagcggcgagtcccggggcggtgcctgtctcagaagaaggggcccttggccagccccccagcgacactatgcaaatcctggagtgcccgccaggatcgaagccatgactgggtgcaggcgggcgccaggcccgctgtgggtgggcaccagttctcagcaccgctcactgctgccgggcacactgggaccagcaggctcctcagccaaccctgtccctcggcccggccctgccagagagggaccccagcacatcgtgggcacgggcagggctcagccgctcccacctccccacagaagcccaggagtgtgtggacgtctgagcccagctttctgcgtgccctcctggcccctcactcccggcagcgggccggcctcgcccccactccccctcctaccccggcaggggcttccggggccttttcacctggagaaacattcccactcccctttggcctccctgtactctgagctgtgaatatttttaaccctgtaaatacggccagctcttgtgacacagagactattttatcaattgtcagtcccgttcctttaccataggattctccacagtggcttccgactcaggctccaatggaccaaataaaagcgttttgttttgtaa

SEQ ID NO: 328940 - DNA, 4754 bp, Homo sapiens
acagcgccgcgtgcgccccgggcgcgccgtagccgcggggcccgggccgggcgctacgctacgaaggcagcgtaaggcgggcgccggacgcgggcaggggccggggccggagccgggtcggggcgcaccgcggctgaggagcgggaggccgtccgggcagcgcggccggcggcgagaggggccccgccgctctccggaggcagaagttgtggatcggccggcgggggcgagcgggcccgggggccggggccgcgctgcccgggccgcgaggacgaggcggcgccgccgggctgtggaggcagcagcccagacgcggcacagagagggcctgggagcttgctgcagcttcagccacacccactcgcccgggtctatggccacggtcggagagtggtcctgtgtgcgctgcaccttcctgaacccggccggccagcgccagtgctccatctgcgaggctccccggcacaagcccgacctcaaccacatcctgcggctcagcgtggaggagcagaaatggccctgcgcccgctgcaccttccgcaacttcctgggcaaggaggcctgcgaggtgtgcggcttcaccccggagcctgcgcctggggctgccttcctgccagtcctcaacggggtcctccccaagccacccgccatcctgggggagcccaagggcagctgccaggaggaagcaggtccagtgaggactgcggggctggtggccacggagcccgccagggggcagtgcgaggacaaggacgaggaggagaaggaggagcaggaggaggaggagggagcggcggagcccagagggggctgggcgtgtccgcgttgcacgctgcacaacacgcccgtggccagctcctgctccgtctgcgggggcccacgcaggctctcgctgccacggatccctcctgaggccctggtggtcccggaagtggtggccccggccggcttccacgtcgtgcctgccgcgcctccacctggcctccccggggaaggtgccgaggccaaccccccagccaccagccagggcccagctgccgaaccagagccgcccagggtcccgcccttcagccccttctcgtccaccctgcagaacaaccccgtgccgcgcagccgacgcgaggttcccccccagctgcagccaccggtgcctgaggctgcccagccgtcaccctctgccggctgcaggggagccccccagggctcgggctgggctggggcctcccgcctagcagagttgctgtctggcaagcggctgagtgtgctggaggaagaggccacggagggtggcaccagccgcgtagaggccggcagctccacctcgggcagtgacatcattgacctggccggagacaccgtgcgttacacgcccgccagcccctccagccccgacttcaccacctggtcatgtgccaagtgcacgctcagaaaccccacagtggcccccaggtgctcggcctgcggctgctccaaactgcacggcttccaggagcatggcgagccccccacccactgccccgactgtggggccgacaagcccagcccctgcggcagaagctgcggacgggtgtcctcggcccagaaggccgcccgcgtcctgcccgagcgcccgggccagtgggcctgccctgcctgtaccctgctcaacgcactgcgggccaagcactgcgccgcctgccacacgcctcagctcctggtggcccagcggcggggggccgcgcccctgaggcgcagggagagcatgcacgtggagcagcggcggcagacagacgagggcgaggccaaggcactctgggagaacatcgtggccttctgccgggagaacaatgtgagcttcgtggatgacagcttccctcccgggcccgagtctgtcggcttccccgcgggtgacagcgtgcagcagcgtgtgaggcagtggctgcgaccccaggagatcaactgctccgtcttcagggaccacagggccacgtggtctgtgttccacacactgcggccctcagacatcctgcaggggctgctggggaactgctggttcctgagcgccctggcggtgctggcggagcggccggacctggtggagcgggtgatggtcacgcgcagcctgtgtgcagagggcgcctaccaggtgcggctgtgcaaggacggcacgtggaccacggtgctggtggacgacatgctgccctgtgatgaggccggctgcctcctcttctcacaggcgcagcggaagcagctgtgggtggccctcatcgagaaggcgctggccaagctgcacggctcctactttgcgctccaggcgggccgcgccatcgaaggcctggccacgctcaccggcgccccctgtgagagcctggcgctgcagctcagctccactaacccccgcgaggagcccgttgacactgacctcatctgggccaaaatgctgagttctaaggaggctgggttcctcatgggtgcctcctgtggcgggggcaacatgaaggtggacgattcggcctacgagagcctgggcctgcgcccccggcatgcctactccatcctggatgtccgagatgtccagggcaccaggcttctgcggctccgaaacccgtggggccgtttctcctggaacggcagctggtccgacgagtggccacactggccggggcacctgcgtggcgagctcatgccgcacggcagcagtgagggtgtcttctggatggagtacggcgactttgtcaggtacttcgactccgtggacatctgtaaggtgcactcggactggcaggaggcgcgggtgcagggctgctttcccagctcggccagcgcgcccgtgggggtaacagcgctcacggtgctggagcgggcctcgctggagttcgcgctcttccaggagggcagcaggcgctcggacgccgtggacagccacctgctggacctgtgcatcctggtgttccgggccacgttcggcagcggcggccacctcagcctgggccgcctcctggcccacagtaagcgcgcggtcaagaagttcgtcagctgcgacgtcatgctggagcctggcgagtacgctgtggtgtgctgcgccttcaaccactgggggccgcccctgccgggcacccctgccccccaggcctccagcccctcggcaggggtcccgagagcctccccagagccgccgggccacgtgctggctgtgtacagctcgaggctggtcatggtggagcccgtggaagcccagccgaccacgctggccgacgccatcatcctgctcaccgagagccgcggagagcggcacgagggccgtgagggcatgacctgctactacctgacacacggttgggcggggctcatcgtggtggtggagaaccgacaccccaaggcctacctgcacgtgcagtgtgactgcaccgacagcttcaacgtggtgtccacacgcggcagcctgcgtacccaggatagcgtgccacccctgcacaggcaggtcctggtgatcttgtcccagctagagggcaacgccggcttctctatcacccaccgcctggcacatcgcaaggcagcccaggccttcctcagtgactggacagcctccaaggggacccacagccccccactcacgccagaggtcgccggtctgcatgggccccgaccgctgtgaccaccatgcctggggcaggggctgtgcacagacggaccccccacccccacacgcactttatgagggagaccccgacagaggacgcttgagccagaatctcaggaccccgcccagggagctgccagcccagggctcagcttcccatgggccccccgcccccctccttcccctccctgaaccccacagtccgcctggccaggcctcctggccgccacgcagaatacctcgaaccaggcgggctgtgaaccagccccgctcacctgccagccccaacacccgacgggggccgaggccaggctgcccctccctgtgggctcagggtctcctgcgggctaggcagccaggagctctgtccgcaaaaccaaatctgggtgtcagaggccaagaccctggggtgggatcagggaccacccctcacggggcataaggtcagttttcccccagagcccgggtccctgtcccccacagggcaggcggggtccctggagccctggtgtggagcggcgagtcccggggcggtgcctgtctcagaagaaggggcccttggccagccccccagcgacactatgcaaatcctggagtgcccgccaggatcgaagccatgactgggtgcaggcgggcgccaggcccgctgtgggtgggcaccagttctcagcaccgctcactgctgccgggcacactgggaccagcaggctcctcagccaaccctgtccctcggcccggccctgccagagagggaccccagcacatcgtgggcacgggcagggctcagccgctcccacctccccacagaagcccaggagtgtgtggacgtctgagcccagctttctgcgtgccctcctggcccctcactcccggcagcgggccggcctcgcccccactccccctcctaccccggcaggggcttccggggccttttcacctggagaaacattcccactcccctttggcctccctgtactctgagctgtgaatatttttaaccctgtaaatacggccagctcttgtgacacagagactattttatcaattgtcagtcccgttcctttaccataggattctccacagtggcttccgactcaggctccaatggaccaaataaaagcgttttgttttgtaa

SEQ ID NO: 328941 - DNA, 3539 bp, Homo sapiens
acagcgccgcgtgcgccccgggcgcgccgtagccgcggggcccgggccgggcgctacgctacgaaggcagcgtaaggcgggcgccggacgcgggcaggggccggggccggagccgggtcggggcgcaccgcggctgaggagcgggaggccgtccgggcagcgcggccggcggcgagaggggccccgccgctctccggaggcagaagttgtggatcggccggcgggggcgagcgggcccgggggccggggccgcgctgcccgggccgcgaggacgaggcggcgccgccgggctgtggaggcagcagcccagacgcggcacagagagggcctgggagcttgctgcagcttcagccacacccactcgcccgggtctatggccacggtcggagagtggtcctgtgtgcgctgcaccttcctgaacccggccggccagcgccagtgctccatctgcgaggctccccggcacaagcccgacctcaaccacatcctgcggctcagcgtggaggagcagaaatggccctgcgcccgctgcaccttccgcaacttcctgggcaaggaggcctgcgaggtgtgcggcttcaccccggagcctgcgcctggggctgccttcctgccagtcctcaacggggtcctccccaagccacccgccatcctgggggagcccaagggcagctgccaggaggaagcaggtccagtgaggactgcggggctggtggccacggagcccgccagggggcagtgcgaggacaaggacgaggaggagaaggaggagcaggaggaggaggagggagcggcggagcccagagggggctgggcgtgtccgcgttgcacgctgcacaacacgcccgtggccagctcctgctccgtctgcgggggcccacgcaggctctcgctgccacggatccctcctgaggccctggtggtcccggaagtggtggccccggccggcttccacgtcgtgcctgccgcgcctccacctggcctccccggggaaggtgccgaggccaaccccccagccaccagccagggcccagctgccgaaccagagccgcccagggtcccgcccttcagccccttctcgtccaccctgcagaacaaccccgtgccgcgcagccgacgcgaggttcccccccagctgcagccaccggtgcctgaggctgcccagccgtcaccctctgccggctgcaggggagccccccagggctcgggctgggctggggcctcccgcctagcagagttgctgtctggcaagcggctgagtgtgctggaggaagaggccacggagggtggcaccagccgcgtagaggccggcagctccacctcgggcagtgacatcattgacctggccggagacaccgtgcgttacacgcccgccagcccctccagccccgacttcaccacctggtcatgtgccaagtgcacgctcagaaaccccacagtggcccccaggtgctcggcctgcggctgctccaaactgcacggcttccaggagcatggcgagccccccacccactgccccgactgtggggccgacaagcccagcccctgcggcagaagctgcggacgggtgtcctcggcccagaaggccgcccgcgtcctgcccgagcgcccgggccagtgggcctgccctgcctgtaccctgctcaacgcactgcgggccaagcactgcgccgcctgccacacgcctcagctcctggtggcccagcggcggggggccgcgcccctgaggcgcagggagagcatgcacgtggagcagcggcggcagacagacgagggcgaggccaaggcactctgggagaacatcgtggccttctgccgggagaacaatgtgagcttcgtggatgacagcttccctcccgggcccgagtctgtcggcttccccgcgggtgacagcgtgcagcagcgtgtgaggcagtggctgcgaccccaggagatcaactgctccgtcttcagggaccacagggccacgtggtctgtgttccacacactgcggccctcagacatcctgcaggggctgctggggaactgctggttcctgagcgccctggcggtgctggcggagcggccggacctggtggagcgggtgatggtcacgcgcagcctgtgtgcagagggcgcctaccaggtgcggctgtgcaaggacggcacgtggaccacggtgctggtggacgacatgctgccctgtgatgaggccggctgcctcctcttctcacaggcgcagcggaagcagctgtgggtggccctcatcgagaaggcgctggccaagctgcacggctcctactttgcgctccaggcgggccgcgccatcgaaggcctggccacgctcaccggcgccccctgtgagagcctggcgctgcagctcagctccactaacccccgcgaggagcccgttgacactgacctcatctgggccaaaatgctgagttctaaggaggctgggttcctcatgggtgcctcctgtggcgggggcaacatgaaggtggacgattcggcctacgagagcctgggcctgcgcccccggcatgcctactccatcctggatgtccgagatgtccagggcaccaggcttctgcggctccgaaacccgtggggccgtttctcctggaacggcagctggtccgacgagtggccacactggccggggcacctgcgtggcgagctcatgccgcacggcagcagtgagggtgtcttctggatggagtacggcgactttgtcaggtacttcgactccgtggacatctgtaaggtgcactcggactggcaggaggcgcgggtgcagggctgctttcccagctcggccagcgcgcccgtgggggtaacagcgctcacggtgctggagcgggcctcgctggagttcgcgctcttccaggagggcagcaggcgctcggacgccgtggacagccacctgctggacctgtgcatcctggtgttccgggccacgttcggcagcggcggccacctcagcctgggccgcctcctggcccacagtaagcgcgcggtcaagaagttcgtcagctgcgacgtcatgctggagcctggcgagtacgctgtggtgtgctgcgccttcaaccactgggggccgcccctgccgggcacccctgccccccaggcctccagcccctcggcaggggtcccgagagcctccccagagccgccgggccacgtgctggctgtgtacagctcgaggctggtcatggtggagcccgtggaagcccagccgaccacgctggccgacgccatcatcctgctcaccgagagccgcggagagcggcacgagggccgtgagggcatgacctgctactacctgacacacggttgggcggggctcatcgtggtggtggagaaccgacaccccaaggcctacctgcacgtgcagtgtgactgcaccgacagcttcaacgtggtgtccacacgcggcagcctgcgtacccaggatagcgtgccacccctgcacagtcccgttcctttaccataggattctccacagtggcttccgactcaggctccaatggaccaaataaaagcgttttgttttgtaa

SEQ ID NO: 328942 - DNA, 3432 bp, Homo sapiens
acagcgccgcgtgcgccccgggcgcgccgtagccgcggggcccgggccgggcgctacgctacgaaggcagcgtaaggcgggcgccggacgcgggcaggggccggggccggagccgggtcggggcgcaccgcggctgaggagcgggaggccgtccgggcagcgcggccggcggcgagaggggccccgccgctctccggaggcagaagttgtggatcggccggcgggggcgagcgggcccgggggccggggccgcgctgcccgggccgcgaggacgaggcggcgccgccgggctgtggaggcagcagcccagacgcggcacagagagggcctgggagcttgctgcagcttcagccacacccactcgcccgggtctatggccacggtcggagagtggtcctgtgtgcgctgcaccttcctgaacccggccggccagcgccagtgctccatctgcgaggctccccggcacaagcccgacctcaaccacatcctgcggctcagcgtggaggagcagaaatggccctgcgcccgctgcaccttccgcaacttcctgggcaaggaggcctgcgaggtgtgcggcttcaccccggagcctgcgcctggggctgccttcctgccagtcctcaacggggtcctccccaagccacccgccatcctgggggagcccaagggcagctgccaggaggaagcaggtccagtgaggactgcggggctggtggccacggagcccgccagggggcagtgcgaggacaaggacgaggaggagaaggaggagcaggaggaggaggagggagcggcggagcccagagggggctgggcgtgtccgcgttgcacgctgcacaacacgcccgtggccagctcctgctccgtctgcgggggcccacgcaggctctcgctgccacggatccctcctgaggccctggtggtcccggaagtggtggccccggccggcttccacgtcgtgcctgccgcgcctccacctggcctccccggggaaggtgccgaggccaaccccccagccaccagccagggcccagctgccgaaccagagccgcccagggtcccgcccttcagccccttctcgtccaccctgcagaacaaccccgtgccgcgcagccgacgcgaggttcccccccagctgcagccaccggtgcctgaggctgcccagccgtcaccctctgccggctgcaggggagccccccagggctcgggctgggctggggcctcccgcctagcagagttgctgtctggcaagcggctgagtgtgctggaggaagaggccacggagggtggcaccagccgcgtagaggccggcagctccacctcgggcagtgacatcattgacctggccggagacaccgtgcgttacacgcccgccagcccctccagccccgacttcaccacctggtcatgtgccaagtgcacgctcagaaaccccacagtggcccccaggtgctcggcctgcggctgctccaaactgcacggcttccaggagcatggcgagccccccacccactgccccgactgtggggccgacaagcccagcccctgcggcagaagctgcggacgggtgtcctcggcccagaaggccgcccgcgtcctgcccgagcgcccgggccagtgggcctgccctgcctgtaccctgctcaacgcactgcgggccaagcactgcgccgcctgccacacgcctcagctcctggtggcccagcggcggggggccgcgcccctgaggcgcagggagagcatgcacgtggagcagcggcggcagacagacgagggcgaggccaaggcactctgggagaacatcgtggccttctgccgggagaacaatgtgagcttcgtggatgacagcttccctcccgggcccgagtctgtcggcttccccgcgggtgacagcgtgcagcagcgtgtgaggcagtggctgcgaccccaggagatcaactgctccgtcttcagggaccacagggccacgtggtctgtgttccacacactgcggccctcagacatcctgcaggggctgctggggaactgctggttcctgagcgccctggcggtgctggcggagcggccggacctggtggagcgggtgatggtcacgcgcagcctgtgtgcagagggcgcctaccaggtgcggctgtgcaaggacggcacgtggaccacggtgctggtggacgacatgctgccctgtgatgaggccggctgcctcctcttctcacaggcgcagcggaagcagctgtgggtggccctcatcgagaaggcgctggccaagctgcacggctcctactttgcgctccaggcgggccgcgccatcgaaggcctggccacgctcaccggcgccccctgtgagagcctggcgctgcagctcagctccactaacccccgcgaggagcccgttgacactgacctcatctgggccaaaatgctgagttctaaggaggctgggttcctcatgggtgcctcctgtggcgggggcaacatgaaggtggacgattcggcctacgagagcctgggcctgcgcccccggcatgcctactccatcctggatgtccgagatgtccagggcaccaggcttctgcggctccgaaacccgtggggccgtttctcctggaacggcagctggtccgacgagtggccacactggccggggcacctgcgtggcgagctcatgccgcacggcagcagtgagggtgtcttctggatggagtacggcgactttgtcaggtacttcgactccgtggacatctgtaaggtgcactcggactggcaggaggcgcgggtgcagggctgctttcccagctcggccagcgcgcccgtgggggtaacagcgctcacggtgctggagcgggcctcgctggagttcgcgctcttccaggagggcagcaggcgctcggacgccgtggacagccacctgctggacctgtgcatcctggtgttccgggccacgttcggcagcggcggccacctcagcctgggccgcctcctggcccacagtaagcgcgcggtcaagaagttcgtcagctgcgacgtcatgctggagcctggcgagtacgctgtggtgtgctgcgccttcaaccactgggggccgcccctgccgggcacccctgccccccaggcctccagcccctcggcaggggtcccgagagcctccccagagccgccgggccacgtgctggctgtgtacagctcgaggctggtcatggtggagcccgtggaagcccagccgaccacgctggccgacgccatcatcctgctcactcccctttggcctccctgtactctgagctgtgaatatttttaaccctgtaaatacggccagctcttgtgacacagagactattttatcaattgtcagtcccgttcctttaccataggattctccacagtggcttccgactcaggctccaatggaccaaataaaagcgttttgttttgtaa

SEQ ID NO: 328943 - DNA, 5410 bp, Homo sapiens
  misc_feature (5077)..(5077): n is a, c, g, or t
  misc_feature (5410)..(5410): n is a, c, g, or t
acagcgccgcgtgcgccccgggcgcgccgtagccgcggggcccgggccgggcgctacgctacgaaggcagcgtaaggcgggcgccggacgcgggcaggggccggggccggagccgggtcggggcgcaccgcggctgaggagcgggaggccgtccgggcagcgcggccggcggcgagaggggccccgccgctctccggaggcagaagttgtggatcggccggcgggggcgagcgggcccgggggccggggccgcgctgcccgggccgcgaggacgaggcggcgccgccgggctgtggaggcagcagcccagacgcggcacagagagggcctgggagcttgctgcagcttcagacagggagccaggatgggaaccacggactgacctgacctgcgtcctcggggccactgcactgggtgattcacgtgtgcccaggccctgaggtgggccggacctgggagtggcagccacacccactcgcccgggtctatggccacggtcggagagtggtcctgtgtgcgctgcaccttcctgaacccggccggccagcgccagtgctccatctgcgaggctccccggcacaagcccgacctcaaccacatcctgcggctcagcgtggaggagcagaaatggccctgcgcccgctgcaccttccgcaacttcctgggcaaggaggcctgcgaggtgtgcggcttcaccccggagcctgcgcctggggctgccttcctgccagtcctcaacggggtcctccccaagccacccgccatcctgggggagcccaagggcagctgccaggaggaagcaggtccagtgaggactgcggggctggtggccacggagcccgccagggggcagtgcgaggacaaggacgaggaggagaaggaggagcaggaggaggaggagggagcggcggagcccagagggggctgggcgtgtccgcgttgcacgctgcacaacacgcccgtggccagctcctgctccgtctgcgggggcccacgcaggctctcgctgccacggatccctcctgaggccctggtggtcccggaagtggtggccccggccggcttccacgtcgtgcctgccgcgcctccacctggcctccccggggaaggtgccgaggccaaccccccagccaccagccagggcccagctgccgaaccagagccgcccagggtcccgcccttcagccccttctcgtccaccctgcagaacaaccccgtgccgcgcagccgacgcgaggttcccccccagctgcagccaccggtgcctgaggctgcccagccgtcaccctctgccggctgcaggggagccccccagggctcgggctgggctggggcctcccgcctagcagagttgctgtctggcaagcggctgagtgtgctggaggaagaggccacggagggtggcaccagccgcgtagaggccggcagctccacctcgggcagtgacatcattgacctggccggagacaccgtgcgttacacgcccgccagcccctccagccccgacttcaccacctggtcatgtgccaagtgcacgctcagaaaccccacagtggcccccaggtgctcggcctgcggctgctccaaactgcacggcttccaggagcatggcgagccccccacccactgccccgactgtggggccgacaagcccagcccctgcggcagaagctgcggacgggtgtcctcggcccagaaggccgcccgcgtcctgcccgagcgcccgggccagtgggcctgccctgcctgtaccctgctcaacgcactgcgggccaagcactgcgccgcctgccacacgcctcagctcctggtggcccagcggcggggggccgcgcccctgaggcgcagggagagcatgcacgtggagcagcggcggcagacagacgagggcgaggccaaggcactctgggagaacatcgtggccttctgccgggagaacaatgtgagcttcgtggatgacagcttccctcccgggcccgagtctgtcggcttccccgcgggtgacagcgtgcagcagcgtgtgaggcagtggctgcgaccccaggagatcaactgctccgtcttcagggaccacagggccacgtggtctgtgttccacacactgcggccctcagacatcctgcaggggctgctggggaactgctggttcctgagcgccctggcggtgctggcggagcggccggacctggtggagcgggtgatggtcacgcgcagcctgtgtgcagagggcgcctaccaggtgcggctgtgcaaggacggcacgtggaccacggtgctggtggacgacatgctgccctgtgatgaggccggctgcctcctcttctcacaggcgcagcggaagcagctgtgggtggccctcatcgagaaggcgctggccaagctgcacggctcctactttgcgctccaggcgggccgcgccatcgaaggcctggccacgctcaccggcgccccctgtgagagcctggcgctgcagctcagctccactaacccccgcgaggagcccgttgacactgacctcatctgggccaaaatgctgagttctaaggaggctgggttcctcatgggtgcctcctgtggcgggggcaacatgaaggtggacgattcggcctacgagagcctgggcctgcgcccccggcatgcctactccatcctggatgtccgagatgtccagggcaccaggcttctgcggctccgaaacccgtggggccgtttctcctggaacggcagctggtccgacgagtggccacactggccggggcacctgcgtggcgagctcatgccgcacggcagcagtgagggtgtcttctggatggagtacggcgactttgtcaggtacttcgactccgtggacatctgtaaggtgcactcggactggcaggaggcgcgggtgcagggctgctttcccagctcggccagcgcgcccgtgggggtaacagcgctcacggtgctggagcgggcctcgctggagttcgcgctcttccaggagggcagcaggcgctcggacgccgtggacagccacctgctggacctgtgcatcctggtgttccgggccacgttcggcagcggcggccacctcagcctgggccgcctcctggcccacagtaagcgcgcggtcaagaagttcgtcagctgcgacgtcatgctggagcctggcgagtacgctgtggtgtgctgcgccttcaaccactgggggccgcccctgccgggcacccctgccccccaggcctccagcccctcggcaggggtcccgagagcctccccagagccgccgggccacgtgctggctgtgtacagctcgaggctggtcatggtggagcccgtggaagcccagccgaccacgctggccgacgccatcatcctgctcaccgagagccgcggagagcggcacgagggccgtgagggcatgacctgctactacctgacacacggttgggcggggctcatcgtggtggtggagaaccgacaccccaaggcctacctgcacgtgcagtgtgactgcaccgacagcttcaacgtggtgtccacacgcggcagcctgcgtacccaggatagcgtgccacccctgcacaggcaggtcctggtgatcttgtcccagctagagggcaacgccggcttctctatcacccaccgcctggcacatcgcaaggcagcccaggccttcctcagtgactggacagcctccaaggggacccacagccccccactcacgccagaggtcgccggtctgcatgggccccgaccgctgtgaccaccatgcctggggcaggggctgtgcacagacggaccccccacccccacacgcactttatgagggagaccccgacagaggacgcttgagccagaatctcaggaccccgcccagggagctgccagcccagggctcagcttcccatgggccccccgcccccctccttcccctccctgaaccccacagtccgcctggccaggcctcctggccgccacgcagaatacctcgaaccaggcgggctgtgaaccagccccgctcacctgccagccccaacacccgacgggggccgaggccaggctgcccctccctgtgggctcagggtctcctgcgggctaggcagccaggagctctgtccgcaaaaccaaatctgggtgtcagaggccaagaccctggggtgggatcagggaccacccctcacggggcataaggtcagttttcccccagagcccgggtccctgtcccccacagggcaggcggggtccctggagccctggtgtggagcggcgagtcccggggcggtgcctgtctcagaagaaggggcccttggccagccccccagcgacactatgcaaatcctggagtgcccgccaggatcgaagccatgactgggtgcaggcgggcgccaggcccgctgtgggtgggcaccagttctcagcaccgctcactgctgccgggcacactgggaccagcaggctcctcagccaaccctgtccctcggcccggccctgccagagagggaccccagcacatcgtgggcacgggcagggctcagccgctcccacctccccacagaagcccaggagtgtgtggacgtctgagcccagctttctgcgtgccctcctggcccctcactcccggcagcgggccggcctcgcccccactccccctcctaccccggcaggggcttccggggccttttcacctggagaaacattcccactcccctttggcctccctgtactctgagctgtgaatatttttaaccctgtaaatacggccagctcttgtgacacagagactattttatcaattgtcagtcccgttcctttaccataggattctccacagtggcttccgactcaggctccaatggaccaaataaaagcgttttgttttgtaaaaaaaatgaaaaaaaaaaaaaaaaaaaaaaattgggggggctttatagggggggggggaaaaaagggttattgaaaggtgacaggggacaaagggggttctctgagcccaagtttcttggcacagggggaaacatcagcggggagccccataagaggggcgcaataactcgaaaaccagcgtaccgtgataagtcgaccagagacaagnagcgaacaaagaagagagggggtcacacacttgggaaccacacagtgggggcgacggcgacagaataatatagtacaaaattcacttttatgtcttacacaaatccttaacttacaagtatgtattatatttatatatttatattacaaatcattaataaagataataaataggtagataataaacaaaagagagatattagagaatcaataaagatcaggaacttaaaattcagaatcagaggatacgtagaagtatcgaggtaaaggatagaagatatataagaacgaataagaaggtagacatattagagataaaatggttctagccgtn

SEQ ID NO: 328944 - DNA, 1984 bp, Homo sapiens
acagcgccgcgtgcgccccgggcgcgccgtagccgcggggcccgggccgggcgctacgctacgaaggcagcgtaaggcgggcgccggacgcgggcaggggccggggccggagccgggtcggggcgcaccgcggctgaggagcgggaggccgtccgggcagcgcggccggcggcgagaggggccccgccgctctccggaggcagaagttgtggatcggccggcgggggcgagcgggcccgggggccggggccgcgctgcccgggccgcgaggacgaggcggcgccgccgggctgtggaggcagcagcccagacgcggcacagagagggcctgggagcttgctgcagcttcagccacacccactcgcccgggtctatggccacggtcggagagtggtcctgtgtgcgctgcaccttcctgaacccggccggccagcgccagtgctccatctgcgaggctccccggcacaagcccgacctcaaccacatcctgcggctcagcgtggaggagcagaaatggccctgcgcccgctgcaccttccgcaacttcctgggcaaggaggcctgcgaggtgtgcggcttcaccccggagcctgcgcctggggctgccttcctgccagtcctcaacggggtcctccccaagccacccgccatcctgggggagcccaagggcagctgccaggaggaagcaggtccagtgaggactgcggggctggtggccacggagcccgccagggggcagtgcgaggacaaggacgaggaggagaaggaggagcaggaggaggaggagggagcggcggagcccagagggggctgggcgtgtccgcgttgcacgctgcacaacacgcccgtggccagctcctgctccgtctgcgggggcccacgcaggctctcgctgccacggatccctcccccacacgcactttatgagggagaccccgacagaggacgcttgagccagaatctcaggaccccgcccagggagctgccagcccagggctcagcttcccatgggccccccgcccccctccttcccctccctgaaccccacagtccgcctggccaggcctcctggccgccacgcagaatacctcgaaccaggcgggctgtgaaccagccccgctcacctgccagccccaacacccgacgggggccgaggccaggctgcccctccctgtgggctcagggtctcctgcgggctaggcagccaggagctctgtccgcaaaaccaaatctgggtgtcagaggccaagaccctggggtgggatcagggaccacccctcacggggcataaggtcagttttcccccagagcccgggtccctgtcccccacagggcaggcggggtccctggagccctggtgtggagcggcgagtcccggggcggtgcctgtctcagaagaaggggcccttggccagccccccagcgacactatgcaaatcctggagtgcccgccaggatcgaagccatgactgggtgcaggcgggcgccaggcccgctgtgggtgggcaccagttctcagcaccgctcactgctgccgggcacactgggaccagcaggctcctcagccaaccctgtccctcggcccggccctgccagagagggaccccagcacatcgtgggcacgggcagggctcagccgctcccacctccccacagaagcccaggagtgtgtggacgtctgagcccagctttctgcgtgccctcctggcccctcactcccggcagcgggccggcctcgcccccactccccctcctaccccggcaggggcttccggggccttttcacctggagaaacattcccactcccctttggcctccctgtactctgagctgtgaatatttttaaccctgtaaatacggccagctcttgtgacacagagactattttatcaattgtcagtcccgttcctttaccataggattctccacagtggcttccgactcaggctccaatggaccaaataaaagcgttttgttttgtaa

SEQ ID NO: 328945 - DNA, 687 bp, Homo sapiens
  misc_feature (7)..(7): n is a, c, g, or t
  misc_feature (570)..(570): n is a, c, g, or t
  misc_feature (598)..(598): n is a, c, g, or t
  misc_feature (625)..(626): n is a, c, g, or t
  misc_feature (645)..(646): n is a, c, g, or t
  misc_feature (655)..(655): n is a, c, g, or t
  misc_feature (658)..(658): n is a, c, g, or t
ggatccnccgggctgcaggaattcggcacgagaaaaacaatgccactgtccatgaacaggtggggggcccctccctgacctctgacctccaggcccagtccaaagggaatcctgagcagacacctgttctgaaacctgaggaagaggcccctgcgcctgaggtgggcgcctctaagcctgaggggatagactcaaggcctgagacccttcatccagggagacctcagcccccagcagaggaggagctgtgcagtgggaagcccttcgacgccttcaccgacctcaagaacggttccctctttgccttccgagggcagtactgctatgaactggacgaaggccccatcgatgccgccttcacccgcatcaactgtcaggggaagacctacctcttcaagggtagtcagtactggcgctttgaggatggtgtcctggaccctgattacccccgaaatatctctgacggcttcgatggcatcccggacaacgtggatgcagccttggccctccctgcccatagctacagtggccgggagcgggtctacttcttcaaggggaacagactggagnccagtcagacagccagcagagagtggangcagtctgcgctggttacactgcatgnncacgacagtgagcatctcnncttttctgnaancttgtgacagacagcagtatagcggctga

SEQ ID NO: 328946 - DNA, 2116 bp, Homo sapiens
ggctggtacggcccggaagtagggatcaatcatggatcaatagctatgtttggagaaggaatttgtggctgctccagctactgggcattttgtctggtccagttcatgtaatctcccaacaccccatgaagcaaggctttgttaatcctattttactgaaaatgaactaagactcagagagataaagctgttgcccaatgagccttctttctgccctccagatccacggtgctaattccccttccgatgacctaatgattctgagcttggcaaaggtcttatctcccagctcgcccaggcccagtgttccaggaatgtgacctttgctgcagcagccgctggagggggcagaggggatgggctggaggttgagcaaacagagcagcagaaaaggcagttcctcttctccagtgccctccttccctgtctctgcctctccctcccttcctcaggcatcagagcggagacttcagggagaccagagcccagcttgccaggcactgagctagaagccctgccatggcacccctgagaccccttctcatactggccctgctggcatgggttgctctggctgaccaagagtcatgcaagggccgctgcactgagggcttcaacgtggacaagaagtgccagtgtgacgagctctgctcttactaccagagctgctgcacagactatacggctgagtgcaagccccaaggtgtgttcagagcccaggtgggtgggctggggtgccccctgctgctggagactcactaccatccactctctgcagtgactcgcggggatgtgttcactatgccggaggatgagtacacggtctatgacgatggcgaggagaaaaacaatgccactgtccatgaacaggtggggggcccctccctgacctctgacctccaggcccagtccaaagggaatcctgagcagacacctgttctgaaacctgaggaagaggcccctgcgcctgaggtgggcgcctctaagcctgaggggatagactcaaggcctgagacccttcatccagggagacctcagcccccagcagaggaggagctgtgcagtgggaagcccttcgacgccttcaccgacctcaagaacggttccctctttgccttccgagggcagtactgctatgaactggacgaaaaggcagtgaggcctgggtaccccaagctcatccgagatgtctggggcatcgagggccccatcgatgccgccttcacccgcatcaactgtcaggggaagacctacctcttcaagggtagtcagtactggcgctttgaggatggtgtcctggaccctgattacccccgaaatatctctgacggcttcgatggcatcccggacaacgtggatgcagccttggccctccctgcccatagctacagtggccgggagcgggtctacttcttcaaggggaaacagtactgggagtaccagttccagcaccagcccagtcaggaggagtgtgaaggcagctccctgtcggctgtgtttgaacactttgccatgatgcagcgggacagctgggaggacatcttcgagcttctcttctggggcagaacctctgctggtaccagacagccccagttcattagccgggactggcacggtgtgccagggcaagtggacgcagccatggctggccgcatctacatctcaggcatggcaccccgcccctccttggccaagaaacaaaggtttaggcatcgcaaccgcaaaggctaccgttcacaacgaggccacagccgtggccgcaaccagaactcccgccggccatcccgcgccatgtggctgtccttgttctccagtgaggagagcaacttgggagccaacaactatgatgactacaggatggactggcttgtgcctgccacctgtgaacccatccagagtgtcttcttcttctctggagacaagtactaccgagtcaatcttcgcacacggcgagtggacactgtggaccctccctacccacgctccatcgctcagtactggctgggctgcccagctcctggccatctgtaggagtcagagcccacatggccgggccctctgtagctccctcctcccatctccttcccccagcccaataaaggtcccttagccccga

SEQ ID NO: 328947 - DNA, 2239 bp, Homo sapiens
ggctggtacggcccggaagtagggatcaatcatggatcaatagctatgtttggagaaggaatttgtggctgctccagctactgggcattttgtctggtccagttcatgtaatctcccaacaccccatgaagcaaggctttgttaatcctattttactgaaaatgaactaagactcagagagataaagctgttgcccaatgagccttctttctgccctccagatccacggtgctaattccccttccgatgacctaatgattctgagcttggcaaaggtcttatctcccagctcgcccaggcccagtgttccaggaatgtgacctttgctgcagcagccgctggagggggcagaggggatgggctggaggttgagcaaacagagcagcagaaaaggcagttcctcttctccagtgccctccttccctgtctctgcctctccctcccttcctcaggcatcagagcggagacttcagggagaccagagcccagcttgccaggcactgagctagaagccctgccatggcacccctgagaccccttctcatactggccctgctggcatgggttgctctggctgaccaagagtcatgcaagggccgctgcactgagggcttcaacgtggacaagaagtgccagtgtgacgagctctgctcttactaccagagctgctgcacagactatacggctgagtgcaagccccaagtgactcgcggggatgtgttcactatgccggaggatgagtacacggtctatgacgatggcgaggagaaaaacaatgccactgtccatgaacaggtggggggcccctccctgacctctgacctccaggcccagtccaaagggaatcctgagcagacacctgttctgaaacctgaggaagaggcccctgcgcctgaggtgggcgcctctaagcctgaggggatagactcaaggcctgagacccttcatccagggagacctcagcccccagcagaggaggagctgtgcagtgggaagcccttcgacgccttcaccgacctcaagaacggttccctctttgccttccgagggcagtactgctatgaactggacgaaaaggcagtgaggcctgggtaccccaagctcatccgagatgtctggggcatcgagggccccatcgatgccgccttcacccgcatcaactgtcaggggaagacctacctcttcaagggtagtcagtactggcgctttgaggatggtgtcctggaccctgattacccccgaaatatctctgacggcttcgatggcatcccggacaacgtggatgcagccttggccctccctgcccatagctacagtggccgggagcgggtctacttcttcaagggtactcagggggtggtgggagactgagcaggcagtggagcagtcttggattcctttcacatttcactggggacaggcctcagcatgtgcccacccctgacccccacctcatgctgggagatcctaacttcaacagcctctgggatctccagtcttgccctggcccagccctcctaatgcccaccaccccgctcctcagggaaacagtactgggagtaccagttccagcaccagcccagtcaggaggagtgtgaaggcagctccctgtcggctgtgtttgaacactttgccatgatgcagcgggacagctgggaggacatcttcgagcttctcttctggggcagaacctctgctggtaccagacagccccagttcattagccgggactggcacggtgtgccagggcaagtggacgcagccatggctggccgcatctacatctcaggcatggcaccccgcccctccttggccaagaaacaaaggtttaggcatcgcaaccgcaaaggctaccgttcacaacgaggccacagccgtggccgcaaccagaactcccgccggccatcccgcgccatgtggctgtccttgttctccagtgaggagagcaacttgggagccaacaactatgatgactacaggatggactggcttgtgcctgccacctgtgaacccatccagagtgtcttcttcttctctggagacaagtactaccgagtcaatcttcgcacacggcgagtggacactgtggaccctccctacccacgctccatcgctcagtactggctgggctgcccagctcctggccatctgtaggagtcagagcccacatggccgggccctctgtagctccctcctcccatctccttcccccagcccaataaaggtcccttagccccga

SEQ ID NO: 328948 - DNA, 2062 bp, Homo sapiens
ggctggtacggcccggaagtagggatcaatcatggatcaatagctatgtttggagaaggaatttgtggctgctccagctactgggcattttgtctggtccagttcatgtaatctcccaacaccccatgaagcaaggctttgttaatcctattttactgaaaatgaactaagactcagagagataaagctgttgcccaatgagccttctttctgccctccagatccacggtgctaattccccttccgatgacctaatgattctgagcttggcaaaggtcttatctcccagctcgcccaggcccagtgttccaggaatgtgacctttgctgcagcagccgctggagggggcagaggggatgggctggaggttgagcaaacagagcagcagaaaaggcagttcctcttctccagtgccctccttccctgtctctgcctctccctcccttcctcaggcatcagagcggagacttcagggagaccagagcccagcttgccaggcactgagctagaagccctgccatggcacccctgagaccccttctcatactggccctgctggcatgggttgctctggctgaccaagagtcatgcaagggccgctgcactgagggcttcaacgtggacaagaagtgccagtgtgacgagctctgctcttactaccagagctgctgcacagactatacggctgagtgcaagccccaagtgactcgcggggatgtgttcactatgccggaggatgagtacacggtctatgacgatggcgaggagaaaaacaatgccactgtccatgaacaggtggggggcccctccctgacctctgacctccaggcccagtccaaagggaatcctgagcagacacctgttctgaaacctgaggaagaggcccctgcgcctgaggtgggcgcctctaagcctgaggggatagactcaaggcctgagacccttcatccagggagacctcagcccccagcagaggaggagctgtgcagtgggaagcccttcgacgccttcaccgacctcaagaacggttccctctttgccttccgagggcagtactgctatgaactggacgaaaaggcagtgaggcctgggtaccccaagctcatccgagatgtctggggcatcgagggccccatcgatgccgccttcacccgcatcaactgtcaggggaagacctacctcttcaagggtagtcagtactggcgctttgaggatggtgtcctggaccctgattacccccgaaatatctctgacggcttcgatggcatcccggacaacgtggatgcagccttggccctccctgcccatagctacagtggccgggagcgggtctacttcttcaaggggaaacagtactgggagtaccagttccagcaccagcccagtcaggaggagtgtgaaggcagctccctgtcggctgtgtttgaacactttgccatgatgcagcgggacagctgggaggacatcttcgagcttctcttctggggcagaacctctgctggtaccagacagccccagttcattagccgggactggcacggtgtgccagggcaagtggacgcagccatggctggccgcatctacatctcaggcatggcaccccgcccctccttggccaagaaacaaaggtttaggcatcgcaaccgcaaaggctaccgttcacaacgaggccacagccgtggccgcaaccagaactcccgccggccatcccgcgccatgtggctgtccttgttctccagtgaggagagcaacttgggagccaacaactatgatgactacaggatggactggcttgtgcctgccacctgtgaacccatccagagtgtcttcttcttctctggagacaagtactaccgagtcaatcttcgcacacggcgagtggacactgtggaccctccctacccacgctccatcgctcagtactggctgggctgcccagctcctggccatctgtaggagtcagagcccacatggccgggccctctgtagctccctcctcccatctccttcccccagcccaataaaggtcccttagccccgagaataaaaaaaattgttctga

SEQ ID NO: 328949 - DNA, 2130 bp, Homo sapiens
ggctggtacggcccggaagtagggatcaatcatggatcaatagctatgtttggagaaggaatttgtggctgctccagctactgggcattttgtctggtccagttcatgtaatctcccaacaccccatgaagcaaggctttgttaatcctattttactgaaaatgaactaagactcagagagataaagctgttgcccaatgagccttctttctgccctccagatccacggtgctaattccccttccgatgacctaatgattctgagcttggcaaaggtcttatctcccagctcgcccaggcccagtgttccaggaatgtgacctttgctgcagcagccgctggagggggcagaggggatgggctggaggttgagcaaacagagcagcagaaaaggcagttcctcttctccagtgccctccttccctgtctctgcctctccctcccttcctcaggcatcagagcggagacttcagggagaccagagcccagcttgccaggcactgagctagaagccctgccatggcacccctgagaccccttctcatactggccctgctggcatgggttgctctggctgaccaagagtcatgcaagggccgctgcactgagggcttcaacgtggacaagaagtgccagtgtgacgagctctgctcttactaccagagctgctgcacagactatacggctgagtgcaagccccaagtgactcgcggggatgtgttcactatgccggaggatgagtacacggtctatgacgatggcgaggagaaaaacaatgccactgtccatgaacaggtggggggcccctccctgacctctgacctccaggcccagtccaaagggaatcctgagcagacacctgttctgaaacctgaggaagaggcccctgcgcctgaggtgggcgcctctaagcctgaggggatagactcaaggcctgagacccttcatccagggagacctcagcccccagcagaggaggagctgtgcagtgggaagcccttcgacgccttcaccgacctcaagaacggttccctctttgccttccgagggcagtactgctatgaactggacgaaaaggcagtgaggcctgggtaccccaagctcatccgagatgtctggggcatcgagggccccatcgatgccgccttcacccgcatcaactgtcaggggaagacctacctcttcaagggtagtcagtactggcgctttgaggatggtgtcctggaccctgattacccccgaaatatctctgacggcttcgatggcatcccggacaacgtggatgcagccttggccctccctgcccatagctacagtggccgggagcgggtctacttcttcaaggggaaacagtactgggagtaccagttccagcaccagcccagtcaggaggagtgtgaaggcagctccctgtcggctgtgtttgaacactttgccatgatgcagcgggacagctgggaggacatcttcgagcttctcttctggggcagaacctctgctggtaccagacagccccagttcattagccgggactggcacggtgtgccagggcaagtggacgcagccatggctggccgcatctacatctcaggcatggcaccccgcccctccttggccaagaaacaaaggtttaggcatcgcaaccgcaaaggctaccgttcacaacgaggccacagccgtggccgcaaccagaactcccgccggccatcccgcgccatgtggctgtccttgttctccagtgaggagagcaacttgggagccaacaactatgatgactacaggatggactggcttgtgcctgccacctgtgaacccatccagagtgtcttcttcttctctggagacaagtactaccgagtcaatcttcgcacacggcgagtggacactgtggaccctccctacccacgctccatcgctcagtactggctgggctgcccagctcctggccatctgtaggagtcagagcccacatggccgggccctctgtagctccctcctcccatctccttcccccagcccaataaaggtcccttagccccgaatagactaacgtcattgcccagctcccatttgcccgatactgaggagaatctcaatgaatgcccttggcttacggtccagggggatccg

SEQ ID NO: 328950 - DNA, 1987 bp, Homo sapiens
ggctggtacggcccggaagtagggatcaatcatggatcaatagctatgtttggagaaggaatttgtggctgctccagctactgggcattttgtctggtccagttcatgtaatctcccaacaccccatgaagcaaggctttgttaatcctattttactgaaaatgaactaagactcagagagataaagctgttgcccaatgagccttctttctgccctccagatccacggtgctaattccccttccgatgacctaatgattctgagcttggcaaaggtcttatctcccagctcgcccaggcccagtgttccaggaatgtgacctttgctgcagcagccgctggagggggcagaggggatgggctggaggttgagcaaacagagcagcagaaaaggcagttcctcttctccagtgccctccttccctgtctctgcctctccctcccttcctcaggcatcagagcggagacttcagggagaccagagcccagcttgccaggcactgagctagaagccctgccatggcacccctgagaccccttctcatactggccctgctggcatgggttgctctggctgaccaagagtcatgcaagggccgctgcactgagggcttcaacgtggacaagaagtgccagtgtgacgagctctgctcttactaccagagctgctgcacagactatacggctgagtgcaagccccaagtgactcgcggggatgtgttcactatgccggaggatgagtacacggtctatgacgatggcgaggagaaaaacaatgccactgtccatgaacaggtggggggcccctccctgacctctgacctccaggcccagtccaaagggaatcctgagcagacacctgttctgaaacctgaggaagaggcccctgcgcctgaggtgggcgcctctaagcctgaggggatagactcaaggcctgagacccttcatccagggagacctcagcccccagcagaggaggagctgtgcagtgggaagcccttcgacgccttcaccgacctcaagaacggttccctctttgccttccgagggcagtactgctatgaactggacgaaggccccatcgatgccgccttcacccgcatcaactgtcaggggaagacctacctcttcaagggtagtcagtactggcgctttgaggatggtgtcctggaccctgattacccccgaaatatctctgacggcttcgatggcatcccggacaacgtggatgcagccttggccctccctgcccatagctacagtggccgggagcgggtctacttcttcaaggggaaacagtactgggagtaccagttccagcaccagcccagtcaggaggagtgtgaaggcagctccctgtcggctgtgtttgaacactttgccatgatgcagcgggacagctgggaggacatcttcgagcttctcttctggggcagaacctctgctggtaccagacagccccagttcattagccgggactggcacggtgtgccagggcaagtggacgcagccatggctggccgcatctacatctcaggcatggcaccccgcccctccttggccaagaaacaaaggtttaggcatcgcaaccgcaaaggctaccgttcacaacgaggccacagccgtggccgcaaccagaactcccgccggccatcccgcgccatgtggctgtccttgttctccagtgaggagagcaacttgggagccaacaactatgatgactacaggatggactggcttgtgcctgccacctgtgaacccatccagagtgtcttcttcttctctggagacaagtactaccgagtcaatcttcgcacacggcgagtggacactgtggaccctccctacccacgctccatcgctcagtactggctgggctgcccagctcctggccatctgtaggagtcagagcccacatggccgggccctctgtagctccctcctcccatctccttcccccagcccaataaaggtcccttagccccga

SEQ ID NO: 328951 - DNA, 2064 bp, Homo sapiens
ggctggtacggcccggaagtagggatcaatcatggatcaatagctatgtttggagaaggaatttgtggctgctccagctactgggcattttgtctggtccagttcatgtaatctcccaacaccccatgaagcaaggctttgttaatcctattttactgaaaatgaactaagactcagagagataaagctgttgcccaatgagccttctttctgccctccagatccacggtgctaattccccttccgatgacctaatgattctgagcttggcaaaggtcttatctcccagctcgcccaggcccagtgttccaggaatgtgacctttgctgcagcagccgctggagggggcagaggggatgggctggaggttgagcaaacagagcagcagaaaaggcagttcctcttctccagtgccctccttccctgtctctgcctctccctcccttcctcaggcatcagagcggagacttcagggagaccagagcccagcttgccaggcactgagctagaagccctgccatggcacccctgagaccccttctcatactggccctgctggcatgggttgctctggctgaccaagagtcatgcaagggccgctgcactgagggcttcaacgtggacaagaagtgccagtgtgacgagctctgctcttactaccagagctgctgcacagactatacggctgagtgcaagccccaagtgactcgcggggatgtgttcactatgccggaggatgagtacacggtctatgacgatggcgaggagaaaaacaatgccactgtccatgaacaggtggggggcccctccctgacctctgacctccaggcccagtccaaagggaatcctgagcagacacctgttctgaaacctgaggaagaggcccctgcgcctgaggtgggcgcctctaagcctgaggggatagactcaaggcctgagacccttcatccagggagacctcagcccccagcagaggaggagctgtgcagtgggaagcccttcgacgccttcaccgacctcaagaacggttccctctttgccttccgagggcagtactgctatgaactggacgaaaaggcagtgaggcctgggtaccccaagctcatccgagatgtctggggcatcgagggccccatcgatgccgccttcacccgcatcaactgtcaggggaagacctacctcttcaagggtagtcagtactggcgctttgaggatggtgtcctggaccctgattacccccgaaatatctctgacggcttcgatggcatcccggacaacgtggatgcagccttggccctccctgcccatagctacagtggccgggagcgggtctacttcttcaaggggaaacagtactgggagtaccagttccagcaccagcccagtcaggaggagtgtgaaggcagctccctgtcggctgtgtttgaacactttgccatgatgcagcgggacagctgggaggacatcttcgagcttctcttctggggcagaacctctgctggtaccagacagccccagttcattagccgggactggcacggtgtgccagggcaagtggacgcagccatggctggccgcatctacatctcaggcatggcaccccgcccctccttggccaagaaacaaaggtttaggcatcgcaaccgcaaaggctaccgttcacaacgaggccacagccgtggccgcaaccagaactcccgccggccatcccgcgccatgtggctgtccttgttctccagtgaggagagcaacttgggagccaacaactatgatgactacaggatggactggcttgtgcctgccacctgtgaacccatccagagtgtcttcttcttctctggagacaagtactaccgagtcaatcttcgcacacggcgagtggacactgtggaccctccctacccacgctccatcgctcagtactggctgggctgcccagctcctggccatctgtaggagtcagagcccacatggccgggccctttccacctccgcctccatttctttcttgatccagtccacgtagttgagcactttggtgtagaagccatagccccgaaaaaa

SEQ ID NO: 328952 - DNA, 2263 bp, Homo sapiens
ggctggtacggcccggaagtagggatcaatcatggatcaatagctatgtttggagaaggaatttgtggctgctccagctactgggcattttgtctggtccagttcatgtaatctcccaacaccccatgaagcaaggctttgttaatcctattttactgaaaatgaactaagactcagagagataaagctgttgcccaatgagccttctttctgccctccagatccacggtgctaattccccttccgatgacctaatgattctgagcttggcaaaggtcttatctcccagctcgcccaggcccagtgttccaggaatgtgacctttgctgcagcagccgctggagggggcagaggggatgggctggaggttgagcaaacagagcagcagaaaaggcagttcctcttctccagtgccctccttccctgtctctgcctctccctcccttcctcaggcatcagagcggagacttcagggagaccagagcccagcttgccaggcactgagctagaagccctgccatggcacccctgagaccccttctcatactggccctgctggcatgggttgctctggctgaccaagagtcatgcaagggccgctgcactgagggcttcaacgtggacaagaagtgccagtgtgacgagctctgctcttactaccagagctgctgcacagactatacggctgagtgcaagccccaagtgactcgcggggatgtgttcactatgccggaggatgagtacacggtctatgacgatggcgaggagaaaaacaatgccactgtccatgaacaggtggggggcccctccctgacctctgacctccaggcccagtccaaagggaatcctgagcagacacctgttctgaaacctgaggaagaggcccctgcgcctgaggtgggcgcctctaagcctgaggggatagactcaaggcctgagacccttcatccagggagacctcagcccccagcagaggaggagctgtgcagtgggaagcccttcgacgccttcaccgacctcaagaacggttccctctttgccttccgaggtgaatccagggcaggtactggggatgcgggtctgccccaggagcgtccctgctctcacaccatctcctccactctagggcagtactgctatgaactggacgaaggccccatcgatgccgccttcacccgcatcaactgtcaggggaagacctacctcttcaagggtagtcagtactggcgctttgaggatggtgtcctggaccctgattacccccgaaatatctctgacggcttcgatggcatcccggacaacgtggatgcagccttggccctccctgcccatagctacagtggccgggagcgggtctacttcttcaagggtactcagggggtggtgggagactgagcaggcagtggagcagtcttggattcctttcacatttcactggggacaggcctcagcatgtgcccacccctgacccccacctcatgctgggagatcctaacttcaacagcctctgggatctccagtcttgccctggcccagccctcctaatgcccaccaccccgctcctcagggaaacagtactgggagtaccagttccagcaccagcccagtcaggaggagtgtgaaggcagctccctgtcggctgtgtttgaacactttgccatgatgcagcgggacagctgggaggacatcttcgagcttctcttctggggcagaacctctgctggtaccagacagccccagttcattagccgggactggcacggtgtgccagggcaagtggacgcagccatggctggccgcatctacatctcaggcatggcaccccgcccctccttggccaagaaacaaaggtttaggcatcgcaaccgcaaaggctaccgttcacaacgaggccacagccgtggccgcaaccagaactcccgccggccatcccgcgccatgtggctgtccttgttctccagtgaggagagcaacttgggagccaacaactatgatgactacaggatggactggcttgtgcctgccacctgtgaacccatccagagtgtcttcttcttctctggagacaagtactaccgagtcaatcttcgcacacggcgagtggacactgtggaccctccctacccacgctccatcgctcagtactggctgggctgcccagctcctggccatctgtaggagtcagagcccacatggccgggccctctgtagctccctcctcccatctccttcccccagcccaataaaggtcccttagccccga

SEQ ID NO: 328953 - DNA, 1954 bp, Homo sapiens
ggctggtacggcccggaagtagggatcaatcatggatcaatagctatgtttggagaaggaatttgtggctgctccagctactgggcattttgtctggtccagttcatgtaatctcccaacaccccatgaagcaaggctttgttaatcctattttactgaaaatgaactaagactcagagagataaagctgttgcccaatgagccttctttctgccctccagatccacggtgctaattccccttccgatgacctaatgattctgagcttggcaaaggtcttatctcccagctcgcccaggcccagtgttccaggaatgtgacctttgctgcagcagccgctggagggggcagaggggatgggctggaggttgagcaaacagagcagcagaaaaggcagttcctcttctccagtgccctccttccctgtctctgcctctccctcccttcctcaggcatcagagcggagacttcagggagaccagagcccagcttgccaggcactgagctagaagccctgccatggcacccctgagaccccttctcatactggccctgctggcatgggttgctctggctgaccaagagtcatgcaagggccgctgcactgagggcttcaacgtggacaagaagtgccagtgtgacgagctctgctcttactaccagagctgctgcacagactatacggctgagtgcaagccccaagtgactcgcggggatgtgttcactatgccggaggatgagtacacggtctatgacgatggcgaggagaaaaacaatgccactgtccatgaacaggtggggggcccctccctgacctctgacctccaggcccagtccaaagggaatcctgagcagacacctgttctgaaacctgaggaagaggcccctgcgcctgaggtgggcgcctctaagcctgaggggatagactcaaggcctgagacccttcatccagggagacctcagcccccagcagaggaggagctgtgcagtgggaagcccttcgacgccttcaccgacctcaagaacggttccctctttgccttccgagggcagtactgctatgaactggacgaaaaggcagtgaggcctgggtaccccaagctcatccgagatgtctggggcatcgagggccccatcgatgccgccttcacccgcatcaactgtcaggggaagacctacctcttcaagggtagtcagtactggcgctttgaggatggtgtcctggaccctgattacccccgaaatatctctgacggcttcgatggcatcccggacaacgtggatgcagccttggccctccctgcccatagctacagtggccgggagcgggtctacttcttcaaggggaaacagtactgggagtaccagttccagcaccagcccagtcaggaggagtgtgaaggcagctccctgtcggctgtgtttgaacactttgccatgatgcagcgggacagctgggaggacatcttcgagcttctcttctggggcagaacctctgctggtaccagacagccccagttcattagccgggactggcacggtgtgccagggcaagtggacgcagccatggctggccgcatctacatctcaggcatggcaccccgcccctccttggccaagaaacaaaggtttaggctgtccttgttctccagtgaggagagcaacttgggagccaacaactatgatgactacaggatggactggcttgtgcctgccacctgtgaacccatccagagtgtcttcttcttctctggagacaagtactaccgagtcaatcttcgcacacggcgagtggacactgtggaccctccctacccacgctccatcgctcagtactggctgggctgcccagctcctggccatctgtaggagtcagagcccacatggccgggccctctgtagctccctcctcccatctccttcccccagcccaataaaggtcccttagccccga

SEQ ID NO: 328954 - DNA, 1757 bp, Homo sapiens
ggctggtacggcccggaagtagggatcaatcatggatcaatagctatgtttggagaaggaatttgtggctgctccagctactgggcattttgtctggtccagttcatgtaatctcccaacaccccatgaagcaaggctttgttaatcctattttactgaaaatgaactaagactcagagagataaagctgttgcccaatgagccttctttctgccctccagatccacggtgctaattccccttccgatgacctaatgattctgagcttggcaaaggtcttatctcccagctcgcccaggcccagtgttccaggaatgtgacctttgctgcagcagccgctggagggggcagaggggatgggctggaggttgagcaaacagagcagcagaaaaggcagttcctcttctccagtgccctccttccctgtctctgcctctccctcccttcctcaggcatcagagcggagacttcagggagaccagagcccagcttgccaggcactgagctagaagccctgccatggcacccctgagaccccttctcatactggccctgctggcatgggttgctctggctgaccaagagtcatgcaagggccgctgcactgagggcttcaacgtggacaagaagtgccagtgtgacgagctctgctcttactaccagagctgctgcacagactatacggctgagtgcaagccccaagtgactcgcggggatgtgttcactatgccggaggatgagtacacggtctatgacgatggcgaggagaaaaacaatgccactgtccatgaacaggtggggggcccctccctgacctctgacctccaggcccagtccaaagggaatcctgagcagacacctgttctgaaacctgaggaagaggcccctgcgcctgaggtgggcgcctctaagcctgaggggatagactcaaggcctgagacccttcatccagggagacctcagcccccagcagaggaggagctgtgcagtgggaagcccttcgacgccttcaccgacctcaagaacggttccctctttgccttccgagggcagtactgctatgaactggacgaaaaggcagtgaggcctgggtaccccaagctcatccgagatgtctggggcatcgagggccccatcgatgccgccttcacccgcatcaactgtcaggggaagacctacctcttcaagggtagtcagtactggcgctttgaggatggtgtcctggaccctgattacccccgaaatatctctgacggcttcgatggcatcccggacaacgtggatgcagccttggccctccctgcccatagctacagtggccgggagcgggtctacttcttcaaggggaaacagtactgggagtaccagttccagcaccagcccagtcaggaggagtgtgaaggcagctccctgtcggctgtgtttgaacactttgccatgatgcagcgggacagctgggaggacatcttcgagcttctcttctggggcagaacctctgctggtaccagacagccccagttcattagccgggactggcacggtgtgccagggcaagtggacgcagccatggctggccgcatctacatctcaggcatggcaccccgcccctccttggccaagaaacaaaggtttaggcatcgcaaccgcaaaggctaccgttcacaacgaggccacagccgtggccgcaaccagaactcccctgtagctccctcctcccatctccttcccccagcccaataaaggtcccttagccccga

SEQ ID NO: 328955 - DNA, 1955 bp, Homo sapiens
ggctggtacggcccggaagtagggatcaatcatggatcaatagctatgtttggagaaggaatttgtggctgctccagctactgggcattttgtctggtccagttcatgtaatctcccaacaccccatgaagcaaggctttgttaatcctattttactgaaaatgaactaagactcagagagataaagctgttgcccaatgagccttctttctgccctccagatccacggtgctaattccccttccgatgacctaatgattctgagcttggcaaaggtcttatctcccagctcgcccaggcccagtgttccaggaatgtgacctttgctgcagcagccgctggagggggcagaggggatgggctggaggttgagcaaacagagcagcagaaaaggcagttcctcttctccagtgccctccttccctgtctctgcctctccctcccttcctcaggcatcagagcggagacttcagggagaccagagcccagcttgccaggcactgagctagaagccctgccatggcacccctgagaccccttctcatactggccctgctggcatgggttgctctggctgaccaagagtcatgcaagggccgctgcactgagggcttcaacgtggacaagaagtgccagtgtgacgagctctgctcttactaccagagctgctgcacagactatacggctgagtgcaagccccaagtgactcgcggggatgtgttcactatgccggaggatgagtacacggtctatgacgatggcgaggagaaaaacaatgccactgtccatgaacaggtggggggcccctccctgacctctgacctccaggcccagtccaaagggaatcctgagcagacacctgttctgaaacctgaggaagaggcccctgcgcctgaggtgggcgcctctaagcctgaggggatagactcaaggcctgagacccttcatccagggagacctcagcccccagcagaggaggagctgtgcagtgggaagcccttcgacgccttcaccgacctcaagaacggttccctctttgccttccgagggcagtactgctatgaactggacgaaaaggcagtgaggcctgggtaccccaagctcatccgagatgtctggggcatcgagggccccatcgatgccgccttcacccgcatcaactgtcaggggaagacctacctcttcaagggtagtcagtactggcgctttgaggatggtgtcctggaccctgattacccccgaaatatctctgacggcttcgatggcatcccggacaacgtggatgcagccttggccctccctgcccatagctacagtggccgggagcgggtctacttcttcaagggtactcagggggtggtgggagactgagcaggcagtggagcagtcttggattcctttcacatttcactggggacaggcctcagcatgtgcccacccctgacccccacctcatgctgggagatcctaacttcaacagcctctgggatctccagtcttgccctggcccagccctcctaatgcccaccaccccgctcctcagggaaacagtactgggagtaccagttccagcaccagcccagtcaggaggagtgtgaaggcagctccctgtcggctgtgtttgaacactttgccatgatgcagcgggacagctgggaggacatcttcgagcttctcttctggggcagaacctctgctggtaccagacagccccagttcattagccgggactggcacggtgtgccagggcaagtggacgcagccatggctggccgcatctacatctcaggcatggcaccccgcccctccttggccaagaaacaaaggtttaggcatcgcaaccgcaaaggctaccgttcacaacgaggccacagccgtggccgcaaccagaactcccctgtagctccctcctcccatctccttcccccagcccaataaaggtcccttagccccga

SEQ ID NO: 328956 - DNA, 296 bp, Homo sapiens
acttttaaaataaattctctcctatgatgactacaggatggactggcttgtgcctgccacctgtgaacccatccagagtgtcttcttcttctctggagacaagtactaccgagtcaatcttcgcacacggcgagtggacactgtggaccctccctacccacgctccatcgctcagtactggctgggctgcccagctcctggccatctgtaggagtcagagcccacatggccgggccctctgtagctccctcctcccatctccttcccccagcccaataaaggtcccttagccccga

SEQ ID NO: 328957 - DNA, 2041 bp, Homo sapiens
ggctggtacggcccggaagtagggatcaatcatggatcaatagctatgtttggagaaggaatttgtggctgctccagctactgggcattttgtctggtccagttcatgtaatctcccaacaccccatgaagcaaggctttgttaatcctattttactgaaaatgaactaagactcagagagataaagctgttgcccaatgagccttctttctgccctccagatccacggtgctaattccccttccgatgacctaatgattctgagcttggcaaaggtcttatctcccagctcgcccaggcccagtgttccaggaatgtgacctttgctgcagcagccgctggagggggcagaggggatgggctggaggttgagcaaacagagcagcagaaaaggcagttcctcttctccagtgccctccttccctgtctctgcctctccctcccttcctcaggcatcagagcggagacttcagggagaccagagcccagcttgccaggcactgagctagaagccctgccatggcacccctgagaccccttctcatactggccctgctggcatgggttgctctggctgaccaagagtcatgcaagggccgctgcactgagggcttcaacgtggacaagaagtgccagtgtgacgagctctgctcttactaccagagctgctgcacagactatacggctgagtgcaagccccaagtgactcgcggggatgtgttcactatgccggaggatgagtacacggtctatgacgatggcgaggagaaaaacaatgccactgtccatgaacaggtggggggcccctccctgacctctgacctccaggcccagtccaaagggaatcctgagcagacacctgttctgaaacctgaggaagaggcccctgcgcctgaggtgggcgcctctaagcctgaggggatagactcaaggcctgagacccttcatccagggagacctcagcccccagcagaggaggagctgtgcagtgggaagcccttcgacgccttcaccgacctcaagaacggttccctctttgccttccgagggcagtactgctatgaactggacgaaaaggcagtgaggcctgggtaccccaagctcatccgagatgtctggggcatcgagggccccatcgatgccgccttcacccgcatcaactgtcaggggaagacctacctcttcaagggtagtcagtactggcgctttgaggatggtgtcctggaccctgattacccccgaaatatctctgacggcttcgatggcatcccggacaacgtggatgcagccttggccctccctgcccatagctacagtggccgggagcgggtctacttcttcaaggggaaacagtactgggagtaccagttccagcaccagcccagtcaggaggagtgtgaaggcagctccctgtcggctgtgtttgaacactttgccatgatgcagcgggacagctgggaggacatcttcgagcttctcttctggggcagaacctctgctggtaccagacagccccagttcattagccgggactggcacggtgtgccagggcaagtggacgcagccatggctggccgcatctacatctcaggcatggcaccccgcccctccttggccaagaaacaaaggtttaggcatcgcaaccgcaaaggctaccgttcacaacgaggccacagccgtggccgcaaccagaactcccgccggccatcccgcgccatgtggctgtccttgttctccagtgaggagagcaacttgggagccaacaactatgatgactacaggatggactggcttgtgcctgccacctgtgaacccatccagagtgtcttcttcttctctggagacaagtactaccgagtcaatcttcgcacacggcgagtggacactgtggaccctccctacccacgctccatcgctcagtactggctgggctgcccagctcctggccatctgtaggagtcagagcccacatggccgggccctctgtagctccctcctcccatctccttcccccagcccaataaaggtcccttagccccga

SEQ ID NO: 328958 - DNA, 1084 bp, Homo sapiens
  misc_feature (47)..(47): n is a, c, g, or t
  misc_feature (67)..(67): n is a, c, g, or t
  misc_feature (84)..(84): n is a, c, g, or t
accttcatccagaaactcacccccacaaagagaaatttcaatggaanccctcgacccttcacgactnaagaacgttcctttttncttccgaggcagtactgctatgaactggacgaaaaggcagtgaggcctgggtaccccaagctcatccgagatgtctggggcatcgagggccccatcgatgccgccttcacccgcatcaactgtcaggggaagacctacctcttcaagggtagtcagtactggcgctttgaggatggtgtcctggaccctgattacccccgaaatatctctgacggcttcgatggcatcccggacaacgtggatgcagccttggccctccctgcccatagctacagtggccgggagcgggtctacttcttcaaggggaaacagtactgggagtaccagttccagcaccagcccagtcaggaggagtgtgaaggcagctccctgtcggctgtgtttgaacactttgccatgatgcagcgggacagctgggaggacatcttcgagcttctcttctggggcagaacctctgctggtaccagacagccccagttcattagccgggactggcacggtgtgccagggcaagtggacgcagccatggctggccgcatctacatctcaggcatggcaccccgcccctccttggccaagaaacaaaggtttaggcatcgcaaccgcaaaggctaccgttcacaacgaggccacagccgtggccgcaaccagaactcccgccggccatcccgcgccatgtggctgtccttgttctccagtgaggagagcaacttgggagccaacaactatgatgactacaggatggactggcttgtgcctgccacctgtgaacccatccagagtgtcttcttcttctctggagacaagtactaccgagtcaatcttcgcacacggcgagtggacactgtggaccctccctacccacgctccatcgctcagtactggctgggctgcccagctcctggccatctgtaggagtcagagcccacatggccgggccctctgtagctccctcctcccatctccttcccccagcccaataaaggtcccttagccccga

SEQ ID NO: 328959 - DNA, 2065 bp, Homo sapiens
ggctggtacggcccggaagtagggatcaatcatggatcaatagctatgtttggagaaggaatttgtggctgctccagctactgggcattttgtctggtccagttcatgtaatctcccaacaccccatgaagcaaggctttgttaatcctattttactgaaaatgaactaagactcagagagataaagctgttgcccaatgagccttctttctgccctccagatccacggtgctaattccccttccgatgacctaatgattctgagcttggcaaaggtcttatctcccagctcgcccaggcccagtgttccaggaatgtgacctttgctgcagcagccgctggagggggcagaggggatgggctggaggttgagcaaacagagcagcagaaaaggcagttcctcttctccagtgccctccttccctgtctctgcctctccctcccttcctcaggcatcagagcggagacttcagggagaccagagcccagcttgccaggcactgagctagaagccctgccatggcacccctgagaccccttctcatactggccctgctggcatgggttgctctggctgaccaagagtcatgcaagggccgctgcactgagggcttcaacgtggacaagaagtgccagtgtgacgagctctgctcttactaccagagctgctgcacagactatacggctgagtgcaagccccaagtgactcgcggggatgtgttcactatgccggaggatgagtacacggtctatgacgatggcgaggagaaaaacaatgccactgtccatgaacaggtggggggcccctccctgacctctgacctccaggcccagtccaaagggaatcctgagcagacacctgttctgaaacctgaggaagaggcccctgcgcctgaggtgggcgcctctaagcctgaggggatagactcaaggcctgagacccttcatccagggagacctcagcccccagcagaggaggagctgtgcagtgggaagcccttcgacgccttcaccgacctcaagaacggttccctctttgccttccgaggtgaatccagggcaggtactggggatgcgggtctgccccaggagcgtccctgctctcacaccatctcctccactctagggcagtactgctatgaactggacgaaggccccatcgatgccgccttcacccgcatcaactgtcaggggaagacctacctcttcaagggtagtcagtactggcgctttgaggatggtgtcctggaccctgattacccccgaaatatctctgacggcttcgatggcatcccggacaacgtggatgcagccttggccctccctgcccatagctacagtggccgggagcgggtctacttcttcaaggggaaacagtactgggagtaccagttccagcaccagcccagtcaggaggagtgtgaaggcagctccctgtcggctgtgtttgaacactttgccatgatgcagcgggacagctgggaggacatcttcgagcttctcttctggggcagaacctctgctggtaccagacagccccagttcattagccgggactggcacggtgtgccagggcaagtggacgcagccatggctggccgcatctacatctcaggcatggcaccccgcccctccttggccaagaaacaaaggtttaggcatcgcaaccgcaaaggctaccgttcacaacgaggccacagccgtggccgcaaccagaactcccgccggccatcccgcgccatgtggctgtccttgttctccagtgaggagagcaacttgggagccaacaactatgatgactacaggatggactggcttgtgcctgccacctgtgaacccatccagagtgtcttcttcttctctggagacaagtactaccgagtcaatcttcgcacacggcgagtggacactgtggaccctccctacccacgctccatcgctcagtactggctgggctgcccagctcctggccatctgtaggagtcagagcccacatggccgggccctctgtagctccctcctcccatctccttcccccagcccaataaaggtcccttagccccga

SEQ ID NO: 328960 - DNA, 1244 bp, Homo sapiens
  misc_feature (7)..(7): n is a, c, g, or t
ggatccnccgggctgcaggaattcggcactagcggcacgagctgttctgcctgaggaagaggcccctgcgcctgaggtgggcgcctctaagcctgaggggatagactcaaggcctgagacccttcatccagggagacctcagcccccagcagaggaggagctgtgcagtgggaagcccttcgacgccttcaccgacctcaagaacggttccctctttgccttccgaggtgaatccagggcaggtactggggatgcgggtctgccccaggagcgtccctgctctcacaccatctcctccactctagggcagtactgctatgaactggacgaaggccccatcgatgccgccttcacccgcatcaactgtcaggggaagacctacctcttcaagggtagtcagtactggcgctttgaggatggtgtcctggaccctgattacccccgaaatatctctgacggcttcgatggcatcccggacaacgtggatgcagccttggccctccctgcccatagctacagtggccgggagcgggtctacttcttcaaggggaaacagtactgggagtaccagttccagcaccagcccagtcaggaggagtgtgaaggcagctccctgtcggctgtgtttgaacactttgccatgatgcagcgggacagctgggaggacatcttcgagcttctcttctggggcagaacctctgctggtaccagacagccccagttcattagccgggactggcacggtgtgccagggcaagtggacgcagccatggctggccgcatctacatctcaggcatggcaccccgcccctccttggccaagaaacaaaggtttaggcatcgcaaccgcaaaggctaccgttcacaacgaggccacagccgtggccgcaaccagaactcccgccggccatcccgcgccatgtggctgtccttgttctccagtgaggagagcaacttgggagccaacaactatgatgactacaggatggactggcttgtgcctgccacctgtgaacccatccagagtgtcttcttcttctctggagacaagtactaccgagtcaatcttcgcacacggcgagtggacactgtggaccctccctacccacgctccatcgctcagtactggctgggctgcccagctcctggccatctgtaggagtcagagcccacatggccgggccctctgtagctccctcctcccatctccttcccccagcccaataaaggtcccttagccccga

SEQ ID NO: 328961 - DNA, 1981 bp, Homo sapiens
ggctggtacggcccggaagtagggatcaatcatggatcaatagctatgtttggagaaggaatttgtggctgctccagctactgggcattttgtctggtccagttcatgtaatctcccaacaccccatgaagcaaggctttgttaatcctattttactgaaaatgaactaagactcagagagataaagctgttgcccaatgagccttctttctgccctccagatccacggtgctaattccccttccgatgacctaatgattctgagcttggcaaaggtcttatctcccagctcgcccaggcccagtgttccaggaatgtgacctttgctgcagcagccgctggagggggcagaggggatgggctggaggttgagcaaacagagcagcagaaaaggcagttcctcttctccagtgccctccttccctgtctctgcctctccctcccttcctcaggcatcagagcggagacttcagggagaccagagcccagcttgccaggcactgagctagaagccctgccatggcacccctgagaccccttctcatactggccctgctggcatgggttgctctggctgaccaagagtcatgcaagggccgctgcactgagggcttcaacgtggacaagaagtgccagtgtgacgagctctgctcttactaccagagctgctgcacagactatacggctgagtgcaagccccaagtgactcgcggggatgtgttcactatgccggaggatgagtacacggtctatgacgatggcgaggagaaaaacaatgccactgtccatgaacaggtggggggcccctccctgacctctgacctccaggcccagtccaaagggaatcctgagcagacacctgttctgaaacctgaggaagaggcccctgcgcctgaggtgggcgcctctaagcctgaggggatagactcaaggcctgagacccttcatccagggagacctcagcccccagcagaggaggagctgtgcagtgggaagcccttcgacgccttcaccgacctcaagaacggttccctctttgccttccgagggcagtactgctatgaactggacgaaaaggcagtgaggcctgggtaccccaagctcatccgagatgtctggggcatcgagggccccatcgatgccgccttcacccgcatcaactgtcaggggaagacctacctcttcaagggtagtcagtactggcgctttgaggatggtgtcctggaccctgattacccccgaaatatctctgacggcttcgatggcatcccggacaacgtggatgcagccttggccctccctgcccatagctacagtggccgggagcgggtctacttcttcaaggggaaacagtactgggagtaccagttccagcaccagcccagtcaggaggagtgtgaaggcagctccctgtcggctgtgtttgaacactttgccatgatgcagcgggacagctgggaggacatcttcgagcttctcttctggggcagaacctctgctggtaccagacagccccagttcattagccgggactggcacgcccgcccctccttggccaagaaacaaaggtttaggcatcgcaaccgcaaaggctaccgttcacaacgaggccacagccgtggccgcaaccagaactcccgccggccatcccgcgccatgtggctgtccttgttctccagtgaggagagcaacttgggagccaacaactatgatgactacaggatggactggcttgtgcctgccacctgtgaacccatccagagtgtcttcttcttctctggagacaagtactaccgagtcaatcttcgcacacggcgagtggacactgtggaccctccctacccacgctccatcgctcagtactggctgggctgcccagctcctggccatctgtaggagtcagagcccacatggccgggccctctgtagctccctcctcccatctccttcccccagcccaataaaggtcccttagccccga

SEQ ID NO: 328962 - DNA, 812 bp, Homo sapiens
  misc_feature (52)..(52): n is a, c, g, or t
gcaaatttaaagttgaactaagattctatcttggacaaccagctatcaccangctcggtaggtttgtcgcctctacctataaatcttcccactattttgctacatagacgggtgtgctcttttagctgttcttaggtagctcgtctggtttcgggggtcttagctttggctctccttgcaaagttatttctagttaattcattatgcagaaggtataggggttagtccttgctatattatgcttggttataatttttcatctttccctgctggtaccagacagccccagttcattagccgggactggcacggtgtgccagggcaagtggacgcagccatggctggccgcatctacatctcaggcatggcaccccgcccctccttggccaagaaacaaaggtttaggcatcgcaaccgcaaaggctaccgttcacaacgaggccacagccgtggccgcaaccagaactcccgccggccatcccgcgccatgtggctgtccttgttctccagtgaggagagcaacttgggagccaacaactatgatgactacaggatggactggcttgtgcctgccacctgtgaacccatccagagtgtcttcttcttctctggagacaagtactaccgagtcaatcttcgcacacggcgagtggacactgtggaccctccctacccacgctccatcgctcagtactggctgggctgcccagctcctggccatctgtaggagtcagagcccacatggccgggccctctgtagctccctcctcccatctccttcccccagcccaataaaggtcccttagccccga

SEQ ID NO: 328963 - DNA, 2035 bp, Homo sapiens
ggctggtacggcccggaagtagggatcaatcatggatcaatagctatgtttggagaaggaatttgtggctgctccagctactgggcattttgtctggtccagttcatgtaatctcccaacaccccatgaagcaaggctttgttaatcctattttactgaaaatgaactaagactcagagagataaagctgttgcccaatgagccttctttctgccctccagatccacggtgctaattccccttccgatgacctaatgattctgagcttggcaaaggtcttatctcccagctcgcccaggcccagtgttccaggaatgtgacctttgctgcagcagccgctggagggggcagaggggatgggctggaggttgagcaaacagagcagcagaaaaggcagttcctcttctccagtgccctccttccctgtctctgcctctccctcccttcctcaggcatcagagcggagacttcagggagaccagagcccagcttgccaggcactgagctagaagccctgccatggcacccctgagaccccttctcatactggccctgctggcatgggttgctctggctgaccaagagtcatgcaagggccgctgcactgagggcttcaacgtggacaagaagtgccagtgtgacgagctctgctcttactaccagagctgctgcacagactatacggctgagtgcaagccccaagtgactcgcggggatgtgttcactatgccggaggatgagtacacggtctatgacgatggcgaggagaaaaacaatgccactgtccatgaacaggtggggggcccctccctgacctctgacctccaggcccagtccaaagggaatcctgagcagacacctgttctgaaacctgaggaagaggcccctgcgcctgaggtgggcgcctctaagcctgaggggatagactcaaggcctgagacccttcatccagggagacctcagcccccagcagaggaggagctgtgcagtgggaagcccttcgacgccttcaccgacctcaagaacggttccctctttgccttccgagggcagtactgctatgaactggacgaaaaggcagtgaggcctgggtaccccaagctcatccgagatgtctggggcatcgagggccccatcgatgccgccttcacccgcatcaactgtcaggggaagacctacctcttcaagggtagtcagtactggcgctttgaggatggtgtcctggaccctgattacccccgaaatatctctgacggcttcgatggcatcccggacaacgtggatgcagccttggccctccctgcccatagctacagtggccgggagcgggtctacttcttcaagggtactcagggggtggtgggagactgagcaggcagtggagcagtcttggattcctttcacatttcactggggacaggcctcagcatgtgcccacccctgacccccacctcatgctgggagatcctaacttcaacagcctctgggatctccagtcttgccctggcccagccctcctaatgcccaccaccccgctcctcagggaaacagtactgggagtaccagttccagcaccagcccagtcaggaggagtgtgaaggcagctccctgtcggctgtgtttgaacactttgccatgatgcagcgggacagctgggaggacatcttcgagcttctcttctggggcagaacctctggtatggagagagggcaagtcttgcttctccctcaaaagggctgaaaccccttggtattggtagagccaggccggctggagggggctgtggttgtggagctatcgatcaaagtctgtttgctcaggccagactttgcttctgttgaccttttggggaaagctcagctctacctggaccccacaccttggactttgcctagcacagctgagagcacagccagcagagggaggggctgtggctgaggagtttagggggcctgggggggtggggtcgagacaccactgtagctccctcctcccatctccttcccccagcccaataaaggtcccttagccccga

SEQ ID NO: 328964 - DNA, 748 bp, Homo sapiens
tctgcctctccctcccttcctcaggcatcagagcggagacttcagggagaccagagcccagcttgccaggcactgagctagaagccctgccatggcacccctgagaccccttctcatactggccctgctggcatgggttgctctggctgaccaaggtacaggggagtgttggtggccatctgggtcaatgtagggagggcgagggtggtctgggcttggtggcaccgactgacactccttcctcatagagtcatgcaagggccgctgcactgagggcttcaacgtggacaagaagtgccagtgtgacgagctctgctcttactaccagagctgctgcacagactatacggctgagtgcaagccccaaggtgtgttcagagcccaggtgggtgggctggggtgccccctgctgctggagactcactaccatccactctctgcagtgactcgcggggatgtgttcactatgccggaggatgagtacacggtctatgacgatggcgaggagaaaaacaatgccactgtccatgaacaggtggggggcccctccctgacctctgacctccaggcccagtccaaagggaatcctgagcagacacctgttctgaaacctgaggaagaggcccctgcgcctgaggtgggcgcctctaagcctgaggggatagactcaaggcctgagacccttcatccagggagacctcagcccccagcagaggaggagctgtgcagtgggaagcccttcgacgcc

SEQ ID NO: 328965 - DNA, 2108 bp, Homo sapiens
atcccggggcggccgggcgggggtgggcagggggcgtgaggccgcccctgcgtcccgggggccccccgaaaacgcgctccgggtgcccggtccctccgctgcgccctgccgccgtcctcccgggggtctcgggcggccgcggccgtgtccttcgcgtcccggcggcgcggcgggaggggccggcgtgacgcagcggttgctacgggccgcccttataaataaccgggctcaggagaaactttagcgagtcagagccgcgcacgggactgggaaggggacccacccgagggtccagccaccagccccctcactaatagcggccaccccggcagcggcggcagcagcagcagcgacgcagcggcgacagctcagagcagggaggccgcgccacctgcgggccggccggagcgggcagccccaggccccctccccgggcacccgcgttcatgcaacgcctggtggcctgggacccagcatgtctccccctgccgccgccgccgcctgcctttaaatccatggaagtggccaacttctactacgaggcggactgcttggctgctgcgtacggcggcaaggcggcccccgcggcgccccccgcggccagacccgggccgcgcccccccgccggcgagctgggcagcatcggcgaccacgagcgcgccatcgacttcagcccgtacctggagccgctgggcgcgccgcaggccccggcgcccgccacggccacggacaccttcgaggcggctccgcccgcgcccgcccccgcgcccgcctcctccgggcagcaccacgacttcctctccgacctcttctccgacgactacgggggcaagaactgcaagaagccggccgagtacggctacgtgagcctggggcgcctgggggccgccaagggcgcgctgcaccccggctgcttcgcgcccctgcacccaccgcccccgccgccgccgccgcccgccgagctcaaggcggagccgggcttcgagcccgcggactgcaagcggaaggaggaggccggggcgccgggcggcggcgcaggcatggcggcgggcttcccgtacgcgctgcgcgcttacctcggctaccaggcggtgccgagcggcagcagcgggagcctctccacgtcctcctcgtccagcccgcccggcacgccgagccccgctgacgccaaggcgcccccgaccgcctgctacgcgggggccgcgccggcgccctcgcaggtcaagagcaaggccaagaagaccgtggacaagcacagcgacgagtacaagatccggcgcgagcgcaacaacatcgccgtgcgcaagagccgcgacaaggccaagatgcgcaacctggagacgcagcacaaggtcctggagctcacggccgagaacgagcggctgcagaagaaggtggagcagctgtcgcgcgagctcagcaccctgcggaacttgttcaagcagctgcccgagcccctgctcgcctcctccggccactgctagcgcggcccccgcgcgcgtccccctgccggccggggctgagactccggggagcgcccgcgcccgcgccctcgcccccgcccccggcggcgccggcaaaactttggcactggggcacttggcagcgcggggagcccgtcggtaattttaatattttattatatatatatatctatatttttgtccaaaccaaccgcacatgcagatggggctcccgcccgtggtgttatttaaagaagaaacgtctatgtgtacagatgaatgataaactctctgcttctccctctgcccctctccaggcgccggcgggcgggccggtttcgaagttgatgcaatcggtttaaacatggctgaacgcgtgtgtacacgggactgacgcaacccacgtgtaactgtcagccgggccctgagtaatcgcttaaagatgttcctacgggcttgttgctgttgatgttttgttttgttttgttttttggtctttttttgtattataaaaaataatctatttctatgagaaaagaggcgtctgtatattttgggaatcttttccgtttcaagcattaagaacacttttaataaacttttttttgagaatggttaaaaagccttttgggggcagtaattggc

SEQ ID NO: 328966 - DNA, 227 bp, Homo sapiens
actcagtgctgtgttagagagggagtgggacaagggcaagcagaaatgacatgaaattttctagcatttccttggttgcttcagcttcttagcttgtttcaagagttctcacaaaactaatcgcttaaagatgttcctacgggcttgttgctgttgatgttttgttttgttttgttttttggtctttttttgtattataaaaaataatctatttctatgagaaaaga

SEQ ID NO: 328967 - DNA, 2147 bp, Homo sapiens
atcccggggcggccgggcgggggtgggcagggggcgtgaggccgcccctgcgtcccgggggccccccgaaaacgcgctccgggtgcccggtccctccgctgcgccctgccgccgtcctcccgggggtctcgggcggccgcggccgtgtccttcgcgtcccggcggcgcggcgggaggggccggcgtgacgcagcggttgctacgggccgcccttataaataaccgggctcaggagaaactttagcgagtcagagccgcgcacgggactgggaaggggacccacccgagggtccagccaccagccccctcactaatagcggccaccccggcagcggcggcagcagcagcagcgacgcagcggcgacagctcagagcagggaggccgcgccacctgcgggccggccggagcgggcagccccaggccccctccccgggcacccgcgttcatgcaacgcctggtggcctgggacccagcatgtctccccctgccgccgccgccgcctgcctttaaatccatggaagtggccaacttctactacgaggcggactgcttggctgctgcgtacggcggcaaggcggcccccgcggcgccccccgcggccagacccgggccgcgcccccccgccggcgagctgggcagcatcggcgaccacgagcgcgccatcgacttcagcccgtacctggagccgctgggcgcgccgcaggccccggcgcccgccacggccacggacaccttcgaggcggctccgcccgcgcccgcccccgcgcccgcctcctccgggcagcaccacgacttcctctccgacctcttctccgacgactacgggggcaagaactgcaagaagccggccgagtacggctacgtgagcctggggcgcctgggggccgccaagggcgcgctgcaccccggctgcttcgcgcccctgcacccaccgcccccgccgccgccgccgcccgccgagctcaaggcggagccgggcttcgagcccgcggactgcaagcggaaggaggaggccggggcgccgggcggcggcgcaggcatggcggcgggcttcccgtacgcgctgcgcgcttacctcggctaccaggcggtgccgagcggcagcagcgggagcctctccacgtcctcctcgtccagcccgcccggcacgccgagccccgctgacgccaaggcgcccccgaccgcctgctacgcgggggccgcgccggcgccctcgcaggtcaagagcaaggccaagaagaccgtggacaagcacagcgacgagtacaagatccggcgcgagcgcaacaacatcgccgtgcgcaagagccgcgacaaggccaagatgcgcaacctggagacgcagcacaaggtcctggagctcacggccgagaacgagcggctgcagaagaaggtggagcagctgtcgcgcgagctcagcaccctgcggaacttgttcaagcagctgcccgagcccctgctcgcctcctccggccactgctagcgcggcccccgcgcgcgtccccctgccggccggggctgagactccggggagcgcccgcgcccgcgccctcgcccccgcccccggcggcgccggcaaaactttggcactggggcacttggcagcgcggggagcccgtcggtaattttaatattttattatatatatatatctatatttttgtccaaaccaaccgcacatgcagatggggctcccgcccgtggtgttatttaaagaagaaacgtctatgtgtacagatgaatgataaactctctgcttctccctctgcccctctccaggcgccggcgggcgggccggtttcgaagttgatgcaatcggtttaaacatggctgaacgcgtgtgtacacgggactgacgcaacccacgtgtaactgtcagccgggccctgagtaatcgcttaaagatgttcctacgggcttgttgctgttgatgttttgttttgttttgttttttggtctttttttgtattataaaaaataatctatttctatgagaaaagaggcgtctgtatattttgggaatcttttccgtttcaagcattaagaacacttttaataaacttttttttgagaataaataacacctcttcccctaatcatcactctccatctaccctaatcccaaaaaaaataaacctcgaggtgg

SEQ ID NO: 328968 - DNA, 2026 bp, Homo sapiens
atcccggggcggccgggcgggggtgggcagggggcgtgaggccgcccctgcgtcccgggggccccccgaaaacgcgctccgggtgcccggtccctccgctgcgccctgccgccgtcctcccgggggtctcgggcggccgcggccgtgtccttcgcgtcccggcggcgcggcgggaggggccggcgtgacgcagcggttgctacgggccgcccttataaataaccgggctcaggagaaactttagcgagtcagagccgcgcacgggactgggaaggggacccacccgagggtccagccaccagccccctcactaatagcggccaccccggcagcggcggcagcagcagcagcgacgcagcggcgacagctcagagcagggaggccgcgccacctgcgggccggccggagcgggcagccccaggccccctccccgggcacccgcgttcatgcaacgcctggtggcctgggacccagcatgtctccccctgccgccgccgccgcctgcctttaaatccatggaagtggccaacttctactacgaggcggactgcttggctgctgcgtacggcggcaaggcggcccccgcggcgccccccgcggccagacccgggccgcgcccccccgccggcgagctgggcagcatcggcgaccacgagcgcgccatcgacttcagcccgtacctggagccgctgggcgcgccgcaggccccggcgcccgccacggccacggacaccttcgaggcggctccgcccgcgcccgcccccgcgcccgcctcctccgggcagcaccacgacttcctctccgacctcttctccgacgactacgggggcaagaactgcaagaagccggccgagtacggctacgtgagcctggggcgcctgggggccgccaagggcgcgctgcaccccggctgcttcgcgcccctgcacccaccgcccccgccgccgccgccgcccgccgagctcaaggcggagccgggcttcgagcccgcggactgcaagcggaaggaggaggccggggcgccgggcggcggcgcaggcatggcggcgggcttcccgtacgcgctgcgcgcttacctcggctaccaggcggtgccgagcggcagcagcgggagcctctccacgtcctcctcgtccagcccgcccggcacgccgagccccgctgacgccaaggcgcccccgaccgcctgctacgcgggggccgcgccggcgccctcgcaggtcaagagcaaggccaagaagaccgtggacaagcacagcgacgagtacaagatccggcgcgagcgcaacaacatcgccgtgcgcaagagccgcgacaaggccaagatgcgcaacctggagacgcagcacaaggtcctggagctcacggccgagaacgagcggctgcagaagaaggtggagcagctgtcgcgcgagctcagcaccctgcggaacttgttcaagcagctgcccgagcccctgctcgcctcctccggccactgctagcgcggcgccggcaaaactttggcactggggcacttggcagcgcggggagcccgtcggtaattttaatattttattatatatatatatctatatttttgtccaaaccaaccgcacatgcagatggggctcccgcccgtggtgttatttaaagaagaaacgtctatgtgtacagatgaatgataaactctctgcttctccctctgcccctctccaggcgccggcgggcgggccggtttcgaagttgatgcaatcggtttaaacatggctgaacgcgtgtgtacacgggactgacgcaacccacgtgtaactgtcagccgggccctgagtaatcgcttaaagatgttcctacgggcttgttgctgttgatgttttgttttgttttgttttttggtctttttttgtattataaaaaataatctatttctatgagaaaagaggcgtctgtatattttgggaatcttttccgtttcaagcattaagaacacttttaataaacttttttttgagaatggttaaaaagccttttgggggcagtaattggc

SEQ ID NO: 328969 - DNA, 2002 bp, Homo sapiens
atcccggggcggccgggcgggggtgggcagggggcgtgaggccgcccctgcgtcccgggggccccccgaaaacgcgctccgggtgcccggtccctccgctgcgccctgccgccgtcctcccgggggtctcgggcggccgcggccgtgtccttcgcgtcccggcggcgcggcgggaggggccggcgtgacgcagcggttgctacgggccgcccttataaataaccgggctcaggagaaactttagcgagtcagagccgcgcacgggactgggaaggggacccacccgagggtccagccaccagccccctcactaatagcggccaccccggcagcggcggcagcagcagcagcgacgcagcggcgacagctcagagcagggaggccgcgccacctgcgggccggccggagcgggcagccccaggccccctccccgggcacccgcgttcatgcaacgcctggtggcctgggacccagcatgtctccccctgccgccgccgccgcctgcctttaaatccatggaagtggccaacttctactacgaggcggactgcttggctgctgcgtacggcggcaaggcggcccccgcggcgccccccgcggccagacccgggccgcgcccccccgccggcgagctgggcagcatcggcgaccacgagcgcgccatcgacttcagcccgtacctggagccgctgggcgcgccgcaggccccggcgcccgccacggccacggacaccttcgaggcggctccgcccgcgcccgcccccgcgcccgcctcctccgggcagcaccacgacttcctctccgacctcttctccgacgactacgggggcaagaactgcaagaagccggccgagtacggctacgtgagcctggggcgcctgggggccgccaagggcgcgctgcaccccggctgcttcgcgcccctgcacccaccgcccccgccgccgccgccgcccgccgagctcaaggcggagccgggcttcgagcccgcggactgcaagcggaaggaggaggccggggcgccgggcggcggcgcaggcatggcggcgggcttcccgtacgcgctgcgcgcttacctcggctaccaggcggtgccgagcggcagcagcgggagcctctccacgtcctcctcgtccagcccgcccggcacgccgagccccgctgacgccaaggcgcccccgaccgcctgctacgcgggggccgcgccggcgccctcgcaggtcaagagcaaggccaagaagaccgtggacaagcacagcgacgagtacaagatccggcgcgagcgcaacaacatcgccgtgcgcaagagccgcgacaaggccaagatgcgcaacctggagacgcagcacaaggtcctggagctcacggccgagaacgagcggctgcagaagaaggtggagcagctgtcgcgcgagctcagcaccctgcggaacttgttcaagcagctgcccgagcccctgctcgcctcctccggccactgctagcgcggcccccgcgcgcgtccccctgccggccggggctgagactccggggagcgcccgcgcccgcgccctcgcccccgcccccggcggcgccggcaaaactttggcactggggcacttggcagcgcggggagcccgtcggtaattttaatattttattatatatatatatctatatttttgtccaaaccaaccgcacatgcagatggggctcccgcccgtggtgttatttaaagaagaaacgtctatgtgtacagatgaatgataaactctctgcttctccctctgcccctctccaggcgccggcgggcgggccggtttcgaagttgatgcaatcggtttaaacatggctgaacgcgtgtgtacacgggactgacgcaacccacgtgtaactgtcagccgggccctgagtaatcgcttaaagatgttcctacgggcttgttgctgttgatgttttgttttgttttgttttttggtctttttttgtattataaaaaataatctatttctatgagaaaaga

SEQ ID NO: 328970 - DNA, 2333 bp, Homo sapiens
  misc_feature (2228)..(2228): n is a, c, g, or t
atcccggggcggccgggcgggggtgggcagggggcgtgaggccgcccctgcgtcccgggggccccccgaaaacgcgctccgggtgcccggtccctccgctgcgccctgccgccgtcctcccgggggtctcgggcggccgcggccgtgtccttcgcgtcccggcggcgcggcgggaggggccggcgtgacgcagcggttgctacgggccgcccttataaataaccgggctcaggagaaactttagcgagtcagagccgcgcacgggactgggaaggggacccacccgagggtccagccaccagccccctcactaatagcggccaccccggcagcggcggcagcagcagcagcgacgcagcggcgacagctcagagcagggaggccgcgccacctgcgggccggccggagcgggcagccccaggccccctccccgggcacccgcgttcatgcaacgcctggtggcctgggacccagcatgtctccccctgccgccgccgccgcctgcctttaaatccatggaagtggccaacttctactacgaggcggactgcttggctgctgcgtacggcggcaaggcggcccccgcggcgccccccgcggccagacccgggccgcgcccccccgccggcgagctgggcagcatcggcgaccacgagcgcgccatcgacttcagcccgtacctggagccgctgggcgcgccgcaggccccggcgcccgccacggccacggacaccttcgaggcggctccgcccgcgcccgcccccgcgcccgcctcctccgggcagcaccacgacttcctctccgacctcttctccgacgactacgggggcaagaactgcaagaagccggccgagtacggctacgtgagcctggggcgcctgggggccgccaagggcgcgctgcaccccggctgcttcgcgcccctgcacccaccgcccccgccgccgccgccgcccgccgagctcaaggcggagccgggcttcgagcccgcggactgcaagcggaaggaggaggccggggcgccgggcggcggcgcaggcatggcggcgggcttcccgtacgcgctgcgcgcttacctcggctaccaggcggtgccgagcggcagcagcgggagcctctccacgtcctcctcgtccagcccgcccggcacgccgagccccgctgacgccaaggcgcccccgaccgcctgctacgcgggggccgcgccggcgccctcgcaggtcaagagcaaggccaagaagaccgtggacaagcacagcgacgagtacaagatccggcgcgagcgcaacaacatcgccgtgcgcaagagccgcgacaaggccaagatgcgcaacctggagacgcagcacaaggtcctggagctcacggccgagaacgagcggctgcagaagaaggtggagcagctgtcgcgcgagctcagcaccctgcggaacttgttcaagcagctgcccgagcccctgctcgcctcctccggccactgctagcgcggcccccgcgcgcgtccccctgccggccggggctgagactccggggagcgcccgcgcccgcgccctcgcccccgcccccggcggcgccggcaaaactttggcactggggcacttggcagcgcggggagcccgtcggtaattttaatattttattatatatatatatctatatttttgtccaaaccaaccgcacatgcagatggggctcccgcccgtggtgttatttaaagaagaaacgtctatgtgtacagatgaatgataaactctctgcttctccctctgcccctctccaggcgccggcgggcgggccggtttcgaagttgatgcaatcggtttaaacatggctgaacgcgtgtgtacacgggactgacgcaacccacgtgtaactgtcagccgggccctgagtaatcgcttaaagatgttcctacgggcttgttgctgttgatgttttgttttgttttgttttttggtctttttttgtattataaaaaataatctatttctatgagaaaagaggcgtctgtatattttgggaatcttttccgtttcaagcattaagaacacttttaataaacttttttttgagaatcaaaaaaaaaaacaataacacacacaccacgttgtgggcgcacggccacgggaccgcgcaaaaaggcttcaggaagaccattcgtggggccgcgcgggccccaatggtaggcacccggggcccgaggtgccctgagaaacccgggcgcgacncggccggcgtcgccaccaataaaacgcccggggaccgagcgcgtcgaccaccccacggcgggcccgcagcacccgggccacacaccggacccagagcggaatatc

SEQ ID NO: 328971 - DNA, 2181 bp, Homo sapiens
atcccggggcggccgggcgggggtgggcagggggcgtgaggccgcccctgcgtcccgggggccccccgaaaacgcgctccgggtgcccggtccctccgctgcgccctgccgccgtcctcccgggggtctcgggcggccgcggccgtgtccttcgcgtcccggcggcgcggcgggaggggccggcgtgacgcagcggttgctacgggccgcccttataaataaccgggctcaggagaaactttagcgagtcagagccgcgcacgggactgggaaggggacccacccgagggtccagccaccagccccctcactaatagcggccaccccggcagcggcggcagcagcagcagcgacgcagcggcgacagctcagagcagggaggccgcgccacctgcgggccggccggagcgggcagccccaggccccctccccgggcacccgcgttcatgcaacgcctggtggcctgggacccagcatgtctccccctgccgccgccgccgcctgcctttaaatccatggaagtggccaacttctactacgaggcggactgcttggctgctgcgtacggcggcaaggcggcccccgcggcgccccccgcggccagacccgggccgcgcccccccgccggcgagctgggcagcatcggcgaccacgagcgcgccatcgacttcagcccgtacctggagccgctgggcgcgccgcaggccccggcgcccgccacggccacggacaccttcgaggcggctccgcccgcgcccgcccccgcgcccgcctcctccgggcagcaccacgacttcctctccgacctcttctccgacgactacgggggcaagaactgcaagaagccggccgagtacggctacgtgagcctggggcgcctgggggccgccaagggcgcgctgcaccccggctgcttcgcgcccctgcacccaccgcccccgccgccgccgccgcccgccgagctcaaggcggagccgggcttcgagcccgcggactgcaagcggaaggaggaggccggggcgccgggcggcggcgcaggcatggcggcgggcttcccgtacgcgctgcgcgcttacctcggctaccaggcggtgccgagcggcagcagcgggagcctctccacgtcctcctcgtccagcccgcccggcacgccgagccccgctgacgccaaggcgcccccgaccgcctgctacgcgggggccgcgccggcgccctcgcaggtcaagagcaaggccaagaagaccgtggacaagcacagcgacgagtacaagatccggcgcgagcgcaacaacatcgccgtgcgcaagagccgcgacaaggccaagatgcgcaacctggagacgcagcacaaggtcctggagctcacggccgagaacgagcggctgcagaagaaggtggagcagctgtcgcgcgagctcagcaccctgcggaacttgttcaagcagctgcccgagcccctgctcgcctcctccggccactgctagcgcggcccccgcgcgcgtccccctgccggccggggctgagactccggggagcgcccgcgcccgcgccctcgcccccgcccccggcggcgccggcaaaactttggcactggggcacttggcagcgcggggagcccgtcggtaattttaatattttattatatatatatatctatatttttgtccaaaccaaccgcacatgcagatggggctcccgcccgtggtgttatttaaagaagaaacgtctatgtgtacagatgaatgataaactctctgcttctccctctgcccctctccaggcgccggcgggcgggccggtttcgaagttgatgcaatcggtttaaacatggctgaacgcgtgtgtacacgggactgacgcaacccacgtgtaactgtcagccgggccctgagtaatcgcttaaagatgttcctacgggcttgttgctgttgatgttttgttttgttttgttttttggtctttttttgtattataaaaaataatctatttctatgagaaaagaaaacaacacaaaaaacaacacaaacaaaaaaacaaaaaaaaaacaaaaaaaacaaaaaacaagagagggggcaaaccacaaaaaaaaaccccccacaaggggcgccccacccaacaaacaaacaacaacaaaaaaaactgaaaaaagggagagccaaaaaagaaaggcggggttgccgc

SEQ ID NO: 328972 - DNA, 1981 bp, Homo sapiens
cgtgctgccgcgggtcacgtgctgcggaggcttggggaggggcggcgaggcggggtttatagcccgggcgcccgcgggccccacgctttgaccgggtcgtggcagccggagtcgtcttcgggacgcgcctgctcttcgcctttcgctgcagtccgtcgatttctttctccaggaagaaaaatggcatccgttgcagttgatccacaaccgagtgtggtgactcgggtggtcaacctgcccttggtgagctccacgtatgacctcatgtcctcagcctatctcagtacaaaggaccagtatccctacctgaagtctgtgtgtgagatggcagagaacggtgtgaagaccatcacctccgtggccatgaccagtgctctgcccatcatccagaagctagagccgcaaattgcagttgccaatacctatgcctgtaaggggctagacaggattgaggagagactgcctattctgaatcagccatcaactcagattgttgccaatgccaaaggcgctgtgactggggcaaaagatgctgtgacgactactgtgactggggccaaggattctgtggccagcacgatcacaggggtgatggacaagaccaaaggggcagtgactggcagtgtggagaagaccaagtctgtggtcagtggcagcattaacacagtcttggggagtcggatgatgcagctcgtgagcagtggcgtagaaaatgcactcaccaaatcagagctgttggtagaacagtacctccctctcactgaggaagaactagaaaaagaagcaaaaaaagttgaaggatttgatctggttcagaagccaagttattatgttagactgggatccctgtctaccaagcttcactcccgtgcctaccagcaggctctcagcagggttaaagaagctaagcaaaaaagccaacagaccatttctcagctccattctactgttcacctgattgaatttgccaggaagaatgtgtatagtgccaatcagaaaattcaggatgctcaggataagctctacctctcatgggtagagtggaaaaggagcattggatatgatgatactgatgagtcccactgtgctgagcacattgagtcacgtactcttgcaattgcccgcaacctgactcagcagctccagaccacgtgccacaccctcctgtccaacatccaaggtgtaccacagaacatccaagatcaagccaagcacatgggggtgatggcaggcgacatctactcagtgttccgcaatgctgcctcctttaaagaagtgtctgacagcctcctcacttctagcaaggggcagctgcagaaaatgaaggaatctttagatgacgtgatggattatcttgttaacaacacgcccctcaactggctggtaggtcccttttatcctcagctgactgagtctcagaatgctcaggaccaaggtgcagagatggacaagagcagccaggagacccagcgatctgagcataaaactcattaaacctgcccctatcactagtgcatgctgtggccagacagatgacaccttttgttatgttgaaattaacttgctaggcaaccctaaattgggaagcaagtagctagtataaaggccctcaattgtagttgtttccagctgaattaagagctttaaagtttctggcattagcagatgatttctgttcacctggtaagaaaagaatgataggcttgtcagagcctatagccagaactcagaaaaaattcaaatgcacttatgttctcattctatggccattgtgttgcctctgttactgtttgtattgaataaaaacatcttcatgtgggctggggtagaaactggtgtctgctctggtgtgatctgaaaaggcgtcttcactgctttatctcatgatgcttgcttgtaaaacttgattttagtttttcatttctcaaataggaatactacctttgaattcaataaaattcactgcaggatagaccagtta

SEQ ID NO: 328973 - DNA, 750 bp, Homo sapiens
  misc_feature (732)..(732): n is a, c, g, or t
  misc_feature (736)..(736): n is a, c, g, or t
cgtgctgccgcgggtcacgtgctgcggaggcttggggaggggcggcgaggcggggtttatagcccgggcgcccgcgggccccacgctttgaccgggtcgtggcagccggagtcgtcttcgggacgcgcctgctcttcgcctttcgctgcagtccgtcgatttctttctccaggaagaaaaatggcatccgttgcagttgatccacaaccgagtgtggtgactcgggtggtcaacctgcccttggtgagctccacgtatgacctcatgtcctcagcctatctcagtacaaaggaccagtatccctacctgaagtctgtgtgtgagatggcagagaacggtgtgaagaccatcacctccgtggccatgaccagtgctctgcccatcatccagaagctagagccgcaaattgcagttgccaatacctatgcctgtaaggggctagacaggattgaggagagactgcctattctgaatcagccatcaactcaggcaaatacttgttttcccaacctggatctggatgtatgtttgaaaaataatggccacttccttacttcctgaactgttgtcaagttgtatctacgaagcagagaagaactagcctcctttggattagaaaacttttagtgtgttgtctatcagtttgtgtctttgctcctataaatgaaattgctgtctcaagtaactgattgtcttgtggtattaaataaatgcagacgtgatatatacaanacanaaaacaaaaaacct

SEQ ID NO: 328974 - DNA, 887 bp, Homo sapiens
cgtgctgccgcgggtcacgtgctgcggaggcttggggaggggcggcgaggcggggtttatagcccgggcgcccgcgggccccacgctttgaccgggtcgtggcagccggagtcgtcttcgggacgcgcctgctcttcgcctttcgctgcagtccgtcgatttctttctccaggaagaaaaatggcatccgttgcagttgatccacaaccgagtgtggtgactcgggtggtcaacctgcccttggtgagctccacgtatgacctcatgtcctcagcctatctcagtacaaaggaccagtatccctacctgaagtctgtgtgtgagatggcagagaacggtgtgaagaccatcacctccgtggccatgaccagtgctctgcccatcatccagaagctagagccgcaaagtgagttctgatttttcaagatgcaagtcaagggactggtcagtggcgagcccctgagctcacagcagtaacatctggaactcctcagcccttcctggggcatacactgcctttacctagaaactttcaggtgaccctcattaccgtaagaggactgtttcttttcttttctttcctttttttttttttttgagatggagtctcactctatcactcaggctggagttcagtggcgcagtcttggctcactgcaacctctgcctgctgggttcaagtgattctcctgcctcagcctcccgagtagctgggactacaggctcccaccaccatgcccagctaatttttgtatttttagtagagacgcggtttcacaatattggccaggcttaactcctgactttgtgatccacccacctctgcctcccaaagtgctgggattacaggcgtgagccaccgcgcctgtccacagaaggcctgtttc

SEQ ID NO: 328975 - DNA, 880 bp, Homo sapiens
taatctgttgtttgctaagaaacattacctagcttatcgaaattgtatataaaataaaatttgatagagtttcttgtccctaaaggctttcctgtgcagggaagaggtagggttttgtgatggctgtttcaaccataaaaagaccttttgtttcctcagttgctaaacatttgcctagacacttgcttatggaaaagtggggtattattgtttttaagaaagtaatagattaatagttgaataacaaaaaatgctttatatctggtattttttaaaaaagcttcattgactaggttccaccactagttagtttcctttttaaaaggtttccttagtgcttttatagtatgagggaattgcaggaataagaccacaaacatcttttcaaaaagcacagctatggacaaagcaaggttcacctacatgcactaaagtctccatgagctcagatggacctgacaactcacttcatcggtgtttgtttcaatatccaagattcttcttttacaggtgtttgatttcaccaccatagacttgacatctgagactgatgaaattccagatattatagctttggaagaggagaacggatcaaataattcacatgctaatggccctgtcctctcagggcaagatgttgaataactaacaacaataaaataccccttttggttgaatacgcaatttgtattacattaaacttcctgtttttattcctgtgactttgaagagtgttaatctattttttggctacattggtcttaattgcaatgacactctgatctaaacttttgtaagagatcctagttctgtgtcatataatcatttaatataattaaagtttaattgctgaaatacttataatgaaaattgggctgta

SEQ ID NO: 328976 - DNA, 826 bp, Homo sapiens
taatctgttgtttgctaagaaacattacctagcttatcgaaattgtatataaaataaaatttgatagagtttcttgtccctaaaggctttcctgtgcagggaagaggtagggttttgtgatggctgtttcaaccataaaaagaccttttgtttcctcagttgctaaacatttgcctagacacttgcttatggaaaagtggggtattattgtttttaagaaagtaatagattaatagttgaataacaaaaaatgctttatatctggtattttttaaaaaagcttcattgactaggttccaccactagttagtttcctttttaaaaggtttccttagtgcttttatagtatgagggaattgcaggaataagaccacaaacatcttttcagagctcagatggacctgacaactcacttcatcggtgtttgtttcaatatccaagattcttcttttacaggtgtttgatttcaccaccatagacttgacatctgagactgatgaaattccagatattatagctttggaagaggagaacggatcaaataattcacatgctaatggccctgtcctctcagggcaagatgttgaataactaacaacaataaaataccccttttggttgaatacgcaatttgtattacattaaacttcctgtttttattcctgtgactttgaagagtgttaatctattttttggctacattggtcttaattgcaatgacactctgatctaaacttttgtaagagatcctagttctgtgtcatataatcatttaatataattaaagtttaattgctgaaatacttataatgaaaattgggctgta

SEQ ID NO: 328977 - DNA, 895 bp, Homo sapiens
cattctggttgaacagaacgtttgtcagaacaattatggctttcttcctgaagtgtgcttggccggaaaagaaagcaggagacctcaagggctaataatctagcagtggctgacactgaaatgatgcatggaagaaaggctaccaagcaagggaggtggagagcagtttgaagcaactggggtaaagtccggagaagaagctggtgagaaagagacaggagccagatgctgaatgacggtaaatcgaatcctggagggaaccaaacaaaaccctgaaaacctccaggaatctcaggttggccaaatccttggtaatgtcctgccactccccaggactgccacactgtacacaccctatctaatggcaacctactgcaggggccaaggaaaaacgtctcctttgtcctctggaggttcactgaaaaatcaactggcggaaagcaaattaacaggtcaaaagatatacatgtattattataaaaagacgtaaatgtattattgggcatgtgggggaaccacagagtaattactccacctctcagtgggctcagaagcttatatacccctcctgaggttacagaaagtttgggggctcagagaatggtggtaaatcaggatttagtggcaagacagaaatggaaacttggctagcaaaagtcatttcattatgtagatgggggtccccaaactttgggccatttacactgtggccatttacattcctgttaggaatagggccgcacagcaagaggtgagtggcgggtgagtgagcaataccgcctgagctctgcctcttgtcaggtcagcagctggtattaggttctcttaggagcaagaacgccgctgtgaactgcacatgcaagggatctaggttgcggctccttatgagaatcta

SEQ ID NO: 328978 - DNA, 310 bp, Homo sapiens
ccagtacggtatggtgctgggccagtcgaatgtgtatagtgccaatcagaaaattcaggatgctcaggataagctctacctctcatgggtagagtggaaaaggagcattggatatgatgatactgatgagtcccactgtgctgagcacattgagtcacgtactcttgcaattgcccgcaacctgactcagcagctccagaccacgtgccacatccgtactggcccgcatgtgtctctgacttgatggcactgcagtggcttcagagagggtcgcaaataccatgccacagcgcccggggtttgcctgaag

SEQ ID NO: 328979 - DNA, 2009 bp, Homo sapiens
  misc_feature (1982)..(1982): n is a, c, g, or t
  misc_feature (2000)..(2000): n is a, c, g, or t
cgtgctgccgcgggtcacgtgctgcggaggcttggggaggggcggcgaggcggggtttatagcccgggcgcccgcgggccccacgctttgaccgggtcgtggcagccggagtcgtcttcgggacgcgcctgctcttcgcctttcgctgcagtccgtcgatttctttctccaggaagaaaaatggcatccgttgcagttgatccacaaccgagtgtggtgactcgggtggtcaacctgcccttggtgagctccacgtatgacctcatgtcctcagcctatctcagtacaaaggaccagtatccctacctgaagtctgtgtgtgagatggcagagaacggtgtgaagaccatcacctccgtggccatgaccagtgctctgcccatcatccagaagctagagccgcaaattgcagttgccaatacctatgcctgtaaggggctagacaggattgaggagagactgcctattctgaatcagccatcaactcagattgttgccaatgccaaaggcgctgtgactggggcaaaagatgctgtgacgactactgtgactggggccaaggattctgtggccagcacgatcacaggggtgatggacaagaccaaaggggcagtgactggcagtgtggagaagaccaagtctgtggtcagtggcagcattaacacagtcttggggagtcggatgatgcagctcgtgagcagtggcgtagaaaatgcactcaccaaatcagagctgttggtagaacagtacctccctctcactgaggaagaactagaaaaagaagcaaaaaaagttgaaggatttgatctggttcagaagccaagttattatgttagactgggatccctgtctaccaagcttcactcccgtgcctaccagcaggctctcagcagggttaaagaagctaagcaaaaaagccaacagaccatttctcagctccattctactgttcacctgattgaatttgccaggaagaatgtgtatagtgccaatcagaaaattcaggatgctcaggataagctctacctctcatgggtagagtggaaaaggagcattggatatgatgatactgatgagtcccactgtgctgagcacattgagtcacgtactcttgcaattgcccgcaacctgactcagcagctccagaccacgtgccacaccctcctgtccaacatccaaggtgtaccacagaacatccaagatcaagccaagcacatgggggtgatggcaggcgacatctactcagtgttccgcaatgctgcctcctttaaagaagtgtctgacagcctcctcacttctagcaaggggcagctgcagaaaatgaaggaatctttagatgacgtgatggattatcttgttaacaacacgcccctcaactggctggtaggtcccttttatcctcagctgactgagtctcagaatgctcaggaccaaggtgcagagatggacaagagcagccaggagacccagcgatctgagcataaaactcattaaacctgcccctatcactagtgcatgctgtggccagacagatgacaccttttgttatgttgaaattaacttgctaggcaaccctaaattgggaagcaagtagctagtataaaggccctcaattgtagttgtttccagctgaattaagagctttaaagtttctggcattagcagatgatttctgttcacctggtaagaaaagaatgataggcttgtcagagcctatagccagaactcagaaaaaattcaaatgcacttatgttctcattctatggccattgtgttgcctctgttactgtttgtattgaataaaaacatcttcatgtgggctggggtagaaactggtgtctgctctggtgtgatctgaaaaggcgtcttcactgctttatctcatgatgcttgcttgtaaaacttgattttagtttttcatttctcaaataggaatactacctttgaattcaataaaattcactgcaggatagaccagttanaaaaaagaaaaaaaaaanaaaaaaaaa

SEQ ID NO: 328980 - DNA, 2030 bp, Homo sapiens
tacgagggctggtgttaattcggccgagggtgagtgcgcgcccagtgggtgccccagcgaaccggtcccgggcccccagcggcgcccagttggggtggggggctccccggggccttgggaccgctgctctgctccccgcggggctcaaaggtggacgggacgcgggggtgatggtccgagaccccccgctcgcctcgcggcttccagatttctttctccaggaagaaaaatggcatccgttgcagttgatccacaaccgagtgtggtgactcgggtggtcaacctgcccttggtgagctccacgtatgacctcatgtcctcagcctatctcagtacaaaggaccagtatccctacctgaagtctgtgtgtgagatggcagagaacggtgtgaagaccatcacctccgtggccatgaccagtgctctgcccatcatccagaagctagagccgcaaattgcagttgccaatacctatgcctgtaaggggctagacaggattgaggagagactgcctattctgaatcagccatcaactcagattgttgccaatgccaaaggcgctgtgactggggcaaaagatgctgtgacgactactgtgactggggccaaggattctgtggccagcacgatcacaggggtgatggacaagaccaaaggggcagtgactggcagtgtggagaagaccaagtctgtggtcagtggcagcattaacacagtcttggggagtcggatgatgcagctcgtgagcagtggcgtagaaaatgcactcaccaaatcagagctgttggtagaacagtacctccctctcactgaggaagaactagaaaaagaagcaaaaaaagttgaaggatttgatctggttcagaagccaagttattatgttagactgggatccctgtctaccaagcttcactcccgtgcctaccagcaggctctcagcagggttaaagaagctaagcaaaaaagccaacagaccatttctcagctccattctactgttcacctgattgaatttgccaggaagaatgtgtatagtgccaatcagaaaattcaggatgctcaggataagctctacctctcatgggtagagtggaaaaggagcattggatatgatgatactgatgagtcccactgtgctgagcacattgagtcacgtactcttgcaattgcccgcaacctgactcagcagctccagaccacgtgccacaccctcctgtccaacatccaaggtgtaccacagaacatccaagatcaagccaagcacatgggggtgatggcaggcgacatctactcagtgttccgcaatgctgcctcctttaaagaagtgtctgacagcctcctcacttctagcaaggggcagctgcagaaaatgaaggaatctttagatgacgtgatggattatcttgttaacaacacgcccctcaactggctggtaggtcccttttatcctcagctgactgagtctcagaatgctcaggaccaaggtgcagagatggacaagagcagccaggagacccagcgatctgagcataaaactcattaaacctgcccctatcactagtgcatgctgtggccagacagatgacaccttttgttatgttgaaattaacttgctaggcaaccctaaattgggaagcaagtagctagtataaaggccctcaattgtagttgtttccagctgaattaagagctttaaagtttctggcattagcagatgatttctgttcacctggtaagaaaagaatgataggcttgtcagagcctatagccagaactcagaaaaaattcaaatgcacttatgttctcattctatggccattgtgttgcctctgttactgtttgtattgaataaaaacatcttcatgtgggctggggtagaaactggtgtctgctctggtgtgatctgaaaaggcgtcttcactgctttatctcatgatgcttgcttgtaaaacttgattttagtttttcatttctcaaataggaatactacctttgaattcaataaaattcactgcaggatagaccagtta

SEQ ID NO: 328981 - DNA, 2061 bp, Homo sapiens
cattctggttgaacagaacgtttgtcagaacaattatggctttcttcctgaagtgtgcttggccggaaaagaaagcaggagacctcaagggctaataatctagcagtggctgacactgaaatgatgcatggaagaaaggctaccaagcaagggaggtggagagcagtttgaagcaactggggtaaagtccggagaagaagctggtgagaaagagacaggagccagatgctgaatgacgatttctttctccaggaagaaaaatggcatccgttgcagttgatccacaaccgagtgtggtgactcgggtggtcaacctgcccttggtgagctccacgtatgacctcatgtcctcagcctatctcagtacaaaggaccagtatccctacctgaagtctgtgtgtgagatggcagagaacggtgtgaagaccatcacctccgtggccatgaccagtgctctgcccatcatccagaagctagagccgcaaattgcagttgccaatacctatgcctgtaaggggctagacaggattgaggagagactgcctattctgaatcagccatcaactcagattgttgccaatgccaaaggcgctgtgactggggcaaaagatgctgtgacgactactgtgactggggccaaggattctgtggccagcacgatcacaggggtgatggacaagaccaaaggggcagtgactggcagtgtggagaagaccaagtctgtggtcagtggcagcattaacacagtcttggggagtcggatgatgcagctcgtgagcagtggcgtagaaaatgcactcaccaaatcagagctgttggtagaacagtacctccctctcactgaggaagaactagaaaaagaagcaaaaaaagttgaaggatttgatctggttcagaagccaagttattatgttagactgggatccctgtctaccaagcttcactcccgtgcctaccagcaggctctcagcagggttaaagaagctaagcaaaaaagccaacagaccatttctcagctccattctactgttcacctgattgaatttgccaggaagaatgtgtatagtgccaatcagaaaattcaggatgctcaggataagctctacctctcatgggtagagtggaaaaggagcattggatatgatgatactgatgagtcccactgtgctgagcacattgagtcacgtactcttgcaattgcccgcaacctgactcagcagctccagaccacgtgccacaccctcctgtccaacatccaaggtgtaccacagaacatccaagatcaagccaagcacatgggggtgatggcaggcgacatctactcagtgttccgcaatgctgcctcctttaaagaagtgtctgacagcctcctcacttctagcaaggggcagctgcagaaaatgaaggaatctttagatgacgtgatggattatcttgttaacaacacgcccctcaactggctggtaggtcccttttatcctcagctgactgagtctcagaatgctcaggaccaaggtgcagagatggacaagagcagccaggagacccagcgatctgagcataaaactcattaaacctgcccctatcactagtgcatgctgtggccagacagatgacaccttttgttatgttgaaattaacttgctaggcaaccctaaattgggaagcaagtagctagtataaaggccctcaattgtagttgtttccagctgaattaagagctttaaagtttctggcattagcagatgatttctgttcacctggtaagaaaagaatgataggcttgtcagagcctatagccagaactcagaaaaaattcaaatgcacttatgttctcattctatggccattgtgttgcctctgttactgtttgtattgaataaaaacatcttcatgtgggctggggtagaaactggtgtctgctctggtgtgatctgaaaaggcgtcttcactgctttatctcatgatgcttgcttgtaaaacttgattttagtttttcatttctcaaataggaatactacctttgaattcaataaaattcactgcaggatagaccagtta

SEQ ID NO: 328982 - DNA, 1753 bp, Homo sapiens
cgtgctgccgcgggtcacgtgctgcggaggcttggggaggggcggcgaggcggggtttatagcccgggcgcccgcgggccccacgctttgaccgggtcgtggcagccggagtcgtcttcgggacgcgcctgctcttcgcctttcgctgcagtccgtcgatttctttctccaggaagaaaaatggcatccgttgcagttgatccacaaccgagtgtggtgactcgggtggtcaacctgcccttggtgagctccacgtatgacctcatgtcctcagcctatctcagtacaaaggaccagtatccctacctgaagtctgtgtgtgagatggcagagaacggtgtgaagaccatcacctccgtggccatgaccagtgctctgcccatcatccagaagctagagccgcaaattgcagttgccaatacctatgcctgtaaggggctagacaggattgaggagagactgcctattctgaatcagccatcaactcagattgttgccaatgccaaaggcgctgtgactggggcaaaagatgctgtgacgactactgtgactggggccaaggattctgtggccagcacgatcacaggggtgatggacaagaccaaaggggcagtgactggcagtgtggagaagaccaagtctgtggtcagtggcagcattaacacagtcttggggagtcggatgatgcagctcgtgagcagtggcgtagaaaatgcactcaccaaatcagagctgttggtagaacagtacctccctctcactgaggaagaactagaaaaagaagcaaaaaaagttgaaggatttgatctggttcagaagccaagttattatgttagactgggatccctgtctaccaagcttcactcccgtgcctaccagcaggctctcagcagggttaaagaagctaagcaaaaaagccaacagaccatttctcagctccattctactgttcacctgattgaatttgccaggaagaatgtgtatagtgccaatcagaaaattcaggatgctcaggataagctctacctctcatgggtagagtggaaaaggagcattggatatgatgatactgatgagtcccactgtgctgagcacattgagtcacgtactcttgcaattgcccgcaacctgactcagcagctccagaccacgtgccacaccctcctgtccaacatccaaggtgtaccacagaacatccaagatcaagccaagcacatgggggtgatggcaggcgacatctactcagtgttccgcaatgctgcctcctttaaagaagtgtctgacagcctcctcacttctagcaaggggcagctgcagaaaatgaaggaatctttagatgacgtgatggattatcttgttaacaacacgcccctcaactggctggtgtttgatttcaccaccatagacttgacatctgagactgatgaaattccagatattatagctttggaagaggagaacggatcaaataattcacatgctaatggccctgtcctctcagggcaagatgttgaataactaacaacaataaaataccccttttggttgaatacgcaatttgtattacattaaacttcctgtttttattcctgtgactttgaagagtgttaatctattttttggctacattggtcttaattgcaatgacactctgatctaaacttttgtaagagatcctagttctgtgtcatataatcatttaatataattaaagtttaattgctgaaatacttataatgaaaattgggctgta

SEQ ID NO: 328983 - DNA, 838 bp, Homo sapiens
  misc_feature (820)..(820): n is a, c, g, or t
  misc_feature (824)..(824): n is a, c, g, or t
cgtgctgccgcgggtcacgtgctgcggaggcttggggaggggcggcgaggcggggtttatagcccgggcgcccgcgggccccacgctttgaccgggtcgtggcagccggagtcgtcttcgggacgcgcctgctcttcgcctttcgctgcagtccgtcgatttctttctccaggaagaaaaatggcatccgttgcagttgatccacaaccgagtgtggtgactcgggtggtcaacctgcccttggtgagctccacgtatgacctcatgtcctcagcctatctcagtacaaaggaccagtatccctacctgaagtctgtgtgtgagatggcagagaacggtgtgaagaccatcacctccgtggccatgaccagtgctctgcccatcatccagaagctagagccgcaaattgcagttgccaatacctatgcctgtaaggggctagacaggattgaggagagactgcctattctgaatcagccatcaactcaggtgagcttgggacaaaagtgctgagacttgacacttcacatgttttcatcttctatctgttaaaacaagctgtacatatcacaaacaggcaaatacttgttttcccaacctggatctggatgtatgtttgaaaaataatggccacttccttacttcctgaactgttgtcaagttgtatctacgaagcagagaagaactagcctcctttggattagaaaacttttagtgtgttgtctatcagtttgtgtctttgctcctataaatgaaattgctgtctcaagtaactgattgtcttgtggtattaaataaatgcagacgtgatatatacaanacanaaaacaaaaaacct

SEQ ID NO: 328984 - DNA, 635 bp, Homo sapiens
  misc_feature (403)..(403): n is a, c, g, or t
  misc_feature (437)..(437): n is a, c, g, or t
  misc_feature (439)..(439): n is a, c, g, or t
  misc_feature (450)..(450): n is a, c, g, or t
  misc_feature (453)..(453): n is a, c, g, or t
  misc_feature (456)..(456): n is a, c, g, or t
  misc_feature (460)..(460): n is a, c, g, or t
  misc_feature (462)..(462): n is a, c, g, or t
  misc_feature (472)..(472): n is a, c, g, or t
  misc_feature (478)..(478): n is a, c, g, or t
  misc_feature (497)..(497): n is a, c, g, or t
  misc_feature (503)..(503): n is a, c, g, or t
  misc_feature (526)..(526): n is a, c, g, or t
  misc_feature (538)..(538): n is a, c, g, or t
  misc_feature (556)..(556): n is a, c, g, or t
  misc_feature (564)..(564): n is a, c, g, or t
  misc_feature (567)..(567): n is a, c, g, or t
  misc_feature (608)..(608): n is a, c, g, or t
cgtgctgccgcgggtcacgtgctgcggaggcttggggaggggcggcgaggcggggtttatagcccgggcgcccgcgggccccacgctttgaccgggtcgtggcagccggagtcgtcttcgggacgcgcctgctcttcgcctttcgctgcagtccgtcgatttctttctccaggaagaaaaatggcatccgttgcagttgatccacaaccgagtgtggtgactcgggtggtcaacctgcccttggtgagctccacgtatgacctcatgtcctcagcctatctcagtacaaaggaccagtatccctacctgaagtctgtgtgtgagatggcagagaacggtgtgaagaccatcacctccgtggccatgaccagtgctctgcccatcatctcagtatagtctcagnagtccgtctaaaattgtcagattgtctcaaatancncttaatgtccntgntgnaggngngactgagtancagagnatgtggagtggagtagaanctgtcnctaattttctgtaaattcagacncattcaaaactncagaaatttgatgtgtcncaaaatgnccnaaaagtgtcgcactgttggtaactgagtgtggcaaaaaagnatgtactggtgtaacgtaactaacctg

SEQ ID NO: 328985 - DNA, 2100 bp, Homo sapiens
cgtgctgccgcgggtcacgtgctgcggaggcttggggaggggcggcgaggcggggtttatagcccgggcgcccgcgggccccacgctttgaccgggtcgtggcagccggagtcgtcttcgggacgcgcctgctcttcgcctttcgctgcagtccgtcgatttctttctccaggaagaaaaatggcatccgttgcagttgatccacaaccgagtgtggtgactcgggtggtcaacctgcccttggtgagctccacgtatgacctcatgtcctcagcctatctcagtacaaaggaccagtatccctacctgaagtctgtgtgtgagatggcagagaacggtgtgaagaccatcacctccgtggccatgaccagtgctctgcccatcatccagaagctagagccgcaaattgcagttgccaatacctatgcctgtaaggggctagacaggattgaggagagactgcctattctgaatcagccatcaactcagattgttgccaatgccaaaggcgctgtgactggggcaaaagatgctgtgacgactactgtgactggggccaaggattctgtggccagcacgatcacaggggtgatggacaagaccaaaggggcagtgactggcagtgtggagaagaccaagtctgtggtcagtggcagcattaacacagtcttggggagtcggatgatgcagctcgtgagcagtggcgtagaaaatgcactcaccaaatcagagctgttggtagaacagtacctccctctcactgaggaagaactagaaaaagaagcaaaaaaagttgaaggatttgatctggttcagaagccaagttattatgttagactgggatccctgtctaccaagcttcactcccgtgcctaccagcaggctctcagcagggttaaagaagctaagcaaaaaagccaacagaccatttctcagctccattctactgttcacctgattgaatttgccaggaagaatgtgtatagtgccaatcagaaaattcaggatgctcaggataagctctacctctcatgggtagagtggaaaaggagcattggatatgatgatactgatgagtcccactgtgctgagcacattgagtcacgtactcttgcaattgcccgcaacctgactcagcagctccagaccacgtgccacaccctcctgtccaacatccaaggtgtaccacagaacatccaagatcaagccaagcacatgggggtgatggcaggcgacatctactcagtgttccgcaatgctgcctcctttaaagaagtgtctgacagcctcctcacttctagcaaggggcagctgcagaaaatgaaggaatctttagatgacgtgatggattatcttgttaacaacacgcccctcaactggctggtaggtcccttttatcctcagctgactgagtctcagaatgctcaggaccaaggtgcagagatggacaagagcagccaggagacccagcgatctgagcataaaactcattaaacctgcccctatcactagtgcatgctgtggccagacagatgacaccttttgttatgttgaaattaacttgctaggcaaccctaaattgggaagcaagtagctagtataaaggccctcaattgtagttgtttccagctgaattaagagctttaaagtttctggcattagcagatgatttctgttcacctggtaagaaaagaatgataggcttgtcagagcctatagccagaactcagaaaaaattcaaatgcacttatgttctcattctatggccattgtgttgcctctgttactgtttgtattgaataaaaacatcttcatgtgggctggggtagaaactggtgtctgctctggtgtgatctgaaaaggcgtcttcactgctttatctcatgatgcttgcttgtaaaacttgattttagtttttcatttctcaaataggaatactacctttgaattcaataaaattcactgcaggatagaccagttaaaaaaaaaaaaaaaatcggggtctaggcggggggggaaaagaggttggagggcctgggctagtgttctgaccaggttttgtaaggggatgggggccaaaggggggataatgaacagagg

SEQ ID NO: 328986 - DNA, 1889 bp, Homo sapiens
  misc_feature (1862)..(1862): n is a, c, g, or t
  misc_feature (1880)..(1880): n is a, c, g, or t
cgtgctgccgcgggtcacgtgctgcggaggcttggggaggggcggcgaggcggggtttatagcccgggcgcccgcgggccccacgctttgaccgggtcgtggcagccggagtcgtcttcgggacgcgcctgctcttcgcctttcgctgcagtccgtcgatttctttctccaggaagaaaaatggcatccgttgcagttgatccacaaccgagtgtggtgactcgggtggtcaacctgcccttggtgagctccacgtatgacctcatgtcctcagcctatctcagtacaaaggaccagtatccctacctgaagtctgtgtgtgagatggcagagaacggtgtgaagaccatcacctccgtggccatgaccagtgctctgcccatcatccagaagctagagccgcaaattgcagttgccaatacctatgcctgtaaggggctagacaggattgaggagagactgcctattctgaatcagccatcaactcagattgttgccaatgccaaaggcgctgtgactggggcaaaagatgctgtgacgactactgtgactggggccaaggattctgtggccagcacgatcacaggggtgatggacaagaccaaaggggcagtgactggcagtgtggagaagaccaagtctgtggtcagtggcagcattaacacagtcttggggagtcggatgatgcagctcgtgagcagtggcgtagaaaatgcactcaccaaatcagagctgttggtagaacagtacctccctctcactgaggaagaactagaaaaagaagcaaaaaaagttgaaggatttgatctggttcagaagccaagttattatgttagactgggatccctgtctaccaagcttcactcccgtgcctaccagcaggctctcagcagggttaaagaagctaagcaaaaaagccaacagaccatttctcagctccattctactgttcacctgattgaatttgccaggaagaatgtgtatagtgccaatcagaaaattcaggatgctcaggataagctctacctctcatgggtagagtggaaaaggagcattggatatgatgatactgatgagtcccactgtgctgagcacattgagtcacgtactcttgcaattgcccgcaacctgactcagcagctccagaccacgtgccacaccctcctgtccaacatccaaggtgtaccacagaacatccaagatcaagccaagcacatgggggtgatggcaggcgacatctactcagtgttccgcaatgctgcctcctttaaagaagtgtctgacagcctcctcacttctagcaaggggcagctgcagaaaatgaaggaatctttagatgacgtgatggattatcttgttaacaacacgcccctcaactggctggtaggtcccttttatcctcagctgactgagtctcagaatgctcaggaccaaggtgcagagatggacaagagcagccaggagacccagcgatctgagcataaaactcattaaacctgcccctatcactagtgcatgctgtggccagacagatgacaccttttgttatgttgaaattaacttgctaggcaaccctaaattgggaagcaagtagctagtataaaggccctcaattgtagttgtttccagctgaattaagagctttaaagtttctggcattagcagatgatttctgttcacctggtaagaaaagaatgataggcttgtcagagcctatagccagaactcagaaaaaattcaaatgcacttatgttctcattctatggccattgtgttgcctctgttactgtttgtattgaataaaaacatcttcatgtgggctggggtagaaactggtgtctgctctggtgtgatctgaaaanaaaaaagaaaaaaaaaanaaaaaaaaa

SEQ ID NO: 328987 - DNA, 1624 bp, Homo sapiens
cgtgctgccgcgggtcacgtgctgcggaggcttggggaggggcggcgaggcggggtttatagcccgggcgcccgcgggccccacgctttgaccgggtcgtggcagccggagtcgtcttcgggacgcgcctgctcttcgcctttcgctgcagtccgtcgatttctttctccaggaagaaaaatggcatccgttgcagttgatccacaaccgagtgtggtgactcgggtggtcaacctgcccttggtgagctccacgtatgacctcatgtcctcagcctatctcagtacaaaggaccagtatccctacctgaagtctgtgtgtgagatggcagagaacggtgtgaagaccatcacctccgtggccatgaccagtgctctgcccatcatccagaagctagagccgcaaattgcagttgccaatacctatgcctgtaaggggctagacaggattgaggagagactgcctattctgaatcagccatcaactcagattgttgccaatgccaaaggcgctgtgactggggcaaaagatgctgtgacgactactgtgactggggccaaggattctgtggccagcacgatcacaggggtgatggacaagaccaaaggggcagtgactggcagtgtggagaagaccaagtctgtggtcagtggcagcattaacacagtcttggggagtcggatgatgcagctcgtgagcagtggcgtagaaaatgcactcaccaaatcagagctgttggtagaacagtacctccctctcactgaggaagaactagaaaaagaagcaaaaaaagttgaaggatttgatctggttcagaagccaagttattatgttagactgggatccctgtctaccaagcttcactcccgtgcctaccagcaggctctcagcagggttaaagaagctaagcaaaaaagccaacagaccatttctcagctccattctactgttcacctgattgaatttgccaggaagaatgtgtatagtgccaatcagaaaattcaggatgctcaggataagctctacctctcatgggtagagtggaaaaggagcattggatatgatgatactgatgagtcccactgtgctgagcacattgagtcacgtactcttgcaattgcccgcaacctgactcagcagctccagaccacgtgccacaccctcctgtccaacatccaaggtgtaccacagaacatccaagatcaagccaagcacatgggggtgatggcaggcgacatctactcagtgttccgcaatgctgcctcctttaaagaagtgtctgacagcctcctcacttctagcaaggggcagctgcagaaaatgaaggaatctttagatgacgtgatggattatcttgttaacaacacgcccctcaactggctggtaggtcccttttatcctcagctgactgagtctcagaatgctcaggaccaaggtgcagagatggacaagagcagccaggagacccagcgatctgagcataaaactcattaaacctgcccctatcactagtgcatgctgtggccagacagatgacaccttttgttatgtgttgttgtcattgttgttgtttatcgaagccatcctcaattgtgtgaggtgtgtagcttgaagatcctctaga

SEQ ID NO: 328988 - DNA, 1743 bp, Homo sapiens
cgtgctgccgcgggtcacgtgctgcggaggcttggggaggggcggcgaggcggggtttatagcccgggcgcccgcgggccccacgctttgaccgggtcgtggcagccggagtcgtcttcgggacgcgcctgctcttcgcctttcgctgcagtccgtcgatttctttctccaggaagaaaaatggcatccgttgcagttgatccacaaccgagtgtggtgactcgggtggtcaacctgcccttggtgagctccacgtatgacctcatgtcctcagcctatctcagtacaaaggaccagtatccctacctgaagtctgtgtgtgagatggcagagaacggtgtgaagaccatcacctccgtggccatgaccagtgctctgcccatcatccagaagctagagccgcaaattgcagttgccaatacctatgcctgtaaggggctagacaggattgaggagagactgcctattctgaatcagccatcaactcagattgttgccaatgccaaaggcgctgtgactggggcaaaagatgctgtgacgactactgtgactggggccaaggattctgtggccagcacgatcacaggggtgatggacaagaccaaaggggcagtgactggcagtgtggagaagaccaagtctgtggtcagtggcagcattaacacagtcttggggagtcggatgatgcagctcgtgagcagtggcgtagaaaatgcactcaccaaatcagagctgttggtagaacagtacctccctctcactgaggaagaactagaaaaagaagcaaaaaaagttgaaggatttgatctggttcagaagccaagttattatgttagactgggatccctgtctaccaagcttcactcccgtgcctaccagcaggctctcagcagggttaaagaagctaagcaaaaaagccaacagaccatttctcagcacagtgggactcatcaggatcatcatagtccaacggcatccatggagcacactcgtaccgcaatgaggagctaacagacaagacaccctcagaccacacagcgccaccgccgactccacgagaacaaccacacaatgacaacagacgaaagaacaagaaaaacacggtacaaccacagcgacagaaggcaacaacacaccgaacggatcgacgcgtgaacaaggaagcaacaagcaagcgaagcaacgccggccgcgcgcagcacaaaccagacgacgccgcagtggcagcccacccagcgtaggacaccagcaccaggacgcggatactaccgacagcgacgacacgcaaccgcggacgcaccagccgcaggaaaccgccgaaacaccaacgcagagcagacaaagggagaaggacaacaccccaacacgccaccacacagtggctgaagcaccggcacggtggccccgtagaaagaaactggaagccacagagcgcggacgaccgagagacaaacacacggagagacacacgaagtgaggcacgacagcactcatcagcgccgaaagacgaactcgacaacagcgatcacacacaccgcgccgccgaaagcacagaacccgacgacaaaacagaaagggaagtacacaccgaagccggccgctaccacgagcaacaggacacggagcgcaacgccagctccacacgggctgggcgcgctgacccaacgcagcagagtcgccaaaccggcagagaagccaaaccacacgcaccaaccaaaccgagcaggcacaacgaccacacaa

SEQ ID NO: 328989 - DNA, 468 bp, Homo sapiens
tttctaacatgaagcacttcagagttctattactttcaccttactgtaccaaaaaatactttttttttttttgagaccaagtttcactctgttgcccaggctggagtgcagtggtgtgatctcggctcactgcagtctttgcctccccggttcaagtgattcttatgcctcagcctcctgagtagctgggattataggcacgcggcaccacgcccagctaatgtttgtgtttttagtagagatggggtttcaccatgctgtccaggctggtctcgaactcttggactcaagctatccacctgcctcgcctcccaaagtgctggaattacaggcgtgacacacccacccggcccccagaatactttttacactaccaggaatatccacctataagccctcctcttgtactccatagcaccttgttacgagaccgctagctcctctgccttttttttatttttatttttt

SEQ ID NO: 328990 - DNA, 503 bp, Homo sapiens
ggcgccttttatcacaagagaaacatgtgtgtatctgcttgcctgggtgaaaaacctcgagatgcgccgttgtctggcaacacaagacagcatgtaagatctacgatcatcgccccgccggagcgcaaatactcggtgtggatcggcggctccatcctggcctcgctgtccaccttccagcagatgtggatcaccaagcaggagtacgacgaggccggcccttccatcgtccaccgcaaatgcttctagacacactccacctccagcacgcgacttctcaggacgacgaatcttctcaatgggggggcggctgagctccagccaccccgcagtcactttctttgtaacaacttccgttgctgccatcgtaaactgacacagtgtttataacgtgtacatacattaacttattacctcattttgttatttttcgaaacaaagccctgtggaagaaaatggaaaacttgaagaagcattaaagtcattctgttaagctgcgtaaa

SEQ ID NO: 328991 - DNA, 1368 bp, Homo sapiens
gcgaccaccgcagcggacagcgccaagtgaagcctcgcttccctcccgcggcgaccagggcccgagccgagagtagcagttgtagctacccgcccagaaactagacacaatgtgcgacgaagacgagaccaccgccctcgtgtgcgacaatggctccggcctggtgaaagccggcttcgccggggatgacgcccctagggccgtgttcccgtccatcgtgggccgcccccgacaccagggcgtcatggtcggtatgggtcagaaagattcctacgtgggcgacgaggctcagagcaagagaggtatcctgaccctgaagtaccctatcgagcacggcatcatcaccaactgggatgacatggagaagatctggcaccacaccttctacaacgagcttcgcgtggctcccgaggagcaccccaccctgctcaccgaggcccccctcaatcccaaggccaaccgcgagaagatgacccagatcatgtttgagaccttcaacgtgcccgccatgtacgtggccatccaggccgtgctgtccctctacgcctccggcaggaccaccggcatcgtgctggactccggcgacggcgtcacccacaacgtgcccatttatgagggctacgcgctgccgcacgccatcatgcgcctggacttcgagaacgagatggcgacggccgcctcctcctcctccctggaaaagagctacgagctgccagacgggcaggtcatcaccatcggcaacgagcgcttccgctgcccggagacgctcttccagccctccttcatcggtatggagtcggcgggcattcacgagaccacctacaacagcatcatgaagtgtgacatcgacatcaggaaggacctgtatgccaacaacgtcatgtcggggggcaccacgatgtaccctgggatcgctgaccgcatgcagaaagagatcaccgcgctggcacccagcaccatgaagatcaagatcatcgccccgccggagcgcaaatactcggtgtggatcggcggctccatcctggcctcgctgtccaccttccagcagatgtggatcaccaagcaggagtacgacgaggccggcccttccatcgtccaccgcaaatgcttctagacacactccacctccagcacgcgacttctcaggacgacgaatcttctcaatgggggggcggctgagctccagccaccccgcagtcactttctttgtaacaacttccgttgctgccatcgtaaactgacacagtgtttataacgtgtacatacattaacttattacctcattttgttatttttcgaaacaaagccctgtggaagaaaatggaaaacttgaagaagcattaaagtcattctgttaagctgcgtaaa

SEQ ID NO: 328992 - DNA, 974 bp, Homo sapiens
gcgaccaccgcagcggacagcgccaagtgaagcctcgcttccctcccgcggcgaccagggcccgagccgagagtagcagttgtagctacccgcccagacgcgctgccgcacgccatcatgcgcctggacctggcgggccgcgatctcaccgactacctgatgaagatcctcactgagcgtggctactccttcgtgaccacagctgagcgcgagatcgtgcgcgacatcaaggagaagctgtgctacgtggccctggacttcgagaacgagatggcgacggccgcctcctcctcctccctggaaaagagctacgagctgccagacgggcaggtcatcaccatcggcaacgagcgcttccgctgcccggagacgctcttccagccctccttcatcggtatggagtcggcgggcattcacgagaccacctacaacagcatcatgaagtgtgacatcgacatcaggaaggacctgtatgccaacaacgtcatgtcggggggcaccacgatgtaccctgggatcgctgaccgcatgcagaaagagatcaccgcgctggcacccagcaccatgaagatcaagatcatcgccccgccggagcgcaaatactcggtgtggatcggcggctccatcctggcctcgctgtccaccttccagcagatgtggatcaccaagcaggagtacgacgaggccggcccttccatcgtccaccgcaaatgcttctagacacactccacctccagcacgcgacttctcaggacgacgaatcttctcaatgggggggcggctgagctccagccaccccgcagtcactttctttgtaacaacttccgttgctgccatcgtaaactgacacagtgtttataacgtgtacatacattaacttattacctcattttgttatttttcgaaacaaagccctgtggaagaaaatggaaaacttgaagaagcattaaagtcattctgttaagctgcgtaaa

SEQ ID NO: 328993 - DNA, 1200 bp, Homo sapiens
gcgaccaccgcagcggacagcgccaagtgaagcctcgcttccctcccgcggcgaccagggcccgagccgagagtagcagttgtagctacccgcccagaaactagacacaatgtgcgacgaagacgagaccaccgccctcgtgtgcgacaatggctccggcctggtgaaagccggcttcgccggggatgacgcccctagggccgtgttcccgtccatcgtgggccgcccccgacaccagggcgtcatggtcggtatgggtcagaaagattcctacgtgggcgacgaggctcagagcaagagaggtatcctgaccctgaagtaccctatcgagcacggcatcatcaccaactgggatgacatggagaagatctggcaccacaccttctacaacgagcttcgcgtggctcccgaggagcaccccaccctgctcaccgaggcccccctcaatcccaaggccaaccgcgagaagatgacccagatcatgtttgagaccttcaacgtgcccgccatgtacgtggccatccaggccgtgctgtccctctacgcctccggcaggaccaccggcatcgtgctggactccggcgacggcgtcacccacaacgtgcccatttatgagggctgtatggagtcggcgggcattcacgagaccacctacaacagcatcatgaagtgtgacatcgacatcaggaaggacctgtatgccaacaacgtcatgtcggggggcaccacgatgtaccctgggatcgctgaccgcatgcagaaagagatcaccgcgctggcacccagcaccatgaagatcaagatcatcgccccgccggagcgcaaatactcggtgtggatcggcggctccatcctggcctcgctgtccaccttccagcagatgtggatcaccaagcaggagtacgacgaggccggcccttccatcgtccaccgcaaatgcttctagacacactccacctccagcacgcgacttctcaggacgacgaatcttctcaatgggggggcggctgagctccagccaccccgcagtcactttctttgtaacaacttccgttgctgccatcgtaaactgacacagtgtttataacgtgtacatacattaacttattacctcattttgttatttttcgaaacaaagccctgtggaagaaaatggaaaacttgaagaagcattaaagtcattctgttaagctgcgtaaa

SEQ ID NO: 328994 - DNA, 1284 bp, Homo sapiens
gcgaccaccgcagcggacagcgccaagtgaagcctcgcttccctcccgcggcgaccagggcccgagccgagagtagcagttgtagctacccgcccagaaactagacacaatgtgcgacgaagacgagaccaccgccctcgtgtgcgacaatggctccggcctggtgaaagccggcttcgccggggatgacgcccctagggccgtgttcccgtccatcgtgggccgcccccgacaccagggcgtcatggtcggtatgggtcagaaagattcctacgtgggcgacgaggctcagagcaagagaggtatcctgaccctgaagtaccctatcgagcacggcatcatcaccaactgggatgacatggagaagatctggcaccacaccttctacaacgagcttcgcgtggctcccgaggagcaccccaccctgctcaccgaggcccccctcaatcccaaggccaaccgcgagaagatgacccagatcatgtttgagaccttcaacgtgcccgccatgtacgtggccatccaggccgtgctgtccctctacgcctccggcaggaccaccggcatcgtgctggactccggcgacggcgtcacccacaacgtgcccatttatgagggctacgcgctgccgcacgccatcatgcgcctggacctggcgggccgcgatctcaccgactacctgatgaagatcctcactgagcgtggctactccttcgtgaccacagctgagcgcgagatcgtgcgcgacatcaaggagaagctgtgctacgtggccctggacttcgagaacgagatggcgacggccgcctcctcctcctcccctgggatcgctgaccgcatgcagaaagagatcaccgcgctggcacccagcaccatgaagatcaagatcatcgccccgccggagcgcaaatactcggtgtggatcggcggctccatcctggcctcgctgtccaccttccagcagatgtggatcaccaagcaggagtacgacgaggccggcccttccatcgtccaccgcaaatgcttctagacacactccacctccagcacgcgacttctcaggacgacgaatcttctcaatgggggggcggctgagctccagccaccccgcagtcactttctttgtaacaacttccgttgctgccatcgtaaactgacacagtgtttataacgtgtacatacattaacttattacctcattttgttatttttcgaaacaaagccctgtggaagaaaatggaaaacttgaagaagcattaaagtcattctgttaagctgcgtaaa

SEQ ID NO: 328995 - DNA, 1342 bp, Homo sapiens
gcgaccaccgcagcggacagcgccaagtgaagcctcgcttccctcccgcggcgaccagggcccgagccgagagtagcagttgtagctacccgcccagaaactagacacaatgtgcgacgaagacgagaccaccgccctcgtgtgcgacaatggctccggcctggtgaaagccggcttcgccggggatgacgcccctagggccgtgttcccgtccatcgtgggccgcccccgacaccagggcgtcatggtcggtatgggtcagaaagattcctacgtgggcgacgaggctcagagcaagagaggtatcctgaccctgaagtaccctatcgagcacggcatcatcaccaactgggatgacatggagaagatctggcaccacaccttctacaacgagcttcgcgtggctcccgaggagcaccccaccctgctcaccgaggcccccctcaatcccaaggccaaccgcgagaagatgacccagatcatgtttgagaccttcaacgtgcccgccatgtacgtggccatccaggccgtgctgtccctctacgcctccggcaggaccaccggcatcgtgctggactccggcgacggcgtcacccacaacgtgcccatttatgagggctacgcgctgccgcacgccatcatgcgcctggacctggcgggccgcgatctcaccgactacctgatgaagatcctcactgagcgtggctactccttcgtgaccacagctgagcgcgagatcgtgcgcgacatcaaggagaagctgtgctacgtggccctggacttcgagaacgagatggcgacggccgcctcctcctcctccctggaaaagagctacgagctgccagacgggcaggtcatcaccatcggcaacgagcgcttccgctgcccggagacgctcttccagccctccttcatcggtatggagtcggcgggcattcacgagaccacctacaacagcatcatgaagtgtgacatcgacatcaggaaggacctgtatgccaacaacgtcatgtcggggggcaccacgatgtaccctgggatcgctgaccgcatgcagaaagagatcaccgcgctggcacccagcaccatgaagatcaagctccagcacgcgacttctcaggacgacgaatcttctcaatgggggggcggctgagctccagccaccccgcagtcactttctttgtaacaacttccgttgctgccatcgtaaactgacacagtgtttataacgtgtacatacattaacttattacctcattttgttatttttcgaaacaaagccctgtggaagaaaatggaaaacttgaagaagcattaaagtcattctgttaagctgcgtaaa

SEQ ID NO: 328996 - DNA, 1641 bp, Homo sapiens
  misc_feature (1472)..(1472): n is a, c, g, or t
  misc_feature (1546)..(1546): n is a, c, g, or t
gcgaccaccgcagcggacagcgccaagtgaagcctcgcttccctcccgcggcgaccagggcccgagccgagagtagcagttgtagctacccgcccagaaactagacacaatgtgcgacgaagacgagaccaccgccctcgtgtgcgacaatggctccggcctggtgaaagccggcttcgccggggatgacgcccctagggccgtgttcccgtccatcgtgggccgcccccgacaccagggcgtcatggtcggtatgggtcagaaagattcctacgtgggcgacgaggctcagagcaagagaggtatcctgaccctgaagtaccctatcgagcacggcatcatcaccaactgggatgacatggagaagatctggcaccacaccttctacaacgagcttcgcgtggctcccgaggagcaccccaccctgctcaccgaggcccccctcaatcccaaggccaaccgcgagaagatgacccagatcatgtttgagaccttcaacgtgcccgccatgtacgtggccatccaggccgtgctgtccctctacgcctccggcaggaccaccggcatcgtgctggactccggcgacggcgtcacccacaacgtgcccatttatgagggctacgcgctgccgcacgccatcatgcgcctggacctggcgggccgcgatctcaccgactacctgatgaagatcctcactgagcgtggctactccttcgtgaccacagctgagcgcgagatcgtgcgcgacatcaaggagaagctgtgctacgtggccctggacttcgagaacgagatggcgacggccgcctcctcctcctccctggaaaagagctacgagctgccagacgggcaggtcatcaccatcggcaacgagcgcttccgctgcccggagacgctcttccagccctccttcatcggtatggagtcggcgggcattcacgagaccacctacaacagcatcatgaagtgtgacatcgacatcaggaaggacctgtatgccaacaacgtcatgtcggggggcaccacgatgtaccctgggatcgctgaccgcatgcagaaagagatcaccgcgctggcacccagcaccatgaagatcaagatcatcgccccgccggagcgcaaatactcggtgtggatcggcggctccatcctggcctcgctgtccaccttccagcagatgtggatcaccaagcaggagtacgacgaggccggcccttccatcgtccaccgcaaatgcttctagacacactccacctccagcacgcgacttctcaggacgacgaatcttctcaatgggggggcggctgagctccagccaccccgcagtcactttctagaattccataggttccactaactctatttcggatgacaaactggtttgtcttttttttctttcgaaaccttatgtttcagatgaatttaaaggtagtcccggtttttcatttccagacacaaaaagagacaagggnttcctcttttcaaacggctttagaatattcttgtgttcagaatctctttcaaaatgtggaggtgtggatgtctntgggggtgcccagaatgagggttacatcatcccggtctcaaactctccccccatggaaaaggttgtttcctaaattaaccatctggctgatggag

SEQ ID NO: 328997 - DNA, 1311 bp, Homo sapiens
gcgaccaccgcagcggacagcgccaagtgaagcctcgcttccctcccgcggcgaccagggcccgagccgagagtagcagttgtagctacccgcccagaaactagacacaatgtgcgacgaagacgagaccaccgccctcgtgtgcgacaatggctccggcctggtgaaagccggcttcgccggggatgacgcccctagggccgtgttcccgtccatcgtgggccgcccccgacaccagggcgtcatggtcggtatgggtcagaaagattcctacgtgggcgacgaggctcagagcaagagaggtatcctgaccctgaagtaccctatcgagcacggcatcatcaccaactgggatgacatggagaagatctggcaccacaccttctacaacgagcttcgcgtggctcccgaggagcaccccaccctgctcaccgaggcccccctcaatcccaaggccaaccgcgagaagatgacccagatcatgtttgagaccttcaacgtgcccgccatgtacgtggccatccaggccgtgctgtccctctacgcctccggcaggaccaccggcatcgtgctggactccggcgacggcgtcacccacaacgtgcccatttatgagggctacgcgctgccgcacgccatcatgcgcctggacctggcgggccgcgatctcaccgactacctgatgaagatcctcactgagcgtggctactccttcgtgaccacagctgagcgcgagatcgtgcgcgacatcaaggagaagctgtgctacgtggccctggacttcgagaacgagatggcgacggccgcctcctcctcctccctggaaaagagctacgagctgccagacgggcaggtcatcaccatcggcaacgagcgcttccgctgcccggagacgctcttccagccctccttcatcggtatggagtcggcgggcattcacgagaccacctacaacagcatcatgaagtgtgacatcgacatcaggaaggacctgtatgccaacaacgtcatgtcggggggcaccacgatgtaccctgggatcgctgaccgcatgcagaaagagatcaccgcgctggcacccagcaccatgaagatcaagatcatcgccccgccggagcgcaaatactcggtgtggatcggcggctccatcctggcctcgctgtccaccttccagcagatgtggatcaccaagcaggagtacgacgaggccggcccttccatcgtccaccgcaaatgcttctagacacactccacgcggactatgacttagtaggcgttacaccctttcgttgactaaaccttaccttgcgc

SEQ ID NO: 328998 - DNA, 947 bp, Homo sapiens
gcgaccaccgcagcggacagcgccaagtgaagcctcgcttccctcccgcggcgaccagggcccgagccgagagtagcagttgtagctacccgcccagaaactagacacaatgtgcgacgaagacgagaccaccgccctcgtgtgcgacaatggctccggcctggtgaaagccggcttcgccggggatgacgcccctagggccgtgttcccgtccatcgtgggccgcccccgacaccagggcgtcatggtcggtatgggtcagaaagattcctacgtgggcgacgaggctcagagcaagagaggtatcctgaccctgaagtaccctatcgagcacggcatcatcaccaactgggatgacatggagaagatctggcaccacaccttctacaacgagcttcgcgtggctcccgaggagcaccccaccctgctcaccgaggcccccctcaatcccaaggccaaccgcgagaagatgacccagatcatgtttgagaccttcaacgtgcccgccatgtacgtggccatccaggccgtgctgtccctctacgcctccggcaggaccaccggcatcgtgctggactccggcgacggcgtcacccacaacgtgcccatttatgagggctacgcgctgccgcacgccatcatgcgcctggacctggcgggccgcgatctcaccgactacctgatgaagatcctcactgagcgtggctactccttcgtgaccacagctgagcgcgagatcgtgcgcgacatcaaggagaagctgtgctacgtggccctggacttcgagaacgagatggcgacggccgcctcctcctcctccctggaaaagagctacgagctgccagacgggcaggtcatcaccatcggcaacgagcgcttccgctgcccggagacgctcttccagccctccttcatcggtgagccccgctcgccctcgccccggcccc

SEQ ID NO: 328999 - DNA, 848 bp, Homo sapiens
gcgaccaccgcagcggacagcgccaagtgaagcctcgcttccctcccgcggcgaccagggcccgagccgagagtagcagttgtagctacccgcccagaaactagacacaatgtgcgacgaagacgagaccaccgccctcgtgtgcgacaatggctccggcctggtgaaagccggcttcgccggggatgacgcccctagggccgtgttcccgtccatcgtgggccgcccccgacaccagggcgtcatggtcggtatgggtcagaaagattcctacgtgggcgacgaggctcagagcaagagaggtatcctgaccctgaagtaccctatcgagcacggcatcatcaccaactgggatgacatggagaagatctggcaccacaccttctacaacgagcttcgcgtggctcccgaggagcaccccaccctgctcaccgaggcccccctcaatcccaaggccaaccgcgagaagatgacccagatcatgtttgagaccttcaacgtgcccgccatgtacgtggccatccaggccgtgctgtccctctacgcctccggcaggaccaccggcatcgtgctggactccggcgacggcgtcacccacaacgtgcccatttatgagggctacgcgctgccgcacgccatcatgcgcctggacctggcgggccgcgatctcaccgactacctgatgaagatcctcactgagcgtggctactccttcgtgaccacagctgagcgcgagatcgtgcgcgacatcaaggagaagctgtgctacgtggccctggactaaatggcagccatttactccatgcaggtacagactgccctaatcttgctacctcgagacgcgtctg

SEQ ID NO: 329000 - DNA, 1497 bp, Homo sapiens
gcgaccaccgcagcggacagcgccaagtgaagcctcgcttccctcccgcggcgaccagggcccgagccgagagtagcagttgtagctacccgcccagaaactagacacaatgtgcgacgaagacgagaccaccgccctcgtgtgcgacaatggctccggcctggtgaaagccggcttcgccggggatgacgcccctagggccgtgttcccgtccatcgtgggccgcccccgacaccagggcgtcatggtcggtatgggtcagaaagattcctacgtgggcgacgaggctcagagcaagagaggtatcctgaccctgaagtaccctatcgagcacggcatcatcaccaactgggatgacatggagaagatctggcaccacaccttctacaacgagcttcgcgtggctcccgaggagcaccccaccctgctcaccgaggcccccctcaatcccaaggccaaccgcgagaagatgacccagatcatgtttgagaccttcaacgtgcccgccatgtacgtggccatccaggccgtgctgtccctctacgcctccggcaggaccaccggcatcgtgctggactccggcgacggcgtcacccacaacgtgcccatttatgagggctacgcgctgccgcacgccatcatgcgcctggacctggcgggccgcgatctcaccgactacctgatgaagatcctcactgagcgtggctactccttcgtgaccacagctgagcgcgagatcgtgcgcgacatcaaggagaagctgtgctacgtggccctggacttcgagaacgagatggcgacggccgcctcctcctcctccctggaaaagagctacgagctgccagacgggcaggtcatcaccatcggcaacgagcgcttccgctgcccggagacgctcttccagccctccttcatcggtatggagtcggcgggcattcacgagaccacctacaacagcatcatgaagtgtgacatcgacatcaggaaggacctgtatgccaacaacgtcatgtcggggggcaccacgatgtaccctgggatcgctgaccgcatgcagaaagagatcaccgcgctggcacccagcaccatgaagatcaagatcatcgccccgccggagcgcaaatactcggtgtggatcggcggctccatcctggcctcgctgtccaccttccagcagatgtggatcaccaagcaggagtacgacgaggccggcccttccatcgtccaccgcaaatgcttctagacacactccacctccagcacgcgacttctcaggacgacgaatcttctcaatgggggggcggctgagctccagccaccccgcagtcactttctttgtaacaacttccgttgctgccatcgtaaactgacacagtgtttataacgtgtacatacattaacttattacctcattttgttatttttcgaaacaaagccctgtggaagaaaatggaaaacttgaagaagcattaaagtcattctgttaagctgcgtaaa

SEQ ID NO: 329001 - DNA, 510 bp, Homo sapiens
ccgggccctgagccagccaggagggaagatcctggtgcattgtgctgtgggcgtgagccgatccgccaccctggtactggcctaacctcatgctgtaccaccacccttacccttcgtggaggccatcaagaaaagttccctgtgcgaattcggcggctccatcctggcctcgctgtccaccttccagcagatgtggatcaccaagcaggagtacgacgaggccggcccttccatcgtccaccgcaaatgcttctagacacactccacctccagcacgcgacttctcaggacgacgaatcttctcaatgggggggcggctgagctccagccaccccgcagtcactttctttgtaacaacttccgttgctgccatcgtaaactgacacagtgtttataacgtgtacatacattaacttattacctcattttgttatttttcgaaacaaagccctgtggaagaaaatggaaaacttgaagaagcattaaagtcattctgttaagctgcgtaaa

SEQ ID NO: 329002 - DNA, 374 bp, Homo sapiens
cgccccgagcttctgctcacgctccccgccgcggtccccaggtacttccagcagatgtggatcaccaagcaggagtacgacgaggccggcccttccatcgtccaccgcaaatgcttctagacacactccacctccagcacgcgacttctcaggacgacgaatcttctcaatgggggggcggctgagctccagccaccccgcagtcactttctttgtaacaacttccgttgctgccatcgtaaactgacacagtgtttataacgtgtacatacattaacttattacctcattttgttatttttcgaaacaaagccctgtggaagaaaatggaaaacttgaagaagcattaaagtcattctgttaagctgcgtaaa

SEQ ID NO: 329003 - DNA, 1072 bp, Homo sapiens
ggtcggtccgcgacaggcgactccccaaggccaaccgcgagaagatgacccagatcatgtttgagaccttcaacgtgcccgccatgtacgtggccatccaggccgtgctgtccctctacgcctccggcaggaccaccggcatcgtgctggactccggcgacggcgtcacccacaacgtgcccatttatgagggctacgcgctgccgcacgccatcatgcgcctggacctggcgggccgcgatctcaccgactacctgatgaagatcctcactgagcgtggctactccttcgtgaccacagctgagcgcgagatcgtgcgcgacatcaaggagaagctgtgctacgtggccctggacttcgagaacgagatggcgacggccgcctcctcctcctccctggaaaagagctacgagctgccagacgggcaggtcatcaccatcggcaacgagcgcttccgctgcccggagacgctcttccagccctccttcatcggtatggagtcggcgggcattcacgagaccacctacaacagcatcatgaagtgtgacatcgacatcaggaaggacctgtatgccaacaacgtcatgtcggggggcaccacgatgtaccctgggatcgctgaccgcatgcagaaagagatcaccgcgctggcacccagcaccatgaagatcaagatcatcgccccgccggagcgcaaatactcggtgtggatcggcggctccatcctggcctcgctgtccaccttccagcagatgtggatcaccaagcaggagtacgacgaggccggcccttccatcgtccaccgcaaatgcttctagacacactccacctccagcacgcgacttctcaggacgacgaatcttctcaatgggggggcggctgagctccagccaccccgcagtcactttctttgtaacaacttccgttgctgccatcgtaaactgacacagtgtttataacgtgtacatacattaacttattacctcattttgttatttttcgaaacaaagccctgtggaagaaaatggaaaacttgaagaagcattaaagtcattctgttaagctgcgtaaa

SEQ ID NO: 329004 - DNA, 958 bp, Homo sapiens
  misc_feature (20)..(20): n is a, c, g, or t
  misc_feature (47)..(47): n is a, c, g, or t
  misc_feature (107)..(107): n is a, c, g, or t
  misc_feature (170)..(170): n is a, c, g, or t
  misc_feature (175)..(175): n is a, c, g, or t
catcggggcgaggcctatantacggatcatttctctactcagaaacntaaacatcggcattatcctcctgcttgcaactatagcaacagccttcataggctatgtcntcccgtgaggccaaatatcattctgaggggccacagtaattacaaacttactatccgccactnccttncgaattcggcactgagcgcgagatcgtgcgcgacatcaaggagaagctgtgctacgtggccctggacttcgagaacgagatggcgacggccgcctcctcctcctccctggaaaagagctacgagctgccagacgggcaggtcatcaccatcggcaacgagcgcttccgctgcccggagacgctcttccagccctccttcatcggtatggagtcggcgggcattcacgagaccacctacaacagcatcatgaagtgtgacatcgacatcaggaaggacctgtatgccaacaacgtcatgtcggggggcaccacgatgtaccctgggatcgctgaccgcatgcagaaagagatcaccgcgctggcacccagcaccatgaagatcaagatcatcgccccgccggagcgcaaatactcggtgtggatcggcggctccatcctggcctcgctgtccaccttccagcagatgtggatcaccaagcaggagtacgacgaggccggcccttccatcgtccaccgcaaatgcttctagacacactccacctccagcacgcgacttctcaggacgacgaatcttctcaatgggggggcggctgagctccagccaccccgcagtcactttctttgtaacaacttccgttgctgccatcgtaaactgacacagtgtttataacgtgtacatacattaacttattacctcattttgttatttttcgaaacaaagccctgtggaagaaaatggaaaacttgaagaagcattaaagtcattctgttaagctgcgtaaa

SEQ ID NO: 329005 - DNA, 1382 bp, Homo sapiens
gcgaccaccgcagcggacagcgccaagtgaagcctcgcttccctcccgcggcgaccagggcccgagccgagagtagcagttgtagctacccgcccagaaactagacacaatgtgcgacgaagacgagaccaccgccctcgtgtgcgacaatggctccggcctggtgaaagccggcttcgccggggatgacgcccctagggccgtgttcccgtccatcgtgggccgcccccgacaccagggcgtcatggtcggtatgggtcagaaagattcctacgtgggcgacgaggctcagagcaagagaggtatcctgaccctgaagtaccctatcgagcacggcatcatcaccaactgggatgacatggagaagatctggcaccacaccttctacaacgagcttcgcgtggctcccgaggagcaccccaccctgctcaccgaggcccccctcaatcccaaggccaaccgcgagaagatgacccagatcatgtttgagaccttcaacgtgcccgccatgtacgtggccatccaggccgtgctgtccctctacgcctccggcaggaccaccggcatcgtgctggactccggcgacggcgtcacccacaacgtgcccatttatgagggctacgcgctgccgcacgccatcatgcgcctggacctggcgggccgcgatctcaccgactacctgatgaagatcctcactgagcgtggctactccttcgtgaccacagctgagcgcgagatcgtgcgcgacatcaaggagaagctgtgctacgtggccctggacttcgagaacgagatggcgacggccgcctcctcctcctccctggaaaagagctacgagctgccagacgggcaggtcatcaccatcggcaacgagcgcttccgctgcccggagacgctcttccagccctccttcatcggtatggagtcggcgggcattcacgagaccacctacaacagcatcatgaagtgtgacatcgacatcaggaaggacctgtatgccaacaacgtcatgtcggggggcaccacgatgtaccctgggatcgctgaccgcatgcagaaagagatcaccgcgctggcacccagcaccatgaagatcaagatcatcgccccgccggagcgcaaatactcggtgtggatcggcggctccatcctggcctcgctgtccaccttccagcagatgtggatcaccaagcaggagtacgacgaggccggcccttccatcgtccaccgcaaatgcttctagacacactccacctccagcacgcgacttctcaggacgacgaatcttctcaatgggggggcggctgagctccagccaccccgcagtcactttctttgtaacaacttccgttgctgccattggccagcgggggtataagctc

SEQ ID NO: 329006 - DNA, 1455 bp, Homo sapiens
gcgaccaccgcagcggacagcgccaagtgaagcctcgcttccctcccgcggcgaccagggcccgagccgagagtagcagttgtagctacccgcccagaaactagacacaatgtgcgacgaagacgagaccaccgccctcgtgtgcgacaatggctccggcctggtgaaagccggcttcgccggggatgacgcccctagggccgtgttcccgtccatcgtgggccgcccccgacaccagggcgtcatggtcggtatgggtcagaaagattcctacgtgggcgacgaggctcagagcaagagaggtatcctgaccctgaagtaccctatcgagcacggcatcatcaccaactgggatgacatggagaagatctggcaccacaccttctacaacgagcttcgcgtggctcccgaggagcaccccaccctgctcaccgaggcccccctcaatcccaaggccaaccgcgagaagatgacccagatcatgtttgagaccttcaacgtgcccgccatgtacgtggccatccaggccgtgctgtccctctacgcctccggcaggaccaccggcatcgtgctggactccggcgacggcgtcacccacaacgtgcccatttatgagggctacgcgctgccgcacgccatcatgcgcctggacctggcgggccgcgatctcaccgactacctgatgaagatcctcactgagcgtggctactccttcgtgaccacagctgagcgcgagatcgtgcgcgacatcaaggagaagctgtgctacgtggccctggacttcgagaacgagatggcgacggccgcctcctcctcctccctggaaaagagctacgagctgccagacgggcaggtcatcaccatcggcaacgagcgcttccgctgcccggagacgctcttccagccctccttcatcggtatggagtcggcgggcattcacgagaccacctacaacagcatcatgaagtgtgacatcgacatcaggaaggacctgtatgccaacaacgtcatgtcggggggcaccacgatgtaccctgggatcgctgaccgcatgcagaaagagatcaccgcgctggcacccagcaccatgaagatcaagatcatcgccccgccggagcgcaaatactcggtgtggatcggcggctccatcctggcctcgctgtccaccttccagcagatgtggatcaccaagcaggagtacgacgaggccggcccttccatcgtccaccgcaaatgcttctagacacactccacctccagcacgcgacttctcaggacgacgaatcttgatcttcatgttgcagtgtgcttcccggaagcacactgcaacagcgtcatgacagggggacttggcaggacaccttgatccaaggcgacagcatttggcaaggacacggaagttgggtcgttgcatccatcatcaggagttgacttgttctgagcaactgaacagaa

SEQ ID NO: 329007 - DNA, 1130 bp, Homo sapiens
  misc_feature (1094)..(1094): n is a, c, g, or t
gcgaccaccgcagcggacagcgccaagtgaagcctcgcttccctcccgcggcgaccagggcccgagccgagagtagcagttgtagctacccgcccagaaactagacacaatgtgcgacgaagacgagaccaccgccctcgtgtgcgacaatggctccggcctggtgaaagccggcttcgccggggatgacgcccctagggccgtgttcccgtccatcgtgggccgcccccgacaccagggcgtcatggtcggtatgggtcagaaagattcctacgtgggcgacgaggctcagagcaagagaggtatcctgaccctgaagtaccctatcgagcacggcatcatcaccaactgggatgacatggagaagatctggcaccacaccttctacaacgagcttcgcgtggctcccgaggagcaccccaccctgctcaccgaggcccccctcaatcccaaggccaaccgcgagaagatgacccagatcatgtttgagaccttcaacgtgcccgccatgtacgtggccatccaggccgtgctgtccctctacgcctccggcaggaccaccggcatcgtgctggactccggcgacggcgtcacccacaacgtgcccatttatgagggctacgcgctgccgcacgccatcatgcgcctggacctggcgggccgcgatctcaccgactacctgatgaagatcctcactgagcgtggctactccttcgtgaccacagctgagcgcgagatcgtgcgcgacatcaaggagaagctgtgctacgtggccctggacttcgagaacgagatggcgacggccgcctcctcctcctccctggaaaagagctacgagctgccagacgggcaggtcatcaccatcggcaacgagcgcttccgctgcccggagacgctcttccagccctccttcatcggtatggagtcggcgggcattcacgagaccacctacaacagcatcatgaagtgtgacatcgacatcaggaaggacctgtatgccaacaacgtcatgtcggggggcaccacgatgtaccctgggatctcggcatgctcataaggaaaggttaaaaaaagtaaaaggaactcggcaaatnttaccccgcctgtttaccaaaaacatcacctctagt

SEQ ID NO: 329008 - DNA, 869 bp, Homo sapiens
ggagggcacacaccccttctgtactgcacctgtagtaaccttgtttgactctgtaaataaagcttcttgaggacagtgtatcatttttgatctgctagaacatttggtacaattgctgttcacatggtaatacctcaaaaatacttagtgatcaaaatatgagtcatgaatatatggcgatgaaacttttttttaaaaaatcagacattcagaatattgttctttcaggttgtactgaaagtcatacttttattcttctagtgcccctcctttagtttgacagttccttttggaattgcttttgaggcagtaaaagatccttttgaatgtttataagggaagcaaacttctgttgagacctattctgagtttaggaaataacccaaaggcatttgctttctggttttatgagttagaggatccaatttgggtaatggattttgtgttaaaaagaaaaaaaaaggtgggattataagtaatttccaaatgtggttctaatagaagtgtaagaattgctttaagtgctggcagcagacttgttcagttgagtctttaagcttccaaggctgtaataaaggtaagaaggggccacagggggaacccaggggagaaagtgctggtgtaacctgccagaaccaggctgagttgtaaatggggaatacttatatcctctgtccccatatggatatggcacagggaaaacgttctctaggagtcggtctgacacagggcacggtgtgtggagtcctggcacattaggagactacagatgtagaacagcatggctggagcacagggcacagtgagaggatgggctgcagacacaggaactggcagggaggatggacacagggtcttctgaagaggtc

SEQ ID NO: 329009 - DNA, 4883 bp, Homo sapiens
aagaggaatcggctttcagccttctggagaggggaagacctcgcccctcaacttcctcgtgcctagacagtggaacggggtggagcccctccgctcctatctccagcagacagaaagagccctccacctcagaaagatccagtttgggggggaggggaactcccccaagggggaagagacaactcctggttgggagaggctcctcccctcctcccccgggtaacaagcagggtgtggggggtgtgccaccttccccaagtaggacctccttctcctccccctccccctcctccaaccttgactcctcatcctcaggggacccagttcccctcaccaacttgggaggctcagcctcgtccaggaagagccactgaggatgagagccgtcacctgcctctgaagaggggaatccctccaaccccaaactccagtaccaggtggttccctccctttgccggaggaaccttggagacagaacccagaagtaccatggcttctgacctagagagtagcctcacctccatagactggctcccccagctgaccctccgagctaccattgagaagcttggaagtgcctcccaggctgggcctcccgggagcagccgcaagtgttcaccagggtcacccacagatcctaatgccaccctgagcaaagacgaggcagcagtgcaccaggacggcaagccacgatacagctatgccactctcatcacctatgccatcaactcctctccagccaagaagatgaccctcagcgagatttaccgctggatctgtgataacttcccctattacaagaatgctggcattggttggaagaattcaatacggcacaacctttctctcaacaagtgtttccggaaggtgcccagacctcgggatgaccctgggaagggttcctattggacaattgacacctgccctgacatttcccgaaagagaagacaccctccagatgatgatctgtcccaagactcaccagaacaggaggcaagcaagagcccacggggaggcgttgcagggagtggagaagcctcactgcctcctgaggggaatccgcagatgtcacttcagagccccacatctatagccagctacagccagggcacaggatctgtggatggtggagcagtggcagcaggggcttcaggccgagaaagtgctgagggtccccctcccctctataacaccaaccatgactttaaattctcctactcagagatcaactttcaggatctaagctggtccttccgcaacctctataagtccatgctggagaagtcctcttcctcctctcagcacggcttttcttctctcctgggggacatcccaccctcgaacaactactacatgtatcagcagcagcagccaccgccacctcaacagcagcagcagcagcagcagccgccacagccacctccccagcagtcccagccacagcagcagcaggcacctgcccagggcccctcagctgtagggggtgctcctccactgcacaccccaagcacagatggttgtaccccaccagggggaaagcaagctggggcggaaggctatgggcctccccctgtaatggccatgcatccacccccgctgcagcatggaggctaccaccctcatcagcaccatccccactcccaccctgcccagcagccaccacctccacagccacaggcacaaggccaggctcccatcaacaacactggctttgcctttccttctgactggtgctctaatattgactctttaaaggaaagcttcaagatggtgaatcggctcaattggtccagcattgagcagtcacaattctcagaactgatggagagtctacgacaggcagagcagaagaactggaccctcgaccagcatcacattgccaatctgtgtgactccctcaaccacttccttactcagactggtcacgtgccccctcaagggggtacccaccgcccaccagcccctgcccgtattgctgactcctgtgccctcaccagtggcaaacaggagtcagccatgagccaagtgaactcttatgggcacccacaagctccccacctctaccctggcccatcaccaatgtacccaatccccacccaggactcagcaggatacaatcgcccagcacaccatatggtccctcggccatcagtgccacctcctggtgccaatgaggagatccctgatgacttcgactgggacttgatcacttagtgcatcacagagtgtggacatcagcccagggccgcgtggtgaaatctggcagtggggaaagagcaaccccagcccgtcccttccccccgtctgtatatagacatatatcctctttttgttctttctctgtcagagaagccactgcaagatgctgccgaagataaccctctctttcctgcctcattcttctctcttccttcctgttttttcctagttcttttattattattcttatattattattattattattggttatatactgtccatagtctcctgtccctacatcatggatcatgtccaccttttgctaatttaaaatcatcaggctggaagatgaagccatgatagctacagagaaaggttttagactccagtttacctttctcttggagaaactcaatgctaatcccaccttttggccctaaattgttttttgttcccatcagtttcaggccaggactggagaggccacattaccaagtagaaagggtctgaaacattacttggcagccaagaatttggaggttttaaaatggtgctaattctgtcctctgaggtcttccttgtccctttataccttcaatccttacttctgccagtctgtatttcctatcaagggtgaaagtgatgatggtggtgcaggagggtgacaataaaatcctagtggaattggagaccattggaagggatggaatataagtcagtgtgaaactgagtatacactgccatgttacatcagtgtccattggcttgttttgagcctgttctctaagaagataggattggttttagcccaaactctgcttctatggtagggcatgaggacaactattcagcatggttttagcttcttggagatgattccaacttaactattttggctttttaaacataattttctctgaaaattaattgtggctcttatttgcatttacgaatgatcttcccatccctttttcccattcagcaaatattagtttgtcctcctttaattgtttgcccaaatcttccacccatcttttttcttccctcattttctgggattctcaagaaagaaaaagtaacccattatcactctgagtttcgtcgtgccctgagacatgatgggaatctcattcccacctctcatagcagagccaaacctttagtgttggtggtaggaggatggggagaggaaaaaagagctggcaaagaaatggatagggaatattttagttctttaaatatataggcagatgcttctcttggaatccagatcatctggctgaagcttttgcaagtaggctttgaggggtgaaggagattggtggaggagagtaaataatctagaggcaagagttcagtgagggccaagggggacccccagaaaaaggtatggagctaactcatctcttttacaaggggtggccatgacttactgttgcaaagtactcagtgtatatttaatgttgattgttgaattttagttacgagagggaagaacaattttacttctgtccttatttcacttgctgaaaagctgtgggacaaaatgtatggaatagacaaggccactttctttgtgatttctgcttttcatgcatattattttatttacccataatttccaagaggtttggcgttccgctctcctgcttttttctttcatccacccctttcctttttttggaagggggttatatatgagagttcattgaagaagtccagtgaggctgaagtaaaggggcaagatagggcagttaactaaagagcactttatttctttgaagcctttctaagaaagaaatgggggtgcgagtggcttgaatctcccatgatgttggagggcacttagtggggttgaagtatgacataatatttcccattggggaaaggagaatttctcttagagggtggcaaaatgcctttgcccagtgtccctattttaggcatcttttccttccttattccttccagtcagggtgtgtcctatacaaaacttcccatcagttctcctcaatattccccatttgtaaatgatcacttctcttttctaaacccttttcctgttcagatccatacaggatttgcaagggtaggatcatacatgcaaatgccccttgttcatctgtgtcttctgcaaactagtctcatgaagaattctggcgtgcagccagggtagctgaagtttgggtctgggactggagattggccattaggcctcctgagattccagctcccttccaccaagcccagtcttgctacgtggcacagggcaaacctgactccctttgggcctcagtttcccctccccttcatgaaatgaaaagaatactactttttcttgttggtctagcattgctggacacaaagtgtagtcattattgttgtattgggtgatgtgtgcaaaactgcagaagctcactgcctataagaggaaataagagagaaagtggaggagagggacaaaaggagtaattatttggtatagatccacccatcccaacctttctctcctcagtccctgctcctcatgtttctggtttggtgagtcctttgtgccaccacccataatgctttgcattgctgcatcctgggaagggggtatatggtctcacaagttgttgtcattgtttttttgcatgctttcttaataaaaaaaaaaaagaatgtttacagttttatct

SEQ ID NO: 329010 - DNA, 2675 bp, Homo sapiens
  misc_feature (2604)..(2604): n is a, c, g, or t
aagaggaatcggctttcagccttctggagaggggaagacctcgcccctcaacttcctcgtgcctagacagtggaacggggtggagcccctccgctcctatctccagcagacagaaagagccctccacctcagaaagatccagtttgggggggaggggaactcccccaagggggaagagacaactcctggttgggagaggctcctcccctcctcccccgggtaacaagcagggtgtggggggtgtgccaccttccccaagtaggacctccttctcctccccctccccctcctccaaccttgactcctcatcctcaggggacccagttcccctcaccaacttgggaggctcagcctcgtccaggaagagccactgaggatgagagccgtcacctgcctctgaagaggggaatccctccaaccccaaactccagtaccaggtggttccctccctttgccggaggaaccttggagacagaacccagaagtaccatggcttctgacctagagagtagcctcacctccatagactggctcccccagctgaccctccgagctaccattgagaagcttggaagtgcctcccaggctgggcctcccgggagcagccgcaagtgttcaccagggtcacccacagatcctaatgccaccctgagcaaagacgaggcagcagtgcaccaggacggcaagccacgatacagctatgccactctcatcacctatgccatcaactcctctccagccaagaagatgaccctcagcgagatttaccgctggatctgtgataacttcccctattacaagaatgctggcattggttggaagaattcaatacggcacaacctttctctcaacaagtgtttccggaaggtgcccagacctcgggatgaccctgggaagggttcctattggacaattgacacctgccctgacatttcccgaaagagaagacaccctccagatgatgatctgtcccaagactcaccagaacaggaggcaagcaagagcccacggggaggcgttgcagggagtggagaagcctcactgcctcctgaggggaatccgcagatgtcacttcagagccccacatctatagccagctacagccagggcacaggatctgtggatggtggagcagtggcagcaggggcttcaggccgagaaagtgctgagggtccccctcccctctataacaccaaccatgactttaaattctcctactcagagatcaactttcaggatctaagctggtccttccgcaacctctataagtccatgctggagaagtcctcttcctcctctcagcacggcttttcttctctcctgggggacatcccaccctcgaacaactactacatgtatcagcagcagcagccaccgccacctcaacagcagcagcagcagcagcagccgccacagccacctccccagcagtcccagccacagcagcagcaggcacctgcccagggcccctcagctgtagggggtgctcctccactgcacaccccaagcacagatggttgtaccccaccagggggaaagcaagctggggcggaaggctatgggcctccccctgtaatggccatgcatccacccccgctgcagcatggaggctaccaccctcatcagcaccatccccactcccaccctgcccagcagccaccacctccacagccacaggcacaaggccaggctcccatcaacaacactggctttgcctttccttctgactggtgctctaatattgactctttaaaggaaagcttcaagatggtgaatcggctcaattggtccagcattgagcagtcacaattctcagaactgatggagagtctacgacaggcagagcagaagaactggaccctcgaccagcatcacattgccaatctgtgtgactccctcaaccacttccttactcagactggtcacgtgccccctcaagggggtacccaccgcccaccagcccctgcccgtattgctgactcctgtgccctcaccagtggcaaacaggagtcagccatgagccaaggtactgcaccaagccagttgccatggaggtggagactatgttgaaaaggaagcataggagaaaggcaaaagagaactgagagaaaggattttatggggcagtgacccaaattgagcagtggaactagttatcagttgactgaatatctgttgaatcagtgaagtcctaaactgaaaaatgcaaaagaaatagactgtatgattcctttttagacctcagtttgggagatcagaattgtttaagaaaagggaggagatttgttagagaaaggctgtattttaaatttgcgtctcagtaatccctaccgcctgggtgataccggatgaaatggtggttcttgcttatgtgatgttcaaactagtgaaatgagagagatgtcatgattatgttcctgtttcttgctttttgtttttgagatggggtctcgctctgtcgcccaggctctggagtgcagtggtgtgatcacggctcactgcaaccttgacccctggagctcaggtgatcctcccactttagcctcctgagtagctgggactacaggtgtgtaccaccatgcccagctaattttttttttgtantttgtgtatagctggggtttcaccgtgtcgcccaggctatcttcaaactcttggactcaagggatctaccc

SEQ ID NO: 329011 - DNA, 398 bp, Homo sapiens
aagccccaccctctggggcaccccgggagcggaggcgggagcggggacgcgagcaacctctccccctgttggagagaaaagacccttaccactcgggtgagggaaagaagagacccctggaggggacgcctctctcctgcctagaggcgaggaagacccctgtactggccggggaggagacccccagaagtggaaagaagggagctttccgtagggaagcagagtgagaccaccctagcgcgcccccgcccctccaaacacacactctcaacagttcaggactttggaggcaaagagagacggggctgtgcctgtggagtaggcaccctcggcccaccactattcacaggagacaggagtccttacgttcagaagccactccagggaaagaagaggaa

SEQ ID NO: 329012 - DNA, 429 bp, Homo sapiens
gttagtgctttctttcatcttctctctgtcattgtctggcactagtgggtgtagggggttgagctggtggatcgtgggtttcactgccggggaagacagagtgatgactcagaaaatccaatgggaaatgtgatccaagggagctcctggatttgaacccacatcttgctgcagaagctctgagaaatgggtttcttagtgtttggggactaaagggatgggattcattttaggtcccttagggaagtggatgttttcatgctgaggaaaagggttatcggaaaacagctgcattttgagaacatgcatactgtgtagcagtgatttacacaacccaaccagtggtaagattcccataccacccttcacccttgggccttttcccctggagagtgggctgtcatgaaaatcacggtggcatctggggtc

SEQ ID NO: 329013 - DNA, 4846 bp, Homo sapiens
aagaggaatcggctttcagccttctggagaggggaagacctcgcccctcaacttcctcgtgcctagacagtggaacggggtggagcccctccgctcctatctccagcagacagaaagagccctccacctcagaaagatccagtttgggggggaggggaactcccccaagggggaagagacaactcctggttgggagaggctcctcccctcctcccccgggtaacaagcagggtgtggggggtgtgccaccttccccaagtaggacctccttctcctccccctccccctcctccaaccttgactcctcatcctcaggggacccagttcccctcaccaacttgggaggctcagcctcgtccaggaagagccactgaggatgagagccgtcacctgcctctgaagaggggaatccctccaaccccaaactccagtaccaggtggttccctccctttgccggaggaaccttggagacagaacccagaagtaccatggcttctgacctagagagtagcctcacctccatagactggctcccccagctgaccctccgagctaccattgagaagcttggaagtgcctcccaggctgggcctcccgggagcagccgcaagtgttcaccagggtcacccacagatcctaatgccaccctgagcaaagacgaggcagcagtgcaccaggacggcaagccacgatacagctatgccactctcatcacctatgccatcaactcctctccagccaagaagatgaccctcagcgagatttaccgctggatctgtgataacttcccctattacaagaatgctggcattggttggaagaattcaatacggcacaacctttctctcaacaagtgtttccggaaggtgcccagacctcgggatgaccctgggaagggttcctattggacaattgacacctgccctgacatttcccgaaagagaagacaccctccagatgatgatctgtcccaagactcaccagaacaggaggcaagcaagagcccacggggaggcgttgcagggagtggagaagcctcactgcctcctgaggggaatccgcagatgtcacttcagagccccacatctatagccagctacagccagggcacaggatctgtggatggtggagcagtggcagcaggggcttcaggccgagaaagtgctgagggtccccctcccctctataacaccaaccatgactttaaattctcctactcagagatcaactttcaggatctaagctggtccttccgcaacctctataagtccatgctggagaagtcctcttcctcctctcagcacggcttttcttctctcctgggggacatcccaccctcgaacaactactacatgtatcacagcagcagccgccacagccacctccccagcagtcccagccacagcagcagcaggcacctgcccagggcccctcagctgtagggggtgctcctccactgcacaccccaagcacagatggttgtaccccaccagggggaaagcaagctggggcggaaggctatgggcctccccctgtaatggccatgcatccacccccgctgcagcatggaggctaccaccctcatcagcaccatccccactcccaccctgcccagcagccaccacctccacagccacaggcacaaggccaggctcccatcaacaacactggctttgcctttccttctgactggtgctctaatattgactctttaaaggaaagcttcaagatggtgaatcggctcaattggtccagcattgagcagtcacaattctcagaactgatggagagtctacgacaggcagagcagaagaactggaccctcgaccagcatcacattgccaatctgtgtgactccctcaaccacttccttactcagactggtcacgtgccccctcaagggggtacccaccgcccaccagcccctgcccgtattgctgactcctgtgccctcaccagtggcaaacaggagtcagccatgagccaagtgaactcttatgggcacccacaagctccccacctctaccctggcccatcaccaatgtacccaatccccacccaggactcagcaggatacaatcgcccagcacaccatatggtccctcggccatcagtgccacctcctggtgccaatgaggagatccctgatgacttcgactgggacttgatcacttagtgcatcacagagtgtggacatcagcccagggccgcgtggtgaaatctggcagtggggaaagagcaaccccagcccgtcccttccccccgtctgtatatagacatatatcctctttttgttctttctctgtcagagaagccactgcaagatgctgccgaagataaccctctctttcctgcctcattcttctctcttccttcctgttttttcctagttcttttattattattcttatattattattattattattggttatatactgtccatagtctcctgtccctacatcatggatcatgtccaccttttgctaatttaaaatcatcaggctggaagatgaagccatgatagctacagagaaaggttttagactccagtttacctttctcttggagaaactcaatgctaatcccaccttttggccctaaattgttttttgttcccatcagtttcaggccaggactggagaggccacattaccaagtagaaagggtctgaaacattacttggcagccaagaatttggaggttttaaaatggtgctaattctgtcctctgaggtcttccttgtccctttataccttcaatccttacttctgccagtctgtatttcctatcaagggtgaaagtgatgatggtggtgcaggagggtgacaataaaatcctagtggaattggagaccattggaagggatggaatataagtcagtgtgaaactgagtatacactgccatgttacatcagtgtccattggcttgttttgagcctgttctctaagaagataggattggttttagcccaaactctgcttctatggtagggcatgaggacaactattcagcatggttttagcttcttggagatgattccaacttaactattttggctttttaaacataattttctctgaaaattaattgtggctcttatttgcatttacgaatgatcttcccatccctttttcccattcagcaaatattagtttgtcctcctttaattgtttgcccaaatcttccacccatcttttttcttccctcattttctgggattctcaagaaagaaaaagtaacccattatcactctgagtttcgtcgtgccctgagacatgatgggaatctcattcccacctctcatagcagagccaaacctttagtgttggtggtaggaggatggggagaggaaaaaagagctggcaaagaaatggatagggaatattttagttctttaaatatataggcagatgcttctcttggaatccagatcatctggctgaagcttttgcaagtaggctttgaggggtgaaggagattggtggaggagagtaaataatctagaggcaagagttcagtgagggccaagggggacccccagaaaaaggtatggagctaactcatctcttttacaaggggtggccatgacttactgttgcaaagtactcagtgtatatttaatgttgattgttgaattttagttacgagagggaagaacaattttacttctgtccttatttcacttgctgaaaagctgtgggacaaaatgtatggaatagacaaggccactttctttgtgatttctgcttttcatgcatattattttatttacccataatttccaagaggtttggcgttccgctctcctgcttttttctttcatccacccctttcctttttttggaagggggttatatatgagagttcattgaagaagtccagtgaggctgaagtaaaggggcaagatagggcagttaactaaagagcactttatttctttgaagcctttctaagaaagaaatgggggtgcgagtggcttgaatctcccatgatgttggagggcacttagtggggttgaagtatgacataatatttcccattggggaaaggagaatttctcttagagggtggcaaaatgcctttgcccagtgtccctattttaggcatcttttccttccttattccttccagtcagggtgtgtcctatacaaaacttcccatcagttctcctcaatattccccatttgtaaatgatcacttctcttttctaaacccttttcctgttcagatccatacaggatttgcaagggtaggatcatacatgcaaatgccccttgttcatctgtgtcttctgcaaactagtctcatgaagaattctggcgtgcagccagggtagctgaagtttgggtctgggactggagattggccattaggcctcctgagattccagctcccttccaccaagcccagtcttgctacgtggcacagggcaaacctgactccctttgggcctcagtttcccctccccttcatgaaatgaaaagaatactactttttcttgttggtctagcattgctggacacaaagtgtagtcattattgttgtattgggtgatgtgtgcaaaactgcagaagctcactgcctataagaggaaataagagagaaagtggaggagagggacaaaaggagtaattatttggtatagatccacccatcccaacctttctctcctcagtccctgctcctcatgtttctggtttggtgagtcctttgtgccaccacccataatgctttgcattgctgcatcctgggaagggggtatatggtctcacaagttgttgtcattgtttttttgcatgctttcttaataaaaaaaaaaaagaatgtttacagttttatct

SEQ ID NO: 329014 - DNA, 1342 bp, Homo sapiens
cgtgggctggacagcgtggtgacgtcgcaacgcggcgcagggtgagagcgcgcgcttgcggacgcggcggcattaaacggttgcaggcgtagcagagtggtcgttgtctttctaggtctcagccggtcgtcgcgacgttcgcccgctcgctctgaggctcctgaagccgaaaccagctagactttcctccttcccgcctgcctgtagcggcgttgttgccactccgccaccatgttcgaggcgcgcctggtccagggctccatcctcaagaaggtgttggaggcactcaaggacctcatcaacgaggcctgctgggatattagctccagcggtgtaaacctgcagagcatggactcgtcccacgtctctttggtgcagctcaccctgcggtctgagggcttcgacacctaccgctgcgaccgcaacctggccatgggcgtgaacctcaccagtatgtccaaaatactaaaatgcgccggcaatgaagatatcattacactaagggccgaagataacgcggataccttggcgctagtatttgaagcaccaaaccaggagaaagtttcagactatgaaatgaagttgatggatttagatgttgaacaacttggaattccagaacaggagtacagctgtgtagtaaagatgccttctggtgaatttgcacgtatatgccgagatctcagccatattggagatgctgttgtaatttcctgtgcaaaagacggagtgaaattttctgcaagtggagaacttggaaatggaaacattaaattgtcacagacaagtaatgtcgataaagaggaggaagctgttaccatagagatgaatgaaccagttcaactaacttttgcactgaggtacctgaacttctttacaaaagccactccactctcttcaacggtgacactcagtatgtctgcagatgtaccccttgttgtagagtataaaattgcggatatgggacacttaaaatactacttggctcccaagatcgaggatgaagaaggatcttaggcattcttaaaattcaagaaaataaaactaagctctttgagaactgcttctaagatgccagcatatactgaagtcttttctgtcaccaaatttgtacctctaagtacatatgtagatattgttttctgtaaataacctatttttttctctattctctgcaatttgtttaaagaataaagtccaaagtcagatctggtctagttaacctagaagtatttttgtctcttagaaatacttgtgatttttataatacaaaagggtcttgactctaaatgcagttttaagaattgtttttgaatttaaataaagttacttgaatttcaaa

SEQ ID NO: 329015 - DNA, 1883 bp, Homo sapiens
  misc_feature (1364)..(1364): n is a, c, g, or t
  misc_feature (1369)..(1369): n is a, c, g, or t
  misc_feature (1373)..(1373): n is a, c, g, or t
  misc_feature (1376)..(1376): n is a, c, g, or t
cgtgggctggacagcgtggtgacgtcgcaacgcggcgcagggtgagagcgcgcgcttgcggacgcggcggcattaaacggttgcaggcgtagcagagtggtcgttgtctttctaggtctcagccggtcgtcgcgacgttcgcccgctcgctctgaggctcctgaagccgaaaccagctagactttcctccttcccgcctgcctgtagcggcgttgttgccactccgccaccatgttcgaggcgcgcctggtccagggctccatcctcaagaaggtgttggaggcactcaaggacctcatcaacgaggcctgctgggatattagctccagcggtgtaaacctgcagagcatggactcgtcccacgtctctttggtgcagctcaccctgcggtctgagggcttcgacacctaccgctgcgaccgcaacctggccatgggcgtgaacctcaccagtatgtccaaaatactaaaatgcgccggcaatgaagatatcattacactaagggccgaagataacgcggataccttggcgctagtatttgaagcaccaaaccaggagaaagtttcagactatgaaatgaagttgatggatttagatgttgaacaacttggaattccagaacaggagtacagctgtgtagtaaagatgccttctggtgaatttgcacgtatatgccgagatctcagccatattggagatgctgttgtaatttcctgtgcaaaagacggagtgaaattttctgcaagtggagaacttggaaatggaaacattaaattgtcacagacaagtaatgtcgataaagaggaggaagctgttaccatagagatgaatgaaccagttcaactaacttttgcactgaggtacctgaacttctttacaaaagccactccactctcttcaacggtgacactcagtatgtctgcagatgtaccccttgttgtagagtataaaattgcggatatgggacacttaaaatactacttggctcccaagatcgaggatgaagaaggatcttaggcattcttaaaattcaagaaaataaaactaagctctttgagaactgcttctaagatgccagcatatactgaagtcttttctgtcaccaaatttgtacctctaagtacatatgtagatattgttttctgtaaataacctatttttttctctattctctgcaatttgtttaaagaataaagtccaaagtcagatctggtctagttaacctagaagtatttttgtctcttagaaatacttgtgatttttataatacaaaagggtcttgactctaaatgcagttttaagaattgtttttgaatttaaataaagttacttgaatttcaaaaaaaaaaaaaacaacaacaaanaaaanaaanaanaacacaacaaaagaaaccaaaagaaaaacaaaaacaagaacacaacaacgaacaaaacacacaaacaaaaaaaaggagagagggggggcgcgcgcgcgcctcacagcagaaatgcattctccccccgcgggggggggagggcgccgcccaccgcctcctgagcgcgcgcgccgaccaacccgcagagccaataattgtgttgagaagacaacaaacaaagaagagcggggagccgggcggcacgccagccacgccaccacaaacacaaatgaaacgaaagaggaggccgagcgacggcaaggaccgacagcaacaatccataaaactaaatcaactaaaccaaaagacagccagaaagaaccagcacgaacgcacagaaacgaaccgaccgagggcggcagacaccacagacaccgcaacaagaaaagaggaggacagcacacaacgacactaccacaccacgaaaacaacaaccgacacaaaacacaacaacagcaccacaccaat

SEQ ID NO: 329016 - DNA, 1541 bp, Homo sapiens
cgtgggctggacagcgtggtgacgtcgcaacgcggcgcagggtgagagcgcgcgcttgcggacgcggcggcattaaacggttgcaggcgtagcagagtggtcgttgtctttctaggtctcagccggtcgtcgcgacgttcgcccgctcgctctgaggctcctgaagccgaaaccagctagactttcctccttcccgcctgcctgtagcggcgttgttgccactccgccaccatgttcgaggcgcgcctggtccagggctccatcctcaagaaggtgttggaggcactcaaggacctcatcaacgaggcctgctgggatattagctccagcggtgtaaacctgcagagcatggactcgtcccacgtctctttggtgcagctcaccctgcggtctgagggcttcgacacctaccgctgcgaccgcaacctggccatgggcgtgaacctcaccagtatgtccaaaatactaaaatgcgccggcaatgaagatatcattacactaagggccgaagataacgcggataccttggcgctagtatttgaagcaccaaaccaggagaaagtttcagactatgaaatgaagttgatggatttagatgttgaacaacttggaattccagaacaggagtacagctgtgtagtaaagatgccttctggtgaatttgcacgtatatgccgagatctcagccatattggagatgctgttgtaatttcctgtgcaaaagacggagtgaaattttctgcaagtggagaacttggaaatggaaacattaaattgtcacagacaagtaatgtcgataaagaggaggaagctgttaccatagagatgaatgaaccagttcaactaacttttgcactgaggtacctgaacttctttacaaaagccactccactctcttcaacggtgacactcagtatgtctgcagatgtaccccttgttgtagagtataaaattgcggatatgggacacttaaaatactacttggctcccaagatcgaggatgaagaaggatcttaggcattcttaaaattcaagaaaataaaactaagctctttgagaactgcttctaagatgccagcatatactgaagtcttttctgtcaccaaatttgtacctctaagtacatatgtagatattgttttctgtaaataacctatttttttctctattctctgcaatttgtttaaagaataaagtccaaagtcagatctggtctagttaacctagaagtatttttgtctcttagaaatacttgtgatttttataatacaaaagggtcttgactctaaatgcagttttaagaattgtttttgaatttaaataaagttacttgaatttcaaaaaaaaaaaggggggcggtttaaaaatcctgagggccaagtaaggtaccgtttttgtaaagggggcctagagggagaataaagcagaaggcgcgttaaggtcggcggaaggattggggttgggagactttggggggcaggggaacatagagataagaggattaataggtagtgaaagatggggaagtaggtaataaggaa

SEQ ID NO: 329017 - DNA, 1718 bp, Homo sapiens
cgtgggctggacagcgtggtgacgtcgcaacgcggcgcagggtgagagcgcgcgcttgcggacgcggcggcattaaacggttgcaggcgtagcagagtggtcgttgtctttctaggtctcagccggtcgtcgcgacgttcgcccgctcgctctgaggctcctgaagccgaaaccagctagactttcctccttcccgcctgcctgtagcggcgttgttgccactccgccaccatgttcgaggcgcgcctggtccagggctccatcctcaagaaggtgttggaggcactcaaggacctcatcaacgaggcctgctgggatattagctccagcggtgtaaacctgcagagcatggactcgtcccacgtctctttggtgcagctcaccctgcggtctgagggcttcgacacctaccgctgcgaccgcaacctggccatgggcgtgaacctcaccagtatgtccaaaatactaaaatgcgccggcaatgaagatatcattacactaagggccgaagataacgcggataccttggcgctagtatttgaagcaccaaaccaggagaaagtttcagactatgaaatgaagttgatggatttagatgttgaacaacttggaattccagaacaggagtacagctgtgtagtaaagatgccttctggtgaatttgcacgtatatgccgagatctcagccatattggagatgctgttgtaatttcctgtgcaaaagacggagtgaaattttctgcaagtggagaacttggaaatggaaacattaaattgtcacagacaagtaatgtcgataaagaggaggaagctgttaccatagagatgaatgaaccagttcaactaacttttgcactgaggtacctgaacttctttacaaaagccactccactctcttcaacggtgacactcagtatgtctgcagatgtaccccttgttgtagagtataaaattgcggatatgggacacttaaaatactacttggctcccaagatcgaggatgaagaaggatcttaggcattcttaaaattcaagaaaataaaactaagctctttgagaactgcttctaagatgccagcatatactgaagtcttttctgtcaccaaatttgtacctctaagtacatatgtagatattgttttctgtaaataacctatttttttctctattctctgcaatttgtttaaagaataaagtccaaagtcagatctggtctagttaacctagaagtatttttgtctcttagaaatacttgtgatttttataatacaaaagggtcttgactctaaatgcagttttaagaattgtttttgaatttaaataaagttacttgaatttcaaaaaaaaaaaaaaaaaaaaaaaaaggggggggggcaaaaaagattccctgggggggcccaggttttaggggtacccggttttttggtacaaagggggccccaaaaggggggccaaatataataaagcctaggcaggcccgctggtttaccaagcgttcgtgtgtcgtgggacaaactggcctagcctgggactcgtggggaagggacccttaactcctgtggtgtgggcacctaatgtggccaaactaccctaaggaaattaaagccccagggaaatataacattctaagggtttatgggtgtaaccatgctgaaataagctgcgctgaaagtaggtaacgggtagctatgaaatttaaggttgacacataaaacgct

SEQ ID NO: 329018 - DNA, 933 bp, Homo sapiens
cgtgggctggacagcgtggtgacgtcgcaacgcggcgcagggtgagagcgcgcgcttgcggacgcggcggcattaaacggttgcaggcgtagcagagtggtcgttgtctttctaggtctcagccggtcgtcgcgacgttcgcccgctcgctctgaggctcctgaagccgaaaccagctagactttcctccttcccgcctgcctgtagcggcgttgttgccactccgccaccatgttcgaggcgcgcctggtccagggctccatcctcaagaaggtgttggaggcactcaaggacctcatcaacgaggcctgctgggatattagctccagcggtgtaaacctgcagagcatggactcgtcccacgtctctttggtgcagctcaccctgcggtctgagggcttcgacacctaccgctgcgaccgcaacctggccatgggcgtgaacctcaccagtatgtccaaaatactaaaatgcgccggcaatgaagatatcattacactaagggccgaagataacgcggataccttggcgctagtatttgaagcaccaaaccaggagaaagtttcagactatgaaatgaagttgatggatttagatgttgaacaacttggaattccagaacaggagtacagctgtgtagtaaagatgccttctggtgaatttgcacgtatatgccgagatctcagccatattggagatgctgttgtaatttcctgtgcaaaagacggagtgaaattttctgcaagtggagaacttggaaatggaaacattaaattgtcacagacaagtaatgtcgataaagaggaggaagctgttaccatagagatgaatgaaccagttcaactaacttttgcactgaggtacctgaacttctttacaaaagccactccacaaggggtacatctgcagacatactgagtgtcaccgtcgacg

SEQ ID NO: 329019 - DNA, 1266 bp, Homo sapiens
cgtgggctggacagcgtggtgacgtcgcaacgcggcgcaggctcagccggtcgtcgcgacgttcgcccgctcgctctgaggctcctgaagccgaaaccagctagactttcctccttcccgcctgcctgtagcggcgttgttgccactccgccaccatgttcgaggcgcgcctggtccagggctccatcctcaagaaggtgttggaggcactcaaggacctcatcaacgaggcctgctgggatattagctccagcggtgtaaacctgcagagcatggactcgtcccacgtctctttggtgcagctcaccctgcggtctgagggcttcgacacctaccgctgcgaccgcaacctggccatgggcgtgaacctcaccagtatgtccaaaatactaaaatgcgccggcaatgaagatatcattacactaagggccgaagataacgcggataccttggcgctagtatttgaagcaccaaaccaggagaaagtttcagactatgaaatgaagttgatggatttagatgttgaacaacttggaattccagaacaggagtacagctgtgtagtaaagatgccttctggtgaatttgcacgtatatgccgagatctcagccatattggagatgctgttgtaatttcctgtgcaaaagacggagtgaaattttctgcaagtggagaacttggaaatggaaacattaaattgtcacagacaagtaatgtcgataaagaggaggaagctgttaccatagagatgaatgaaccagttcaactaacttttgcactgaggtacctgaacttctttacaaaagccactccactctcttcaacggtgacactcagtatgtctgcagatgtaccccttgttgtagagtataaaattgcggatatgggacacttaaaatactacttggctcccaagatcgaggatgaagaaggatcttaggcattcttaaaattcaagaaaataaaactaagctctttgagaactgcttctaagatgccagcatatactgaagtcttttctgtcaccaaatttgtacctctaagtacatatgtagatattgttttctgtaaataacctatttttttctctattctctgcaatttgtttaaagaataaagtccaaagtcagatctggtctagttaacctagaagtatttttgtctcttagaaatacttgtgatttttataatacaaaagggtcttgactctaaatgcagttttaagaattgtttttgaatttaaataaagttacttgaatttcaaa

SEQ ID NO: 329020 - DNA, 1288 bp, Homo sapiens
cgtgggctggacagcgtggtgacgtcgcaacgcggcgcagggtgagagcgcgcgcttgcggacgcggcggcattaaacggttgcaggcgtagcagagtggtcgttgtctttctaggtctcagccggtcgtcgcgacgttcgcccgctcgctctgaggctcctgaagccgaaaccagctagactttcctccttcccgcctgcctgtagcggcgttgttgccactccgccaccatgttcgaggcgcgcctggtccagggctccatcctcaagaaggtgttggaggcactcaaggacctcatcaacgaggcctgctgggatattagctccagcggtgtaaacctgcagagcatggactcgtcccacgtctctttggtgcagctcaccctgcggtctgagggcttcgacacctaccgctgcgaccgcaacctggccatgggcgtgaacctcaccagtatgtccaaaatacttaccttggcgctagtatttgaagcaccaaaccaggagaaagtttcagactatgaaatgaagttgatggatttagatgttgaacaacttggaattccagaacaggagtacagctgtgtagtaaagatgccttctggtgaatttgcacgtatatgccgagatctcagccatattggagatgctgttgtaatttcctgtgcaaaagacggagtgaaattttctgcaagtggagaacttggaaatggaaacattaaattgtcacagacaagtaatgtcgataaagaggaggaagctgttaccatagagatgaatgaaccagttcaactaacttttgcactgaggtacctgaacttctttacaaaagccactccactctcttcaacggtgacactcagtatgtctgcagatgtaccccttgttgtagagtataaaattgcggatatgggacacttaaaatactacttggctcccaagatcgaggatgaagaaggatcttaggcattcttaaaattcaagaaaataaaactaagctctttgagaactgcttctaagatgccagcatatactgaagtcttttctgtcaccaaatttgtacctctaagtacatatgtagatattgttttctgtaaataacctatttttttctctattctctgcaatttgtttaaagaataaagtccaaagtcagatctggtctagttaacctagaagtatttttgtctcttagaaatacttgtgatttttataatacaaaagggtcttgactctaaatgcagttttaagaattgtttttgaatttaaataaagttacttgaatttcaaa

SEQ ID NO: 329021 - DNA, 1136 bp, Homo sapiens
cgtgggctggacagcgtggtgacgtcgcaacgcggcgcagggtgagagcgcgcgcttgcggacgcggcggcattaaacggttgcaggcgtagcagagtggtcgttgtctttctaggtctcagccggtcgtcgcgacgttcgcccgctcgctctgaggctcctgaagccgaaaccagctagactttcctccttcccgcctgcctgtagcggcgttgttgccactccgccaccatgttcgaggcgcgctatgtccaaaatactaaaatgcgccggcaatgaagatatcattacactaagggccgaagataacgcggataccttggcgctagtatttgaagcaccaaaccaggagaaagtttcagactatgaaatgaagttgatggatttagatgttgaacaacttggaattccagaacaggagtacagctgtgtagtaaagatgccttctggtgaatttgcacgtatatgccgagatctcagccatattggagatgctgttgtaatttcctgtgcaaaagacggagtgaaattttctgcaagtggagaacttggaaatggaaacattaaattgtcacagacaagtaatgtcgataaagaggaggaagctgttaccatagagatgaatgaaccagttcaactaacttttgcactgaggtacctgaacttctttacaaaagccactccactctcttcaacggtgacactcagtatgtctgcagatgtaccccttgttgtagagtataaaattgcggatatgggacacttaaaatactacttggctcccaagatcgaggatgaagaaggatcttaggcattcttaaaattcaagaaaataaaactaagctctttgagaactgcttctaagatgccagcatatactgaagtcttttctgtcaccaaatttgtacctctaagtacatatgtagatattgttttctgtaaataacctatttttttctctattctctgcaatttgtttaaagaataaagtccaaagtcagatctggtctagttaacctagaagtatttttgtctcttagaaatacttgtgatttttataatacaaaagggtcttgactctaaatgcagttttaagaattgtttttgaatttaaataaagttacttgaatttcaaa

SEQ ID NO: 329022 - DNA, 783 bp, Homo sapiens
  misc_feature (23)..(23): n is a, c, g, or t
  misc_feature (29)..(29): n is a, c, g, or t
  misc_feature (61)..(61): n is a, c, g, or t
  misc_feature (85)..(85): n is a, c, g, or t
  misc_feature (107)..(107): n is a, c, g, or t
  misc_feature (121)..(121): n is a, c, g, or t
aggggacttcttctttaaatttnaacccncccggttaccaaggaacccaggaggtcccaanctggggtagtaaaaaatgcctttntggggggattttggcacggtanaatgcccgaggttntccagcccatattggagatgctgttgtaatttcctgtgcaaaagacggagtgaaattttctgcaagtggagaacttggaaatggaaacattaaattgtcacagacaagtaatgtcgataaagaggaggaagctgttaccatagagatgaatgaaccagttcaactaacttttgcactgaggtacctgaacttctttacaaaagccactccactctcttcaacggtgacactcagtatgtctgcagatgtaccccttgttgtagagtataaaattgcggatatgggacacttaaaatactacttggctcccaagatcgaggatgaagaaggatcttaggcattcttaaaattcaagaaaataaaactaagctctttgagaactgcttctaagatgccagcatatactgaagtcttttctgtcaccaaatttgtacctctaagtacatatgtagatattgttttctgtaaataacctatttttttctctattctctgcaatttgtttaaagaataaagtccaaagtcagatctggtctagttaacctagaagtatttttgtctcttagaaatacttgtgatttttataatacaaaagggtcttgactctaaatgcagttttaagaattgtttttgaatttaaataaagttacttgaatttcaaa

SEQ ID NO: 329023 - DNA, 1829 bp, Homo sapiens
  misc_feature (1310)..(1310): n is a, c, g, or t
  misc_feature (1315)..(1315): n is a, c, g, or t
  misc_feature (1319)..(1319): n is a, c, g, or t
  misc_feature (1322)..(1322): n is a, c, g, or t
cgtgggctggacagcgtggtgacgtcgcaacgcggcgcagggtgagagcgcgcgcttgcggacgcggcggcattaaacggttgcaggcgtagcagagtggtcgttgtctttctaggtctcagccggtcgtcgcgacgttcgcccgctcgctctgaggctcctgaagccgaaaccagctagactttcctccttcccgcctgcctgtagcggcgttgttgccactccgccaccatgttcgaggcgcgcctggtccagggctccatcctcaagaaggtgttggaggcactcaaggacctcatcaacgaggcctgctgggatattagctccagcggtgtaaacctgcagagcatggactcgtcccacgtctctttggtgcagctcaccctgcggtctgagggcttcgacacctaccgctgcgaccgcaacctggccatgggcgtgaacctcaccagtatgtccaaaatacttaccttggcgctagtatttgaagcaccaaaccaggagaaagtttcagactatgaaatgaagttgatggatttagatgttgaacaacttggaattccagaacaggagtacagctgtgtagtaaagatgccttctggtgaatttgcacgtatatgccgagatctcagccatattggagatgctgttgtaatttcctgtgcaaaagacggagtgaaattttctgcaagtggagaacttggaaatggaaacattaaattgtcacagacaagtaatgtcgataaagaggaggaagctgttaccatagagatgaatgaaccagttcaactaacttttgcactgaggtacctgaacttctttacaaaagccactccactctcttcaacggtgacactcagtatgtctgcagatgtaccccttgttgtagagtataaaattgcggatatgggacacttaaaatactacttggctcccaagatcgaggatgaagaaggatcttaggcattcttaaaattcaagaaaataaaactaagctctttgagaactgcttctaagatgccagcatatactgaagtcttttctgtcaccaaatttgtacctctaagtacatatgtagatattgttttctgtaaataacctatttttttctctattctctgcaatttgtttaaagaataaagtccaaagtcagatctggtctagttaacctagaagtatttttgtctcttagaaatacttgtgatttttataatacaaaagggtcttgactctaaatgcagttttaagaattgtttttgaatttaaataaagttacttgaatttcaaaaaaaaaaaaaacaacaacaaanaaaanaaanaanaacacaacaaaagaaaccaaaagaaaaacaaaaacaagaacacaacaacgaacaaaacacacaaacaaaaaaaaggagagagggggggcgcgcgcgcgcctcacagcagaaatgcattctccccccgcgggggggggagggcgccgcccaccgcctcctgagcgcgcgcgccgaccaacccgcagagccaataattgtgttgagaagacaacaaacaaagaagagcggggagccgggcggcacgccagccacgccaccacaaacacaaatgaaacgaaagaggaggccgagcgacggcaaggaccgacagcaacaatccataaaactaaatcaactaaaccaaaagacagccagaaagaaccagcacgaacgcacagaaacgaaccgaccgagggcggcagacaccacagacaccgcaacaagaaaagaggaggacagcacacaacgacactaccacaccacgaaaacaacaaccgacacaaaacacaacaacagcaccacaccaat

SEQ ID NO: 329024 - DNA, 930 bp, Homo sapiens
cgtgggctggacagcgtggtgacgtcgcaacgcggcgcagggtgagagcgcgcgcttgcggacgcggcggcattaaacggttgcaggcgtagcagagtggtcgttgtctttctaggtctcagccggtcgtcgcgacgttcgcccgctcgctctgaggctcctgaagccgaaaccagctagactttcctccttcccgcctgcctgtagcggcgttgttgccactccgccaccatgttcgaggcgcgcctggtccagggctccatcctcaagaaggtgttggaggcactcaaggacctcatcaacgaggcctgctgggatattagctccagcggtgtaaacctgcagagcatggactcgtcccacgtctctttggtgcagctcaccctgcggtctgagggcttcgacacctaccgctgcgaccgcaacctggccatgggcgtgaacctcaccaggtgagcctcgcggccccgggaagccggccccggcccgcctgcacctccggtgcttggcgggagcgctttcgagcctagccctcattggctggcgtgggccatccgcgccttctcattggcctgccacgcagtggggtggggcccagctgagcgcgcggttcggaaaagcccgcgctggctgctgcgcgaacctgctttttcgcgccaaagtcacaaagcgggtggtggcgggaaaatcaagggtttttccgcagtgccaggaacactgttccagggctctttgctcactaaatcctgttggccttgaatggacgctttagctgtggctttcttgtttctgagacggtctcggtgtgttgcccgggctggtctccaacttctgggctcaagcgatcctcccggctcagtcgcggttgactttaaatgctttataatgcccttgcgagaaatgtggcagcctgtcatcctacttagtggc

SEQ ID NO: 329025 - DNA, 467 bp, Homo sapiens
ttttgtaggtagtcatatgtgatacatactcctcagtaattaaccatcttcctgtctttcagttgtagagtataaaattgcggatatgggacacttaaaatactacttggctcccaagatcgaggatgaagaaggatcttaggcattcttaaaattcaagaaaataaaactaagctctttgagaactgcttctaagatgccagcatatactgaagtcttttctgtcaccaaatttgtacctctaagtacatatgtagatattgttttctgtaaataacctatttttttctctattctctgcaatttgtttaaagaataaagtccaaagtcagatctggtctagttaacctagaagtatttttgtctcttagaaatacttgtgatttttataatacaaaagggtcttgactctaaatgcagttttaagaattgtttttgaatttaaataaagttacttgaatttcaaa

SEQ ID NO: 329026 - DNA, 422 bp, Homo sapiens
gctcttgttccctggatggtgcatttaatagccatttatttttttgagtggagtttgttaagaaattacgcaagtcatattttaaagtaatcagaaaatattgattctgagttgtttaggtgttgccttttaagaaagtgagggtgccaaatcattaaatttctaacaattaacttttggaaaatttttgttcttaataggaacaggagtacagctgtgtagtaaagatgccttctggtgaatttgcacgtatatgccgagatctcagccatattggagatgctgttgtaatttcctgtgcaaaagacggagtgaaattttctgcaagtggagaacttggaaatggaaacattaaattgtcacagacaagtaatgtcgataaagaggaggaagctgtaagtagtttttaagtaaaaagaaaa

SEQ ID NO: 329027 - DNA, 1305 bp, Homo sapiens
cgtgggctggacagcgtggtgacgtcgcaacgcggcgcagggtgagagcgcgcgcttgcggacgcggcggcattaaacggttgcaggcgtagcagagtggtcgttgtctttctaggtctcagccggtcgtcgcgacgttcgcccgctcgctctgaggctcctgaagccgaaaccagctagactttcctccttcccgcctgcctgtagcggcgttgttgccactccgccaccatgttcgaggcgcgcctggtccagggctccatcctcaagaaggtgttggaggcactcaaggacctcatcaacgaggcctgctgggatattagctccagcggtgtaaacctgcagagcatggactcgtcccacgtctctttggtgcagctcaccctgcggtctgagggcttcgacacctaccgctgcgaccgcaacctggccatgggcgtgaacctcaccagtatgtccaaaatactaaaatgcgccggcaatgaagatatcattacactaagggccgaagataacgcggataccttggcgctagtatttgaagcaccaaaccaggagaaagtttcagactatgaaatgaagttgatggatttagatgttgaacaacttggaattccagaacaggagtacagctgtgtagtaaagatgccttctggtgaatttgcacgtatatgccgagatctcagccatattggagatgctgttgtaatttcctgtgcaaaagacggagtgaaattttctgcaagtggagaacttggaaatggaaacattaaattgtcacagacaagtaatgtcgataaagaggaggaagctgttaccatagagatgaatgaaccagttcaactaacttttgcactgaggtacctgaacttctttacaaaagccactccactctcttcaacggtgacactcagtatgtctgcagatgtaccccttgttgtagagtataaaattgcggatatgggacacttaaaatactacttggctcccaagatcgaggatgaagaaggatcttaggcattcttaaaattcaagaaaataaaactaagctctttgagaactgcttctaagatgccagcatatactgaagtcttttctgtcaccaaatttgtacctctaagtacatatgtagatattgttttctgtaaataacctatttttttctctattctctgcaatttgtttaaagaataaagtccaaagtcagatctggtctagttaacctagaagtatttttgtctcttagaaccaatccccctttttcctcccatcccggtcccccgtcataatgccggggttttcctt

SEQ ID NO: 329028 - DNA, 1380 bp, Homo sapiens
ctctagaggatgccttatgaatcgacggtttctcgtggccggagctggcgccctggttctggaggtaaccggttactgagggcgagaagcgccacccggaggctctagcctgacaaatgcttgctgacctgggccagagctcttcccttacgcaactcagccggtcgtcgcgacgttcgcccgctcgctctgaggctcctgaagccgaaaccagctagactttcctccttcccgcctgcctgtagcggcgttgttgccactccgccaccatgttcgaggcgcgcctggtccagggctccatcctcaagaaggtgttggaggcactcaaggacctcatcaacgaggcctgctgggatattagctccagcggtgtaaacctgcagagcatggactcgtcccacgtctctttggtgcagctcaccctgcggtctgagggcttcgacacctaccgctgcgaccgcaacctggccatgggcgtgaacctcaccagtatgtccaaaatactaaaatgcgccggcaatgaagatatcattacactaagggccgaagataacgcggataccttggcgctagtatttgaagcaccaaaccaggagaaagtttcagactatgaaatgaagttgatggatttagatgttgaacaacttggaattccagaacaggagtacagctgtgtagtaaagatgccttctggtgaatttgcacgtatatgccgagatctcagccatattggagatgctgttgtaatttcctgtgcaaaagacggagtgaaattttctgcaagtggagaacttggaaatggaaacattaaattgtcacagacaagtaatgtcgataaagaggaggaagctgttaccatagagatgaatgaaccagttcaactaacttttgcactgaggtacctgaacttctttacaaaagccactccactctcttcaacggtgacactcagtatgtctgcagatgtaccccttgttgtagagtataaaattgcggatatgggacacttaaaatactacttggctcccaagatcgaggatgaagaaggatcttaggcattcttaaaattcaagaaaataaaactaagctctttgagaactgcttctaagatgccagcatatactgaagtcttttctgtcaccaaatttgtacctctaagtacatatgtagatattgttttctgtaaataacctatttttttctctattctctgcaatttgtttaaagaataaagtccaaagtcagatctggtctagttaacctagaagtatttttgtctcttagaaatacttgtgatttttataatacaaaagggtcttgactctaaatgcagttttaagaattgtttttgaatttaaataaagttacttgaatttcaaa

SEQ ID NO: 329029 - DNA, 1282 bp, Homo sapiens
gctggtacccgcgtccaggtactattcccggagataatccggtccgcaccaccaacgctcagccggtcgtcgcgacgttcgcccgctcgctctgaggctcctgaagccgaaaccagctagactttcctccttcccgcctgcctgtagcggcgttgttgccactccgccaccatgttcgaggcgcgcctggtccagggctccatcctcaagaaggtgttggaggcactcaaggacctcatcaacgaggcctgctgggatattagctccagcggtgtaaacctgcagagcatggactcgtcccacgtctctttggtgcagctcaccctgcggtctgagggcttcgacacctaccgctgcgaccgcaacctggccatgggcgtgaacctcaccagtatgtccaaaatactaaaatgcgccggcaatgaagatatcattacactaagggccgaagataacgcggataccttggcgctagtatttgaagcaccaaaccaggagaaagtttcagactatgaaatgaagttgatggatttagatgttgaacaacttggaattccagaacaggagtacagctgtgtagtaaagatgccttctggtgaatttgcacgtatatgccgagatctcagccatattggagatgctgttgtaatttcctgtgcaaaagacggagtgaaattttctgcaagtggagaacttggaaatggaaacattaaattgtcacagacaagtaatgtcgataaagaggaggaagctgttaccatagagatgaatgaaccagttcaactaacttttgcactgaggtacctgaacttctttacaaaagccactccactctcttcaacggtgacactcagtatgtctgcagatgtaccccttgttgtagagtataaaattgcggatatgggacacttaaaatactacttggctcccaagatcgaggatgaagaaggatcttaggcattcttaaaattcaagaaaataaaactaagctctttgagaactgcttctaagatgccagcatatactgaagtcttttctgtcaccaaatttgtacctctaagtacatatgtagatattgttttctgtaaataacctatttttttctctattctctgcaatttgtttaaagaataaagtccaaagtcagatctggtctagttaacctagaagtatttttgtctcttagaaatacttgtgatttttataatacaaaagggtcttgactctaaatgcagttttaagaattgtttttgaatttaaataaagttacttgaatttcaaa

SEQ ID NO: 329030 - DNA, 1287 bp, Homo sapiens
cgtgggctggacagcgtggtgacgtcgcaacgcggcgcagggtgagagcgcgcgcttgcggacgcggcggcattaaacggttgcaggcgtagcagagtggtcgttgtctttctaggtctcagccggtcgtcgcgacgttcgcccgctcgctctgaggctcctgaagccgaaaccagctagactttcctccttcccgcctgcctgtagcggcgttgttgccactccgccaccatgttcgaggcgcgcctggtccagggctccatcctcaagaaggtgttggaggcactcaaggacctcatcaacgaggcctgctgggatattagctccagcggtgtaaacctgcagagcatggactcgtcccacgtctctttggtgcagctcaccctgcggtctgagggcttcgacacctaccgctgcgaccgcaacctggccatgggcgtgaacctcaccagtatgtccaaaatactaaaatgcgccggcaatgaagatatcattacactaagggccgaagataacgcggataccttggcgctagtatttgaagcaccaaaccaggagaaagtttcagactatgaaatgaagttgatggatttagatgttgaacaacttggaattccagaacaggagtacagctgtgtagtaaagatgccttctggtgaatttgcacgtatatgccgagatctcagccatattggagatgctgttgtaatttcctgtgcttgtcacagacaagtaatgtcgataaagaggaggaagctgttaccatagagatgaatgaaccagttcaactaacttttgcactgaggtacctgaacttctttacaaaagccactccactctcttcaacggtgacactcagtatgtctgcagatgtaccccttgttgtagagtataaaattgcggatatgggacacttaaaatactacttggctcccaagatcgaggatgaagaaggatcttaggcattcttaaaattcaagaaaataaaactaagctctttgagaactgcttctaagatgccagcatatactgaagtcttttctgtcaccaaatttgtacctctaagtacatatgtagatattgttttctgtaaataacctatttttttctctattctctgcaatttgtttaaagaataaagtccaaagtcagatctggtctagttaacctagaagtatttttgtctcttagaaatacttgtgatttttataatacaaaagggtcttgactctaaatgcagttttaagaattgtttttgaatttaaataaagttacttgaatttcaaa

SEQ ID NO: 329031 - DNA, 530 bp, Homo sapiens
cgtgggctggacagcgtggtgacgtcgcaacgcggcgcagggtgagagcgcgcgcttgcggacgcggcggcattaaacggttgcaggcgtagcagagtggtcgttgtctttctaggtctcagccggtcgtcgcgacgttcgcccgctcgctctgaggctcctgaagccgaaaccagctagactttcctccttcccgcctgcctgtagcggcgttgttgccactccgccaccatgttcgaggcgcgctatgtccaaaatactaaaatgcgccggcaatgaagatatcattacactaagggccgaagataacgcggataccttggcgctagtatttgaagcaccaaaccaggagaaagtttcagactatgaaatgaagttgatggatttagatgttgaacaacttggaattccagaacaggagtacagctgtgtagatatagaagagtgactttcaaaagtgcactcttctatatctacaggggaggtgatagcatttgctttcgtgtaaacttatgtaatgcaaaattttt

SEQ ID NO: 329032 - DNA, 328 bp, Homo sapiens
gcacctagttctgtaactgggctgaacaagaggcaggacagatgggagaaacagctgggttctgccatctttacactctccaacacccagactcctaacccaggaaactgcctggagaggaggcagggaggaaagctgtttagtgcttcagtgctgtaaaacacctaggaataccaaacctttgaagaaaatctccagcagaaaatactgagacctaagcaaacgcaccgcagtgagtagggaaggggaagaagtaaacagagatcactgtaaagagatcaatgcaaaaacttaaaatactttaaagtggaaaaaaaaaatcctcaga

SEQ ID NO: 329033 - DNA, 590 bp, Homo sapiens
gtgaggctactgctggtccagggctgtattttgagaacttctactctactcatagggagttgcagacagagactgtgttatttcagccttcactgtgagtcagaatcacctgggtaacttttaagtacccttataacttccctacattccccaatcaattctatcaacggagaataaggctcctccaggcatcagtactttaaatgcctgaggatttcaatctgagccaaacttgagaaccattgttctaaataagagctctggtagttttaaaagccttgttttgacctttcactttttcaacagcggttactttctttctgagcatcctacaattccagggcccaaatgaaactaataaaaccaccaaactagttttgcagcttccaaatccttctaccgcaagcaagatacaagaacaattccatcatctcagaaaattcctttgtccctttgtagttaactcctctctctgcccccagcccttgagacaggaataatgcatgatgttcacaagggctaaaaaattccagagagcagttttccatgactagaggctaagggctaataagaccctgaaaaaccagggt

SEQ ID NO: 329034 - DNA, 329 bp, Homo sapiens
ggtatttctccagagcaacttgctgcccctgctccccatcactcctgccttatgacagctcagggctgtcacctcgagaaaggttaaggtcaccctcctggcaaccgtcagcccagcgctaacccacaccatctccacagcacctttcaaggtgccaggaggctcctgacttgagccatccttcgggaagcaattcatttgcaatcaagggtcacctcgatgtgagggtcgaatgctccagctgcacttaaagattgtcagcatccaacttagccccttcatcccgtcatacctccatctcactgccgtctaccgatgaggagagagaa

SEQ ID NO: 329035 - DNA, 637 bp, Homo sapiens
ggagttcacttattctgcttagtttgtggcgtgttttataagtatattaactattggtttgtttcctcaaatatttcagttggtttgttattttttatatgtggttcctgttgttttgatacacaggagtttaaaatttttacactgttaaactattaacctttgcttatatgttttagaatgatgccaatttagtaagactctataaatggaacttagagtctattttatagtttctttttaacctctaattcttatcttcttaaccagagctataactttcattatcaagtaaccatttatgctaaacctgaaaaaactgaatatgagtcttccccctaaaaaatctttacaaacacaggtgtcaacatgaatcatcgtatttcctgaccttgtggtcttccattacggtttcaaagcagagaagagtaactctgctattttttttttaagcaaattcatcttctaggtgctgcaaatatgataaactctgcttttttaaggagaatgcttgcctgagccgtagcagacatgccctgacttaacacatctaagtgaagctagagtatttttttcaggaatcatctttatgatgttcaagatgaattaaatggaggaaaagtaggttttaaaaata

SEQ ID NO: 329036 - DNA, 269 bp, Homo sapiens
agacagctccggccagccagtgcccccagagagcagacccagacagatgcagaaatgacgcagtggatgaggggcacagagacctgtcagggagcgggagctgggccaacgtctgggtacatgggatgcccttggctactgctgaggccgtgccccagccccaggtctacgcattaaacttcatcctccgcacagccccagtctcccacaggccccagcttatagagactgttgttgctccattttgcagaagaggaaactgaggcaga

SEQ ID NO: 329037 - DNA, 240 bp, Homo sapiens
ggattacaggtgtgagccaccacgcctggccatatggacattttttatgggagaagactcatggaacttcttcttagccttttttaacttctggagacagttttagtaattcacacattttcagaaaaccctattctagatttacacatatattggtataattagtattttccagttaacctaatatttagagttgtagtcatatttgaggggaggagctattttggtttcctttctgtg

SEQ ID NO: 329038 - DNA, 2160 bp, Homo sapiens
gcaggctctgcctgtggccactagcagagaagctgctgtccttccaccaccagcaccggaccacctgctccaagaccagcctcctggggggaccaggcacccggccttcactggcacccagggagccgtcctcagcagcgtcaacatgtcaaggcccagcagcagagccatttacttgcaccggaaggagtactcccagaacctcacctcagagcccaccctcctgcagcacagggtggagcacttgatgacatgcaagcaggggagtcagagagtccaggggcccgaggatgccttgcagaagctgttcgagatggatgcacagggccgggtgtggagccaagacttgatcctgcaggtcagggacggctggctgcagctgctggacattgagaccaaggaggagctggactcttaccgcctagacagcatccaggccatgaatgtggcgctcaacacatgttcctacaactccatcctgtccatcaccgtgcaggagccgggcctgccaggcactagcactctgctcttccagtgccaggaagtgggggcagagcgactgaagaccagcctgcagaaggctctggaggaagagctggagcaaagcagacctcgacttggaggccttcagccaggccaggacagatggagggggcctgctatggaaaggccgctccctatggagcaggcacgctatctggagccggggatccctccagaacagccccaccagaggaccctagagcacagcctcccaccatccccaaggcccctgccacgccacaccagtgcccgagaaccaagtgcctttactctgcctcctccaaggcggtcctcttcccccgaggacccagagagggacgaggaagtgctgaaccatgtcctaagggacattgagctgttcatgggaaagctggagaaggcccaggcaaagaccagcaggaagaagaaatttgggaaaaaaaacaaggaccagggaggtctcacccaggcacagtacattgactgcttccagaagatcaagtacagcttcaacctcctgggaaggctggccacctggctgaaggagacaagtgcccctgagctcgtacacatcctcttcaagtccctgaacttcatcctggccaggtgccctgaggctggcctagcagcccaagtgatctcacccctcctcacccctaaagctatcaacctgctacagtcctgtctaagcccacctgagagtaacctttggatggggttgggcccagcctggaccactagccgggccgactggacaggcgatgagcccctgccctaccaacccacattctcggatgactggcaacttccagagccctccagccaagcacccttaggataccaggaccctgtttcccttcggccctccagccccaaacctgcccagccagccctgaaaatgcaagtcttgtacgagtttgaagctaggaacccacgggaactgactgtggtccagggagagaagctggaggttctggaccacagcaagcggtggtggctggtgaagaatgaggcgggacggagcggctacattccaagcaacatcctggagcccctacagccggggacccctgggacccagggccagtcaccctctcgggttccaatgcttcgacttagctcgaggcctgaagaggtcacagactggctgcaggcagagaacttctccactgccacggtgaggacacttgggtccctgacggggagccagctacttcgcataagacctggggagctacagatgctatgtccacaggaggccccacgaatcctgtcccggctggaggctgtcagaaggatgctggggataagcccttaggcaccagcttagacacctccaagaaccaggccccgctgatgcaagatggcagatctgatacccattagagccccgagaattcctcttctggatcccagtttgcagcaaaccccacaccccagctcacacagcaaaaacaatggacaggcccagagggtgaagcaaacagtgtcccttctggctgtgttggagcctccccagtaaccacctatttattttacctctttcccaaacctggagcatttatgcctaggcttgtcaagaatctgttcagtccctctccttctcaataaaagcatcttcaagcttgtaaaaaaact

SEQ ID NO: 329039 - DNA, 378 bp, Homo sapiens
tccctcacctgccatcagcctcatctgaatctttgtctttcctcagataagcccttaggcaccagcttagacacctccaagaaccaggccccgctgatgcaagatggcagatctgatacccattagagccccgagaattcctcttctggatcccagtttgcagcaaaccccacaccccagctcacacagcaaaaacaatggacaggcccagagggtgaagcaaacagtgtcccttctggctgtgttggagcctccccagtaaccacctatttattttacctctttcccaaacctggagcatttatgcctaggcttgtcaagaatctgttcagtccctctccttctcaataaaagcatcttcaagcttgtaaaaaaact

SEQ ID NO: 329040 - DNA, 512 bp, Homo sapiens
gcaggctctgcctgtggccactagcagagaagctgctgtccttccaccaccagcaccggaccacctgctccaagaccagcctcctggggggaccaggcacccggccttcactggcacccagggagccgtcctcagcagcgtcaacatgtcaaggcccagcagcagagccatttacttgcaccggaaggagtactcccagaacctcacctcagagcccaccctcctgcagcacagggtggaggtgagtacctctgcagcccccgggcagtgtccaactaaacccaagtgttcccatgtgcccaccgccctgccagaacatggacacttcacacaagtccctgccccagaagccaacagcctgtcccaaccatgtcgcatggactcagatccaacaagcctgccagagcatctgctcagtgtcagggacggggaggggtggtcagattgaacagagcaggcctggctggaggttgagcgggtgagtgtcctgtccccagacaggaagaagtagc

SEQ ID NO: 329041 - DNA, 2552 bp, Homo sapiens
gcaggctctgcctgtggccactagcagagaagctgctgtccttccaccaccagcaccggaccacctgctccaagaccagcctcctggggggaccaggcacccggccttcactggcacccagggagccgtcctcagcagcgtcaacatgtcaaggcccagcagcagagccatttacttgcaccggaaggagtactcccagaacctcacctcagagcccaccctcctgcagcacagggtggagcacttgatgacatgcaagcaggggagtcagagagtccaggggcccgaggatgccttgcagaagctgttcgagatggatgcacagggccgggtgtggagccaagacttgatcctgcaggtcagggacggctggctgcagctgctggacattgagaccaaggaggagctggactcttaccgcctagacagcatccaggccatgaatgtggcgctcaacacatgttcctacaactccatcctgtccatcaccgtgcaggagccgggcctgccaggcactagcactctgctcttccagtgccaggaagtgggggcagagcgactgaagaccagcctgcagaaggctctggaggaagagctggagcaaagcagacctcgacttggaggccttcagccaggccaggacagatggagggggcctgctatggaaaggccgctccctatggagcaggcacgctatctggagccggggatccctccagaacagccccaccagaggaccctagagcacagcctcccaccatccccaaggcccctgccacgccacaccagtgcccgagaaccaagtgcctttactctgcctcctccaaggcggtcctcttcccccgaggacccagagagggacgaggaagtgctgaaccatgtcctaagggacattgagctgttcatgggaaagctggagaaggcccaggcaaagaccagcaggaagaagaaatttgggaaaaaaaacaaggaccagggaggtctcacccaggcacagtacattgactgcttccagaagatcaagtacagcttcaacctcctgggaaggctggccacctggctgaaggagacaagtgcccctgagctcgtacacatcctcttcaagtccctgaacttcatcctggccaggtgccctgaggctggcctagcagcccaagtgatctcacccctcctcacccctaaagctatcaacctgctacagtcctgtctaagcccacctgagagtaacctttggatggggttgggcccagcctggaccactagccgggccgactggacaggcgatgagcccctgccctaccaacccacattctcggatgactggcaacttccagagccctccagccaagcacccttaggataccaggaccctgtttcccttcggcggggaagtcataggttagggagcacctcacactttcctcaggagaagacacacaaccatgaccctcagcctggggaccccaactccaggccctccagccccaaacctgcccagccagccctgaaaatgcaagtcttgtacgagtttgaagctaggaacccacgggaactgactgtggtccagggagagaagctggaggttctggaccacagcaagcggtggtggctggtgaagaatgaggcgggacggagcggctacattccaagcaacatcctggagcccctacagccggggacccctgggacccagggccagtcaccctctcgggtactacccagcctggactatccagagccctaagtcttgagttggaggtcggggtggggaggattcagtggcaagcagaggagatagtcttggtttgattcggaccgtattattgcatgcttagtgtgccaactttatcatggggccagagcagagaacaagaccagctccctgccagaccagaaagccacagagtaagagaagtgatttgatgggaacctggagaagggacccagatgttaggggctgtggttggctgtgagatgagatggactctgatccctggttccccctgattctaggttccaatgcttcgacttagctcgaggcctgaagaggtcacagactggctgcaggcagagaacttctccactgccacggtgaggacacttgggtccctgacggggagccagctacttcgcataagacctggggagctacagatgctatgtccacaggaggccccacgaatcctgtcccggctggaggctgtcagaaggatgctggggataagcccttaggcaccagcttagacacctccaagaaccaggccccgctgatgcaagatggcagatctgatacccattagagccccgagaattcctcttctggatcccagtttgcagcaaaccccacaccccagctcacacagcaaaaacaatggacaggcccagagggtgaagcaaacagtgtcccttctggctgtgttggagcctccccagtaaccacctatttattttacctctttcccaaacctggagcatttatgcctaggcttgtcaagaatctgttcagtccctctccttctcaataaaagcatcttcaagcttgtaaaaaaact

SEQ ID NO: 329042 - DNA, 3047 bp, Homo sapiens
gcaggctctgcctgtggccactagcagagaagctgctgtccttccaccaccagcaccggaccacctgctccaagaccagcctcctggggggaccaggcacccggccttcactggcacccagggagccgtcctcagcagcgtcaacatgtcaaggcccagcagcagagccatttacttgcaccggaaggagtactcccagaacctcacctcagagcccaccctcctgcagcacagggtggagcacttgatgacatgcaagcaggggagtcagagagtccaggggcccgaggatgccttgcagaagctgttcgagatggatgcacagggccgggtgtggagccaagacttgatcctgcaggtcagggacggctggctgcagctgctggacattgagaccaaggaggagctggactcttaccgcctagacagcatccaggccatgaatgtggcgctcaacacatgttcctacaactccatcctgtccatcaccgtgcaggagccgggcctgccaggcactagcactctgctcttccagtgccaggaagtgggggcagagcgactgaagaccagcctgcagaaggctctggaggaagagctggagcaaagcagacctcgacttggaggccttcagccaggccaggacagatggagggggcctgctatggaaaggccgctccctatggagcaggcacgctatctggagccggggatccctccagaacagccccaccagaggaccctagagcacagcctcccaccatccccaaggcccctgccacgccacaccagtgcccgagaaccaagtgcctttactctgcctcctccaaggcggtcctcttcccccgaggacccagagagggacgaggaagtgctgaaccatgtcctaagggacattgagctgttcatgggaaagctggagaaggcccaggcaaagaccagcaggaagaagaaatttgggaaaaaaaacaaggaccagggaggtctcacccaggcacagtacattgactgcttccagaagatcaagtacagcttcaacctcctgggaaggctggccacctggctgaaggagacaagtgcccctgagctcgtacacatcctcttcaagtccctgaacttcatcctggccaggtgccctgaggctggcctagcagcccaagtgatctcacccctcctcacccctaaagctatcaacctgctacagtcctgtctaagcccacctgagagtaacctttggatggggttgggcccagcctggaccactagccgggccgactggacaggcgatgagcccctgccctaccaacccacattctcggatgactggcaacttccagagccctccagccaagcacccttaggataccaggaccctgtttcccttcggtatgctctgagcttaatagggactgcgtggtcctggggagggagggacaggactgtagtcctttggatctctggctctctacatcttaagagagccaagagggtctcttttagccgagaaaaacatgtacaaggacatccctctcctaccttgggtgaaaaacagtgttctaccctcctaggctcccattgcttcttctcatgatactacccacacatgcttctgatttcccatactcaagtataaagtgcttagggcagaactcagatgtagaaaattccactcccggaaatgtcttcagaaatcaatgacatttcagacccctcctgcctgcagaaagccccacctaacactgacctgccagcaaactctaaagaaacccaaaagtcaccatcagactgcaggccggagatacctgaggggaatctcagggctgggacataggcttaatttctgaggccccattctccagccatcctgactctgtttcttaggcggggaagtcataggttagggagcacctcacactttcctcaggagaagacacacaaccatgaccctcagcctggggaccccaactccaggccctccagccccaaacctgcccagccagccctgaaaatgcaagtcttgtacgagtttgaagctaggaacccacgggaactgactgtggtccagggagagaagctggaggttctggaccacagcaagcggtggtggctggtgaagaatgaggcgggacggagcggctacattccaagcaacatcctggagcccctacagccggggacccctgggacccagggccagtcaccctctcgggtactacccagcctggactatccagagccctaagtcttgagttggaggtcggggtggggaggattcagtggcaagcagaggagatagtcttggtttgattcggaccgtattattgcatgcttagtgtgccaactttatcatggggccagagcagagaacaagaccagctccctgccagaccagaaagccacagagtaagagaagtgatttgatgggaacctggagaagggacccagatgttaggggctgtggttggctgtgagatgagatggactctgatccctggttccccctgattctaggttccaatgcttcgacttagctcgaggcctgaagaggtcacagactggctgcaggcagagaacttctccactgccacggtgaggacacttgggtccctgacggggagccagctacttcgcataagacctggggagctacagatgctatgtccacaggaggccccacgaatcctgtcccggctggaggctgtcagaaggatgctggggataagcccttaggcaccagcttagacacctccaagaaccaggccccgctgatgcaagatggcagatctgatacccattagagccccgagaattcctcttctggatcccagtttgcagcaaaccccacaccccagctcacacagcaaaaacaatggacaggcccagagggtgaagcaaacagtgtcccttctggctgtgttggagcctccccagtaaccacctatttattttacctctttcccaaacctggagcatttatgcctaggcttgtcaagaatctgttcagtccctctccttctcaataaaagcatcttcaagcttgtaaaaaaact

SEQ ID NO: 329043 - DNA, 1637 bp, Homo sapiens
gcaggctctgcctgtggccactagcagagaagctgctgtccttccaccaccagcaccggaccacctgctccaagaccagcctcctggggggaccaggcacccggccttcactggcacccagggagccgtcctcagcagcgtcaacatgtcaaggcccagcagcagagccatttacttgcaccggaaggagtactcccagaacctcacctcagagcccaccctcctgcagcacagggtggagcacttgatgacatgcaagcaggggagtcagagagtccaggggcccgaggatgccttgcagaagctgttcgagatggatgcacagggccgggtgtggagccaagacttgatcctgcaggtcagggacggctggctgcagctgctggacattgagaccaaggaggagctggactcttaccgcctagacagcatccaggccatgaatgtggcgctcaacacatgttcctacaactccatcctgtccatcaccgtgcaggagccgggcctgccaggcactagcactctgctcttccagtgccaggaagtgggggcagagcgactgaagaccagcctgcagaaggctctggaggaagagctggagcaaagcagacctcgacttggaggccttcagccaggccaggacagatggagggggcctgctatggaaaggccgctccctatggagcaggcacgctatctggagccggggatccctccagaacagccccaccagaggaccctagagcacagcctcccaccatccccaaggcccctgccacgccacaccagtgcccgagaaccaagtgcctttactctgcctcctccaaggcggtcctcttcccccgaggacccagagagggacgaggaagtgctgaaccatgtcctaagggacattgagctgttcatgggaaagctggagaaggcccaggcaaagaccagcaggaagaagaaatttgggaaaaaaaacaaggaccagggaggtctcacccaggcacagtacattgactgcttccagaagatcaagtacagcttcaacctcctgggaaggctggccacctggctgaaggagacaagtgcccctgagctcgtacacatcctcttcaagtccctgaacttcatcctggccaggtgccctgaggctggcctagcagcccaagtgatctcacccctcctcacccctaaagctatcaacctgctacagtcctgtctaagcccacctgagagtaacctttggatggggttgggcccagcctggaccactagccgggccgactggacaggcgatgagcccctgccctaccaacccacattctcggatgactggcaacttccagagccctccagccaagcacccttaggataccaggaccctgtttcccttcggcggggaagtcataggttagggagcacctcacactttcctcaggagaagacacacaaccatgaccctcagcctggggaccccaactccaggccctccagccccaaacctgcccagccagccctgaaaatgcaagtcttgtacgagtttgaagctaggaacccacgggaactggaaacagcacagaccagtgatgacgatgtcgagcgcgaccgctgacgtgaccgctgcaaccagaagggatccgctagagcac

SEQ ID NO: 329044 - DNA, 826 bp, Homo sapiens
gcagccaagggtggatggtccagggatggagctgccaaggtgggtggcctagagagggagaaggagggtaggaaagagctggagggagaaagccttgtgtggggagggaaggctggctggaaagaggctcaggggactgaggtggtgactcttggcaggttctggaccacagcaagcggtggtggctggtgaagaatgaggcgggacggagcggctacattccaagcaacatcctggagcccctacagccggggacccctgggacccagggccagtcaccctctcgggttccaatgcttcgacttagctcgaggcctgaagaggtcacagactggctgcaggcagagaacttctccactgccacggtgaggacacttgggtccctgacggggagccagctacttcgcataagacctggggagctacagatgctatgtccacaggaggccccacgaatcctgtcccggctggaggctgtcagaaggatgctggggataagcccttaggcaccagcttagacacctccaagaaccaggccccgctgatgcaagatggcagatctgatacccattagagccccgagaattcctcttctggatcccagtttgcagcaaaccccacaccccagctcacacagcaaaaacaatggacaggcccagagggtgaagcaaacagtgtcccttctggctgtgttggagcctccccagtaaccacctatttattttacctctttcccaaacctggagcatttatgcctaggcttgtcaagaatctgttcagtccctctccttctcaataaaagcatcttcaagcttgtaaaaaaact

SEQ ID NO: 329045 - DNA, 2250 bp, Homo sapiens
gcaggctctgcctgtggccactagcagagaagctgctgtccttccaccaccagcaccggaccacctgctccaagaccagcctcctggggggaccaggcacccggccttcactggcacccagggagccgtcctcagcagcgtcaacatgtcaaggcccagcagcagagccatttacttgcaccggaaggagtactcccagaacctcacctcagagcccaccctcctgcagcacagggtggagcacttgatgacatgcaagcaggggagtcagagagtccaggggcccgaggatgccttgcagaagctgttcgagatggatgcacagggccgggtgtggagccaagacttgatcctgcaggtcagggacggctggctgcagctgctggacattgagaccaaggaggagctggactcttaccgcctagacagcatccaggccatgaatgtggcgctcaacacatgttcctacaactccatcctgtccatcaccgtgcaggagccgggcctgccaggcactagcactctgctcttccagtgccaggaagtgggggcagagcgactgaagaccagcctgcagaaggctctggaggaagagctggagcaaagcagacctcgacttggaggccttcagccaggccaggacagatggagggggcctgctatggaaaggccgctccctatggagcaggcacgctatctggagccggggatccctccagaacagccccaccagaggaccctagagcacagcctcccaccatccccaaggcccctgccacgccacaccagtgcccgagaaccaagtgcctttactctgcctcctccaaggcggtcctcttcccccgaggacccagagagggacgaggaagtgctgaaccatgtcctaagggacattgagctgttcatgggaaagctggagaaggcccaggcaaagaccagcaggaagaagaaatttgggaaaaaaaacaaggaccagggaggtctcacccaggcacagtacattgactgcttccagaagatcaagtacagcttcaacctcctgggaaggctggccacctggctgaaggagacaagtgcccctgagctcgtacacatcctcttcaagtccctgaacttcatcctggccaggtgccctgaggctggcctagcagcccaagtgatctcacccctcctcacccctaaagctatcaacctgctacagtcctgtctaagcccacctgagagtaacctttggatggggttgggcccagcctggaccactagccgggccgactggacaggcgatgagcccctgccctaccaacccacattctcggatgactggcaacttccagagccctccagccaagcacccttaggataccaggaccctgtttcccttcggcggggaagtcataggttagggagcacctcacactttcctcaggagaagacacacaaccatgaccctcagcctggggaccccaactccaggccctccagccccaaacctgcccagccagccctgaaaatgcaagtcttgtacgagtttgaagctaggaacccacgggaactgactgtggtccagggagagaagctggaggttctggaccacagcaagcggtggtggctggtgaagaatgaggcgggacggagcggctacattccaagcaacatcctggagcccctacagccggggacccctgggacccagggccagtcaccctctcgggttccaatgcttcgacttagctcgaggcctgaagaggtcacagactggctgcaggcagagaacttctccactgccacggtgaggacacttgggtccctgacggggagccagctacttcgcataagacctggggagctacagatgctatgtccacaggaggccccacgaatcctgtcccggctggaggctgtcagaaggatgctggggataagcccttaggcaccagcttagacacctccaagaaccaggccccgctgatgcaagatggcagatctgatacccattagagccccgagaattcctcttctggatcccagtttgcagcaaaccccacaccccagctcacacagcaaaaacaatggacaggcccagagggtgaagcaaacagtgtcccttctggctgtgttggagcctccccagtaaccacctatttattttacctctttcccaaacctggagcatttatgcctaggcttgtcaagaatctgttcagtccctctccttctcaataaaagcatcttcaagcttgtaaaaaaact

SEQ ID NO: 329046 - DNA, 229 bp, Homo sapiens
tctagtggaccttctacgctcagccaagcacccttaggataccaggaccctgtttcccttcggccctccagccccaaacctgcccagccagccctgaaaatgcaagtcttgtacgagtttgaagctaggaacccacgggaactgactgtggtccagggagagaagctggaggttctggaccacagcaacgcgctgctggtctgagcgtgactggggatacctctagagt

SEQ ID NO: 329047 - DNA, 2651 bp, Homo sapiens
cggaggcgttgaatgcccggaggcgttgaatggcccggaggcgttgaatggcccggaggcgttgaatggcccggaggcgttgaatggcccggaggcgttgaatggcccccctcctgcagcccctcagactcagacttggaggccctatccctggccccagtgcttcgacaccgtccctcacattggccctggaaagttgctttatctgaagcctggaacctcctacctcaagggggccgaggacacgtcttcttcctcttctgcttttctctacccagcacgcctgtggtccacctctctgagctttctcccagtcctaggactccccctctccctgcagcacttgatgacatgcaagcaggggagtcagagagtccaggggcccgaggatgccttgcagaagctgttcgagatggatgcacagggccgggtgtggagccaagacttgatcctgcaggtcagggacggctggctgcagctgctggacattgagaccaaggaggagctggactcttaccgcctagacagcatccaggccatgaatgtggcgctcaacacatgttcctacaactccatcctgtccatcaccgtgcaggagccgggcctgccaggcactagcactctgctcttccagtgccaggaagtgggggcagagcgactgaagaccagcctgcagaaggctctggaggaagagctggagcaaagcagacctcgacttggaggccttcagccaggccaggacagatggagggggcctgctatggaaaggccgctccctatggagcaggcacgctatctggagccggggatccctccagaacagccccaccagaggaccctagagcacagcctcccaccatccccaaggcccctgccacgccacaccagtgcccgagaaccaagtgcctttactctgcctcctccaaggcggtcctcttcccccgaggacccagagagggacgaggaagtgctgaaccatgtcctaagggacattgagctgttcatgggaaagctggagaaggcccaggcaaagaccagcaggaagaagaaatttgggaaaaaaaacaaggaccagggaggtctcacccaggcacagtacattgactgcttccagaagatcaagtacagcttcaacctcctgggaaggctggccacctggctgaaggagacaagtgcccctgagctcgtacacatcctcttcaagtccctgaacttcatcctggccaggtgccctgaggctggcctagcagcccaagtgatctcacccctcctcacccctaaagctatcaacctgctacagtcctgtctaagcccacctgagagtaacctttggatggggttgggcccagcctggaccactagccgggccgactggacaggcgatgagcccctgccctaccaacccacattctcggatgactggcaacttccagagccctccagccaagcacccttaggataccaggaccctgtttcccttcggcggggaagtcataggttagggagcacctcacactttcctcaggagaagacacacaaccatgaccctcagcctggggaccccaactccaggccctccagccccaaacctgcccagccagccctgaaaatgcaagtcttgtacgagtttgaagctaggaacccacgggaactgactgtggtccagggagagaagctggaggttctggaccacagcaagcggtggtggctggtgaagaatgaggcgggacggagcggctacattccaagcaacatcctggagcccctacagccggggacccctgggacccagggccagtcaccctctcgggtactacccagcctggactatccagagccctaagtcttgagttggaggtcggggtggggaggattcagtggcaagcagaggagatagtcttggtttgattcggaccgtattattgcatgcttagtgtgccaactttatcatggggccagagcagagaacaagaccagctccctgccagaccagaaagccacagagtaagagaagtgatttgatgggaacctggagaagggacccagatgttaggggctgtggttggctgtgagatgagatggactctgatccctggttccccctgattctaggttccaatgcttcgacttagctcgaggcctgaagaggtcacagactggctgcaggcagagaacttctccactgccacggtgaggacacttgggtccctgacggggagccagctacttcgcataagacctggggagctacagatgctatgtccacaggaggccccacgaatcctgtcccggctggaggctgtcagaaggatgctggggataagcccttaggcaccagcttagacacctccaagaaccaggccccgctgatgcaagatggcagatctgatacccattagagccccgagaattcctcttctggatcccagtttgcagcaaaccccacaccccagctcacacagcaaaaacaatggacaggcccagagggtgaagcaaacagtgtcccttctggctgtgttggagcctccccagtaaccacctatttattttacctctttcccaaacctggagcatttatgcctaggcttgtcaagaatctgttcagtccctctccttctcaataaaagcatcttcaagcttgtaaaaaaact

SEQ ID NO: 329048 - DNA, 1188 bp, Homo sapiens
tctagtggaccttctacgctcagccaagcacccttaggataccaggaccctgtttcccttcggagaagacacacaaccatgaccctcagcctggggaccccaactccaggccctccagccccaaacctgcccagccagccctgaaaatgcaagtcttgtacgagtttgaagctaggaacccacgggaactgactgtggtccagggagagaagctggaggttctggaccacagcaagcggtggtggctggtgaagaatgaggcgggacggagcggctacattccaagcaacatcctggagcccctacagccggggacccctgggacccagggccagtcaccctctcgggtactacccagcctggactatccagagccctaagtcttgagttggaggtcggggtggggaggattcagtggcaagcagaggagatagtcttggtttgattcggaccgtattattgcatgcttagtgtgccaactttatcatggggccagagcagagaacaagaccagctccctgccagaccagaaagccacagagtaagagaagtgatttgatgggaacctggagaagggacccagatgttaggggctgtggttggctgtgagatgagatggactctgatccctggttccccctgattctaggttccaatgcttcgacttagctcgaggcctgaagaggtcacagactggctgcaggcagagaacttctccactgccacggtgaggacacttgggtccctgacggggagccagctacttcgcataagacctggggagctacagatgctatgtccacaggaggccccacgaatcctgtcccggctggaggctgtcagaaggatgctggggataagcccttaggcaccagcttagacacctccaagaaccaggccccgctgatgcaagatggcagatctgatacccattagagccccgagaattcctcttctggatcccagtttgcagcaaaccccacaccccagctcacacagcaaaaacaatggacaggcccagagggtgaagcaaacagtgtcccttctggctgtgttggagcctccccagtaaccacctatttattttacctctttcccaaacctggagcatttatgcctaggcttgtcaagaatctgttcagtccctctccttctcaataaaagcatcttcaagcttgtaaaaaaact

SEQ ID NO: 329049 - DNA, 1141 bp, Homo sapiens
tctagtggaccttctacgctcagccaagcacccttaggataccaggaccctgtttcccttcggccctccagccccaaacctgcccagccagccctgaaaatgcaagtcttgtacgagtttgaagctaggaacccacgggaactgactgtggtccagggagagaagctggaggttctggaccacagcaagcggtggtggctggtgaagaatgaggcgggacggagcggctacattccaagcaacatcctggagcccctacagccggggacccctgggacccagggccagtcaccctctcgggtactacccagcctggactatccagagccctaagtcttgagttggaggtcggggtggggaggattcagtggcaagcagaggagatagtcttggtttgattcggaccgtattattgcatgcttagtgtgccaactttatcatggggccagagcagagaacaagaccagctccctgccagaccagaaagccacagagtaagagaagtgatttgatgggaacctggagaagggacccagatgttaggggctgtggttggctgtgagatgagatggactctgatccctggttccccctgattctaggttccaatgcttcgacttagctcgaggcctgaagaggtcacagactggctgcaggcagagaacttctccactgccacggtgaggacacttgggtccctgacggggagccagctacttcgcataagacctggggagctacagatgctatgtccacaggaggccccacgaatcctgtcccggctggaggctgtcagaaggatgctggggataagcccttaggcaccagcttagacacctccaagaaccaggccccgctgatgcaagatggcagatctgatacccattagagccccgagaattcctcttctggatcccagtttgcagcaaaccccacaccccagctcacacagcaaaaacaatggacaggcccagagggtgaagcaaacagtgtcccttctggctgtgttggagcctccccagtaaccacctatttattttacctctttcccaaacctggagcatttatgcctaggcttgtcaagaatctgttcagtccctctccttctcaataaaagcatcttcaagcttgtaaaaaaact

SEQ ID NO: 329050 - DNA, 713 bp, Homo sapiens
  misc_feature (96)..(96): n is a, c, g, or t
aacagggccaggaggtgtgggagcgggagacactagagtaacctatgtgcacagcctctccatataccatgtgctgttgcgcctgctcgtgcgcgnacattaggcaagagaaacagcggctcctcaagtcctgcccaaagaccgtccagaaaccccagcctcccgtcgccttctcgccgcctccgctgggagccgcagatcagtccaagttgacggacaggaggcgaaatgtgcaaatgtttatggtttcatctgtatggaaaaggagctctggtaactttggccaagacttttcagtaggaaatgcttcaaaatacaaagcaagagctattttcaagaaagaccttctaaatttatattaggacatagtgagaagaaagccatctgaaaaccaggaagagagccctcaccagaatctgaccatgctggtgccctgatcttggactttcagcctccagaactgcaaaattctggtgtggtgtgaatgctgtggctcagtccgaacatgtttttttctgtaattttatcattattacacgattgcaatatcagttttgttttttaattggaaagcaacattttctactgttgaaagacgttttttgacaaattgacccttcctagtattgagtactaagttgaggactgcatctacttgttttttacattatagagaataaaatactattgatttgaaaaatacatatcacttg

SEQ ID NO: 329051 - DNA, 531 bp, Homo sapiens
ggagcgttgcgggcggcggggtagacccgggcagtttggccccagtcctcacccctctgagggccgaagtccgccctgcgctgcgtgggaggctggcgcggagggcgccgcggcccagttgtgtcacttttcccgtccgcccccctgttgactagtcctcccagcggggcagcgagttgccgtgctgtgccagacgtagagggccccagtgtgtgatgttccctttcctgagtaacaccattttctatctaaatgaagaaatggaggcatggaagtttcatctgtatggaaaaggagctctggtaactttggccaagacttttcagtaggaaatgcttcaaaatacaaagcaagagctattttcaagaaagaccttctaaatttatattaggattaagcgtctgtaacgttgccactcgtcgctgaggctcctggtttcagcatgtctccttggttcccagccagctctgggtgttcaggtagcagctgtggctgggagtgtctctccagtccacattccttggccatgaa

SEQ ID NO: 329052 - DNA, 4249 bp, Homo sapiens
aacttaatgtttttgcattggactttgagttaagattattttttaaatcctgaggactagcattaattgacagctgacccaggtgctacacagaagtggattcagtgaatctaggaagacagcagcagacaggattccaggaaccagtgtttgatgaagctaggactgaggagcaagcgagcaagcagcagttcgtggaatcctgtctgctgctgtcttcctggtttaggagccgacgggcgctcgcaggctcagcgcgcgctgcccgcggcaggacccggccgcctccgccgccgccgccgcccctaagcctcccgaagccatggccgggctcggccaccccgccgccttcggccgggccacccacgccgtggtgcgggcgctacccgagtcgctcggccagcacgcgctgagaagcgccaagggcgaggaggtggacgtcgcccgcgcggaacggcagcaccagctctacgtgggcgtgctgggcagcaagctggggctgcaggtggtggagctgccggccgacgagagccttccggactgcgtcttcgtggaggacgtggccgtggtgtgcgaggagacggccctcatcacccgacccggggcgccgagccggaggaaggaggttgacatgatgaaagaagcattagaaaaacttcagctcaatatagtagagatgaaagatgaaaatgcaactttagatggcggagatgttttattcacaggcagagaattttttgtgggcctttccaaaaggacaaatcaacgaggtgctgaaatcttggctgatacttttaaggactatgcagtctccacagtgccagtggcagatgggttgcatttgaagagtttctgcagcatggctgggcctaacctgatcgcaattgggtctagtgaatctgcacagaaggcccttaagatcatgcaacagatgagtgaccaccgctacgacaaactcactgtgcctgatgacatagcagcaaactgtatatatctaaatatccccaacaaagggcacgtcttgctgcaccgaaccccggaagagtatccagaaagtgcaaaggtttatgagaaactgaaggaccatatgctgatccccgtgagcatgtctgaactggaaaaggtggatgggctgctcacctgctgctcagttttaattaacaagaaagtagactcctgagctgcagagtcccccccggtagccggcaagaccgcacaggcaaggccgatgactctgtgcccactcctgttgttttccttgacaatctactgtgccactgtgctactaactcttgtttacaaaatttgattctaagttgaattgcttcattcaacacccccaccctccctcccctcgaggtggtacctaagctgtggatttgctaaatgaattaagcaacctagaagatacagagctaatgaattatcaaaatgtgattaatcccagtaaggaaacactcatttagtgtctgtatttttggtgtgaaaattatttagttgccagtatattctgaagaatgtcttcttgatcagtcagataagcttgctttttttttttttttttttcatgaatcatgtttggttcctgtgaaagtccctggtccagggatcctcctcctttctcttttacttctgaattctgaaattcagttagttacttttgcctttcgctcttctatcacagccaccttgaccttgggtaaaacccaaggtctttccttctggctaccttcctgcaggtccaccctgtctgccattggtctcctctgcctctgactacatctgccaccaacaaccctcccctcacccctgccaggggcagacaggcttctcagcagaactgtgactgaaatcagagctgctgtctggggcagtgttaactacacagaggcacatcctgacagggtttgccccagagatctaaattccagaaggagggcaccacacctaggaaggtaaatccagtatcagaaggttgctaaaagattaaagatcaagaagcttggaaacatcccatgggtacaatgtcttagaaagtctttaagtcacataccatgaatttttgcttcattactgaccatatatgaccttggaggaactcttttttttttttccttctactcatttctgtttccacctaccctgactcaccgtatttccagtcttctacccctgcagttatcctagtccagcaaagtcatttctttcaaaagagacatcatgtctgaaaataattactggtagtctaatatgagccagagtaaacagctcctcatggtcaatgaacatgttcaggaagcgatcaccttgatgcttgaacccaaccccagacagtggacaattctactttgaaatatccgtgaatatttactgtgggatccaatttaaacttctttcttctctagcctttaaattacacaactttgaactgacacggatctcttacaaagaacaatgcggcactgaaggaagagatgattcctttactcaaacctgcaggaatcagcctattaacaggcaggggaaacggtactttccaatgaatggtaactgatccaggcacattatcacacttcctagtcatctccacctttcctgtattgcctgtggcttgttgtttaagattaagaatcaaagagattaagaagtatcacttcaagtcttgctctgctcacttctatgtttgcagtcaaattattccttatgttggtgacctaaagagaattactttcattcatttcatttcccccgtagcagatggaagtgagaaacctctgagaaaatgaaaacatccttaaccactatctttcccttttatttgattattttatgtcagaaatttgcaaaagtttttttctcctccttctcttccttgttgcttaactttttaattcatgccatatgcagatatccaattatgtgcatcctgtgaataaaccacgtcttggtcactgtcatattttgaaccatctcatcagagatgaataatatctttttaccagagagagaacgaatgttagccacatgcccaagttaacaaagaaaaaatgttctcaaggttgtccttttgggttaaatctggcccttccttggcaaaagcaaaaattctccctgtgagagctcaacatctcaaatacaaccacaggaaaaatggcccaatctgccagtttaggcttaccagcatataatttttaatatctttacttctatcatcccaaatcaaagaactcttctctattatgtttaatcaattgcaagcaaatagatttttctttgtaacaatttgttctgcagaaggctgtttttcacttttcctttcttttgcttctttctgtctttccttctcttttgtctggagaaatcacttagactctgtgtgcctcttctacattgcattctgctctgctatgttacctgctaggctggcttctttggactccctatatgattgatgatgtgaaaacctaaattacttgcagcatagtattacttctttgatgttctcattagcataatgttatttttgaaaaggaaagatactatcacataagttttcctcatctgttgtgatatacaccaatggataaactaacggaaactgctttttgacattaaaagacaggagaaattatatttaactaagtaaaagttaagtcagaattacttgggtgatgtgattcaatttagttaaaggatgatatagagaaaatacattatttagcattatttcttcagctataatgaattgctatagaaatcaggcagatctttctaatgtgtattgattggtcttttcagctactctgaacagattactaaggccatctcctcatctctaagggagaaaaatagtctgtagatgaataatgtaaggtaaagagttgcatgtcagtctttgtaattatttacactttaactttctccagaactcagacatgatttcaacatggtgttagatttgtgcattttattttcctgaccacctcattccagccaatgtatggttatccactctgtgtgccaaaaccaatcatgcctttcacggccctttagttcagagaagttctgcactgatttttagtctcttgatgtctcaatcttacatgtataccaatcacaatggaataaagtgttgagttgtactgtgatataacctaattttaaactatccaaccttctctaattcaaagttcttcaatcctaatcactctcctttttacccccttttacctcttacccttatcatcac

SEQ ID NO: 329053 - DNA, 4226 bp, Homo sapiens
aacttaatgtttttgcattggactttgagttaagattattttttaaatcctgaggactagcattaattgacagctgacccaggtgctacacagaagtggattcagtgaatctaggaagacagcagcagacaggattccaggaaccagtgtttgatgaagctaggactgaggagcaagcgagcaagcagcagttcgtggaatcctgtctgctgctgtcttcctggtttaggagccgacgggcgctcgcaggctcagcgcgcgctgcccgcggcaggacccggccgcctccgccgccgccgccgcccctaagcctcccgaagccatggccgggctcggccaccccgccgccttcggccgggccacccacgccgtggtgcgggcgctacccgagtcgctcggccagcacgcgctgagaagcgccaagggcgaggaggtggacgtcgcccgcgcggaacggcagcaccagctctacgtgggcgtgctgggcagcaagctggggctgcaggtggtggagctgccggccgacgagagccttccggactgcgtcttcgtggaggacgtggccgtggtgtgcgaggagacggccctcatcacccgacccggggcgccgagccggaggaaggaggttgacatgatgaaagaagcattagaaaaacttcagctcaatatagtagagatgaaagatgaaaatgcaactttagatggcggagatgttttattcacaggcagagaattttttgtgggcctttccaaaaggacaaatcaacgaggtgctgaaatcttggctgatacttttaaggactatgcagtctccacagtgccagtggcagatgggttgcatttgaagagtttctgcagcatggctgggcctaacctgatcgcaattgggtctagtgaatctgcacagaaggcccttaagatcatgcaacagatgagtgaccaccgctacgacaaactcactgtgcctgatgacatagcagcaaactgtatatatctaaatatccccaacaaagggcacgtcttgctgcaccgaaccccggaagagtatccagaaagtgcaaaggtttatgagaaactgaaggaccatatgctgatccccgtgagcatgtctgaactggaaaaggtggatgggctgctcacctgctgctcagttttaattaacaagaaagtagactcctgagctgcagagtcccccccggtagccggcaagaccgcacaggcaaggccgatgactctgtgcccactcctgttgttttccttgacaatctactgtgccactgtgctactaactcttgtttacaaaatttgattctaagttgaattgcttcattcaacacccccaccctccctcccctcgaggtggtacctaagctgtggatttgctaaatgaattaagcaacctagaagatacagagctaatgaattatcaaaatgtgattaatcccagtaaggaaacactcatttagtgtctgtatttttggtgtgaaaattatttagttgccagtatattctgaagaatgtcttcttgatcagtcagataagcttgctttttttttttttttttttcatgaatcatgtttggttcctgtgaaagtccctggtccagggatcctcctcctttctcttttacttctgaattctgaaattcagttagttacttttgcctttcgctcttctatcacagccaccttgaccttggtgtgactgaaatcagagctgctgtctggggcagtgttaactacacagaggcacatcctgacagggtttgccccagagatctaaattccagaaggagggcaccacacctaggaaggtaaatccagtatcagaaggttgctaaaagattaaagatcaagaagcttggaaacatcccatgggtacaatgtcttagaaagtctttaagtcacataccatgaatttttgcttcattactgaccatatatgaccttggaggaactcttttttttttttccttctactcatttctgtttccacctaccctgactcaccgtatttccagtcttctacccctgcagttatcctagtccagcaaagtcatttctttcaaaagagacatcatgtctgaaaataattactggtagtctaatatgagccagagtaaacagctcctcatggtcaatgaacatgttcaggaagcgatcaccttgatgcttgaacccaaccccagacagtggacaattctactttgaaatatccgtgaatatttactgtgggatccaatttaaacttctttcttctctagcctttaaattacacaactttgaactgacacggatctcttacaaagaacaatgcggcactgaaggaagagatgattcctttactcaaacctgcaggaatcagcctattaacaggcaggggaaacggtactttccaatgaatggtaactgatccaggcacattatcacacttcctagtcatctccacctttcctgtattgcctgtggcttgttgtttaagattaagaatcaaagagattaagaagtatcacttcaagtcttgctctgctcacttctatgtttgcagtcaaattattccttatgttggtgacctaaagagaattactttcattcatttcatttcccccgtagcagatggaagtgagaaacctctgagaaaatgaaaacatccttaaccactatctttcccttttatttgattattttatgtcagaaatttgcaaaagtttttttctcctccttctcttccttgttgcttaactttttaattcatgccatatgcagatatccaattatgtgcatcctgtgaataaaccacgtcttggtcactgtcatattttgaaccatctcatcagagatgaataatatctttttaccagagagagaacgaatgttagccacatgcccaagttaacaaagaaaaaatgttctcaaggttgtccttttgggttaaatctggcccttccttggcaaaagcaaaaattctccctgtgagagctcaacatctcaaatacaaccacaggaaaaatggcccaatctgccagtttaggcttaccagcatataatttttaatatctttacttctatcatcccaaatcaaagaactcttctctattatgtttaatcaattgcaagcaaatagatttttctttgtaacaatttgttctgcagaaggctgtttttcacttttcctttcttttgcttctttctgtctttccttctcttttgtctggagaaatcacttagactctgtgtgcctcttctacattgcattctgctctgctatgttacctgctaggctggcttctttggactccctatatgattgatgatgtgaaaacctaaattacttgcagcatagtattacttctttgatgttctcattagcataatgttatttttgaaaaggaaagatactatcacataagttttcctcatctgttgtgatatacaccaatggataaactaacggaaactgctttttgacattaaaagacaggagaaattatatttaactaagtaaaagttaagtcagaattacttgggtgatgtgattcaatttagttaaaggatgatatagagaaaatacattatttagcattatttcttcagctataatgaattgctatagaaatcaggcagatctttctaatgtgtattgattggtcttttcagctactctgaacagattactaaggccatctcctcatctctaagggagaaaaatagtctgtagatgaataatgtaaggtaaagagttgcatgtcagtctttgtaattatttacactttaactttctccagaactcagacatgatttcaacatggtgttagatttgtgcattttattttcctgaccacctcattccagccaatgtatggttatccactctgtgtgccaaaaccaatcatgcctttcacggccctttagttcagagaagttctgcactgatttttagtctcttgatgtctcaatcttacatgtataccaatcacaatggaataaagtgttgagttgtactgtgaaaaaaaaaaaaaattaaaaaaaaaaaaaaaaaaaaaaaaaaaaaaatagttggtgcgcgcgccctcgggccctagaaaaaactttcataaacaattcgttggggggccgcggggcccacatgtgtgctaggggaacaagtggccatagggggttcacaagaggaacaccggggcacaacgaacaaaggggggggattctccccatataaacacgccgcag

SEQ ID NO: 329054 - DNA, 4150 bp, Homo sapiens
aacttaatgtttttgcattggactttgagttaagattattttttaaatcctgaggactagcattaattgacagctgacccaggtgctacacagaagtggattcagtgaatctaggaagacagcagcagacaggattccaggaaccagtgtttgatgaagctaggactgaggagcaagcgagcaagcagcagttcgtggaatcctgtctgctgctgtcttcctggtttaggagccgacgggcgctcgcaggctcagcgcgcgctgcccgcggcaggacccggccgcctccgccgccgccgccgcccctaagcctcccgaagccatggccgggctcggccaccccgccgccttcggccgggccacccacgccgtggtgcgggcgctacccgagtcgctcggccagcacgcgctgagaagcgccaagggcgaggaggtggacgtcgcccgcgcggaacggcagcaccagctctacgtgggcgtgctgggcagcaagctggggctgcaggtggtggagctgccggccgacgagagccttccggactgcgtcttcgtggaggacgtggccgtggtgtgcgaggagacggccctcatcacccgacccggggcgccgagccggaggaaggaggttgacatgatgaaagaagcattagaaaaacttcagctcaatatagtagagatgaaagatgaaaatgcaactttagatggcggagatgttttattcacaggcagagaattttttgtgggcctttccaaaaggacaaatcaacgaggtgctgaaatcttggctgatacttttaaggactatgcagtctccacagtgccagtggcagatgggttgcatttgaagagtttctgcagcatggctgggcctaacctgatcgcaattgggtctagtgaatctgcacagaaggcccttaagatcatgcaacagatgagtgaccaccgctacgacaaactcactgtgcctgatgacatagcagcaaactgtatatatctaaatatccccaacaaagggcacgtcttgctgcaccgaaccccggaagagtatccagaaagtgcaaaggtttatgagaaactgaaggaccatatgctgatccccgtgagcatgtctgaactggaaaaggtggatgggctgctcacctgctgctcagttttaattaacaagaaagtagactcctgagctgcagagtcccccccggtagccggcaagaccgcacaggcaaggccgatgactctgtgcccactcctgttgttttccttgacaatctactgtgccactgtgctactaactcttgtttacaaaatttgattctaagttgaattgcttcattcaacacccccaccctccctcccctcgaggtggtacctaagctgtggatttgctaaatgaattaagcaacctagaagatacagagctaatgaattatcaaaatgtgattaatcccagtaaggaaacactcatttagtgtctgtatttttggtgtgaaaattatttagttgccagtatattctgaagaatgtcttcttgatcagtcagataagcttgctttttttttttttttttttcatgaatcatgtttggttcctgtgaaagtccctggtccagggatcctcctcctttctcttttacttctgaattctgaaattcagttagttacttttgcctttcgctcttctatcacagccaccttgaccttgggtaaaacccaaggtctttccttctggctaccttcctgcaggtccaccctgtctgccattggtctcctctgcctctgactacatctgccaccaacaaccctcccctcacccctgccaggggcagacaggcttctcagcagaactgtgactgaaatcagagctgctgtctggggcagtgttaactacacagaggcacatcctgacagggtttgccccagagatctaaattccagaaggagggcaccacacctaggaaggtaaatccagtatcagaaggttgctaaaagattaaagatcaagaagcttggaaacatcccatgggtacaatgtcttagaaagtctttaagtcacataccatgaatttttgcttcattactgaccatatatgaccttggaggaactcttttttttttttccttctactcatttctgtttccacctaccctgactcaccgtatttccagtcttctacccctgcagttatcctagtccagcaaagtcatttctttcaaaagagacatcatgtctgaaaataattactggtagtctaatatgagccagagtaaacagctcctcatggtcaatgaacatgttcaggaagcgatcaccttgatgcttgaacccaaccccagacagtggacaattctactttgaaatatccgtgaatatttactgtgggatccaatttaaacttctttcttctctagcctttaaattacacaactttgaactgacacggatctcttacaaagaacaatgcggcactgaaggaagagatgattcctttactcaaacctgcaggaatcagcctattaacaggcaggggaaacggtactttccaatgaatggtaactgatccaggcacattatcacacttcctagtcatctccacctttcctgtattgcctgtggcttgttgtttaagattaagaatcaaagagattaagaagtatcacttcaagtcttgctctgctcacttctatgtttgcagtcaaattattccttatgttggtgacctaaagagaattactttcattcatttcatttcccccgtagcagatggaagtgagaaacctctgagaaaatgaaaacatccttaaccactatctttcccttttatttgattattttatgtcagaaatttgcaaaagtttttttctcctccttctcttccttgttgcttaactttttaattcatgccatatgcagatatccaattatgtgcatcctgtgaataaaccacgtcttggtcactgtcatattttgaaccatctcatcagagatgaataatatctttttaccagagagagaacgaatgttagccacatgcccaagttaacaaagaaaaaatgttctcaaggttgtccttttgggttaaatctggcccttccttggcaaaagcaaaaattctccctgtgagagctcaacatctcaaatacaaccacaggaaaaatggcccaatctgccagtttaggcttaccagcatataatttttaatatctttacttctatcatcccaaatcaaagaactcttctctattatgtttaatcaattgcaagcaaatagatttttctttgtaacaatttgttctgcagaaggctgtttttcacttttcctttcttttgcttctttctgtctttccttctcttttgtctggagaaatcacttagactctgtgtgcctcttctacattgcattctgctctgctatgttacctgctaggctggcttctttggactccctatatgattgatgatgtgaaaacctaaattacttgcagcatagtattacttctttgatgttctcattagcataatgttatttttgaaaaggaaagatactatcacataagttttcctcatctgttgtgatatacaccaatggataaactaacggaaactgctttttgacattaaaagacaggagaaattatatttaactaagtaaaagttaagtcagaattacttgggtgatgtgattcaatttagttaaaggatgatatagagaaaatacattatttagcattatttcttcagctataatgaattgctatagaaatcaggcagatctttctaatgtgtattgattggtcttttcagctactctgaacagattactaaggccatctcctcatctctaagggagaaaaatagtctgtagatgaataatgtaaggtaaagagttgcatgtcagtctttgtaattatttacactttaactttctccagaactcagacatgatttcaacatggtgttagatttgtgcattttattttcctgaccacctcattccagccaatgtatggttatccactctgtgtgccaaaaccaatcatgcctttcacggccctttagttcagagaagttctgcactgatttttagtctcttgatgtctcaatcttacatgtataccaatcacaatgattagtgtatttctccggggggggggtg

SEQ ID NO: 329055 - DNA, 342 bp, Homo sapiens
taagcatgcactatgtatttcatcctcatttattgggtctgggatggaagtttctagccagcatgaacctaacctactttttgagacaaaattcactgtttcgttacaggcaaaattctggtgtggtgtgaatgctgtggctcagtccgaacatgtttttttctgtaattttatcattattacacgattgcaatatcagttttgttttttaattggaaagcaacattttctactgttgaaagacgttttttgacaaattgacccttcctagtattgagtactaagttgaggactgcatctacttgttttttacattatagagaataaaatactattgatttg

SEQ ID NO: 329056 - DNA, 270 bp, Homo sapiens
tgagatagaccaagtgaccttgtgtgttctcttcctcctctgtgcttgtttcatctgcagaaccatctgatggatggcagacagctgaaccaggtactgccccttcccaaacacaaatgccctccccattcaccattccctagagcgttcacttccttcatctatgaaaggcaattactagggtctagcaagactgccaatttggtaatgcaaagcaggagataagtgtgaaactctagactggttttctgtttcaaagggcagcaggat

SEQ ID NO: 329057 - DNA, 4368 bp, Homo sapiens
aacttaatgtttttgcattggactttgagttaagattattttttaaatcctgaggactagcattaattgacagctgacccaggtgctacacagaagtggattcagtgaatctaggaagacagcagcagacaggattccaggaaccagtgtttgatgaagctaggactgaggagcaagcgagcaagcagcagttcgtggaatcctgtctgctgctgtcttcctggtttaggagccgacgggcgctcgcaggctcagcgcgcgctgcccgcggcaggacccggccgcctccgccgccgccgccgcccctaagcctcccgaagccatggccgggctcggccaccccgccgccttcggccgggccacccacgccgtggtgcgggcgctacccgagtcgctcggccagcacgcgctgagaagcgccaagggcgaggaggtggacgtcgcccgcgcggaacggcagcaccagctctacgtgggcgtgctgggcagcaagctggggctgcaggtggtggagctgccggccgacgagagccttccggactgcgtcttcgtggaggacgtggccgtggtgtgcgaggagacggccctcatcacccgacccggggcgccgagccggaggaaggaggttgacatgatgaaagaagcattagaaaaacttcagctcaatatagtagagatgaaagatgaaaatgcaactttagatggcggagatgttttattcacaggcagagaattttttgtgggcctttccaaaaggacaaatcaacgaggtgctgaaatcttggctgatacttttaaggactatgcagtctccacagtgccagtggcagatgggttgcatttgaagagtttctgcagcatggctgggcctaacctgatcgcaattgggtctagtgaatctgcacagaaggcccttaagatcatgcaacagatgagtgaccaccgctacgacaaactcactgtgcctgatgacatagcagcaaactgtatatatctaaatatccccaacaaagggcacgtcttgctgcaccgaaccccggaagagtatccagaaagtgcaaaggtttatgagaaactgaaggaccatatgctgatccccgtgagcatgtctgaactggaaaaggtggatgggctgctcacctgctgctcagttttaattaacaagaaagtagactcctgagctgcagagtcccccccggtagccggcaagaccgcacaggcaaggccgatgactctgtgcccactcctgttgttttccttgacaatctactgtgccactgtgctactaactcttgtttacaaaatttgattctaagttgaattgcttcattcaacacccccaccctccctcccctcgaggtggtacctaagctgtggatttgctaaatgaattaagcaacctagaagatacagagctaatgaattatcaaaatgtgattaatcccagtaaggaaacactcatttagtgtctgtatttttggtgtgaaaattatttagttgccagtatattctgaagaatgtcttcttgatcagtcagataagcttgctttttttttttttttttttcatgaatcatgtttggttcctgtgaaagtccctggtccagggatcctcctcctttctcttttacttctgaattctgaaattcagttagttacttttgcctttcgctcttctatcacagccaccttgaccttgggtaaaacccaaggtctttccttctggctaccttcctgcaggtccaccctgtctgccattggtctcctctgcctctgactacatctgccaccaacaaccctcccctcacccctgccaggggcagacaggcttctcagcagaactgtgactgaaatcagagctgctgtctggggcagtgttaactacacagaggcacatcctgacagggtttgccccagagatctaaattccagaaggagggcaccacacctaggaaggtaaatccagtatcagaaggttgctaaaagattaaagatcaagaagcttggaaacatcccatgggtacaatgtcttagaaagtctttaagtcacataccatgaatttttgcttcattactgaccatatatgaccttggaggaactcttttttttttttccttctactcatttctgtttccacctaccctgactcaccgtatttccagtcttctacccctgcagttatcctagtccagcaaagtcatttctttcaaaagagacatcatgtctgaaaataattactggtagtctaatatgagccagagtaaacagctcctcatggtcaatgaacatgttcaggaagcgatcaccttgatgcttgaacccaaccccagacagtggacaattctactttgaaatatccgtgaatatttactgtgggatccaatttaaacttctttcttctctagcctttaaattacacaactttgaactgacacggatctcttacaaagaacaatgcggcactgaaggaagagatgattcctttactcaaacctgcaggaatcagcctattaacaggcaggggaaacggtactttccaatgaatggtaactgatccaggcacattatcacacttcctagtcatctccacctttcctgtattgcctgtggcttgttgtttaagattaagaatcaaagagattaagaagtatcacttcaagtcttgctctgctcacttctatgtttgcagtcaaattattccttatgttggtgacctaaagagaattactttcattcatttcatttcccccgtagcagatggaagtgagaaacctctgagaaaatgaaaacatccttaaccactatctttcccttttatttgattattttatgtcagaaatttgcaaaagtttttttctcctccttctcttccttgttgcttaactttttaattcatgccatatgcagatatccaattatgtgcatcctgtgaataaaccacgtcttggtcactgtcatattttgaaccatctcatcagagatgaataatatctttttaccagagagagaacgaatgttagccacatgcccaagttaacaaagaaaaaatgttctcaaggttgtccttttgggttaaatctggcccttccttggcaaaagcaaaaattctccctgtgagagctcaacatctcaaatacaaccacaggaaaaatggcccaatctgccagtttaggcttaccagcatataatttttaatatctttacttctatcatcccaaatcaaagaactcttctctattatgtttaatcaattgcaagcaaatagatttttctttgtaacaatttgttctgcagaaggctgtttttcacttttcctttcttttgcttctttctgtctttccttctcttttgtctggagaaatcacttagactctgtgtgcctcttctacattgcattctgctctgctatgttacctgctaggctggcttctttggactccctatatgattgatgatgtgaaaacctaaattacttgcagcatagtattacttctttgatgttctcattagcataatgttatttttgaaaaggaaagatactatcacataagttttcctcatctgttgtgatatacaccaatggataaactaacggaaactgctttttgacattaaaagacaggagaaattatatttaactaagtaaaagttaagtcagaattacttgggtgatgtgattcaatttagttaaaggatgatatagagaaaatacattatttagcattatttcttcagctataatgaattgctatagaaatcaggcagatctttctaatgtgtattgattggtcttttcagctactctgaacagattactaaggccatctcctcatctctaagggagaaaaatagtctgtagatgaataatgtaaggtaaagagttgcatgtcagtctttgtaattatttacactttaactttctccagaactcagacatgatttcaacatggtgttagatttgtgcattttattttcctgaccacctcattccagccaatgtatggttatccactctgtgtgccaaaaccaatcatgcctttcacggccctttagttcagagaagttctgcactgatttttagtctcttgatgtctcaatcttacatgtataccaatcacaatggaataaagtgttgagttgtactgtgaaaaaaaaaaaaaattaaaaaaaaaaaaaaaaaaaaaaaaaaaaaaatagttggtgcgcgcgccctcgggccctagaaaaaactttcataaacaattcgttggggggccgcggggcccacatgtgtgctaggggaacaagtggccatagggggttcacaagaggaacaccggggcacaacgaacaaaggggggggattctccccatataaacacgccgcag

SEQ ID NO: 329058 - DNA, 3989 bp, Homo sapiens
  misc_feature (96)..(96): n is a, c, g, or t
aacagggccaggaggtgtgggagcgggagacactagagtaacctatgtgcacagcctctccatataccatgtgctgttgcgcctgctcgtgcgcgnacattaggcaagagaaacagcggctcctcaagtcctgcccaaagaccgtccagaaaccccagcctcccgtcgccttctcgccgcctccgctgggagccgcagatcagtccaagttgacggacaggaggcgaaatgtgcaaatgtttatgggttgacatgatgaaagaagcattagaaaaacttcagctcaatatagtagagatgaaagatgaaaatgcaactttagatggcggagatgttttattcacaggcagagaattttttgtgggcctttccaaaaggacaaatcaacgaggtgctgaaatcttggctgatacttttaaggactatgcagtctccacagtgccagtggcagatgggttgcatttgaagagtttctgcagcatggctgggcctaacctgatcgcaattgggtctagtgaatctgcacagaaggcccttaagatcatgcaacagatgagtgaccaccgctacgacaaactcactgtgcctgatgacatagcagcaaactgtatatatctaaatatccccaacaaagggcacgtcttgctgcaccgaaccccggaagagtatccagaaagtgcaaaggtttatgagaaactgaaggaccatatgctgatccccgtgagcatgtctgaactggaaaaggtggatgggctgctcacctgctgctcagttttaattaacaagaaagtagactcctgagctgcagagtcccccccggtagccggcaagaccgcacaggcaaggccgatgactctgtgcccactcctgttgttttccttgacaatctactgtgccactgtgctactaactcttgtttacaaaatttgattctaagttgaattgcttcattcaacacccccaccctccctcccctcgaggtggtacctaagctgtggatttgctaaatgaattaagcaacctagaagatacagagctaatgaattatcaaaatgtgattaatcccagtaaggaaacactcatttagtgtctgtatttttggtgtgaaaattatttagttgccagtatattctgaagaatgtcttcttgatcagtcagataagcttgctttttttttttttttttttcatgaatcatgtttggttcctgtgaaagtccctggtccagggatcctcctcctttctcttttacttctgaattctgaaattcagttagttacttttgcctttcgctcttctatcacagccaccttgaccttgggtaaaacccaaggtctttccttctggctaccttcctgcaggtccaccctgtctgccattggtctcctctgcctctgactacatctgccaccaacaaccctcccctcacccctgccaggggcagacaggcttctcagcagaactgtgactgaaatcagagctgctgtctggggcagtgttaactacacagaggcacatcctgacagggtttgccccagagatctaaattccagaaggagggcaccacacctaggaaggtaaatccagtatcagaaggttgctaaaagattaaagatcaagaagcttggaaacatcccatgggtacaatgtcttagaaagtctttaagtcacataccatgaatttttgcttcattactgaccatatatgaccttggaggaactcttttttttttttccttctactcatttctgtttccacctaccctgactcaccgtatttccagtcttctacccctgcagttatcctagtccagcaaagtcatttctttcaaaagagacatcatgtctgaaaataattactggtagtctaatatgagccagagtaaacagctcctcatggtcaatgaacatgttcaggaagcgatcaccttgatgcttgaacccaaccccagacagtggacaattctactttgaaatatccgtgaatatttactgtgggatccaatttaaacttctttcttctctagcctttaaattacacaactttgaactgacacggatctcttacaaagaacaatgcggcactgaaggaagagatgattcctttactcaaacctgcaggaatcagcctattaacaggcaggggaaacggtactttccaatgaatggtaactgatccaggcacattatcacacttcctagtcatctccacctttcctgtattgcctgtggcttgttgtttaagattaagaatcaaagagattaagaagtatcacttcaagtcttgctctgctcacttctatgtttgcagtcaaattattccttatgttggtgacctaaagagaattactttcattcatttcatttcccccgtagcagatggaagtgagaaacctctgagaaaatgaaaacatccttaaccactatctttcccttttatttgattattttatgtcagaaatttgcaaaagtttttttctcctccttctcttccttgttgcttaactttttaattcatgccatatgcagatatccaattatgtgcatcctgtgaataaaccacgtcttggtcactgtcatattttgaaccatctcatcagagatgaataatatctttttaccagagagagaacgaatgttagccacatgcccaagttaacaaagaaaaaatgttctcaaggttgtccttttgggttaaatctggcccttccttggcaaaagcaaaaattctccctgtgagagctcaacatctcaaatacaaccacaggaaaaatggcccaatctgccagtttaggcttaccagcatataatttttaatatctttacttctatcatcccaaatcaaagaactcttctctattatgtttaatcaattgcaagcaaatagatttttctttgtaacaatttgttctgcagaaggctgtttttcacttttcctttcttttgcttctttctgtctttccttctcttttgtctggagaaatcacttagactctgtgtgcctcttctacattgcattctgctctgctatgttacctgctaggctggcttctttggactccctatatgattgatgatgtgaaaacctaaattacttgcagcatagtattacttctttgatgttctcattagcataatgttatttttgaaaaggaaagatactatcacataagttttcctcatctgttgtgatatacaccaatggataaactaacggaaactgctttttgacattaaaagacaggagaaattatatttaactaagtaaaagttaagtcagaattacttgggtgatgtgattcaatttagttaaaggatgatatagagaaaatacattatttagcattatttcttcagctataatgaattgctatagaaatcaggcagatctttctaatgtgtattgattggtcttttcagctactctgaacagattactaaggccatctcctcatctctaagggagaaaaatagtctgtagatgaataatgtaaggtaaagagttgcatgtcagtctttgtaattatttacactttaactttctccagaactcagacatgatttcaacatggtgttagatttgtgcattttattttcctgaccacctcattccagccaatgtatggttatccactctgtgtgccaaaaccaatcatgcctttcacggccctttagttcagagaagttctgcactgatttttagtctcttgatgtctcaatcttacatgtataccaatcacaatggaataaagtgttgagttgtactgtgaaaaaaaaaaaaaattaaaaaaaaaaaaaaaaaaaaaaaaaaaaaaatagttggtgcgcgcgccctcgggccctagaaaaaactttcataaacaattcgttggggggccgcggggcccacatgtgtgctaggggaacaagtggccatagggggttcacaagaggaacaccggggcacaacgaacaaaggggggggattctccccatataaacacgccgcag

SEQ ID NO: 329059 - DNA, 746 bp, Homo sapiens
  misc_feature (96)..(96): n is a, c, g, or t
aacagggccaggaggtgtgggagcgggagacactagagtaacctatgtgcacagcctctccatataccatgtgctgttgcgcctgctcgtgcgcgnacattaggcaagagaaacagcggctcctcaagtcctgcccaaagaccgtccagaaaccccagcctcccgtcgccttctcgccgcctccgctgggagccgcagatcagtccaagttgacggacaggaggcgaaatgtgcaaatgtttatggtttcatctgtatggaaaaggagctctggtaactttggccaagacttttcagtaggaaatgcttcaaaatacaaagcaagagctattttcaagaaagaccttctaaatttatattagaaccatctgatggatggcagacagctgaaccaggacatagtgagaagaaagccatctgaaaaccaggaagagagccctcaccagaatctgaccatgctggtgccctgatcttggactttcagcctccagaactgcaaaattctggtgtggtgtgaatgctgtggctcagtccgaacatgtttttttctgtaattttatcattattacacgattgcaatatcagttttgttttttaattggaaagcaacattttctactgttgaaagacgttttttgacaaattgacccttcctagtattgagtactaagttgaggactgcatctacttgttttttacattatagagaataaaatactattgatttgaaaaatacatatcacttg

SEQ ID NO: 329060 - DNA, 440 bp, Homo sapiens
agatgttaatctctaatctttgcagcatctgttatttttattcaggggtacaagtgctttgtgtgtgctgcggtgagccctggccttctggaagctctgtgcttctgaggggctgagggggatttgggggtcccttttcatagtgtgggctgtctttcccaagatgcagtgatgacccatcagaggcagggttggtattgtccgtggggtccagtccctctatcttccagggcttttctggtcacaagagaccatggccagaagtgggtatcgtgcttgtgtctggggcctggggagggaaggaaaacaaataccaccccctgcagaagagatcgttaatggattctttgagtaaccagccagatagcttgtttgtgtgcgaggttgggacattttccgtaaagagcagactaaatataggctcgagggtggggaccagg

SEQ ID NO: 329061 - DNA, 884 bp, Homo sapiens
  misc_feature (839)..(839): n is a, c, g, or t
  misc_feature (860)..(860): n is a, c, g, or t
  misc_feature (879)..(879): n is a, c, g, or t
cggagtccagacttccttatggcccaggacagctccacgcatgctcagcacctaccagggtcgagctcacacacgtgcctacgacccgccgcggcgcctgcgcggtagcatcgcggagtcggtgctttagtacgccgctggcacctttactctcgccggccgcgcgaacccgtttgagctcggtatcctagtgcacacgccttgcaagcgacggcgccatgagtctgacttccagttccagcgtacgagttgaatggatcgcagcagttaccattgctgctgggacagctgcaattggttatctagcttacaaaagattttatgttaaagatcatcgaaataaagctatgataaaccttcacatccagaaagacaaccccaagatagtacatgcttttgacatggaggatttgggagataaagctgtgtactgccgttgttggaggtccaaaaagttcccattctgtgatggggctcacacaaaacataacgaagagactggagacaatgtgggccctctgatcatcaagaaaaaagaaacttaaatggacacttttgatgctgcaaatcagcttgtcgtgaagttacctgattgtttaattagaatgactaccacctctgtctgattcaccttcgctggattctaaatgtggtatattgcaaactgcagctttcacatttatggcatttgtcttgttgaaacatcgtggtgcacatttgtttaaacaaaaaaaaaaaacacaacggggaaacccaaaaaaaaaaaaaaaaaaaaaattgtggggggggggccgaaaagttttaacaattgttggggggggcccaggattgaatggganaggtgccagaaaacggggaanggggggttccccaaaaacncgggg

SEQ ID NO: 329062 - DNA, 865 bp, Homo sapiens
cggagtccagacttccttatggcccaggacagctccacgcatgctcagcacctaccagggtcgagctcacacacgtgcctacgacccgccgcggcgcctgcgcggtagcatcgcggagtcggtgctttagtacgccgctggcacctttactctcgccggccgcgcgaacccgtttgagctcggtatcctagtgcacacgccttgcaagcgacggcgccatgagtctgacttccagttccagcgtacgagttgaatggatcgcagcagttaccattgctgctgggacagctgcaattggttatctagcttacaaaagattttatgttaaagatcatcgaaataaagctatgataaaccttcacatccagaaagacaaccccaagatagtacatgcttttgacatggaggatttgggagataaagctgtgtactgccgttgttggaggtccaaaaagttcccattctgtgatggggctcacacaaaacataacgaagagactggagacaatgtgggccctctgatcatcaagaaaaaagaaacttaaatggacacttttgatgctgcaaatcagcttgtcgtgaagttacctgattgtttaattagaatgactaccacctctgtctgattcaccttcgctggattctaaatgtggtatattgcaaactgcagctttcacatttatggcatttgtcttgttgaaacatcgtggtgcacatttgtttaaacaaaaaaaaaaaactcggcccaatcaactttgacttggagcaactttttcatgccggccgaatttaggctcacttgccaatcgccctatatgaggggatttttaatgggccgcgtttacgggggctgggcccctgcggg

SEQ ID NO: 329063 - DNA, 797 bp, Homo sapiens
  misc_feature (752)..(752): n is a, c, g, or t
  misc_feature (773)..(773): n is a, c, g, or t
  misc_feature (792)..(792): n is a, c, g, or t
cggagtccagacttccttatggcccaggacagctccacgcatgctcagcacctaccagggtcgagctcacacacgtgcctacgacccgccgcggcgcctgcgcggtagcatcgcggagtcggtgctttagtacgccgctggcacctttactctcgccggccgcgcgaacccgtttgagctcggtatcctagtgcacacgccttgcaagcgacggcgccatgagtctgacttccagttccagcgtacgagttgaatggatcgcagcagttaccattgctgctgggacagctgcaattggttatctagcttacaaaagattttatgttaaagatcatcgaaataaagctatgataaaccttcacatccagaaagacaaccccaagatagtacatgcttttgacatggaggatttgggagataaagctgtgtactgccgttgttggaggtccaaaaagttcccattctgtgatggggctcacacaaaacataacgaagagactggagacaatgtgggccctctgatcatcaagaaaaaagaaacttaaatggacacttttgatgctgcaaatcagcttgtcgtgaagttacctgattgtttaattagaatgactaccacctctgtctgattcaccttcgctggattctaaatgtgcacaacggggaaacccaaaaaaaaaaaaaaaaaaaaaattgtggggggggggccgaaaagttttaacaattgttggggggggcccaggattgaatggganaggtgccagaaaacggggaanggggggttccccaaaaacncgggg

SEQ ID NO: 329064 - DNA, 656 bp, Homo sapiens
cggagtccagacttccttatggcccaggacagctccacgcatgctcagcacctaccagggtcgagctcacacacgtgcctacgacccgccgcggcgcctgcgcggtagcatcgcggagtcggtgctttagtacgccgctggcacctttactctcgccggccgcgcgaacccgtttgagctcggtatcctagtgcacacgccttgcaagcgacggcgccatgagtctgacttccagttccagcgtacgagttgaatggatcgcagcagttaccattgctgctgggacagctgcaattggttatctagcttacaaaagattttatgttaaagatcatcgaaataaagctatgataaaccttcacatccagaaagacaaccccaagatagtacatgcttttgacatggaggatttgggagataaagctgtgtactgccgttgttggaggtccaaaaagcacaacggggaaacccaaaaaaaaaaaaaaaaaaaaaaaaatttgtgtgggcgggccttgggcccccggaaaaagtttttaaaacccttcgcgttgggggcgccggggcccccaagggtagggaacacggggccaaaaggggttcccaaggagaaaaccggggcagggacccggggcggggtttccccccaaaaaaaaagc

SEQ ID NO: 329065 - DNA, 2696 bp, Homo sapiens
cggagtccagacttccttatggcccaggacagctccacgcatgctcagcacctaccagggtcgagctcacacacgtgcctacgacccgccgcggcgcctgcgcggtagcatcgcggagtcggtgctttagtacgccgctggcacctttactctcgccggccgcgcgaacccgtttgagctcggtatcctagtgcacacgccttgcaagcgacggcgccatgagtctgacttccagttccagcgtacgagttgaatggatcgcagcagttaccattgctgctgggacagctgcaattggttatctagcttacaaaagattttatgttaaagatcatcgaaataaagctatgataaaccttcacatccagaaagacaaccccaagatagtacatgcttttgacatggaggatttgggagataaagctgtgtactgccgttgttggaggtccaaaaagttcccattctgtgatggggctcacacaaaacataacgaagagactggagacaatgtgggccctctgatcatcaagaaaaaagaaacttaaatggacacttttgatgctgcaaatcagcttgtcgtgaagttacctgattgtttaattagaatgactaccacctctgtctgattcaccttcgctggattctaaatgtggtatattgcaaactgcagctttcacatttatggcatttgtcttgttgaaacatcgtggtgcacatttgtttaaacaaaaaaaaaaaaaaaggaaaaaccaacctcatggcctgtgggttattttggtcttgtaaggatccatttctttaaaatactgacatatagagttgtaccttatatagaatatagttgtatcttgaagtcaacatattaaattattctcaaaattatgtatttgcagattgtacttgtaagtttcaaagaaaaattaccatcttttcatattgacctggaaactaaataggatgtgattcagctacattaatttcttaatacaatctaggaaagacctgttgtagccttgattttcttgacattggtaatgacactgagaaaatatggcttctgtttttcaccgttttcaatcaaaatgattgataaatgttattctgtttaatttcataagtcaggtcaataataaaggggtggtaacttcctcatatttatcttcacagatatttaatgaagatggatccattaaaggagccaatagtgaaaatttagttaaaggtgatattagatttaaattagtcatgaagaatgtcttaaaatctaatgttccagaattctggcccaaggaatggtaagcacttgaactgaggattttgaaggaattggaacatataatgtcaagtcttttgatcactaagccacatatcctgacagaaatagtagtcacaagattagatcaaaggcgtgggaagatttttttttttcccactctagctaatcaagcacatggcttttaaattgtatgatctttttcttaaaagcaaaaatttgaagacaagtgtttgtttatgtaatattcttcaaagactccgagcagaaacattgcattcattgttgattcagaaaaaagaaaatataaaaactgaaaataattagcaataaaagatttaagacaaatagttcataaatatttttaaagagattaggtttttgaatttcataggttagaaggaaaatcatggcaaaatttacagaaaattgggcaaacaattgaaattgataaagcaggtaaacatcatcatttattttagtatacatgaattctcagtagtagtcaatcacaaatttctacttgctaaaatccatttaccttgacaggaatcaaacctgacagcagcatatcctatgtaatatatgatcatggctatttttaaatatgtagttttgtgtattactgtagataaaagttggtaacaaaattgtacagtggttttaagaagcccatgtaactaacttggacatgtctttaagtcacatattcatcataaaatctaaaatcctacaaactgattctattagattcttagggtaaattttttctttgcccacctccttctttttaagataagtatgcatgtcagcaaaacagagcaatcatgcttttaaagatgaactgttttaaagaaaaataaatgcatcaactcccagtgtttctgataaagggacatccttctaacttaacagactattctttatcttgaatttgaaattatattgttagtcatgcatttttgtaatgtcagggggaacctggtaccagttctcaaaactataggattatatgagtgtgtgtatacatatggcaaaattataaatgaccaccttactgtgaaatatagatcttgagcattttgaaaggccaaaataattaggtaaatgtattttcaaggtcatgttaaaatgtttacatgcttttgaactagcattcatttatgattaaaacccttttcaggttatttgacctaaaaaccaaagtgagtgtggttaggttaatatgagatttttttacacaaaaatcattgtgtgcaattactgttctagctaagcaccttaatgcttctaagtgcttttcatttcgttgaggcaagacaagtggggctttcatcttttttttctctatgtcatttatattctagttatttctgaagagtgtactaggttgagaagtttctaatgtgaaaaatcttgttca

SEQ ID NO: 329066 - DNA, 2629 bp, Homo sapiens
cggagtccagacttccttatggcccaggacagctccacgcatgctcagcacctaccagggtcgagctcacacacgtgcctacgacccgccgcggcgcctgcgcggtagcatcgcggagtcggtgctttagtacgccgctggcacctttactctcgccggccgcgcgaacccgtttgagctcggtatcctagtgcacacgccttgcaagcgacggcgccatgagtctgacttccagttccagcgtacgagattttatgttaaagatcatcgaaataaagctatgataaaccttcacatccagaaagacaaccccaagatagtacatgcttttgacatggaggatttgggagataaagctgtgtactgccgttgttggaggtccaaaaagttcccattctgtgatggggctcacacaaaacataacgaagagactggagacaatgtgggccctctgatcatcaagaaaaaagaaacttaaatggacacttttgatgctgcaaatcagcttgtcgtgaagttacctgattgtttaattagaatgactaccacctctgtctgattcaccttcgctggattctaaatgtggtatattgcaaactgcagctttcacatttatggcatttgtcttgttgaaacatcgtggtgcacatttgtttaaacaaaaaaaaaaaaaaaggaaaaaccaacctcatggcctgtgggttattttggtcttgtaaggatccatttctttaaaatactgacatatagagttgtaccttatatagaatatagttgtatcttgaagtcaacatattaaattattctcaaaattatgtatttgcagattgtacttgtaagtttcaaagaaaaattaccatcttttcatattgacctggaaactaaataggatgtgattcagctacattaatttcttaatacaatctaggaaagacctgttgtagccttgattttcttgacattggtaatgacactgagaaaatatggcttctgtttttcaccgttttcaatcaaaatgattgataaatgttattctgtttaatttcataagtcaggtcaataataaaggggtggtaacttcctcatatttatcttcacagatatttaatgaagatggatccattaaaggagccaatagtgaaaatttagttaaaggtgatattagatttaaattagtcatgaagaatgtcttaaaatctaatgttccagaattctggcccaaggaatggtaagcacttgaactgaggattttgaaggaattggaacatataatgtcaagtcttttgatcactaagccacatatcctgacagaaatagtagtcacaagattagatcaaaggcgtgggaagatttttttttttcccactctagctaatcaagcacatggcttttaaattgtatgatctttttcttaaaagcaaaaatttgaagacaagtgtttgtttatgtaatattcttcaaagactccgagcagaaacattgcattcattgttgattcagaaaaaagaaaatataaaaactgaaaataattagcaataaaagatttaagacaaatagttcataaatatttttaaagagattaggtttttgaatttcataggttagaaggaaaatcatggcaaaatttacagaaaattgggcaaacaattgaaattgataaagcaggtaaacatcatcatttattttagtatacatgaattctcagtagtagtcaatcacaaatttctacttgctaaaatccatttaccttgacaggaatcaaacctgacagcagcatatcctatgtaatatatgatcatggctatttttaaatatgtagttttgtgtattactgtagataaaagttggtaacaaaattgtacagtggttttaagaagcccatgtaactaacttggacatgtctttaagtcacatattcatcataaaatctaaaatcctacaaactgattctattagattcttagggtaaattttttctttgcccacctccttctttttaagataagtatgcatgtcagcaaaacagagcaatcatgcttttaaagatgaactgttttaaagaaaaataaatgcatcaactcccagtgtttctgataaagggacatccttctaacttaacagactattctttatcttgaatttgaaattatattgttagtcatgcatttttgtaatgtcagggggaacctggtaccagttctcaaaactataggattatatgagtgtgtgtatacatatggcaaaattataaatgaccaccttactgtgaaatatagatcttgagcattttgaaaggccaaaataattaggtaaatgtattttcaaggtcatgttaaaatgtttacatgcttttgaactagcattcatttatgattaaaacccttttcaggttatttgacctaaaaaccaaagtgagtgtggttaggttaatatgagatttttttacacaaaaatcattgtgtgcaattactgttctagctaagcaccttaatgcttctaagtgcttttcatttcgttgaggcaagacaagtggggctttcatcttttttttctctatgtcatttatattctagttatttctgaagagtgtactaggttgagaagtttctaatgtgaaaaatcttgttca

SEQ ID NO: 329067 - DNA, 2181 bp, Homo sapiens
cggagtccagacttccttatggcccaggacagctccacgcatgctcagcacctaccagggtcgagctcacacacgtgcctacgacccgccgcggcgcctgcgcggtagcatcgcggagtcggtgctttagtacgccgctggcacctttactctcgccggccgcgcgaacccgtttgagctcggtatcctagtgcacacgccttgcaagcgacggcgccatgagtctgacttccagttccagcgtacgagttgaatggatcgcagcagttaccattgctgctgggacagctgcaattggttatctagcttacaaaagattttatgttaaagatcatcgaaataaagctatgataaaccttcacatccagaaagacaaccccaagatagtacatgcttttgacatggaggatttgggagataaagctgtgtactgccgttgttggaggtccaaaaagttcccattctgtgatggggctcacacaaaacataacgaagagactggagacaatgtgggccctctgatcatcaagaaaaaagaaacttaaatggacacttttgatgctgcaaatcagcttgtcgtgaagttacctgattgtttaattagaatgactaccacctctgtctgattcaccttcgctggattctaaatgtgatatttaatgaagatggatccattaaaggagccaatagtgaaaatttagttaaaggtgatattagatttaaattagtcatgaagaatgtcttaaaatctaatgttccagaattctggcccaaggaatggtaagcacttgaactgaggattttgaaggaattggaacatataatgtcaagtcttttgatcactaagccacatatcctgacagaaatagtagtcacaagattagatcaaaggcgtgggaagatttttttttttcccactctagctaatcaagcacatggcttttaaattgtatgatctttttcttaaaagcaaaaatttgaagacaagtgtttgtttatgtaatattcttcaaagactccgagcagaaacattgcattcattgttgattcagaaaaaagaaaatataaaaactgaaaataattagcaataaaagatttaagacaaatagttcataaatatttttaaagagattaggtttttgaatttcataggttagaaggaaaatcatggcaaaatttacagaaaattgggcaaacaattgaaattgataaagcaggtaaacatcatcatttattttagtatacatgaattctcagtagtagtcaatcacaaatttctacttgctaaaatccatttaccttgacaggaatcaaacctgacagcagcatatcctatgtaatatatgatcatggctatttttaaatatgtagttttgtgtattactgtagataaaagttggtaacaaaattgtacagtggttttaagaagcccatgtaactaacttggacatgtctttaagtcacatattcatcataaaatctaaaatcctacaaactgattctattagattcttagggtaaattttttctttgcccacctccttctttttaagataagtatgcatgtcagcaaaacagagcaatcatgcttttaaagatgaactgttttaaagaaaaataaatgcatcaactcccagtgtttctgataaagggacatccttctaacttaacagactattctttatcttgaatttgaaattatattgttagtcatgcatttttgtaatgtcagggggaacctggtaccagttctcaaaactataggattatatgagtgtgtgtatacatatggcaaaattataaatgaccaccttactgtgaaatatagatcttgagcattttgaaaggccaaaataattaggtaaatgtattttcaaggtcatgttaaaatgtttacatgcttttgaactagcattcatttatgattaaaacccttttcaggttatttgacctaaaaaccaaagtgagtgtggttaggttaatatgagatttttttacacaaaaatcattgtgtgcaattactgttctagctaagcaccttaatgcttctaagtgcttttcatttcgttgaggcaagacaagtggggctttcatcttttttttctctatgtcatttatattctagttatttctgaagagtgtactaggttgagaagtttctaatgtgaaaaatcttgttca

SEQ ID NO: 329068 - DNA, 2880 bp, Homo sapiens
cggagtccagacttccttatggcccaggacagctccacgcatgctcagcacctaccagggtcgagctcacacacgtgcctacgacccgccgcggcgcctgcgcggtagcatcgcggagtcggtgctttagtacgccgctggcacctttactctcgccggccgcgcgaacccgtttgagctcggtatcctagtgcacacgccttgcaagcgacggcgccatgagtctgacttccagttccagcgtacgagttgaatggatcgcagcagttaccattgctgctgggacagctgcaattggttatctagcttacaaaagattttatgttaaagatcatcgaaataaagctatgataaaccttcacatccagaaagacaaccccaagatagtacatgcttttgacatggaggatttgggagataaagctgtgtactgccgttgttggaggtccaaaaaggttggttacatcacttgctgagttgtatgacggccacctaggaggcagttcaaacaaggacagcaaaagaatacagactaagaagaaagagaggaaagtcttaccagttaacatcaggagctgaactgaaattgaaatgaaatgcaactggacatgtttagactcattttctttcatttacaggttcccattctgtgatggggctcacacaaaacataacgaagagactggagacaatgtgggccctctgatcatcaagaaaaaagaaacttaaatggacacttttgatgctgcaaatcagcttgtcgtgaagttacctgattgtttaattagaatgactaccacctctgtctgattcaccttcgctggattctaaatgtggtatattgcaaactgcagctttcacatttatggcatttgtcttgttgaaacatcgtggtgcacatttgtttaaacaaaaaaaaaaaaaaaggaaaaaccaacctcatggcctgtgggttattttggtcttgtaaggatccatttctttaaaatactgacatatagagttgtaccttatatagaatatagttgtatcttgaagtcaacatattaaattattctcaaaattatgtatttgcagattgtacttgtaagtttcaaagaaaaattaccatcttttcatattgacctggaaactaaataggatgtgattcagctacattaatttcttaatacaatctaggaaagacctgttgtagccttgattttcttgacattggtaatgacactgagaaaatatggcttctgtttttcaccgttttcaatcaaaatgattgataaatgttattctgtttaatttcataagtcaggtcaataataaaggggtggtaacttcctcatatttatcttcacagatatttaatgaagatggatccattaaaggagccaatagtgaaaatttagttaaaggtgatattagatttaaattagtcatgaagaatgtcttaaaatctaatgttccagaattctggcccaaggaatggtaagcacttgaactgaggattttgaaggaattggaacatataatgtcaagtcttttgatcactaagccacatatcctgacagaaatagtagtcacaagattagatcaaaggcgtgggaagatttttttttttcccactctagctaatcaagcacatggcttttaaattgtatgatctttttcttaaaagcaaaaatttgaagacaagtgtttgtttatgtaatattcttcaaagactccgagcagaaacattgcattcattgttgattcagaaaaaagaaaatataaaaactgaaaataattagcaataaaagatttaagacaaatagttcataaatatttttaaagagattaggtttttgaatttcataggttagaaggaaaatcatggcaaaatttacagaaaattgggcaaacaattgaaattgataaagcaggtaaacatcatcatttattttagtatacatgaattctcagtagtagtcaatcacaaatttctacttgctaaaatccatttaccttgacaggaatcaaacctgacagcagcatatcctatgtaatatatgatcatggctatttttaaatatgtagttttgtgtattactgtagataaaagttggtaacaaaattgtacagtggttttaagaagcccatgtaactaacttggacatgtctttaagtcacatattcatcataaaatctaaaatcctacaaactgattctattagattcttagggtaaattttttctttgcccacctccttctttttaagataagtatgcatgtcagcaaaacagagcaatcatgcttttaaagatgaactgttttaaagaaaaataaatgcatcaactcccagtgtttctgataaagggacatccttctaacttaacagactattctttatcttgaatttgaaattatattgttagtcatgcatttttgtaatgtcagggggaacctggtaccagttctcaaaactataggattatatgagtgtgtgtatacatatggcaaaattataaatgaccaccttactgtgaaatatagatcttgagcattttgaaaggccaaaataattaggtaaatgtattttcaaggtcatgttaaaatgtttacatgcttttgaactagcattcatttatgattaaaacccttttcaggttatttgacctaaaaaccaaagtgagtgtggttaggttaatatgagatttttttacacaaaaatcattgtgtgcaattactgttctagctaagcaccttaatgcttctaagtgcttttcatttcgttgaggcaagacaagtggggctttcatcttttttttctctatgtcatttatattctagttatttctgaagagtgtactaggttgagaagtttctaatgtgaaaaatcttgttca

SEQ ID NO: 329069 - DNA, 604 bp, Homo sapiens
aaacactgaagatctgactcaggaagtgctgggaaggagtccagtgtgtttatcctgacccctgttcaacttcttcctgcagcccactccatgctgggaatagacaactctcctctgaggctgaggctaaccagattatgcagaactttcttctctccaacattgcctggagctggggtagttgttaagtccttgggtttctaaagacttgaaaagctgcttgaaaagaataactagatggcttgttagtcagtttttttattattagaaagcagaataatgccattaaatttaaaataaattttatagaaaattaaaatatatttagaatttattaaatgagaatataactatacttatataatcatgttttctacaaaatatgaagttagtacattctgatttttattttaatgagaaaacactttgaaattttaaacaaaggacttttgaatgaagaatgactttgaaacctggaatcctgctacatatattcctttgaaaattaacattaagggtggttttgttttgtttatctgtttctttgggtatcatttctcttacagctttctgtgatagttgcaattgagttttggtaaattaa

SEQ ID NO: 329070 - DNA, 2791 bp, Homo sapiens
cggagtccagacttccttatggcccaggacagctccacgcatgctcagcacctaccagggtcgagctcacacacgtgcctacgacccgccgcggcgcctgcgcggtagcatcgcggagtcggtgctttagtacgccgctggcacctttactctcgccggccgcgcgaacccgtttgagctcggtatcctagtgcacacgccttgcaagcgacggcgccatgagtctgacttccagttccagcgtacgagcccactccatgctgggaatagacaactctcctctgaggctgaggctaaccagattatgcagaactttcttctctccaacattgcctggagctgggttgaatggatcgcagcagttaccattgctgctgggacagctgcaattggttatctagcttacaaaagattttatgttaaagatcatcgaaataaagctatgataaaccttcacatccagaaagacaaccccaagatagtacatgcttttgacatggaggatttgggagataaagctgtgtactgccgttgttggaggtccaaaaagttcccattctgtgatggggctcacacaaaacataacgaagagactggagacaatgtgggccctctgatcatcaagaaaaaagaaacttaaatggacacttttgatgctgcaaatcagcttgtcgtgaagttacctgattgtttaattagaatgactaccacctctgtctgattcaccttcgctggattctaaatgtggtatattgcaaactgcagctttcacatttatggcatttgtcttgttgaaacatcgtggtgcacatttgtttaaacaaaaaaaaaaaaaaaggaaaaaccaacctcatggcctgtgggttattttggtcttgtaaggatccatttctttaaaatactgacatatagagttgtaccttatatagaatatagttgtatcttgaagtcaacatattaaattattctcaaaattatgtatttgcagattgtacttgtaagtttcaaagaaaaattaccatcttttcatattgacctggaaactaaataggatgtgattcagctacattaatttcttaatacaatctaggaaagacctgttgtagccttgattttcttgacattggtaatgacactgagaaaatatggcttctgtttttcaccgttttcaatcaaaatgattgataaatgttattctgtttaatttcataagtcaggtcaataataaaggggtggtaacttcctcatatttatcttcacagatatttaatgaagatggatccattaaaggagccaatagtgaaaatttagttaaaggtgatattagatttaaattagtcatgaagaatgtcttaaaatctaatgttccagaattctggcccaaggaatggtaagcacttgaactgaggattttgaaggaattggaacatataatgtcaagtcttttgatcactaagccacatatcctgacagaaatagtagtcacaagattagatcaaaggcgtgggaagatttttttttttcccactctagctaatcaagcacatggcttttaaattgtatgatctttttcttaaaagcaaaaatttgaagacaagtgtttgtttatgtaatattcttcaaagactccgagcagaaacattgcattcattgttgattcagaaaaaagaaaatataaaaactgaaaataattagcaataaaagatttaagacaaatagttcataaatatttttaaagagattaggtttttgaatttcataggttagaaggaaaatcatggcaaaatttacagaaaattgggcaaacaattgaaattgataaagcaggtaaacatcatcatttattttagtatacatgaattctcagtagtagtcaatcacaaatttctacttgctaaaatccatttaccttgacaggaatcaaacctgacagcagcatatcctatgtaatatatgatcatggctatttttaaatatgtagttttgtgtattactgtagataaaagttggtaacaaaattgtacagtggttttaagaagcccatgtaactaacttggacatgtctttaagtcacatattcatcataaaatctaaaatcctacaaactgattctattagattcttagggtaaattttttctttgcccacctccttctttttaagataagtatgcatgtcagcaaaacagagcaatcatgcttttaaagatgaactgttttaaagaaaaataaatgcatcaactcccagtgtttctgataaagggacatccttctaacttaacagactattctttatcttgaatttgaaattatattgttagtcatgcatttttgtaatgtcagggggaacctggtaccagttctcaaaactataggattatatgagtgtgtgtatacatatggcaaaattataaatgaccaccttactgtgaaatatagatcttgagcattttgaaaggccaaaataattaggtaaatgtattttcaaggtcatgttaaaatgtttacatgcttttgaactagcattcatttatgattaaaacccttttcaggttatttgacctaaaaaccaaagtgagtgtggttaggttaatatgagatttttttacacaaaaatcattgtgtgcaattactgttctagctaagcaccttaatgcttctaagtgcttttcatttcgttgaggcaagacaagtggggctttcatcttttttttctctatgtcatttatattctagttatttctgaagagtgtactaggttgagaagtttctaatgtgaaaaatcttgttca

SEQ ID NO: 329071 - DNA, 1065 bp, Homo sapiens
cggagtccagacttccttatggcccaggacagctccacgcatgctcagcacctaccagggtcgagctcacacacgtgcctacgacccgccgcggcgcctgcgcggtagcatcgcggagtcggtgctttagtacgccgctggcacctttactctcgccggccgcgcgaacccgtttgagctcggtatcctagtgcacacgccttgcaagcgacggcgccatgagtctgacttccagttccagcgtacgagttgaatggatcgcagcagttaccattgctgctgggacagctgcaattggttatctagcttacaaaagattttatgttaaagatcatcgaaataaagctatgataaaccttcacatccagaaagacaaccccaagatagtacatgcttttgacatggaggatttgggagataaagctgtgtactgccgttgttggaggtccaaaaagttcccattctgtgatggggctcacacaaaacataacgaagagactggagacaatgtgggccctctgatcatcaagaaaaaagaaacttaaatggacacttttgatgctgcaaatcagcttgtcgtgaagttacctgattgtttaattagaatgactaccacctctgtctgattcaccttcgctggattctaaatgtggtatattgcaaactgcagctttcacatttatggcatttgtcttgttgaaacatcgtggtgcacatttgtttaaacaaaaaaaaaaaacaaaaacaaaatttacaaaaaacacaaccaaaaaaaaaatttgtggggggcggcggcgaggaaaaaaggtttctacaacccatgtctggtgggcgcgcgccgccagggaggaatagcagcacactggcataacggcgtgccaaaagaaaacccgggagagcagaggcggggcggtttcacccaaaaaaaaaccgccgggggcacggggttttgaccaactcccaggaggggccgggggcatgactgggtccacaccagggggcccaggaagccataaacccccccgcagcgcggggaaaaaaagcaaggagcacagtgaggaagga

SEQ ID NO: 329072 - DNA, 907 bp, Homo sapiens
  misc_feature (756)..(756): n is a, c, g, or t
cggagtccagacttccttatggcccaggacagctccacgcatgctcagcacctaccagggtcgagctcacacacgtgcctacgacccgccgcggcgcctgcgcggtagcatcgcggagtcggtgctttagtacgccgctggcacctttactctcgccggccgcgcgaacccgtttgagctcggtatcctagtgcacacgccttgcaagcgacggcgccatgagtctgacttccagttccagcgtacgagttgaatggatcgcagcagttaccattgctgctgggacagctgcaattggttatctagcttacaaaagattttatgttaaagatcatcgaaataaagctatgataaaccttcacatccagaaagacaaccccaagatagtacatgcttttgacatggaggatttgggagataaagctgtgtactgccgttgttggaggtccaaaaagttcccattctgtgatggggctcacacaaaacataacgaagagactggagacaatgtgggccctctgatcatcaagaaaaaagaaacttaaatggacacttttgatgctgcaaatcagcttgtcgtgaagttacctgattgtttaattagaatgactaccacctctgtctgattcaccttcgctggattctaaatgtggtatattgcaaactgcagctttcacatttatggcatttgtcttgttgaaacatcgtggtgcacatttgtttaaacaaaaaaaaaaaaaattttgggggggggcngggaaaagtttttaaccattggtggggggggcccgaggtaggaacagggccaagccggtccaaagaaccggaggaggtggggtttcccaaaaaagccggggcggggtttgaaatcagggttggggttggttaagggcggctaacgcgcggg

SEQ ID NO: 329073 - DNA, 909 bp, Homo sapiens
  misc_feature (826)..(826): n is a, c, g, or t
  misc_feature (853)..(853): n is a, c, g, or t
cggagtccagacttccttatggcccaggacagctccacgcatgctcagcacctaccagggtcgagctcacacacgtgcctacgacccgccgcggcgcctgcgcggtagcatcgcggagtcggtgctttagtacgccgctggcacctttactctcgccggccgcgcgaacccgtttgagctcggtatcctagtgcacacgccttgcaagcgacggcgccatgagtctgacttccagttccagcgtacgagttgaatggatcgcagcagttaccattgctgctgggacagctgcaattggttatctagcttacaaaagattttatgttaaagatcatcgaaataaagctatgataaaccttcacatccagaaagacaaccccaagatagtacatgcttttgacatggaggatttgggagataaagctgtgtactgccgttgttggaggtccaaaaagttcccattctgtgatggggctcacacaaaacataacgaagagactggagacaatgtgggccctctgatcatcaagaaaaaagaaacttaaatggacacttttgatgctgcaaatcagcttgtcgtgaagttacctgattgtttaattagaatgactaccacctctgtctgattcaccttcgctggattctaaatgtggtatattgcaaactgcagctttcacatttatggcatttgtcttgttgaaacatcgtggtgcacatttgtttaaacaaaaaaaaaaaaggggaaaaccacctcatggcggggggtaatggggctgggaagggccctttttaaaatactggctttgaagtggccttataaaattgnggtttggggccattaatttctccattntttggcggtttggggttcaaaaaaaactttttgggggagagagggggcattttaag

SEQ ID NO: 329074 - DNA, 3350 bp, Homo sapiens
  misc_feature (806)..(806): n is a, c, g, or t
tgctaatgcttttggtacaaatggatgtggaatataattgaatattttcttgtttaaggggagcatgaagaggtgttgaggttatgtcaagcatctggcacagctgaaggcagatggaaatatttacaagtacgcaatttgagactaagatattgttatcattctcctattgaagacaagagcaatagtaaaacacatcaggtcagggggttaaagacctgtgataaaccacttccgataagttggaaacgtgtgtctatattttcatatctgtatatatataatggtaaagaaagacaccttcgtaacccgcattttccaaagagaggaatcacagggagatgtacagcaatggggccatttaagagttctgtgttcatcttgattcttcaccttctagaaggggccctgagtaattcactcattcagctgaacaacaatggctatgaaggcattgtcgttgcaatcgaccccaatgtgccagaagatgaaacactcattcaacaaataaaggacatggtgacccaggcatctctgtatctgtttgaagctacaggaaagcgattttatttcaaaaatgttgccattttgattcctgaaacatggaagacaaaggctgactatgtgagaccaaaacttgagacctacaaaaatgctgatgttctggttgctgagtctactcctccaggtaatgatgaaccctacactgagcagatgggcaactgtggagagaagggtgaaaggatccacctcactcctgatttcattgcaggaaaaaagttagctgaatatggaccacaaggtanggcatttgtccatgagtgggctcatctacgatggggagtatttgacgagtacaataatgatgagaaattctacttatccaatggaagaatacaagcagtaagatgttcagcaggtattactggtacaaatgtagtaaagaagtgtcagggaggcagctgttacaccaaaagatgcacattcaataaagttacaggactctatgaaaaaggatgtgagtttgttctccaatcccgccagacggagaaggcttctataatgtttgcacaacatgttgattctatagttgaattctgtacagaacaaaaccacaacaaagaagctccaaacaagcaaaatcaaaaatgcaatctccgaagcacatgggaagtgatccgtgattctgaggactttaagaaaaccactcctatgacaacacagccaccaaatcccaccttctcattgctgcagattggacaaagaattgtgtgtttagtccttgacaaatctggaagcatggcgactggtaaccgcctcaatcgactgaatcaagcaggccagcttttcctgctgcagacagttgagctggggtcctgggttgggatggtgacatttgacagtgctgcccatgtacaaagtgaactcatacagataaacagtggcagtgacagggacacactcgccaaaagattacctgcagcagcttcaggagggacgtccatctgcagcgggcttcgatcggcatttactgtgattaggaagaaatatccaactgatggatctgaaattgtgctgctgacggatggggaagacaacactataagtgggtgctttaacgaggtcaaacaaagtggtgccatcatccacacagtcgctttggggccctctgcagctcaagaactagaggagctgtccaaaatgacaggaggtttacagacatatgcttcagatcaagttcagaacaatggcctcattgatgcttttggggccctttcatcaggaaatggagctgtctctcagcgctccatccagcttgagagtaagggattaaccctccagaacagccagtggatgaatggcacagtgatcgtggacagcaccgtgggaaaggacactttgtttcttatcacctggacaacgcagcctccccaaatccttctctgggatcccagtggacagaagcaaggtggctttgtagtggacaaaaacaccaaaatggcctacctccaaatcccaggcattgctaaggttggcacttggaaatacagtctgcaagcaagctcacaaaccttgaccctgactgtcacgtcccgtgcgtccaatgctaccctgcctccaattacagtgacttccaaaacgaacaaggacaccagcaaattccccagccctctggtagtttatgcaaatattcgccaaggagcctccccaattctcagggccagtgtcacagccctgattgaatcagtgaatggaaaaacagttaccttggaactactggataatggagcaggtgctgatgctactaaggatgacggtgtctactcaaggtatttcacaacttatgacacgaatggtagatacagtgtaaaagtgcgggctctgggaggagttaacgcagccagacggagagtgataccccagcagagtggagcactgtacatacctggctggattgagaatgatgaaatacaatggaatccaccaagacctgaaattaataaggatgatgttcaacacaagcaagtgtgtttcagcagaacatcctcgggaggctcatttgtggcttctgatgtcccaaatgctcccatacctgatctcttcccacctggccaaatcaccgacctgaaggcggaaattcacgggggcagtctcattaatctgacttggacagctcctggggatgattatgaccatggaacagctcacaagtatatcattcgaataagtacaagtattcttgatctcagagacaagttcaatgaatctcttcaagtgaatactactgctctcatcccaaaggaagccaactctgaggaagtctttttgtttaaaccagaaaacattacttttgaaaatggcacagatcttttcattgctattcaggctgttgataaggtcgatctgaaatcagaaatatccaacattgcacgagtatctttgtttattcctccacagactccgccagagacacctagtcctgatgaaacgtctgctccttgtcctaatattcatatcaacagcaccattcctggcattcacattttaaaaattatgtggaagtggataggagaactgcagctgtcaatagcctagggctgaatttttgtcagataaataaaataaatcattcatccttttttttgattataaaattttctaaaatgtattttagacttcctgtagggggcgatatactaaatgtatatagtacatttatactaaatgtattcctgtagggggcgatatactaaatgtattttagacttcctgtagggggcgataaaataaaatgctaaacaactgggtatacatgcataaaaactatccattcaaacccaaaaatttaa

SEQ ID NO: 329075 - DNA, 2156 bp, Homo sapiens
cagtctatggatctctgcagaattcggcttactcttcatgcctaccacgtcggagaaggcttctatcatgtttgcacgacatgttgattctatagttgaattctgtacagaacaaaaccacaacaaagaagctccaaacaagcaaaatcaaaaatgcaatctccgaagcacatgggaagtgatccgtgattctgaggactttaagaaaaccactcctatgacaacacagccaccaaatcccaccttctcattgctgcagattggacaaagaattgtgtgtttagtccttgacaaatctggaagcatggcgactggtaaccgcctcaatcgactgaatcaagcaggccagcttttcctgctgcagacagttgagctggggtcctgggttgggatggtgacatttgacagtgctgcccatgtacaaagtgaactcatacagataaacagtggcagtgacagggacacactcgccaaaagattacctgcagcagcttcaggagggacgtccatctgcagcgggcttcgatcggcatttactgtgattaggaagaaatatccaactgatggatctgaaattgtgctgctgacggatggggaagacaacactataagtgggtgctttaacgaggtcaaacaaagtggtgccatcatccacacagtcgctttggggccctctgcagctcaagaactagaggagctgtccaaaatgacaggaggtttacagacatatgcttcagatcaagttcagaacaatggcctcattgatgcttttggggccctttcatcaggaaatggagctgtctctcagcgctccatccagcttgagagtaagggattaaccctccagaacagccagtggatgaatggcacagtgatcgtggacagcaccgtgggaaaggacactttgtttcttatcacctggacaacgcagcctccccaaatccttctctgggatcccagtggacagaagcaaggtggctttgtagtggacaaaaacaccaaaatggcctacctccaaatcccaggcattgctaaggttggcacttggaaatacagtctgcaagcaagctcacaaaccttgaccctgactgtcacgtcccgtgcgtccaatgctaccctgcctccaattacagtgacttccaaaacgaacaaggacaccagcaaattccccagccctctggtagtttatgcaaatattcgccaaggagcctccccaattctcagggccagtgtcacagccctgattgaatcagtgaatggaaaaacagttaccttggaactactggataatggagcaggtgctgatgctactaaggatgacggtgtctactcaaggtatttcacaacttatgacacgaatggtagatacagtgtaaaagtgcgggctctgggaggagttaacgcagccagacggagagtgataccccagcagagtggagcactgtacatacctggctggattgagaatgatgaaatacaatggaatccaccaagacctgaaattaataaggatgatgttcaacacaagcaagtgtgtttcagcagaacatcctcgggaggctcatttgtggcttctgatgtcccaaatgctcccatacctgatctcttcccacctggccaaatcaccgacctgaaggcggaaattcacgggggcagtctcattaatctgacttggacagctcctggggatgattatgaccatggaacagctcacaagtatatcattcgaataagtacaagtattcttgatctcagagacaagttcaatgaatctcttcaagtgaatactactgctctcatcccaaaggaagccaactctgaggaagtctttttgtttaaaccagaaaacattacttttgaaaatggcacagatcttttcattgctattcaggctgttgataaggtcgatctgaaatcagaaatatccaacattgcacgagtatctttgtttattcctccacagactccgccagagacacctagtcctgatgaaacgtctgctccttgtcctaatattcatatcaacagcaccattcctggcattcacattttaaaaattatgtggaagtggataggagaactgcagctgtcaatagcctagggctgaatttttgtcagataaataaaataaatcattcatccttttttttgattat

SEQ ID NO: 329076 - DNA, 1859 bp, Homo sapiens
ccttaaaaccgggtgggaaggttggcccagggataccaattaagtttaaaaaaaaaaaaaggccaggcgtggtggctcatgcctttaatcccagcactctgggaggccgagcaaagtgggtgctttaacgaggtcaaacaaagtggtgccatcatccacacagtcgctttggggccctctgcagctcaagaactagaggagctgtccaaaatgacaggaggtttacagacatatgcttcagatcaagttcagaacaatggcctcattgatgcttttggggccctttcatcaggaaatggagctgtctctcagcgctccatccagcttgagagtaagggattaaccctccagaacagccagtggatgaatggcacagtgatcgtggacagcaccgtgggaaaggacactttgtttcttatcacctggacaacgcagcctccccaaatccttctctgggatcccagtggacagaagcaaggtggctttgtagtggacaaaaacaccaaaatggcctacctccaaatcccaggcattgctaaggttggcacttggaaatacagtctgcaagcaagctcacaaaccttgaccctgactgtcacgtcccgtgcgtccaatgctaccctgcctccaattacagtgacttccaaaacgaacaaggacaccagcaaattccccagccctctggtagtttatgcaaatattcgccaaggagcctccccaattctcagggccagtgtcacagccctgattgaatcagtgaatggaaaaacagttaccttggaactactggataatggagcaggtgctgatgctactaaggatgacggtgtctactcaaggtatttcacaacttatgacacgaatggtagatacagtgtaaaagtgcgggctctgggaggagttaacgcagccagacggagagtgataccccagcagagtggagcactgtacatacctggctggattgagaatgatgaaatacaatggaatccaccaagacctgaaattaataaggatgatgttcaacacaagcaagtgtgtttcagcagaacatcctcgggaggctcatttgtggcttctgatgtcccaaatgctcccatacctgatctcttcccacctggccaaatcaccgacctgaaggcggaaattcacgggggcagtctcattaatctgacttggacagctcctggggatgattatgaccatggaacagctcacaagtatatcattcgaataagtacaagtattcttgatctcagagacaagttcaatgaatctcttcaagtgaatactactgctctcatcccaaaggaagccaactctgaggaagtctttttgtttaaaccagaaaacattacttttgaaaatggcacagatcttttcattgctattcaggctgttgataaggtcgatctgaaatcagaaatatccaacattgcacgagtatctttgtttattcctccacagactccgccagagacacctagtcctgatgaaacgtctgctccttgtcctaatattcatatcaacagcaccattcctggcattcacattttaaaaattatgtggaagtggataggagaactgcagctgtcaatagcctagggctgaatttttgtcagataaataaaataaatcattcatccttttttttgattataaaattttctaaaatgtattttagacttcctgtagggggcgatatactaaatgtatatagtacatttatactaaatgtattcctgtagggggcgatatactaaatgtattttagacttcctgtagggggcgataaaataaaatgctaaacaactgggtatacatgcataaaaactatccattcaaacccaaaaatttaa

SEQ ID NO: 329077 - DNA, 1585 bp, Homo sapiens
  misc_feature (806)..(806): n is a, c, g, or t
tgctaatgcttttggtacaaatggatgtggaatataattgaatattttcttgtttaaggggagcatgaagaggtgttgaggttatgtcaagcatctggcacagctgaaggcagatggaaatatttacaagtacgcaatttgagactaagatattgttatcattctcctattgaagacaagagcaatagtaaaacacatcaggtcagggggttaaagacctgtgataaaccacttccgataagttggaaacgtgtgtctatattttcatatctgtatatatataatggtaaagaaagacaccttcgtaacccgcattttccaaagagaggaatcacagggagatgtacagcaatggggccatttaagagttctgtgttcatcttgattcttcaccttctagaaggggccctgagtaattcactcattcagctgaacaacaatggctatgaaggcattgtcgttgcaatcgaccccaatgtgccagaagatgaaacactcattcaacaaataaaggacatggtgacccaggcatctctgtatctgtttgaagctacaggaaagcgattttatttcaaaaatgttgccattttgattcctgaaacatggaagacaaaggctgactatgtgagaccaaaacttgagacctacaaaaatgctgatgttctggttgctgagtctactcctccaggtaatgatgaaccctacactgagcagatgggcaactgtggagagaagggtgaaaggatccacctcactcctgatttcattgcaggaaaaaagttagctgaatatggaccacaaggtanggcatttgtccatgagtgggctcatctacgatggggagtatttgacgagtacaataatgatgagaaattctacttatccaatggaagaatacaagcagtaagatgttcagcaggtattactggtacaaatgtagtaaagaagtgtcagggaggcagctgttacaccaaaagatgcacattcaataaagttacaggactctatgaaaaaggatgtgagtttgttctccaatcccgccagacggagaaggcttctataatgtttgcacaacatgttgattctatagttgaattctgtacagaacaaaaccacaacaaagaagctccaaacaagcaaaatcaaaaatgcaatctccgaagcacatgggaagtgatccgtgattctgaggactttaagaaaaccactcctatgacaacacagccaccaaatcccaccttctcattgctgcagattggacaaagaattgtgtgtttagtccttgacaaatctggaagcatggcgactggtaaccgcctcaatcgactgaatcaagcaggccagcttttcctgctgcagacagttgagctggggtcctgggttgggatggtgacatttgacagtgctgcccatgtacaaagtgaactcatacagataaacagtggcagtgacagggacacactcgccaaaagattacctgcagcagcttcaggagggacgtccatctgcagcgggcttcgatcggcatttactgtgataaggaagaaatatccaaagttaggtcactcggcgtgagcagggtacc

SEQ ID NO: 329078 - DNA, 3151 bp, Homo sapiens
  misc_feature (806)..(806): n is a, c, g, or t
tgctaatgcttttggtacaaatggatgtggaatataattgaatattttcttgtttaaggggagcatgaagaggtgttgaggttatgtcaagcatctggcacagctgaaggcagatggaaatatttacaagtacgcaatttgagactaagatattgttatcattctcctattgaagacaagagcaatagtaaaacacatcaggtcagggggttaaagacctgtgataaaccacttccgataagttggaaacgtgtgtctatattttcatatctgtatatatataatggtaaagaaagacaccttcgtaacccgcattttccaaagagaggaatcacagggagatgtacagcaatggggccatttaagagttctgtgttcatcttgattcttcaccttctagaaggggccctgagtaattcactcattcagctgaacaacaatggctatgaaggcattgtcgttgcaatcgaccccaatgtgccagaagatgaaacactcattcaacaaataaaggacatggtgacccaggcatctctgtatctgtttgaagctacaggaaagcgattttatttcaaaaatgttgccattttgattcctgaaacatggaagacaaaggctgactatgtgagaccaaaacttgagacctacaaaaatgctgatgttctggttgctgagtctactcctccaggtaatgatgaaccctacactgagcagatgggcaactgtggagagaagggtgaaaggatccacctcactcctgatttcattgcaggaaaaaagttagctgaatatggaccacaaggtanggcatttgtccatgagtgggctcatctacgatggggagtatttgacgagtacaataatgatgagaaattctacttatccaatggaagaatacaagcagtaagatgttcagcaggtattactggtacaaatgtagtaaagaagtgtcagggaggcagctgttacaccaaaagatgcacattcaataaagttacaggactctatgaaaaaggatgtgagtttgttctccaatcccgccagacggagaaggcttctataatgtttgcacaacatgttgattctatagttgaattctgtacagaacaaaaccacaacaaagaagctccaaacaagcaaaatcaaaaatgcaatctccgaagcacatgggaagtgatccgtgattctgaggactttaagaaaaccactcctatgacaacacagccaccaaatcccaccttctcattgctgcagattggacaaagaattgtgtgtttagtccttgacaaatctggaagcatggcgactggtaaccgcctcaatcgactgaatcaagcaggccagcttttcctgctgcagacagttgagctggggtcctgggttgggatggtgacatttgacagtgctgcccatgtacaaagtgaactcatacagataaacagtggcagtgacagggacacactcgccaaaagattacctgcagcagcttcaggagggacgtccatctgcagcgggcttcgatcggcatttactgtgattaggaagaaatatccaactgatggatctgaaattgtgctgctgacggatggggaagacaacactataagtgggtgctttaacgaggtcaaacaaagtggtgccatcatccacacagtcgctttggggccctctgcagctcaagaactagaggagctgtccaaaatgacaggaggtttacagacatatgcttcagatcaagttcagaacaatggcctcattgatgcttttggggccctttcatcaggaaatggagctgtctctcagcgctccatccagcttgagagtaagggattaaccctccagaacagccagtggatgaatggcacagtgatcgtggacagcaccgtgggaaaggacactttgtttcttatcacctggacaacgcagcctccccaaatccttctctgggatcccagtggacagaagcaaggtggctttgtagtggacaaaaacaccaaaatggcctacctccaaatcccaggcattgctaaggttggcacttggaaatacagtctgcaagcaagctcacaaaccttgaccctgactgtcacgtcccgtgcgtccaatgctaccctgcctccaattacagtgacttccaaaacgaacaaggacaccagcaaattccccagccctctggtagtttatgcaaatattcgccaaggagcctccccaattctcagggccagtgtcacagccctgattgaatcagtgaatggaaaaacagttaccttggaactactggataatggagcaggtgctgatgctactaaggatgacggtgtctactcaaggtatttcacaacttatgacacgaatggtagatacagtgtaaaagtgcgggctctgggaggagttaacgcagccagacggagagtgataccccagcagagtggagcactgtacatacctggctggattgagaatgatgaaatacaatggaatccaccaagacctgaaattaataaggatgatgttcaacacaagcaagtgtgtttcagcagaacatcctcgggaggctcatttgtggcttctgatgtcccaaatgctcccatacctgatctcttcccacctggccaaatcaccgacctgaaggcggaaattcacgggggcagtctcattaatctgacttggacagctcctggggatgattatgaccatggaacagctcacaagtatatcattcgaataagtacaagtattcttgatctcagagacaagttcaatgaatctcttcaagtgaatactactgctctcatcccaaaggaagccaactctgaggaagtctttttgtttaaaccagaaaacattacttttgaaaatggcacagatcttttcattgctattcaggctgttgataaggtcgatctgaaatcagaaatatccaacattgcacgagtatctttgtttattcctccacagactccgccagagacacctagtcctgatgaaacgtctgctccttgtcctaatattcatatcaacagcaccattcctggcattcacattttaaaaattatgtggaagtggataggagaactgcagctgtcaatagcctagggctgaatttttgtcagataaataaaataaatcattcatccttttttttgattat

SEQ ID NO: 329079 - DNA, 1891 bp, Homo sapiens
  misc_feature (26)..(26): n is a, c, g, or t
  misc_feature (43)..(43): n is a, c, g, or t
  misc_feature (49)..(49): n is a, c, g, or t
  misc_feature (59)..(60): n is a, c, g, or t
  misc_feature (72)..(72): n is a, c, g, or t
acgacggcagtgctcgttatttggtnatagcgtctccagaggntccctngtgagggatnngatcggcattanttgtgattaggaagaaatatccaactgatggatctgaaattgtgctgctgacggatggggaagacaacactataagtgggtgctttaacgaggtcaaacaaagtggtgccatcatccacacagtcgctttggggccctctgcagctcaagaactagaggagctgtccaaaatgacaggaggtttacagacatatgcttcagatcaagttcagaacaatggcctcattgatgcttttggggccctttcatcaggaaatggagctgtctctcagcgctccatccagcttgagagtaagggattaaccctccagaacagccagtggatgaatggcacagtgatcgtggacagcaccgtgggaaaggacactttgtttcttatcacctggacaacgcagcctccccaaatccttctctgggatcccagtggacagaagcaaggtggctttgtagtggacaaaaacaccaaaatggcctacctccaaatcccaggcattgctaaggttggcacttggaaatacagtctgcaagcaagctcacaaaccttgaccctgactgtcacgtcccgtgcgtccaatgctaccctgcctccaattacagtgacttccaaaacgaacaaggacaccagcaaattccccagccctctggtagtttatgcaaatattcgccaaggagcctccccaattctcagggccagtgtcacagccctgattgaatcagtgaatggaaaaacagttaccttggaactactggataatggagcaggtgctgatgctactaaggatgacggtgtctactcaaggtatttcacaacttatgacacgaatggtagatacagtgtaaaagtgcgggctctgggaggagttaacgcagccagacggagagtgataccccagcagagtggagcactgtacatacctggctggattgagaatgatgaaatacaatggaatccaccaagacctgaaattaataaggatgatgttcaacacaagcaagtgtgtttcagcagaacatcctcgggaggctcatttgtggcttctgatgtcccaaatgctcccatacctgatctcttcccacctggccaaatcaccgacctgaaggcggaaattcacgggggcagtctcattaatctgacttggacagctcctggggatgattatgaccatggaacagctcacaagtatatcattcgaataagtacaagtattcttgatctcagagacaagttcaatgaatctcttcaagtgaatactactgctctcatcccaaaggaagccaactctgaggaagtctttttgtttaaaccagaaaacattacttttgaaaatggcacagatcttttcattgctattcaggctgttgataaggtcgatctgaaatcagaaatatccaacattgcacgagtatctttgtttattcctccacagactccgccagagacacctagtcctgatgaaacgtctgctccttgtcctaatattcatatcaacagcaccattcctggcattcacattttaaaaattatgtggaagtggataggagaactgcagctgtcaatagcctagggctgaatttttgtcagataaataaaataaatcattcatccttttttttgattataaaattttctaaaatgtattttagacttcctgtagggggcgatatactaaatgtatatagtacatttatactaaatgtattcctgtagggggcgatatactaaatgtattttagacttcctgtagggggcgataaaataaaatgctaaacaactgggtatacatgcataaaaactatccattcaaacccaaaaatttaa

SEQ ID NO: 329080 - DNA, 2107 bp, Homo sapiens
cagaacccatcaggaagtgcacaggcgtccggcgtgctcctccctccctgcagccccgggcagcatctcccagaggctccgcggcccaggctcctggtgtgtctgcagtgcaggtggctcctggaagaccctcagcctgcctgctgaggccatgtcggactacgagaacgatgacgagtgctggaacgtcctggagggcttccgggtgacgctcacctcggtcatcgacccctcacgcatcacaccttacctgcggcagtgcaaggtcctgaaccctgatgatgaggagcaggtgctcagcgaccccaacctggtcatccgcaaacggaaagtgggtgtgctcctggacatcctgcagcggaccggccacaagggctacgtggccttcctcgagagcctggagctctactacccgcagctgtacaagaaggtcacaggcaaggagccggcccgcgtcttctccatgatcatcgacgcgtccggggagtcaggcctgactcagctgctgatgactgaggtcatgaagctgcagaagaaggtgcaggacctgaccgcgctgctgagctccaaagatgacttcatcaaggagctgcgggtgaaggacagcctgctgcgcaagcaccaggagcgtgtgcagaggctcaaggaggagtgcgaggccggcagccgcgagctcaagcgctgcaaggaggagaactacgacctggccatgcgcctggcgcaccagagtgaggagaagggcgccgcgctcatgcggaaccgtgacctgcagctggagattgaccagctcaagcacagcctcatgaaggccgaggacgactgcaaggtggagcgcaagcacacgctgaagctcaggcacgccatggagcagcggcccagccaggagctgctgtgggagctgcagcaggagaaggccctgctccaggcccgggtgcaggagctggaggcctccgtccaggaggggaagctggacaggagcagcccctacatccaggtactggaggaggactggcggcaggcgctgcgggaccaccaggagcaggccaacaccatcttctccctgcgcaaggacctccgccagggcgaggcccgacgcctccggtgcatggaggagaaggagatgttcgagctgcagtgcctggcactacgtaaggactccaagatgtacaaggaccgcatcgaggccatcctgctgcagatggaggaggtcgccattgagcgggaccaggccatagccacgcgggaggagctgcacgcacagcacgcccggggcctgcaggagaaggacgcgctgcgcaagcaggtgcgggagctgggcgagaaggcggatgagctgcagctgcaggtgttccagtgtgaggcgcagctactggccgtggagggcaggctcaggcggcagcagctggagacgctcgtcctgagctccgacctggaagatggctcacccaggaggtcccaggagctctcactcccccaggacctggaggacacccagctctcagacaaaggctgccttgccggcggggggagcccgaaacagccctttgcagctctgcaccaggagcaggttttgcggaacccccatgacgcaggcctgagcagcggggagccgcccgagaaggagcggcggcgcctcaaagagagttttgagaactaccgcaggaagcgcgccctcaggaagatgcagaaaggatggcggcagggggaggaggaccgggagaacaccacgggcagcgacaacaccgacactgagggctcctagccgcagcagcgcaggccccgaccagggcacacccaccggcccggcctcctgccacccgggggtgccgacgccctggggcgcagacttccccgagccgtcgctgacttggcctggaacgaggaatctggtgccctgaaaggcccagccggactgccgggcattggggccgtttgttaagcggcactcattttgcggaggccatgcgggtgctcaccacccccatgcacacgccatctgtgtaacttcaggatctgttctgtttcaccatgtaacacacaatacatgcatgcattgtattagtgttagaaaacacagctgcgtaaataaacagcacgggtgacccgc

SEQ ID NO: 329081 - DNA, 3005 bp, Homo sapiens
cagaacccatcaggaagtgcacaggcgtccggcgtgctcctccctccctgcagccccgggcagcatctcccagaggctccgcggcccaggctcctggtgtgtctgcagtgcaggtggctcctggaagaccctcagcctgcctgctgaggccatgtcggactacgagaacgatgacgagtgctggaacgtcctggagggcttccgggtgacgctcacctcggtcatcgacccctcacgcatcacaccttacctgcggcagtgcaaggtcctgaaccctgatgatgaggagcaggtgctcagcgaccccaacctggtcatccgcaaacggaaagtgggtgtgctcctggacatcctgcagcggaccggccacaagggctacgtggccttcctcgagagcctggagctctactacccgcagctgtacaagaaggtcacaggcaaggagccggcccgcgtcttctccatgatcatcgacgcgtccggggagtcaggcctgactcagctgctgatgactgaggtcatgaagctgcagaagaaggtgcaggacctgaccgcgctgctgagctccaaagatgacttcatcaaggagctgcgggtgaaggacagcctgctgcgcaagcaccaggagcgtgtgcagaggctcaaggaggagtgcgaggccggcagccgcgagctcaagcgctgcaaggaggagaactacgacctggccatgcgcctggcgcaccagagtgaggagaagggcgccgcgctcatgcggaaccgtgacctgcagctggagattgaccagctcaagcacagcctcatgaaggccgaggacgactgcaaggtggagcgcaagcacacgctgaagctcaggcacgccatggagcagcggcccagccaggagctgctgtgggagctgcagcaggagaaggccctgctccaggcccgggtgcaggagctggaggcctccgtccaggaggggaagctggacaggagcagcccctacatccaggtactggaggaggactggcggcaggcgctgcgggaccaccaggagcaggccaacaccatcttctccctgcgcaaggacctccgccagggcgaggcccgacgcctccggtgcatggaggagaaggagatgttcgagctgcagtgcctggcactacgtaaggactccaagatgtacaaggaccgcatcgaggccatcctgctgcagatggaggaggtcgccattgagcgggaccaggccatagccacgcgggaggagctgcacgcacagcacgcccggggcctgcaggagaaggacgcgctgcgcaagcaggtgcgggagctgggcgagaaggcggatgagctgcagctgcaggtgttccagtgtgaggcgcagctactggccgtggagggcaggctcaggcggcagcagctggagacgctcgtcctgagctccgacctggaagatggctcacccaggaggtcccaggagctctcactcccccaggacctggaggacacccagctctcagacaaaggctgccttgccggcggggggagcccgaaacagccctttgcagctctgcaccaggagcaggttttgcggaacccccatgacgcaggcctgagcagcggggagccgcccgagaaggagcggcggcgcctcaaagagagttttgagaactaccgcaggaagcgcgccctcaggaagatgcagaaaggatggcggcagggggaggaggaccgggagaacaccacgggcagcgacaacaccgacactgagggctcctagccgcagcagcgcaggccccgaccagggcacacccaccggcccggcctcctgccacccgggggtgccgacgccctggggcgcagacttccccgagccgtcgctgacttggcctggaacgaggaatctggtgccctgaaaggcccagccggactgccgggcattggggccgtttgttaagcggcactcattttgcggaggccatgcgggtgctcaccacccccatgcacacgccatctgtgtaacttcaggatctgttctgtttcaccatgtaacacacaatacatgcatgcattgtattagtgttagaaaacacagctgcgtaaataaacagcacgggtgacccgcattcccgctcggacactcgcgcgcagccccgcggccgtccctcctcgctgcggcccgcggtgtcctcggggtgcgagctgcacgtggacgcagggccccctcaggccgccagggggcggcatagcgcagcgcgcccccgacccggaagacggaagcccaagaacgccgcttccgcccggcgcccacttccaagatggcggcggggcggggccggggcggggccggggcagggcggacggagccggcgagcgggatgctgcggactgcgctgcgcggcgcgccgaggttgctgagtcgcgtgcagccccgggcgccctgcctgaggcggctgtggggccgcggggcccgtccagaggtcgcggggaggcggcgggcctgggcctggggctggcggcgctcaagctccgagcaggggccggggcccgcggcggctctggggcgcgtggaggcggcgcactaccagctcgtctacacctgcaaggtctgcgggactaggtcctccaagcgcatctccaagctggcctatcaccaaggcgtggtcattgtgacctgccccggctgccagaaccaccatatcatcgctgacaacctgggctggttctcggacctgaatgggaagagaaatatcgaagagatcctgacggccagaggcgagcaggtgcaccgtgtggcgggcgagggggccctggaactggttctggaggctgcaggggcccccacatccactgcagctccggaagcgggtgaggatgagggtccccccagccctggcaagacggagccgagctgactcctgcgctccccggcactgtgggacttcggccttccagaaggaggttttggccctgggcctctctggacgtggcctgttttctatcaataaacagacattacttcc

SEQ ID NO: 329082 - DNA, 675 bp, Homo sapiens
ggcacacgagcagttcagggtcccagcaggaagtggggctgcagggccggggtgggtcctgggcctggccatcaggcagcctagcaggttgttctgggcatggagggggcctggtgtggctgagggcatgcccagggctccctggaggatcccgctctgtgccctgcccaccctgtgcctggggagccctctgccctcacagcccacccaccccattttctatgaccacagagctccgacctggaagatggctcacccaggaggtcccaggaggtgagtgagaccccagccagcacgaggctggccttccttcacctggggtcctggctgagctgccaccaggcatagccccacactgcccgtcacatggccctgctcggtgggctgggctgggtggaggaagagcaggtggccaaatgctaaggcctctgatggctcaaggggtaaggtaaggcacggacagtgcccacctcctggccgcccaatgtccgtctgctgggcacctgagtctctgagaagctctgtgcagggggtgacggcaatggctgcacccagctgagggccaagggctggggtgggcagtgtggccgggtccagtccttggcgaagtggcctaatgggacatcttgactctctttggaagctctcactcccccaggacctggaggacaccca

SEQ ID NO: 329083 - DNA, 381 bp, Homo sapiens
ggccggggcggggccggggcagggcggacggagccggcgagcgggatgctgcggactgcgctgcgcggcgcgccgaggttgctgagtcgcgtgcagccccgggcgccctgcctgaggcggctgtggggccgcggggcccgtccagaggtcgcggggaggcggcgggcctgggcctggggctggcggcgctcaagctccgagcaggggccggggcccgcggcggctctggggcgcgtggaggcggcgcactaccagctcgtctacacctgcaaggtaggcgcgcggcgggacggaaccggggacagacccgtatctgacgctacacggcctgcggggagaagcggcccgccggggatccgggaggcggcgtggtcaagtcac

SEQ ID NO: 329084 - DNA, 2180 bp, Homo sapiens
cagaacccatcaggaagtgcacaggcgtccggcgtgctcctccctccctgcagccccgggcagcatctcccagaggctccgcggcccaggctcctggtgtgtctgcagtgcaggtggctcctggaagaccctcagcctgcctgctgaggccatgtcggactacgagaacgatgacgagtgctggaacgtcctggagggcttccgggtgacgctcacctcggtcatcgacccctcacgcatcacaccttacctgcggcagtgcaaggtcctgaaccctgatgatgaggagcaggtgctcagcgaccccaacctggtcatccgcaaacggaaagtgggtgtgctcctggacatcctgcagcggaccggccacaagggctacgtggccttcctcgagagcctggagctctactacccgcagctgtacaagaaggtcacaggcaaggagccggcccgcgtcttctccatgatcatcgacgcgtccggggagtcaggcctgactcagctgctgatgactgaggtcatgaagctgcagaagaaggtgcaggacctgaccgcgctgctgagctccaaagatgacttcatcaaggagctgcgggtgaaggacagcctgctgcgcaagcaccaggagcgtgtgcagaggctcaaggaggagtgcgaggccggcagccgcgagctcaagcgctgcaaggaggagaactacgacctggccatgcgcctggcgcaccagagtgaggagaagggcgccgcgctcatgcggaaccgtgacctgcagctggagattgaccagctcaagcacagcctcatgaaggccgaggacgactgcaaggtggagcgcaagcacacgctgaagctcaggcacgccatggagcagcggcccagccaggagctgctgtgggagctgcagcaggagaaggccctgctccaggcccgggtgcaggagctggaggcctccgtccaggaggggaagctggacaggagcagcccctacatccaggtactggaggaggactggcggcaggcgctgcgggaccaccaggagcaggccaacaccatcttctccctgcgcaaggacctccgccagggcgaggcccgacgcctccggtgcatggaggagaaggagatgttcgagctgcagtgcctggcactacgtaaggactccaagatgtacaaggaccgcatcgaggccatcctgctgcagatggaggaggtcgccattgagcgggaccagagcacacaaatggaggggctgtgaccagcctccgcgcccagcggcttgacgtcctccggagcctctgcttggagttgggcggccgggccgagggcccagggcaagcttggggccctcactgagggtcggccttgtgctgtcccgtcaggccatagccacgcgggaggagctgcacgcacagcacgcccggggcctgcaggagaaggacgcgctgcgcaagcaggtgcgggagctgggcgagaaggcggatgagctgcagctgcaggtgttccagtgtgaggcgcagctactggccgtggagggcaggctcaggcggcagcagctggagacgctcgtcctgagctccgacctggaagatggctcacccaggaggtcccaggagctctcactcccccaggacctggaggacacccagctctcagacaaaggctgccttgccggcggggggagcccgaaacagccctttgcagctctgcaccaggagcaggttttgcggaacccccatgacgcaggcctgagcagcggggagccgcccgagaaggagcggcggcgcctcaaagagagttttgagaactaccgcaggaagcgcgccctcaggaagatgcagaaaggatggcggcagggggaggaggaccgggagaacaccacgggcagcgacaacaccgacactgagggctcctagccgcagcaacttccccgagccgtcgctgacttggcctggaacgaggaatctggtgccctgaaaggcccagccggactgccgggcattggggccgtttgttaagcggcactcattttgcggaggccatgcgggtgctcaccacccccatgcacacgccatctgtgtaacttcaggatctgttctgtttcaccatgtaacacacaatacatgcatgcattgtattagtgttagaaaacacagctgcgtaaataaacagcacgggtgacccgc

SEQ ID NO: 329085 - DNA, 1791 bp, Homo sapiens
cagaacccatcaggaagtgcacaggcgtccggcgtgctcctccctccctgcagccccgggcagcatctcccagaggctccgcggcccaggctcctggtgtgtctgcagtgcaggtggctcctggaagaccctcagcctgcctgctgaggccatgtcggactacgagaacgatgacgagtgctggaacgtcctggagggcttccgggtgacgctcacctcggtcatcgacccctcacgcatcacaccttacctgcggcagtgcaaggtcctgaaccctgatgatgaggagcaggtgctcagcgaccccaacctggtcatccgcaaacggaaagtgggtgtgctcctggacatcctgcagcggaccggccacaagggctacgtggccttcctcgagagcctggagctctactacccgcagctgtacaagaaggtcacaggcaaggagccggcccgcgtcttctccatgatcatcgacgcgtccggggagtcaggcctgactcagctgctgatgactgaggtcatgaagctgcagaagaaggtgcaggacctgaccgcgctgctgagctccaaagatgacttcatcaaggagctgcgggtgaaggacagcctgctgcgcaagcaccaggagcgtgtgcagaggctcaaggaggagtgcgaggccggcagccgcgagctcaagcgctgcaaggaggagaactacgacctggccatgcgcctggcgcaccagagtgaggagaagggcgccgcgctcatgcggaaccgtgacctgcagctggagattgaccagctcaagcacagcctcatgaaggccgaggacgactgcaaggtggagcgcaagcacacgctgaagctcaggcacgccatggagcagcggcccagccaggagctgctgtgggagctgcagcaggagaaggccctgctccaggcccgggtgcaggagctggaggcctccgtccaggaggggaagctggacaggagcagcccctacatccaggtactggaggaggactggcggcaggcgctgcgggaccaccaggagcaggccaacaccatcttctccctgcgcaaggacctccgccagggcgaggcccgacgcctccggtgcatggaggagaaggagatgttcgagctgcagtgcctggcactacgtaaggactccaagatgtacaaggaccgcatcgaggccatcctgctgcagatggaggaggtcgccattgagcgggaccaggccatagccacgcgggaggagctgcacgcacagcacgcccggggcctgcaggagaaggacgcgctgcgcaagcaggtgcgggagctgggcgagaaggcggatgagctgcagctgcaggtgttccagtgtgaggcgcagctactggccgtggagggcaggctcaggcggcagcagctggagacgctcgtcctgagctccgacctggaagatggctcacccaggaggtcccaggagctctcactcccccaggacctggaggacacccagctctcagacaaaggctgccttgccggcggggggagcccgaaacagccctttgcagctctgcaccaggagcaggttttgcggaacccccatgcccagccggactgccgggcattggggccgtttgttaagcggcactcattttgcggaggccatgcgggtgctcaccacccccatgcacacgccatctgtgtaacttcaggatctgttctgtttcaccatgtaacacacaatacatgcatgcattgtattagtgttagaaaacacagctgcgtaaataaacagcacgggtgacccgc

SEQ ID NO: 329086 - DNA, 1623 bp, Homo sapiens
ccctcacagcccacccaccccattttctatgaccacagagctccgacctggaagatggctcacccaggaggtcccaggagctctcactcccccaggacctggaggacacccagctctcagacaaaggctgccttgccggcggggggagcccgaaacagccctttgcagctctgcaccaggagcaggttttgcggaacccccatgacgcaggcctgagcagcggggagccgcccgagaaggagcggcggcgcctcaaagagagttttgagaactaccgcaggaagcgcgccctcaggaagatgcagaaaggatggcggcagggggaggaggaccgggagaacaccacgggcagcgacaacaccgacactgagggctcctagccgcagcagcgcaggccccgaccagggcacacccaccggcccggcctcctgccacccgggggtgccgacgccctggggcgcagacttccccgagccgtcgctgacttggcctggaacgaggaatctggtgccctgaaaggcccagccggactgccgggcattggggccgtttgttaagcggcactcattttgcggaggccatgcgggtgctcaccacccccatgcacacgccatctgtgtaacttcaggatctgttctgtttcaccatgtaacacacaatacatgcatgcattgtattagtgttagaaaacacagctgcgtaaataaacagcacgggtgacccgcattcccgctcggacactcgcgcgcagccccgcggccgtccctcctcgctgcggcccgcggtgtcctcggggtgcgagctgcacgtggacgcagggccccctcaggccgccagggggcggcatagcgcagcgcgcccccgacccggaagacggaagcccaagaacgccgcttccgcccggcgcccacttccaagatggcggcggggcggggccggggcggggccggggcagggcggacggagccggcgagcgggatgctgcggactgcgctgcgcggcgcgccgaggttgctgagtcgcgtgcagccccgggcgccctgcctgaggcggctgtggggccgcggggcccgtccagaggtcgcggggaggcggcgggcctgggcctggggctggcggcgctcaagctccgagcaggggccggggcccgcggcggctctggggcgcgtggaggcggcgcactaccagctcgtctacacctgcaaggtctgcgggactaggtcctccaagcgcatctccaagctggcctatcaccaaggcgtggtcattgtgacctgccccggctgccagaaccaccatatcatcgctgacaacctgggctggttctcggacctgaatgggaagagaaatatcgaagagatcctgacggccagaggcgagcaggtgcaccgtgtggcgggcgagggggccctggaactggttctggaggctgcaggggcccccacatccactgcagctccggaagcgggtgaggatgagggtccccccagccctggcaagacggagccgagctgactcctgcgctccccggcactgtgggacttcggccttccagaaggaggttttggccctgggcctctctggacgtggcctgttttctatcaataaacagacattacttcc

SEQ ID NO: 329087 - DNA, 681 bp, Homo sapiens
ctcagccttccaagtagctgggactacaggcgcccgccaccacgcccagctaagttttttgtatttttagtagagacggggtttcactgtgttagccaggatggtctggatctcctgacctcgtgatccacccacctcgacctcccaaagtgctgggattacaggcgtgagccaccgcacccggcctatttacttatttcttattacgatttacaaaatgtgctctcatgtttgaaaaactcatatttgaatatatgtgaggtaaaaacatttaaatgctggctgctaaattcacatcttaaaaacctatggaaatttctggaaggaaactttcctgtagttagcatgatggtttatgtgacccagaaagattgcagcttctcaggaacagacatgtctgcccctttctgcatgtgcaaatgcaagagagtttccatttactgtgattccgacaaaattagaggtaatagcaaataatcacattctgttgaaactgcatgttatattatctgtattccctccaggttttaagatcagtgaggtcagaaatcatgtatattttgctaattaatctcttacttcaagtacaatgcctggcacatagtaggcacttaatacgtatgcactaaaccatacaaaacaaatgaaagaatgaatctagatcacttttagttataatat

SEQ ID NO: 329088 - DNA, 446 bp, Homo sapiens
tcattttggtgccattgaggaaagaagagcttcagatacaaatataactgacagtgaatcaagacaacactggaatagctttgggggagacatacataaaaatatctttctgtaggccactaaacataggatatattagccctcagattagaagaccttctaaattcttttacagtcctatattctaggagtctgcttgtgtgctataacatgattttcttacagaagccagtatttttaaatgaaaaaaaagtgtgaggtttccactgggcctttaacagagatgctgaaatgaacaaaacccctgaaatatctcagggataattgggggcaaagggattgggtggccacaggaggacctgatccctctgcctagaatatacagcaccctcatcacctcttatccttcttggggtcctctggtgggctcctcaccattgtccatg

SEQ ID NO: 329089 - DNA, 298 bp, Homo sapiens
ccaactgataaaaaggaaacccacagtgaattttacagttgaaagatgtctcttatgcatcaaaccaaacttaacaaaagttttataaaattaccatattcacttatgttttccacttaatatttttgacacagtctcactctgttgcctagcctggaatgcagtcgtgtaatcatagctcactgcagtctccatctcccaggctcaagtgatcctcctgcttcagcctctgagtagctgggagtacaggagcacatcactatgcccagatgatttttttaaattttatttttcgtac

SEQ ID NO: 329090 - DNA, 307 bp, Homo sapiens
tgacagctgactctagaggatacacggcgagctgccataattagaaaggcactcatgggtaaatatgaccagtgggaagagtccccgccgctcagcgccaatgcttttaaccctctgaatgccagtgccagcctgcccgctgctatgcccataaccgctgctgacggacggagtgaccacacactcacctcgccaggtggcggcgggaaggccaaggtctctggcagacccagcagctcgcccctgagttagcagctcgcccctgagttagcagctcgctcctgagttagcagctcgctcctgagtt

SEQ ID NO: 329091 - DNA, 573 bp, Homo sapiens
cctactattttttaaccaaatcaacaacagctaaataggttgttggccctgtccagcccccagtgcgctcgttccggtccccacagactgccccagccaacgagattgctggaaaccaagtcaggccaggtgggcggacaaaagggccaggtgcggcctggggggaacggatgctccgaggactggactgtttttttcacacatcgttgccgcagcggtgggaaggaaaggcagatgtaaatgatgtgttggtttacagggtatatttttgataccttcaatgaattaattcagatgttttacgcaaggaaggacttacccagtattactgctgctgtgcttttgatctctgcttaccgttcaagaggcgtgtgcaggccgacagtcggtgaccccatcactcgcaggaccaagggggcggggactgctggctcacgccccgctgtgtcctccctccctcccttccttgggcagaatgaattcgatgcgtattctgtggccgccatctgcgcagggtggtggtattctgtcatttacacacgtcgttctaattaaaaagcgaattatactcca

SEQ ID NO: 329092 - DNA, 8700 bp, Homo sapiens
  misc_feature (2538)..(2538): n is a, c, g, or t
gagtctttgaggacacagcctcgctggaggcagtttctggtgccagtgacggggtggcccgtgagctgatgacgaggactggcttttaatccttggtggtgattaagagaaagcttattgcggcctgggagcagctccccgccgacccccaccaccatgtcgggatccacacagcctgtggcacagacgtggagggccactgagccccgctacccgccccacagcctttcctacccagtgcagatcgcccggacgcacacggacgtcgggctcctggagtaccagcaccactcccgcgactatgcctcccacctgtcgcccggctccatcatccagccccagcggcggaggccctccctgctgtctgagttccagcccgggaatgaacggtcccaggagctccacctgcggccagagtcccactcatacctgcccgagctggggaagtcagagatggagttcattgaaagcaagcgccctcggctagagctgctgcctgaccccctgctgcgaccgtcacccctgctggccacgggccagcctgcgggatctgaagacctcaccaaggaccgtagcctgacgggcaagctggaaccggtgtctccccccagccccccgcacactgaccctgagctggagctggtgccgccacggctgtccaaggaggagctgatccagaacatggaccgcgtggaccgagagatcaccatggtagagcagcagatctctaagctgaagaagaagcagcaacagctggaggaggaggctgccaagccgcccgagcctgagaagcccgtgtcaccgccgcccatcgagtcgaagcaccgcagcctggtgcagatcatctacgacgagaaccggaagaaggctgaagctgcacatcggattctggaaggcctggggccccaggtggagctgccgctgtacaaccagccctccgacacccggcagtatcatgagaacatcaaaataaaccaggcgatgcggaagaagctaatcttgtacttcaagaggaggaatcacgctcggaaacaatgggagcagaagttctgccagcgctatgaccagctcatggaggcctgggagaagaaggtggagcgcatcgagaacaacccccggcggcgggccaaggagagcaaggtgcgcgagtactacgagaagcagttccctgagatccgcaagcagcgcgagctgcaggagcgcatgcagagcagggtgggccagcggggcagtgggctgtccatgtcggccgcccgcagcgagcacgaggtgtcagagatcatcgatggcctctcagagcaggagaacctggagaagcagatgcgccagctggccgtgatcccgcccatgctgtacgacgctgaccagcagcgcatcaagttcatcaacatgaacgggcttatggccgaccccatgaaggtgtacaaagaccgccaggtcatgaacatgtggagtgagcaggagaaggagaccttccgggagaagttcatgcagcatcccaagaactttggcctgatcgcatcattcctggagaggaagacagtggctgagtgcgtcctctattactacctgactaagaagaatgagaactataagagcctggtgagacggagctatcggcgccgcggcaagagccagcagcaacaacagcagcagcagcagcagcagcagcagcagcagcagcagcccatgccccgcagcagccaggaggagaaagatgagaaggagaaggaaaaggaggcggagaaggaggaggagaagccggaggtggagaacgacaaggaagacctcctcaaggagaagacagacgacacctcaggggaggacaacgacgagaaggaggctgtggcctccaaaggccgcaaaactgccaacagccagggaagacgcaaaggccgcatcacccgctcaatggctaatgaggccaacagcgaggaggccatcaccccccagcagagcgccgagctggcctccatggagctgaatgagagttctcgctggacagaagaagaaatggaaacagccaagaaaggtctcctggaacacggccgcaactggtcggccatcgcccggatggtgggctccaagactgtgtcgcagtgtaagaacttctacttcaactacaagaagaggcagaacctcgatgagatcttgcagcagcacaagctgaagatggagaaggagaggaacgcgcggaggaagaagaagaaagcgccggcggcggccagcgaggaggctgcattcccgcccgtggtggaggatgaggagatggaggcgtcgggcgtgagcggaaatgaggaggagatggtggaggaggctgaagccttacatgcctctgggaatgaggtgcccagaggggaatgcagtggcccagccactgtcaacaacagctcagacaccgagagcatcccctctcctcacactgaggccgccaaggacacagggcagaatgggcccaagcccccagccaccctgggcgccgacgggccacccccagggccacccaccccaccaccggaggacatcccgggcccccantgagcccaccccggcctctgaagccaccggagcccctacgcccccaccagcacccccatcgccctctgcacctcctcctgtggtccccaaggaggagaaggaggaggagaccgcagcagcgcccccagtggaggagggggaggagcagaagccccccgcggctgaggagctggcagtggacacagggaaggccgaggagcccgtcaagagcgagtgcacggaggaagccgaggaggggccggccaagggcaaggacgcggaggccgctgaggccacggccgagggggcgctcaaggcagagaagaaggagggcgggagcggcagggccaccactgccaagagctcgggcgccccccaggacagcgactccagtgctacctgcagtgcagacgaggtggatgaggccgagggcggcgacaagaaccggctgctgtccccaaggcccagcctcctcaccccgactggcgacccccgggccaatgcctcaccccagaagccactggacctgaagcagctgaagcagcgagcggctgccatcccccccatccaggtcaccaaagtccatgagcccccccgggaggacgcagctcccaccaagccagctcccccagccccaccgccaccgcaaaacctgcagccggagagcgacgcccctcagcagcctggcagcagcccccggggcaagagcaggagcccggcaccccccgccgacaaggaggccttcgcagccgaggcccagaagctgcctggggaccccccttgctggacttccggcctgcccttccccgtgcccccccgtgaggtgatcaaggcctccccgcatgccccggacccctcagccttctcctacgctccacctggtcacccactgcccctgggcctccatgacactgcccggcccgtcctgccgcgcccacccaccatctccaacccgcctcccctcatctcctctgccaagcaccccagcgtcctcgagaggcaaataggtgccatctcccaaggaatgtcggtccagctccacgtcccgtactcagagcatgccaaggccccggtgggccctgtcaccatggggctgcccctgcccatggaccccaaaaagctggcacccttcagcggagtgaagcaggagcagctgtccccacggggccaggctgggccaccggagagcctgggggtgcccacagcccaggaggcgtccgtgctgagagggacagctctgggctcagttccgggcggaagcatcaccaaaggcattcccagcacacgggtgccctcggacagcgccatcacataccgcggctccatcacccacggcacgccagctgacgtcctgtacaagggcaccatcaccaggatcatcggcgaggacagcccgagtcgcttggaccgcggccgggaggacagcctgcccaagggccacgtcatctacgaaggcaagaagggccacgtcttgtcctatgagggtggcatgtctgtgacccagtgctccaaggaggacggcagaagcagctcaggacccccccatgagacggccgcccccaagcgcacctatgacatgatggagggccgcgtgggcagagccatctcctcagccagcatcgaaggtctcatgggccgtgccatcccgccggagcgacacagcccccaccacctcaaagagcagcaccacatccgcgggtccatcacacaagggatccctcggtcctacgtggaggcacaggaggactacctgcgtcgggaggccaagctcctaaagcgggagggcacgcctccgcccccaccgccctcacgggacctgaccgaggcctacaagacgcaggccctgggccccctgaagctgaagccggcccatgagggcctggtggccacggtgaaggaggcgggccgctccatccatgagatcccgcgcgaggagctgcggcacacgcccgagctgcccctggccccgcggccgctcaaggagggctccatcacgcagggcaccccgctcaagtacgacaccggcgcgtccaccactggctccaaaaagcacgacgtacgctccctcatcggcagccccggccggacgttcccacccgtgcacccgctggatgtgatggccgacgcccgggcactggaacgtgcctgctacgaggagagcctgaagagccggccagggaccgccagcagctcggggggctccattgcgcgcggcgccccggtcattgtgcctgagctgggtaagccgcggcagagccccctgacctatgaggaccacggggcaccctttgccggccacctcccacgaggttcgcccgtgaccacgcgggagcccacgccgcgcctgcaggagggcagcctttcgtccagcaaggcatcccaggaccgaaagctgacgtcgacgcctcgtgagatcgccaagtccccgcacagcaccgtgcccgagcaccacccacaccccatctcgccctatgagcacctgcttcggggcgtgagtggcgtggacctgtatcgcagccacatccccctggccttcgaccccacctccataccccgcggcatccctctggacgcagccgctgcctactacctgccccgacacctggcccccaaccccacctacccgcacctgtacccaccctacctcatccgcggctaccccgacacggcggcgctggagaaccggcagaccatcatcaatgactacatcacctcgcagcagatgcaccacaacacggccaccgccatggcccagcgagctgatatgctgaggggcctctcgccccgcgagtcctcgctggcactcaactacgctgcgggtccccgaggcatcatcgacctgtcccaagtgccacacctgcctgtgctcgtgcccccgacaccaggcaccccagccaccgccatggaccgccttgcctacctccccaccgcgccccagcccttcagcagccgccacagcagctccccactctccccaggaggtccaacacacttgacaaaaccaaccaccacgtcctcgtccgagcgggagcgagaccgggatcgagagcgggaccgggatcgggagcgggaaaagtccatcctcacgtccaccacgacggtggagcacgcacccatctggagacctggtacagagcagagcagcggcagcagcggcagcagcggcgggggtgggggcagcagcagccgccccgcctcccactcccatgcccaccagcactcgcccatctcccctcggacccaggatgccctccagcagagacccagtgtgcttcacaacacaggcatgaagggtatcatcaccgctgtggagcccagcacgcccacggtcctgaggtccacctccacctcctcacccgttcgcccggctgccacattcccacctgccacccactgcccactgggcggcaccctcgatggggtctaccctaccctcatggagcccgtcttgctgcccaaggaggccccccgggtcgcccggccagagcggccccgagcagacaccggccatgccttcctcgccaagcccccagcccgctccgggctggagcccgcctcctcccccagcaagggctcggagccccggcccctagtgcctcctgtctctggccacgccaccatcgcccgcacccctgcgaagaacctcgcacctcaccacgccagcccggacccgccggcgccacctgcctcggcctcggacccgcaccgggaaaagactcaaagtaaacccttttccatccaggaactggaactccgttctctgggttaccacggcagcagctacagccccgaaggggtggagcccgtcagccctgtgagctcacccagtctgacccacgacaaggggctccccaagcacctggaagagctcgacaagagccacctggagggggagctgcggcccaagcagccaggccccgtgaagcttggcggggaggccgcccacctcccacacctgcggccgctgcctgagagccagccctcgtccagcccgctgctccagaccgccccaggggtcaaaggtcaccagcgggtggtcaccctggcccagcacatcagtgaggtcatcacacaggactacacccggcaccacccacagcagctcagcgcacccctgcccgcccccctctactccttccctggggccagctgccccgtcctggacctccgccgcccacccagtgacctctacctcccgcccccggaccatggtgccccggcccgtggctccccccacagcgaagggggcaagaggtctccagagccaaacaagacgtcggtcttgggtggtggtgaggacggtattgaacctgtgtccccaccggagggcatgacggagccagggcactcccggagtgctgtgtacccgctgctgtaccgggatggggaacagacggagcccagcaggatgggctccaagtctccaggcaacaccagccagccgccagccttcttcagcaagctgaccgagagcaactccgccatggtcaagtccaagaagcaagagatcaacaagaagctgaacacccacaaccggaatgagcctgaatacaatatcagccagcctgggacggagatcttcaatatgcccgccatcaccggaacaggccttatgacctatagaagccaggcggtgcaggaacatgccagcaccaacatggggctggaggccataattagaaaggcactcatgggtaaatatgaccagtgggaagagtccccgccgctcagcgccaatgcttttaaccctctgaatgccagtgccagcctgcccgctgctatgcccataaccgctgctgacggacggagtgaccacacactcacctcgccaggtggcggcgggaaggccaaggtctctggcagacccagcagccgaaaagccaagtccccggccccgggcctggcatctggggaccggccaccctctgtctcctcagtgcactcggagggagactgcaaccgccggacgccgctcaccaaccgcgtgtgggaggacaggccctcgtccgcaggttccacgccattcccctacaaccccctgatcatgcggctgcaggcgggtgtcatggcttccccacccccaccgggcctccccgcgggcagcgggcccctcgctggcccccaccacgcctgggacgaggagcccaagccactgctctgctcgcagtacgagacactctccgacagcgagtgactcagaacagggcgggggggggcgggcggtgtcaggtcccagcgagccacaggaacggccctgcaggagcagggcggctgccgactcccccaaccaaggaaggagcccctgagtccgcctgcgcctccatccatctgtccgtccagagccggcatccttgcctgtctaaagccttaactaagactcccgccccgggctggccctgtgcagaccttactcaggggatgtttacctggtgctcgggaagggaggggaaggggccggggagggggcacggcaggcgtgtggcagccacacgcaggcggccagggcggccagggacccaaagcaggatgaccacgcacctccacgccactgcctcccccgaatgcatttggaaccaaagtctaaactgagctcgcagcccccgcgccctccctccgcctcccatcccgcttagcgctctggacagatggacgcaggccctgtccagcccccagtgcgctcgttccggtccccacagactgccccagccaacgagattgctggaaaccaagtcaggccaggtgggcggacaaaagggccaggtgcggcctggggggaacggatgctccgaggactggactgtttttttcacacatcgttgccgcagcggtgggaaggaaaggcagatgtaaatgatgtgttggtttacagggtatatttttgataccttcaatgaattaattcagatgttttacgcaaggaaggacttacccagtattactgctgctgtgcttttgatctctgcttaccgttcaagaggcgtgtgcaggccgacagtcggtgaccccatcactcgcaggaccaagggggcggggactgctggctcacgccccgctgtgtcctccctccctcccttccttgggcagaatgaattcgatgcgtattctgtggccgccatctgcgcagggtggtggtattctgtcatttacacacgtcgttctaattaaaaagcgaattatactcca

SEQ ID NO: 329093 - DNA, 8667 bp, Homo sapiens
  misc_feature (2481)..(2481): n is a, c, g, or t
gagtctttgaggacacagcctcgctggaggcagtttctggtgccagtgacggggtggcccgtgagctgatgacgaggactggcttttaatccttggtggtgattaagagaaagcttattgcggcctgggagcagctccccgccgacccccaccaccatgtcgggatccacacagcctgtggcacagacgtggagggccactgagccccgctacccgccccacagcctttcctacccagtgcagatcgcccggacgcacacggacgtcgggctcctggagtaccagcaccactcccgcgactatgcctcccacctgtcgcccggctccatcatccagccccagcggcggaggccctccctgctgtctgagttccagcccgggaatgaacggtcccaggagctccacctgcggccagagtcccactcatacctgcccgagctggggaagtcagagatggagttcattgaaagcaagcgccctcggctagagctgctgcctgaccccctgctgcgaccgtcacccctgctggccacgggccagcctgcgggatctgaagacctcaccaaggaccgtagcctgacgggcaagctggaaccggtgtctccccccagccccccgcacactgaccctgagctggagctggtgccgccacggctgtccaaggaggagctgatccagaacatggaccgcgtggaccgagagatcaccatggtagagcagcagatctctaagctgaagaagaagcagcaacagctggaggaggaggctgccaagccgcccgagcctgagaagcccgtgtcaccgccgcccatcgagtcgaagcaccgcagcctggtgcagatcatctacgacgagaaccggccgctgtacaaccagccctccgacacccggcagtatcatgagaacatcaaaataaaccaggcgatgcggaagaagctaatcttgtacttcaagaggaggaatcacgctcggaaacaatgggagcagaagttctgccagcgctatgaccagctcatggaggcctgggagaagaaggtggagcgcatcgagaacaacccccggcggcgggccaaggagagcaaggtgcgcgagtactacgagaagcagttccctgagatccgcaagcagcgcgagctgcaggagcgcatgcagagcagggtgggccagcggggcagtgggctgtccatgtcggccgcccgcagcgagcacgaggtgtcagagatcatcgatggcctctcagagcaggagaacctggagaagcagatgcgccagctggccgtgatcccgcccatgctgtacgacgctgaccagcagcgcatcaagttcatcaacatgaacgggcttatggccgaccccatgaaggtgtacaaagaccgccaggtcatgaacatgtggagtgagcaggagaaggagaccttccgggagaagttcatgcagcatcccaagaactttggcctgatcgcatcattcctggagaggaagacagtggctgagtgcgtcctctattactacctgactaagaagaatgagaactataagagcctggtgagacggagctatcggcgccgcggcaagagccagcagcaacaacagcagcagcagcagcagcagcagcagcagcagcagcagcccatgccccgcagcagccaggaggagaaagatgagaaggagaaggaaaaggaggcggagaaggaggaggagaagccggaggtggagaacgacaaggaagacctcctcaaggagaagacagacgacacctcaggggaggacaacgacgagaaggaggctgtggcctccaaaggccgcaaaactgccaacagccagggaagacgcaaaggccgcatcacccgctcaatggctaatgaggccaacagcgaggaggccatcaccccccagcagagcgccgagctggcctccatggagctgaatgagagttctcgctggacagaagaagaaatggaaacagccaagaaaggtctcctggaacacggccgcaactggtcggccatcgcccggatggtgggctccaagactgtgtcgcagtgtaagaacttctacttcaactacaagaagaggcagaacctcgatgagatcttgcagcagcacaagctgaagatggagaaggagaggaacgcgcggaggaagaagaagaaagcgccggcggcggccagcgaggaggctgcattcccgcccgtggtggaggatgaggagatggaggcgtcgggcgtgagcggaaatgaggaggagatggtggaggaggctgaagccttacatgcctctgggaatgaggtgcccagaggggaatgcagtggcccagccactgtcaacaacagctcagacaccgagagcatcccctctcctcacactgaggccgccaaggacacagggcagaatgggcccaagcccccagccaccctgggcgccgacgggccacccccagggccacccaccccaccaccggaggacatcccgggcccccantgagcccaccccggcctctgaagccaccggagcccctacgcccccaccagcacccccatcgccctctgcacctcctcctgtggtccccaaggaggagaaggaggaggagaccgcagcagcgcccccagtggaggagggggaggagcagaagccccccgcggctgaggagctggcagtggacacagggaaggccgaggagcccgtcaagagcgagtgcacggaggaagccgaggaggggccggccaagggcaaggacgcggaggccgctgaggccacggccgagggggcgctcaaggcagagaagaaggagggcgggagcggcagggccaccactgccaagagctcgggcgccccccaggacagcgactccagtgctacctgcagtgcagacgaggtggatgaggccgagggcggcgacaagaaccggctgctgtccccaaggcccagcctcctcaccccgactggcgacccccgggccaatgcctcaccccagaagccactggacctgaagcagctgaagcagcgagcggctgccatcccccccatccaggtcaccaaagtccatgagcccccccgggaggacgcagctcccaccaagccagctcccccagccccaccgccaccgcaaaacctgcagccggagagcgacgcccctcagcagcctggcagcagcccccggggcaagagcaggagcccggcaccccccgccgacaaggaggcagagaagcctgtgttcttcccagccttcgcagccgaggcccagaagctgcctggggaccccccttgctggacttccggcctgcccttccccgtgcccccccgtgaggtgatcaaggcctccccgcatgccccggacccctcagccttctcctacgctccacctggtcacccactgcccctgggcctccatgacactgcccggcccgtcctgccgcgcccacccaccatctccaacccgcctcccctcatctcctctgccaagcaccccagcgtcctcgagaggcaaataggtgccatctcccaaggaatgtcggtccagctccacgtcccgtactcagagcatgccaaggccccggtgggccctgtcaccatggggctgcccctgcccatggaccccaaaaagctggcacccttcagcggagtgaagcaggagcagctgtccccacggggccaggctgggccaccggagagcctgggggtgcccacagcccaggaggcgtccgtgctgagagggacagctctgggctcagttccgggcggaagcatcaccaaaggcattcccagcacacgggtgccctcggacagcgccatcacataccgcggctccatcacccacggcacgccagctgacgtcctgtacaagggcaccatcaccaggatcatcggcgaggacagcccgagtcgcttggaccgcggccgggaggacagcctgcccaagggccacgtcatctacgaaggcaagaagggccacgtcttgtcctatgagggtggcatgtctgtgacccagtgctccaaggaggacggcagaagcagctcaggacccccccatgagacggccgcccccaagcgcacctatgacatgatggagggccgcgtgggcagagccatctcctcagccagcatcgaaggtctcatgggccgtgccatcccgccggagcgacacagcccccaccacctcaaagagcagcaccacatccgcgggtccatcacacaagggatccctcggtcctacgtggaggcacaggaggactacctgcgtcgggaggccaagctcctaaagcgggagggcacgcctccgcccccaccgccctcacgggacctgaccgaggcctacaagacgcaggccctgggccccctgaagctgaagccggcccatgagggcctggtggccacggtgaaggaggcgggccgctccatccatgagatcccgcgcgaggagctgcggcacacgcccgagctgcccctggccccgcggccgctcaaggagggctccatcacgcagggcaccccgctcaagtacgacaccggcgcgtccaccactggctccaaaaagcacgacgtacgctccctcatcggcagccccggccggacgttcccacccgtgcacccgctggatgtgatggccgacgcccgggcactggaacgtgcctgctacgaggagagcctgaagagccggccagggaccgccagcagctcggggggctccattgcgcgcggcgccccggtcattgtgcctgagctgggtaagccgcggcagagccccctgacctatgaggaccacggggcaccctttgccggccacctcccacgaggttcgcccgtgaccacgcgggagcccacgccgcgcctgcaggagggcagcctttcgtccagcaaggcatcccaggaccgaaagctgacgtcgacgcctcgtgagatcgccaagtccccgcacagcaccgtgcccgagcaccacccacaccccatctcgccctatgagcacctgcttcggggcgtgagtggcgtggacctgtatcgcagccacatccccctggccttcgaccccacctccataccccgcggcatccctctggacgcagccgctgcctactacctgccccgacacctggcccccaaccccacctacccgcacctgtacccaccctacctcatccgcggctaccccgacacggcggcgctggagaaccggcagaccatcatcaatgactacatcacctcgcagcagatgcaccacaacacggccaccgccatggcccagcgagctgatatgctgaggggcctctcgccccgcgagtcctcgctggcactcaactacgctgcgggtccccgaggcatcatcgacctgtcccaagtgccacacctgcctgtgctcgtgcccccgacaccaggcaccccagccaccgccatggaccgccttgcctacctccccaccgcgccccagcccttcagcagccgccacagcagctccccactctccccaggaggtccaacacacttgacaaaaccaaccaccacgtcctcgtccgagcgggagcgagaccgggatcgagagcgggaccgggatcgggagcgggaaaagtccatcctcacgtccaccacgacggtggagcacgcacccatctggagacctggtacagagcagagcagcggcagcagcggcagcagcggcgggggtgggggcagcagcagccgccccgcctcccactcccatgcccaccagcactcgcccatctcccctcggacccaggatgccctccagcagagacccagtgtgcttcacaacacaggcatgaagggtatcatcaccgctgtggagcccagcacgcccacggtcctgaggtccacctccacctcctcacccgttcgcccggctgccacattcccacctgccacccactgcccactgggcggcaccctcgatggggtctaccctaccctcatggagcccgtcttgctgcccaaggaggccccccgggtcgcccggccagagcggccccgagcagacaccggccatgccttcctcgccaagcccccagcccgctccgggctggagcccgcctcctcccccagcaagggctcggagccccggcccctagtgcctcctgtctctggccacgccaccatcgcccgcacccctgcgaagaacctcgcacctcaccacgccagcccggacccgccggcgccacctgcctcggcctcggacccgcaccgggaaaagactcaaagtaaacccttttccatccaggaactggaactccgttctctgggttaccacggcagcagctacagccccgaaggggtggagcccgtcagccctgtgagctcacccagtctgacccacgacaaggggctccccaagcacctggaagagctcgacaagagccacctggagggggagctgcggcccaagcagccaggccccgtgaagcttggcggggaggccgcccacctcccacacctgcggccgctgcctgagagccagccctcgtccagcccgctgctccagaccgccccaggggtcaaaggtcaccagcgggtggtcaccctggcccagcacatcagtgaggtcatcacacaggactacacccggcaccacccacagcagctcagcgcacccctgcccgcccccctctactccttccctggggccagctgccccgtcctggacctccgccgcccacccagtgacctctacctcccgcccccggaccatggtgccccggcccgtggctccccccacagcgaagggggcaagaggtctccagagccaaacaagacgtcggtcttgggtggtggtgaggacggtattgaacctgtgtccccaccggagggcatgacggagccagggcactcccggagtgctgtgtacccgctgctgtaccgggatggggaacagacggagcccagcaggatgggctccaagtctccaggcaacaccagccagccgccagccttcttcagcaagctgaccgagagcaactccgccatggtcaagtccaagaagcaagagatcaacaagaagctgaacacccacaaccggaatgagcctgaatacaatatcagccagcctgggacggagatcttcaatatgcccgccatcaccggaacaggccttatgacctatagaagccaggcggtgcaggaacatgccagcaccaacatggggctggaggccataattagaaaggcactcatgggtaaatatgaccagtgggaagagtccccgccgctcagcgccaatgcttttaaccctctgaatgccagtgccagcctgcccgctgctatgcccataaccgctgctgacggacggagtgaccacacactcacctcgccaggtggcggcgggaaggccaaggtctctggcagacccagcagccgaaaagccaagtccccggccccgggcctggcatctggggaccggccaccctctgtctcctcagtgcactcggagggagactgcaaccgccggacgccgctcaccaaccgcgtgtgggaggacaggccctcgtccgcaggttccacgccattcccctacaaccccctgatcatgcggctgcaggcgggtgtcatggcttccccacccccaccgggcctccccgcgggcagcgggcccctcgctggcccccaccacgcctgggacgaggagcccaagccactgctctgctcgcagtacgagacactctccgacagcgagtgactcagaacagggcgggggggggcgggcggtgtcaggtcccagcgagccacaggaacggccctgcaggagcagggcggctgccgactcccccaaccaaggaaggagcccctgagtccgcctgcgcctccatccatctgtccgtccagagccggcatccttgcctgtctaaagccttaactaagactcccgccccgggctggccctgtgcagaccttactcaggggatgtttacctggtgctcgggaagggaggggaaggggccggggagggggcacggcaggcgtgtggcagccacacgcaggcggccagggcggccagggacccaaagcaggatgaccacgcacctccacgccactgcctcccccgaatgcatttggaaccaaagtctaaactgagctcgcagcccccgcgccctccctccgcctcccatcccgcttagcgctctggacagatggacgcaggccctgtccagcccccagtgcgctcgttccggtccccacagactgccccagccaacgagattgctggaaaccaagtcaggccaggtgggcggacaaaagggccaggtgcggcctggggggaacggatgctccgaggactggactgtttttttcacacatcgttgccgcagcggtgggaaggaaaggcagatgtaaatgatgtgttggtttacagggtatatttttgataccttcaatgaattaattcagatgttttacgcaaggaaggacttacccagtattactgctgctgtgcttttgatctctgcttaccgttcaagaggcgtgtgcaggccgacagtcggtgaccccatcactcgcaggaccaagggggcggggactgctggctcacgccccgctgtgtcctccctccctcccttccttgggcagaatgaattcgatgcgtattctgtggccgccatctgcgcagggtggtggtattctgtcatttacacacgtcgttctaattaaaaagcgaattatactcca

SEQ ID NO: 329094 - DNA, 9241 bp, Homo sapiens
  misc_feature (2538)..(2538): n is a, c, g, or t
gagtctttgaggacacagcctcgctggaggcagtttctggtgccagtgacggggtggcccgtgagctgatgacgaggactggcttttaatccttggtggtgattaagagaaagcttattgcggcctgggagcagctccccgccgacccccaccaccatgtcgggatccacacagcctgtggcacagacgtggagggccactgagccccgctacccgccccacagcctttcctacccagtgcagatcgcccggacgcacacggacgtcgggctcctggagtaccagcaccactcccgcgactatgcctcccacctgtcgcccggctccatcatccagccccagcggcggaggccctccctgctgtctgagttccagcccgggaatgaacggtcccaggagctccacctgcggccagagtcccactcatacctgcccgagctggggaagtcagagatggagttcattgaaagcaagcgccctcggctagagctgctgcctgaccccctgctgcgaccgtcacccctgctggccacgggccagcctgcgggatctgaagacctcaccaaggaccgtagcctgacgggcaagctggaaccggtgtctccccccagccccccgcacactgaccctgagctggagctggtgccgccacggctgtccaaggaggagctgatccagaacatggaccgcgtggaccgagagatcaccatggtagagcagcagatctctaagctgaagaagaagcagcaacagctggaggaggaggctgccaagccgcccgagcctgagaagcccgtgtcaccgccgcccatcgagtcgaagcaccgcagcctggtgcagatcatctacgacgagaaccggaagaaggctgaagctgcacatcggattctggaaggcctggggccccaggtggagctgccgctgtacaaccagccctccgacacccggcagtatcatgagaacatcaaaataaaccaggcgatgcggaagaagctaatcttgtacttcaagaggaggaatcacgctcggaaacaatgggagcagaagttctgccagcgctatgaccagctcatggaggcctgggagaagaaggtggagcgcatcgagaacaacccccggcggcgggccaaggagagcaaggtgcgcgagtactacgagaagcagttccctgagatccgcaagcagcgcgagctgcaggagcgcatgcagagcagggtgggccagcggggcagtgggctgtccatgtcggccgcccgcagcgagcacgaggtgtcagagatcatcgatggcctctcagagcaggagaacctggagaagcagatgcgccagctggccgtgatcccgcccatgctgtacgacgctgaccagcagcgcatcaagttcatcaacatgaacgggcttatggccgaccccatgaaggtgtacaaagaccgccaggtcatgaacatgtggagtgagcaggagaaggagaccttccgggagaagttcatgcagcatcccaagaactttggcctgatcgcatcattcctggagaggaagacagtggctgagtgcgtcctctattactacctgactaagaagaatgagaactataagagcctggtgagacggagctatcggcgccgcggcaagagccagcagcaacaacagcagcagcagcagcagcagcagcagcagcagcagcagcccatgccccgcagcagccaggaggagaaagatgagaaggagaaggaaaaggaggcggagaaggaggaggagaagccggaggtggagaacgacaaggaagacctcctcaaggagaagacagacgacacctcaggggaggacaacgacgagaaggaggctgtggcctccaaaggccgcaaaactgccaacagccagggaagacgcaaaggccgcatcacccgctcaatggctaatgaggccaacagcgaggaggccatcaccccccagcagagcgccgagctggcctccatggagctgaatgagagttctcgctggacagaagaagaaatggaaacagccaagaaaggtctcctggaacacggccgcaactggtcggccatcgcccggatggtgggctccaagactgtgtcgcagtgtaagaacttctacttcaactacaagaagaggcagaacctcgatgagatcttgcagcagcacaagctgaagatggagaaggagaggaacgcgcggaggaagaagaagaaagcgccggcggcggccagcgaggaggctgcattcccgcccgtggtggaggatgaggagatggaggcgtcgggcgtgagcggaaatgaggaggagatggtggaggaggctgaagccttacatgcctctgggaatgaggtgcccagaggggaatgcagtggcccagccactgtcaacaacagctcagacaccgagagcatcccctctcctcacactgaggccgccaaggacacagggcagaatgggcccaagcccccagccaccctgggcgccgacgggccacccccagggccacccaccccaccaccggaggacatcccgggcccccantgagcccaccccggcctctgaagccaccggagcccctacgcccccaccagcacccccatcgccctctgcacctcctcctgtggtccccaaggaggagaaggaggaggagaccgcagcagcgcccccagtggaggagggggaggagcagaagccccccgcggctgaggagctggcagtggacacagggaaggccgaggagcccgtcaagagcgagtgcacggaggaagccgaggaggggccggccaagggcaaggacgcggaggccgctgaggccacggccgagggggcgctcaaggcagagaagaaggagggcgggagcggcagggccaccactgccaagagctcgggcgccccccaggacagcgactccagtgctacctgcagtgcagacgaggtggatgaggccgagggcggcgacaagaaccggctgctgtccccaaggcccagcctcctcaccccgactggcgacccccgggccaatgcctcaccccagaagccactggacctgaagcagctgaagcagcgagcggctgccatcccccccatccaggtcaccaaagtccatgagcccccccgggaggacgcagctcccaccaagccagctcccccagccccaccgccaccgcaaaacctgcagccggagagcgacgcccctcagcagcctggcagcagcccccggggcaagagcaggagcccggcaccccccgccgacaaggaggcagagaagcctgtgttcttcccagccttcgcagccgaggcccagaagctgcctggggaccccccttgctggacttccggcctgcccttccccgtgcccccccgtgaggtgatcaaggcctccccgcatgccccggacccctcagccttctcctacgctccacctggtcacccactgcccctgggcctccatgacactgcccggcccgtcctgccgcgcccacccaccatctccaacccgcctcccctcatctcctctgccaagcaccccagcgtcctcgagaggcaaataggtgccatctcccaaggaatgtcggtccagctccacgtcccgtactcagagcatgccaaggccccggtgggccctgtcaccatggggctgcccctgcccatggaccccaaaaagctggcacccttcagcggagtgaagcaggagcagctgtccccacggggccaggctgggccaccggagagcctgggggtgcccacagcccaggaggcgtccgtgctgagagggacagctctgggctcagttccgggcggaagcatcaccaaaggcattcccagcacacgggtgccctcggacagcgccatcacataccgcggctccatcacccacggcacgccagctgacgtcctgtacaagggcaccatcaccaggatcatcggcgaggacagcccgagtcgcttggaccgcggccgggaggacagcctgcccaagggccacgtcatctacgaaggcaagaagggccacgtcttgtcctatgagggtggcatgtctgtgacccagtgctccaaggaggacggcagaagcagctcaggacccccccatgagacggccgcccccaagcgcacctatgacatgatggagggccgcgtgggcagagccatctcctcagccagcatcgaaggtctcatgggccgtgccatcccgccggagcgacacagcccccaccacctcaaagagcagcaccacatccgcgggtccatcacacaagggatccctcggtcctacgtggaggcacaggaggactacctgcgtcgggaggccaagctcctaaagcgggagggcacgcctccgcccccaccgccctcacgggacctgaccgaggcctacaagacgcaggccctgggccccctgaagctgaagccggcccatgagggcctggtggccacggtgaaggaggcgggccgctccatccatgagatcccgcgcgaggagctgcggcacacgcccgagctgcccctggccccgcggccgctcaaggagggctccatcacgcagggcaccccgctcaagtacgacaccggcgcgtccaccactggctccaaaaagcacgacgtacgctccctcatcggcagccccggccggacgttcccacccgtgcacccgctggatgtgatggccgacgcccgggcactggaacgtgcctgctacgaggagagcctgaagagccggccagggaccgccagcagctcggggggctccattgcgcgcggcgccccggtcattgtgcctgagctgggtaagccgcggcagagccccctgacctatgaggaccacggggcaccctttgccggccacctcccacgaggttcgcccgtgaccacgcgggagcccacgccgcgcctgcaggagggcagcctttcgtccagcaaggcatcccaggaccgaaagctgacgtcgacgcctcgtgagatcgccaagtccccgcacagcaccgtgcccgagcaccacccacaccccatctcgccctatgagcacctgcttcggggcgtgagtggcgtggacctgtatcgcagccacatccccctggccttcgaccccacctccataccccgcggcatccctctggacgcagccgctgcctactacctgccccgacacctggcccccaaccccacctacccgcacctgtacccaccctacctcatccgcggctaccccgacacggcggcgctggagaaccggcagaccatcatcaatgactacatcacctcgcagcagatgcaccacaacacggccaccgccatggcccagcgagctgatatgctgaggggcctctcgccccgcgagtcctcgctggcactcaactacgctgcgggtccccgaggcatcatcgacctgtcccaagtgccacacctgcctgtgctcgtgcccccgacaccaggcaccccagccaccgccatggaccgccttgcctacctccccaccgcgccccagcccttcagcagccgccacagcagctccccactctccccaggaggtccaacacacttgacaaaaccaaccaccacgtcctcgtccgagcgggagcgagaccgggatcgagagcgggaccgggatcgggagcgggaaaagtccatcctcacgtccaccacgacggtggagcacgcacccatctggagacctggtacagagcagagcagcggcagcagcggcagcagcggcgggggtgggggcagcagcagccgccccgcctcccactcccatgcccaccagcactcgcccatctcccctcggacccaggatgccctccagcagagacccagtgtgcttcacaacacaggcatgaagggtatcatcaccgctgtggagcccagcacgcccacggtcctgaggtccacctccacctcctcacccgttcgcccggctgccacattcccacctgccacccactgcccactgggcggcaccctcgatggggtctaccctaccctcatggagcccgtcttgctgcccaaggaggccccccgggtcgcccggccagagcggccccgagcagacaccggccatgccttcctcgccaagcccccagcccgctccgggctggagcccgcctcctcccccagcaagggctcggagccccggcccctagtgcctcctgtctctggccacgccaccatcgcccgcacccctgcgaagaacctcgcacctcaccacgccagcccggacccgccggcgccacctgcctcggcctcggacccgcaccgggaaaagactcaaagtaaacccttttccatccaggaactggaactccgttctctgggttaccacggcagcagctacagccccgaaggggtggagcccgtcagccctgtgagctcacccagtctgacccacgacaaggggctccccaagcacctggaagagctcgacaagagccacctggagggggagctgcggcccaagcagccaggccccgtgaagcttggcggggaggccgcccacctcccacacctgcggccgctgcctgagagccagccctcgtccagcccgctgctccagaccgccccaggggtcaaaggtcaccagcgggtggtcaccctggcccagcacatcagtgtaactacgcgttctctgctgctgcttgtcacctttgcacctgggggcaccaggcctggagaggggatggggaaccccacagcccttctgtcctggcggggtggctgggggatccagggcatggcgctggggggatccagggcgtgggtgagggtgagatcccaaagccccgagcaccggcaccatcaccgccccctaatccatgggaggagcctgtgatgcgagccgatggcatcttcacgggcaatgaggccttcctggtggcccaggtttctcagtgtcatgggctggtctcatcagccatctgccaactaccagcttgggaccgctgaccacagccccactcccatgcacactgggacacggaggcccagagggtggcgggcaggtccacagtcacccaggaagctggccccacccaggattctgccccgagctccgtctagcccctccccacccccagaaggttctgtcaggagagtgctgcctgactctgggcccccccacttgcctgcaggaggtcatcacacaggactacacccggcaccacccacagcagctcagcgcacccctgcccgcccccctctactccttccctggggccagctgccccgtcctggacctccgccgcccacccagtgacctctacctcccgcccccggaccatggtgccccggcccgtggctccccccacagcgaagggggcaagaggtctccagagccaaacaagacgtcggtcttgggtggtggtgaggacggtattgaacctgtgtccccaccggagggcatgacggagccagggcactcccggagtgctgtgtacccgctgctgtaccgggatggggaacagacggagcccagcaggatgggctccaagtctccaggcaacaccagccagccgccagccttcttcagcaagctgaccgagagcaactccgccatggtcaagtccaagaagcaagagatcaacaagaagctgaacacccacaaccggaatgagcctgaatacaatatcagccagcctgggacggagatcttcaatatgcccgccatcaccggaacaggccttatgacctatagaagccaggcggtgcaggaacatgccagcaccaacatggggctggaggccataattagaaaggcactcatgggtaaatatgaccagtgggaagagtccccgccgctcagcgccaatgcttttaaccctctgaatgccagtgccagcctgcccgctgctatgcccataaccgctgctgacggacggagtgaccacacactcacctcgccaggtggcggcgggaaggccaaggtctctggcagacccagcagccgaaaagccaagtccccggccccgggcctggcatctggggaccggccaccctctgtctcctcagtgcactcggagggagactgcaaccgccggacgccgctcaccaaccgcgtgtgggaggacaggccctcgtccgcaggttccacgccattcccctacaaccccctgatcatgcggctgcaggcgggtgtcatggcttccccacccccaccgggcctccccgcgggcagcgggcccctcgctggcccccaccacgcctgggacgaggagcccaagccactgctctgctcgcagtacgagacactctccgacagcgagtgactcagaacagggcgggggggggcgggcggtgtcaggtcccagcgagccacaggaacggccctgcaggagcagggcggctgccgactcccccaaccaaggaaggagcccctgagtccgcctgcgcctccatccatctgtccgtccagagccggcatccttgcctgtctaaagccttaactaagactcccgccccgggctggccctgtgcagaccttactcaggggatgtttacctggtgctcgggaagggaggggaaggggccggggagggggcacggcaggcgtgtggcagccacacgcaggcggccagggcggccagggacccaaagcaggatgaccacgcacctccacgccactgcctcccccgaatgcatttggaaccaaagtctaaactgagctcgcagcccccgcgccctccctccgcctcccatcccgcttagcgctctggacagatggacgcaggccctgtccagcccccagtgcgctcgttccggtccccacagactgccccagccaacgagattgctggaaaccaagtcaggccaggtgggcggacaaaagggccaggtgcggcctggggggaacggatgctccgaggactggactgtttttttcacacatcgttgccgcagcggtgggaaggaaaggcagatgtaaatgatgtgttggtttacagggtatatttttgataccttcaatgaattaattcagatgttttacgcaaggaaggacttacccagtattactgctgctgtgcttttgatctctgcttaccgttcaagaggcgtgtgcaggccgacagtcggtgaccccatcactcgcaggaccaagggggcggggactgctggctcacgccccgctgtgtcctccctccctcccttccttgggcagaatgaattcgatgcgtattctgtggccgccatctgcgcagggtggtggtattctgtcatttacacacgtcgttctaattaaaaagcgaattatactcca

SEQ ID NO: 329095 - DNA, 8586 bp, Homo sapiens
  misc_feature (2538)..(2538): n is a, c, g, or t
gagtctttgaggacacagcctcgctggaggcagtttctggtgccagtgacggggtggcccgtgagctgatgacgaggactggcttttaatccttggtggtgattaagagaaagcttattgcggcctgggagcagctccccgccgacccccaccaccatgtcgggatccacacagcctgtggcacagacgtggagggccactgagccccgctacccgccccacagcctttcctacccagtgcagatcgcccggacgcacacggacgtcgggctcctggagtaccagcaccactcccgcgactatgcctcccacctgtcgcccggctccatcatccagccccagcggcggaggccctccctgctgtctgagttccagcccgggaatgaacggtcccaggagctccacctgcggccagagtcccactcatacctgcccgagctggggaagtcagagatggagttcattgaaagcaagcgccctcggctagagctgctgcctgaccccctgctgcgaccgtcacccctgctggccacgggccagcctgcgggatctgaagacctcaccaaggaccgtagcctgacgggcaagctggaaccggtgtctccccccagccccccgcacactgaccctgagctggagctggtgccgccacggctgtccaaggaggagctgatccagaacatggaccgcgtggaccgagagatcaccatggtagagcagcagatctctaagctgaagaagaagcagcaacagctggaggaggaggctgccaagccgcccgagcctgagaagcccgtgtcaccgccgcccatcgagtcgaagcaccgcagcctggtgcagatcatctacgacgagaaccggaagaaggctgaagctgcacatcggattctggaaggcctggggccccaggtggagctgccgctgtacaaccagccctccgacacccggcagtatcatgagaacatcaaaataaaccaggcgatgcggaagaagctaatcttgtacttcaagaggaggaatcacgctcggaaacaatgggagcagaagttctgccagcgctatgaccagctcatggaggcctgggagaagaaggtggagcgcatcgagaacaacccccggcggcgggccaaggagagcaaggtgcgcgagtactacgagaagcagttccctgagatccgcaagcagcgcgagctgcaggagcgcatgcagagcagggtgggccagcggggcagtgggctgtccatgtcggccgcccgcagcgagcacgaggtgtcagagatcatcgatggcctctcagagcaggagaacctggagaagcagatgcgccagctggccgtgatcccgcccatgctgtacgacgctgaccagcagcgcatcaagttcatcaacatgaacgggcttatggccgaccccatgaaggtgtacaaagaccgccaggtcatgaacatgtggagtgagcaggagaaggagaccttccgggagaagttcatgcagcatcccaagaactttggcctgatcgcatcattcctggagaggaagacagtggctgagtgcgtcctctattactacctgactaagaagaatgagaactataagagcctggtgagacggagctatcggcgccgcggcaagagccagcagcaacaacagcagcagcagcagcagcagcagcagcagcagcagcagcccatgccccgcagcagccaggaggagaaagatgagaaggagaaggaaaaggaggcggagaaggaggaggagaagccggaggtggagaacgacaaggaagacctcctcaaggagaagacagacgacacctcaggggaggacaacgacgagaaggaggctgtggcctccaaaggccgcaaaactgccaacagccagggaagacgcaaaggccgcatcacccgctcaatggctaatgaggccaacagcgaggaggccatcaccccccagcagagcgccgagctggcctccatggagctgaatgagagttctcgctggacagaagaagaaatggaaacagccaagaaaggtctcctggaacacggccgcaactggtcggccatcgcccggatggtgggctccaagactgtgtcgcagtgtaagaacttctacttcaactacaagaagaggcagaacctcgatgagatcttgcagcagcacaagctgaagatggagaaggagaggaacgcgcggaggaagaagaagaaagcgccggcggcggccagcgaggaggctgcattcccgcccgtggtggaggatgaggagatggaggcgtcgggcgtgagcggaaatgaggaggagatggtggaggaggctgaagccttacatgcctctgggaatgaggtgcccagaggggaatgcagtggcccagccactgtcaacaacagctcagacaccgagagcatcccctctcctcacactgaggccgccaaggacacagggcagaatgggcccaagcccccagccaccctgggcgccgacgggccacccccagggccacccaccccaccaccggaggacatcccgggcccccantgagcccaccccggcctctgaagccaccggagcccctacgcccccaccagcacccccatcgccctctgcacctcctcctgtggtccccaaggaggagaaggaggaggagaccgcagcagcgcccccagtggaggagggggaggagcagaagccccccgcggctgaggagctggcagtggacacagggaaggccgaggagcccgtcaagagcgagtgcacggaggaagccgaggaggggccggccaagggcaaggacgcggaggccgctgaggccacggccgagggggcgctcaaggcagagaagaaggagggcgggagcggcagggccaccactgccaagagctcgggcgccccccaggacagcgactccagtgctacctgcagtgcagacgaggtggatgaggccgagggcggcgacaagaaccggctgctgtccccaaggcccagcctcctcaccccgactggcgacccccgggccaatgcctcaccccagaagccactggacctgaagcagctgaagcagcgagcggctgccatcccccccatccaggtcaccaaagtccatgagcccccccgggaggacgcagctcccaccaagccagctcccccagccccaccgccaccgcaaaacctgcagccggagagcgacgcccctcagcagcctggcagcagcccccggggcaagagcaggagcccggcaccccccgccgacaaggaggcagagaagcctgtgttcttcccagccttcgcagccgaggcccagaagctgcctggggaccccccttgctggacttccggcctgcccttccccgtgcccccccgtgaggtgatcaaggcctccccgcatgccccggacccctcagccttctcctacgctccacctggtcacccactgcccctgggcctccatgacactgcccggcccgtcctgccgcgcccacccaccatctccaacccgcctcccctcatctcctctgccaagcaccccagcgtcctcgagaggcaaataggtgccatctcccaaggaatgtcggtccagctccacgtcccgtactcagagcatgccaaggccccggtgggccctgtcaccatggggctgcccctgcccatggaccccaaaaagctggcacccttcagcggagtgaagcaggagcagctgtccccacggggccaggctgggccaccggagagcctgggggtgcccacagcccaggaggcgtccgtgctgagagggacagctctgggctcagttccgggcggaagcatcaccaaaggcattcccagcacacgggtgccctcggacagcgccatcacataccgcggctccatcacccacggcacgccagctgacgtcctgtacaagggcaccatcaccaggatcatcggcgaggacagcccgagtcgcttggaccgcggccgggaggacagcctgcccaagggccacgtcatctacgaaggcaagaagggccacgtcttgtcctatgagggtggcatgtctgtgacccagtgctccaaggaggacggcagaagcagctcaggacccccccatgagacggccgcccccaagcgcacctatgacatgatggagggccgcgtgggcagagccatctcctcagccagcatcgaaggtctcatgggccgtgccatcccgccggagcgacacagcccccaccacctcaaagagcagcaccacatccgcgggtccatcacacaagggatccctcggtcctacgtggaggcacaggaggactacctgcgtcgggaggccaagctcctaaagcgggagggcacgcctccgcccccaccgccctcacgggacctgaccgaggcctacaagacgcaggccctgggccccctgaagctgaagccggcccatgagggcctggtggccacggtgaaggaggcgggccgctccatccatgagatcccgcgcgaggagctgcggcacacgcccgagctgcccctggccccgcggccgctcaaggagggctccatcacgcagggcaccccgctcaagtacgacaccggcgcgtccaccactggctccaaaaagcacgacgtacgctccctcatcggcagccccggccggacgttcccacccgtgcacccgctggatgtgatggccgacgcccgggcactggaacgtgcctgctacgaggagagcctgaagagccggccagggaccgccagcagctcggggggctccattgcgcgcggcgccccggtcattgtgcctgagctgggtaagccgcggcagagccccctgacctatgaggaccacggggcaccctttgccggccacctcccacgaggttcgcccgtgaccacgcgggagcccacgccgcgcctgcaggagggcagcctttcgtccagcaaggcatcccaggaccgaaagctgacgtcgacgcctcgtgagatcgccaagtccccgcacagcaccgtgcccgagcaccacccacaccccatctcgccctatgagcacctgcttcggggcgtgagtggcgtggacctgtatcgcagccacatccccctggccttcgaccccacctccataccccgcggcatccctctggacgcagccgctgcctactacctgccccgacacctggcccccaaccccacctacccgcacctgtacccaccctacctcatccgcggctaccccgacacggcggcgctggagaaccggcagaccatcatcaatgactacatcacctcgcagcagatgcaccacaacacggccaccgccatggcccagcgagctgatatgctgaggggcctctcgccccgcgagtcctcgctggcactcaactacgctgcgggtccccgaggcatcatcgacctgtcccaagtgccacacctgcctgtgctcgtgcccccgacaccaggcaccccagccaccgccatggaccgccttgcctacctccccaccgcgccccagcccttcagcagccgccacagcagctccccactctccccaggaggtccaacacacttgacaaaaccaaccaccacgtcctcgtccgagcgggagcgagaccgggatcgagagcgggaccgggatcgggagcgggaaaagtccatcctcacgtccaccacgacggtggagcacgcacccatctggagacctggtacagagcagagcagcggcagcagcggcagcagcggcgggggtgggggcagcagcagccgccccgcctcccactcccatgcccaccagcactcgcccatctcccctcggacccaggatgccctccagcagagacccagtgtgcttcacaacacaggcatgaagggtatcatcaccgctgtggagcccagcacgcccacggtcctgaggtccacctccacctcctcacccgttcgcccggctgccacattcccacctgccacccactgcccactgggcggcaccctcgatggggtctaccctaccctcatggagcccgtcttgctgcccaaggaggccccccgggtcgcccggccagagcggccccgagcagacaccggccatgccttcctcgccaagcccccagcccgctccgggctggagcccgcctcctcccccagcaagggctcggagccccggcccctagtgcctcctgtctctggccacgccaccatcgcccgcacccctgcgaagaacctcgcacctcaccacgccagcccggacccgccggcgccacctgcctcggcctcggacccgcaccgggaaaagactcaaagtaaacccttttccatccaggaactggaactccgttctctgggttaccacggcagcagctacagccccgaaggggtggagcccgtcagccctgtgagctcacccagtctgacccacgacaaggggctccccaagcacctggaagagctcgacaagagccacctggagggggagctgcggcccaagcagccaggccccgtgaagcttggcggggaggccgcccacctcccacacctgcggccgctgcctgagagccagccctcgtccagcccgctgctccagaccgccccaggggtcaaaggtcaccagcgggtggtcaccctggcccagcacatcagtgaggtcatcacacaggactacacccggcaccacccacagcagctcagcgcacccctgcccgcccccctctactccttccctggggccagctgccccgtcctggacctccgccgcccacccagtgacctctacctcccgcccccggaccatggtgccccggcccgtggctccccccacagcgaagggggcaagaggtctccagagccaaacaagacgtcggtcttgggtggtggtgaggacggtattgaacctgtgtccccaccggagggcatgacggagccagggcactcccggagtgctgtgtacccgctgctgtaccgggatggggaacagacggagcccagcaggatgggctccaagtctccaggcaacaccagccagccgccagccttcttcagcaagctgaccgagagcaactccgccatggtcaagtccaagaagcaagagatcaacaagaagctgaacacccacaaccggaatgagcctgaatacaatatcagccagcctgggacggagatcttcaatatgcccgccatcaccggaacaggccttatgacctatagaagccaggcggtgcaggaacatgccagcaccaacatggggctggaggccataattagaaaggcactcatgggtggcggcgggaaggccaaggtctctggcagacccagcagccgaaaagccaagtccccggccccgggcctggcatctggggaccggccaccctctgtctcctcagtgcactcggagggagactgcaaccgccggacgccgctcaccaaccgcgtgtgggaggacaggccctcgtccgcaggttccacgccattcccctacaaccccctgatcatgcggctgcaggcgggtgtcatggcttccccacccccaccgggcctccccgcgggcagcgggcccctcgctggcccccaccacgcctgggacgaggagcccaagccactgctctgctcgcagtacgagacactctccgacagcgagtgactcagaacagggcgggggggggcgggcggtgtcaggtcccagcgagccacaggaacggccctgcaggagcagggcggctgccgactcccccaaccaaggaaggagcccctgagtccgcctgcgcctccatccatctgtccgtccagagccggcatccttgcctgtctaaagccttaactaagactcccgccccgggctggccctgtgcagaccttactcaggggatgtttacctggtgctcgggaagggaggggaaggggccggggagggggcacggcaggcgtgtggcagccacacgcaggcggccagggcggccagggacccaaagcaggatgaccacgcacctccacgccactgcctcccccgaatgcatttggaaccaaagtctaaactgagctcgcagcccccgcgccctccctccgcctcccatcccgcttagcgctctggacagatggacgcaggccctgtccagcccccagtgcgctcgttccggtccccacagactgccccagccaacgagattgctggaaaccaagtcaggccaggtgggcggacaaaagggccaggtgcggcctggggggaacggatgctccgaggactggactgtttttttcacacatcgttgccgcagcggtgggaaggaaaggcagatgtaaatgatgtgttggtttacagggtatatttttgataccttcaatgaattaattcagatgttttacgcaaggaaggacttacccagtattactgctgctgtgcttttgatctctgcttaccgttcaagaggcgtgtgcaggccgacagtcggtgaccccatcactcgcaggaccaagggggcggggactgctggctcacgccccgctgtgtcctccctccctcccttccttgggcagaatgaattcgatgcgtattctgtggccgccatctgcgcagggtggtggtattctgtcatttacacacgtcgttctaattaaaaagcgaattatactcca

SEQ ID NO: 329096 - DNA, 8505 bp, Homo sapiens
  misc_feature (2319)..(2319): n is a, c, g, or t
gagtctttgaggacacagcctcgctggaggcagtttctggtgccagtgacggggtggcccgtgagctgatgacgaggactggcttttaatccttggtggtgattaagagaaagcttattgcggcctgggagcagctccccgccgacccccaccaccatgtcgggatccacacagcctgtggcacagacgtggagggccactgagccccgctacccgccccacagcctttcctacccagtgcagatcgcccggacgcacacggacgtcgggctcctggagtaccagcaccactcccgcgactatgcctcccacctgtcgcccggctccatcatccagccccagcggcggaggccctccctgctgtctgagttccagcccgggaatgaacggtcccaggagctccacctgcggccagagtcccactcatacctgcccgagctggggaagtcagagatggagttcattgaaagcaagcgccctcggctagagctgctgcctgaccccctgctgcgaccgtcacccctgctggccacgggccagcctgcgggatctgaagacctcaccaaggaccgtagcctgacgggcaagctggaaccggtgtctccccccagccccccgcacactgaccctgagctggagctggtgccgccacggctgtccaaggaggagctgatccagaacatggaccgcgtggaccgagagatcaccatggtagagcagcagatctctaagctgaagaagaagcagcaacagctggaggaggaggctgccaagccgcccgagcctgagaagcccgtgtcaccgccgcccatcgagtcgaagcaccgcagcctggtgcagatcatctacgacgagaaccggccgctgtacaaccagccctccgacacccggcagtatcatgagaacatcaaaataaaccaggcgatgcggaagaagctaatcttgtacttcaagaggaggaatcacgctcggaaacaatgggagcagaagttctgccagcgctatgaccagctcatggaggcctgggagaagaaggtggagcgcatcgagaacaacccccggcggcgggccaaggagagcaaggtgaacctggagaagcagatgcgccagctggccgtgatcccgcccatgctgtacgacgctgaccagcagcgcatcaagttcatcaacatgaacgggcttatggccgaccccatgaaggtgtacaaagaccgccaggtcatgaacatgtggagtgagcaggagaaggagaccttccgggagaagttcatgcagcatcccaagaactttggcctgatcgcatcattcctggagaggaagacagtggctgagtgcgtcctctattactacctgactaagaagaatgagaactataagagcctggtgagacggagctatcggcgccgcggcaagagccagcagcaacaacagcagcagcagcagcagcagcagcagcagcagcagcagcccatgccccgcagcagccaggaggagaaagatgagaaggagaaggaaaaggaggcggagaaggaggaggagaagccggaggtggagaacgacaaggaagacctcctcaaggagaagacagacgacacctcaggggaggacaacgacgagaaggaggctgtggcctccaaaggccgcaaaactgccaacagccagggaagacgcaaaggccgcatcacccgctcaatggctaatgaggccaacagcgaggaggccatcaccccccagcagagcgccgagctggcctccatggagctgaatgagagttctcgctggacagaagaagaaatggaaacagccaagaaaggtctcctggaacacggccgcaactggtcggccatcgcccggatggtgggctccaagactgtgtcgcagtgtaagaacttctacttcaactacaagaagaggcagaacctcgatgagatcttgcagcagcacaagctgaagatggagaaggagaggaacgcgcggaggaagaagaagaaagcgccggcggcggccagcgaggaggctgcattcccgcccgtggtggaggatgaggagatggaggcgtcgggcgtgagcggaaatgaggaggagatggtggaggaggctgaagccttacatgcctctgggaatgaggtgcccagaggggaatgcagtggcccagccactgtcaacaacagctcagacaccgagagcatcccctctcctcacactgaggccgccaaggacacagggcagaatgggcccaagcccccagccaccctgggcgccgacgggccacccccagggccacccaccccaccaccggaggacatcccgggcccccantgagcccaccccggcctctgaagccaccggagcccctacgcccccaccagcacccccatcgccctctgcacctcctcctgtggtccccaaggaggagaaggaggaggagaccgcagcagcgcccccagtggaggagggggaggagcagaagccccccgcggctgaggagctggcagtggacacagggaaggccgaggagcccgtcaagagcgagtgcacggaggaagccgaggaggggccggccaagggcaaggacgcggaggccgctgaggccacggccgagggggcgctcaaggcagagaagaaggagggcgggagcggcagggccaccactgccaagagctcgggcgccccccaggacagcgactccagtgctacctgcagtgcagacgaggtggatgaggccgagggcggcgacaagaaccggctgctgtccccaaggcccagcctcctcaccccgactggcgacccccgggccaatgcctcaccccagaagccactggacctgaagcagctgaagcagcgagcggctgccatcccccccatccaggtcaccaaagtccatgagcccccccgggaggacgcagctcccaccaagccagctcccccagccccaccgccaccgcaaaacctgcagccggagagcgacgcccctcagcagcctggcagcagcccccggggcaagagcaggagcccggcaccccccgccgacaaggaggcagagaagcctgtgttcttcccagccttcgcagccgaggcccagaagctgcctggggaccccccttgctggacttccggcctgcccttccccgtgcccccccgtgaggtgatcaaggcctccccgcatgccccggacccctcagccttctcctacgctccacctggtcacccactgcccctgggcctccatgacactgcccggcccgtcctgccgcgcccacccaccatctccaacccgcctcccctcatctcctctgccaagcaccccagcgtcctcgagaggcaaataggtgccatctcccaaggaatgtcggtccagctccacgtcccgtactcagagcatgccaaggccccggtgggccctgtcaccatggggctgcccctgcccatggaccccaaaaagctggcacccttcagcggagtgaagcaggagcagctgtccccacggggccaggctgggccaccggagagcctgggggtgcccacagcccaggaggcgtccgtgctgagagggacagctctgggctcagttccgggcggaagcatcaccaaaggcattcccagcacacgggtgccctcggacagcgccatcacataccgcggctccatcacccacggcacgccagctgacgtcctgtacaagggcaccatcaccaggatcatcggcgaggacagcccgagtcgcttggaccgcggccgggaggacagcctgcccaagggccacgtcatctacgaaggcaagaagggccacgtcttgtcctatgagggtggcatgtctgtgacccagtgctccaaggaggacggcagaagcagctcaggacccccccatgagacggccgcccccaagcgcacctatgacatgatggagggccgcgtgggcagagccatctcctcagccagcatcgaaggtctcatgggccgtgccatcccgccggagcgacacagcccccaccacctcaaagagcagcaccacatccgcgggtccatcacacaagggatccctcggtcctacgtggaggcacaggaggactacctgcgtcgggaggccaagctcctaaagcgggagggcacgcctccgcccccaccgccctcacgggacctgaccgaggcctacaagacgcaggccctgggccccctgaagctgaagccggcccatgagggcctggtggccacggtgaaggaggcgggccgctccatccatgagatcccgcgcgaggagctgcggcacacgcccgagctgcccctggccccgcggccgctcaaggagggctccatcacgcagggcaccccgctcaagtacgacaccggcgcgtccaccactggctccaaaaagcacgacgtacgctccctcatcggcagccccggccggacgttcccacccgtgcacccgctggatgtgatggccgacgcccgggcactggaacgtgcctgctacgaggagagcctgaagagccggccagggaccgccagcagctcggggggctccattgcgcgcggcgccccggtcattgtgcctgagctgggtaagccgcggcagagccccctgacctatgaggaccacggggcaccctttgccggccacctcccacgaggttcgcccgtgaccacgcgggagcccacgccgcgcctgcaggagggcagcctttcgtccagcaaggcatcccaggaccgaaagctgacgtcgacgcctcgtgagatcgccaagtccccgcacagcaccgtgcccgagcaccacccacaccccatctcgccctatgagcacctgcttcggggcgtgagtggcgtggacctgtatcgcagccacatccccctggccttcgaccccacctccataccccgcggcatccctctggacgcagccgctgcctactacctgccccgacacctggcccccaaccccacctacccgcacctgtacccaccctacctcatccgcggctaccccgacacggcggcgctggagaaccggcagaccatcatcaatgactacatcacctcgcagcagatgcaccacaacacggccaccgccatggcccagcgagctgatatgctgaggggcctctcgccccgcgagtcctcgctggcactcaactacgctgcgggtccccgaggcatcatcgacctgtcccaagtgccacacctgcctgtgctcgtgcccccgacaccaggcaccccagccaccgccatggaccgccttgcctacctccccaccgcgccccagcccttcagcagccgccacagcagctccccactctccccaggaggtccaacacacttgacaaaaccaaccaccacgtcctcgtccgagcgggagcgagaccgggatcgagagcgggaccgggatcgggagcgggaaaagtccatcctcacgtccaccacgacggtggagcacgcacccatctggagacctggtacagagcagagcagcggcagcagcggcagcagcggcgggggtgggggcagcagcagccgccccgcctcccactcccatgcccaccagcactcgcccatctcccctcggacccaggatgccctccagcagagacccagtgtgcttcacaacacaggcatgaagggtatcatcaccgctgtggagcccagcacgcccacggtcctgaggtccacctccacctcctcacccgttcgcccggctgccacattcccacctgccacccactgcccactgggcggcaccctcgatggggtctaccctaccctcatggagcccgtcttgctgcccaaggaggccccccgggtcgcccggccagagcggccccgagcagacaccggccatgccttcctcgccaagcccccagcccgctccgggctggagcccgcctcctcccccagcaagggctcggagccccggcccctagtgcctcctgtctctggccacgccaccatcgcccgcacccctgcgaagaacctcgcacctcaccacgccagcccggacccgccggcgccacctgcctcggcctcggacccgcaccgggaaaagactcaaagtaaacccttttccatccaggaactggaactccgttctctgggttaccacggcagcagctacagccccgaaggggtggagcccgtcagccctgtgagctcacccagtctgacccacgacaaggggctccccaagcacctggaagagctcgacaagagccacctggagggggagctgcggcccaagcagccaggccccgtgaagcttggcggggaggccgcccacctcccacacctgcggccgctgcctgagagccagccctcgtccagcccgctgctccagaccgccccaggggtcaaaggtcaccagcgggtggtcaccctggcccagcacatcagtgaggtcatcacacaggactacacccggcaccacccacagcagctcagcgcacccctgcccgcccccctctactccttccctggggccagctgccccgtcctggacctccgccgcccacccagtgacctctacctcccgcccccggaccatggtgccccggcccgtggctccccccacagcgaagggggcaagaggtctccagagccaaacaagacgtcggtcttgggtggtggtgaggacggtattgaacctgtgtccccaccggagggcatgacggagccagggcactcccggagtgctgtgtacccgctgctgtaccgggatggggaacagacggagcccagcaggatgggctccaagtctccaggcaacaccagccagccgccagccttcttcagcaagctgaccgagagcaactccgccatggtcaagtccaagaagcaagagatcaacaagaagctgaacacccacaaccggaatgagcctgaatacaatatcagccagcctgggacggagatcttcaatatgcccgccatcaccggaacaggccttatgacctatagaagccaggcggtgcaggaacatgccagcaccaacatggggctggaggccataattagaaaggcactcatgggtaaatatgaccagtgggaagagtccccgccgctcagcgccaatgcttttaaccctctgaatgccagtgccagcctgcccgctgctatgcccataaccgctgctgacggacggagtgaccacacactcacctcgccaggtggcggcgggaaggccaaggtctctggcagacccagcagccgaaaagccaagtccccggccccgggcctggcatctggggaccggccaccctctgtctcctcagtgcactcggagggagactgcaaccgccggacgccgctcaccaaccgcgtgtgggaggacaggccctcgtccgcaggttccacgccattcccctacaaccccctgatcatgcggctgcaggcgggtgtcatggcttccccacccccaccgggcctccccgcgggcagcgggcccctcgctggcccccaccacgcctgggacgaggagcccaagccactgctctgctcgcagtacgagacactctccgacagcgagtgactcagaacagggcgggggggggcgggcggtgtcaggtcccagcgagccacaggaacggccctgcaggagcagggcggctgccgactcccccaaccaaggaaggagcccctgagtccgcctgcgcctccatccatctgtccgtccagagccggcatccttgcctgtctaaagccttaactaagactcccgccccgggctggccctgtgcagaccttactcaggggatgtttacctggtgctcgggaagggaggggaaggggccggggagggggcacggcaggcgtgtggcagccacacgcaggcggccagggcggccagggacccaaagcaggatgaccacgcacctccacgccactgcctcccccgaatgcatttggaaccaaagtctaaactgagctcgcagcccccgcgccctccctccgcctcccatcccgcttagcgctctggacagatggacgcaggccctgtccagcccccagtgcgctcgttccggtccccacagactgccccagccaacgagattgctggaaaccaagtcaggccaggtgggcggacaaaagggccaggtgcggcctggggggaacggatgctccgaggactggactgtttttttcacacatcgttgccgcagcggtgggaaggaaaggcagatgtaaatgatgtgttggtttacagggtatatttttgataccttcaatgaattaattcagatgttttacgcaaggaaggacttacccagtattactgctgctgtgcttttgatctctgcttaccgttcaagaggcgtgtgcaggccgacagtcggtgaccccatcactcgcaggaccaagggggcggggactgctggctcacgccccgctgtgtcctccctccctcccttccttgggcagaatgaattcgatgcgtattctgtggccgccatctgcgcagggtggtggtattctgtcatttacacacgtcgttctaattaaaaagcgaattatactcca

SEQ ID NO: 329097 - DNA, 8670 bp, Homo sapiens
  misc_feature (2538)..(2538): n is a, c, g, or t
gagtctttgaggacacagcctcgctggaggcagtttctggtgccagtgacggggtggcccgtgagctgatgacgaggactggcttttaatccttggtggtgattaagagaaagcttattgcggcctgggagcagctccccgccgacccccaccaccatgtcgggatccacacagcctgtggcacagacgtggagggccactgagccccgctacccgccccacagcctttcctacccagtgcagatcgcccggacgcacacggacgtcgggctcctggagtaccagcaccactcccgcgactatgcctcccacctgtcgcccggctccatcatccagccccagcggcggaggccctccctgctgtctgagttccagcccgggaatgaacggtcccaggagctccacctgcggccagagtcccactcatacctgcccgagctggggaagtcagagatggagttcattgaaagcaagcgccctcggctagagctgctgcctgaccccctgctgcgaccgtcacccctgctggccacgggccagcctgcgggatctgaagacctcaccaaggaccgtagcctgacgggcaagctggaaccggtgtctccccccagccccccgcacactgaccctgagctggagctggtgccgccacggctgtccaaggaggagctgatccagaacatggaccgcgtggaccgagagatcaccatggtagagcagcagatctctaagctgaagaagaagcagcaacagctggaggaggaggctgccaagccgcccgagcctgagaagcccgtgtcaccgccgcccatcgagtcgaagcaccgcagcctggtgcagatcatctacgacgagaaccggaagaaggctgaagctgcacatcggattctggaaggcctggggccccaggtggagctgccgctgtacaaccagccctccgacacccggcagtatcatgagaacatcaaaataaaccaggcgatgcggaagaagctaatcttgtacttcaagaggaggaatcacgctcggaaacaatgggagcagaagttctgccagcgctatgaccagctcatggaggcctgggagaagaaggtggagcgcatcgagaacaacccccggcggcgggccaaggagagcaaggtgcgcgagtactacgagaagcagttccctgagatccgcaagcagcgcgagctgcaggagcgcatgcagagcagggtgggccagcggggcagtgggctgtccatgtcggccgcccgcagcgagcacgaggtgtcagagatcatcgatggcctctcagagcaggagaacctggagaagcagatgcgccagctggccgtgatcccgcccatgctgtacgacgctgaccagcagcgcatcaagttcatcaacatgaacgggcttatggccgaccccatgaaggtgtacaaagaccgccaggtcatgaacatgtggagtgagcaggagaaggagaccttccgggagaagttcatgcagcatcccaagaactttggcctgatcgcatcattcctggagaggaagacagtggctgagtgcgtcctctattactacctgactaagaagaatgagaactataagagcctggtgagacggagctatcggcgccgcggcaagagccagcagcaacaacagcagcagcagcagcagcagcagcagcagcagcagcagcccatgccccgcagcagccaggaggagaaagatgagaaggagaaggaaaaggaggcggagaaggaggaggagaagccggaggtggagaacgacaaggaagacctcctcaaggagaagacagacgacacctcaggggaggacaacgacgagaaggaggctgtggcctccaaaggccgcaaaactgccaacagccagggaagacgcaaaggccgcatcacccgctcaatggctaatgaggccaacagcgaggaggccatcaccccccagcagagcgccgagctggcctccatggagctgaatgagagttctcgctggacagaagaagaaatggaaacagccaagaaaggtctcctggaacacggccgcaactggtcggccatcgcccggatggtgggctccaagactgtgtcgcagtgtaagaacttctacttcaactacaagaagaggcagaacctcgatgagatcttgcagcagcacaagctgaagatggagaaggagaggaacgcgcggaggaagaagaagaaagcgccggcggcggccagcgaggaggctgcattcccgcccgtggtggaggatgaggagatggaggcgtcgggcgtgagcggaaatgaggaggagatggtggaggaggctgaagccttacatgcctctgggaatgaggtgcccagaggggaatgcagtggcccagccactgtcaacaacagctcagacaccgagagcatcccctctcctcacactgaggccgccaaggacacagggcagaatgggcccaagcccccagccaccctgggcgccgacgggccacccccagggccacccaccccaccaccggaggacatcccgggcccccantgagcccaccccggcctctgaagccaccggagcccctacgcccccaccagcacccccatcgccctctgcacctcctcctgtggtccccaaggaggagaaggaggaggagaccgcagcagcgcccccagtggaggagggggaggagcagaagccccccgcggctgaggagctggcagtggacacagggaaggccgaggagcccgtcaagagcgagtgcacggaggaagccgaggaggggccggccaagggcaaggacgcggaggccgctgaggccacggccgagggggcgctcaaggcagagaagaaggagggcgggagcggcagggccaccactgccaagagctcgggcgccccccaggacagcgactccagtgctacctgcagtgcagacgaggtggatgaggccgagggcggcgacaagaaccggctgctgtccccaaggcccagcctcctcaccccgactggcgacccccgggccaatgcctcaccccagaagccactggacctgaagcagctgaagcagcgagcggctgccatcccccccatccaggtcaccaaagtccatgagcccccccgggaggacgcagctcccaccaagccagctcccccagccccaccgccaccgcaaaacctgcagccggagagcgacgcccctcagcagcctggcagcagcccccggggcaagagcaggagcccggcaccccccgccgacaaggaggcagagaagcctgtgttcttcccagccttcgcagccgaggcccagaagctgcctggggaccccccttgctggacttccggcctgcccttccccgtgcccccccgtgaggtgatcaaggcctccccgcatgccccggacccctcagccttctcctacgctccacctggtcacccactgcccctgggcctccatgacactgcccggcccgtcctgccgcgcccacccaccatctccaacccgcctcccctcatctcctctgccaagcaccccagcgtcctcgagaggcaaataggtgccatctcccaaggaatgtcggtccagctccacgtcccgtactcagagcatgccaaggccccggtgggccctgtcaccatggggctgcccctgcccatggaccccaaaaagctggcacccttcagcggagtgaagcaggagcagctgtccccacggggccaggctgggccaccggagagcctgggggtgcccacagcccaggaggcgtccgtgctgagagggacagctctgggctcagttccgggcggaagcatcaccaaaggcattcccagcacacgggtgccctcggacagcgccatcacataccgcggctccatcacccacggcacgccagctgacgtcctgtacaagggcaccatcaccaggatcatcggcgaggacagcccgagtcgcttggaccgcggccgggaggacagcctgcccaagggccacgtcatctacgaaggcaagaagggccacgtcttgtcctatgagggtggcatgtctgtgacccagtgctccaaggaggacggcagaagcagctcaggacccccccatgagacggccgcccccaagcgcacctatgacatgatggagggccgcgtgggcagagccatctcctcagccagcatcgaaggtctcatgggccgtgccatcccgccggagcgacacagcccccaccacctcaaagagcagcaccacatccgcgggtccatcacacaagggatccctcggtcctacgtggaggcacaggaggactacctgcgtcgggaggccaagctcctaaagcgggagggcacgcctccgcccccaccgccctcacgggacctgaccgaggcctacaagacgcaggccctgggccccctgaagctgaagccggcccatgagggcctggtggccacggtgaaggaggcgggccgctccatccatgagatcccgcgcgaggagctgcggcacacgcccgagctgcccctggccccgcggccgctcaaggagggctccatcacgcagggcaccccgctcaagtacgacaccggcgcgtccaccactggctccaaaaagcacgacgtacgctccctcatcggcagccccggccggacgttcccacccgtgcacccgctggatgtgatggccgacgcccgggcactggaacgtgcctgctacgaggagagcctgaagagccggccagggaccgccagcagctcggggggctccattgcgcgcggcgccccggtcattgtgcctgagctgggtaagccgcggcagagccccctgacctatgaggaccacggggcaccctttgccggccacctcccacgaggttcgcccgtgaccacgcgggagcccacgccgcgcctgcaggagggcagcctttcgtccagcaaggcatcccaggaccgaaagctgacgtcgacgcctcgtgagatcgccaagtccccgcacagcaccgtgcccgagcaccacccacaccccatctcgccctatgagcacctgcttcggggcgtgagtggcgtggacctgtatcgcagccacatccccctggccttcgaccccacctccataccccgcggcatccctctggacgcagccgctgcctactacctgccccgacacctggcccccaaccccacctacccgcacctgtacccaccctacctcatccgcggctaccccgacacggcggcgctggagaaccggcagaccatcatcaatgactacatcacctcgcagcagatgcaccacaacacggccaccgccatggcccagcgagctgatatgctgaggggcctctcgccccgcgagtcctcgctggcactcaactacgctgcgggtccccgaggcatcatcgacctgtcccaagtgccacacctgcctgtgctcgtgcccccgacaccaggcaccccagccaccgccatggaccgccttgcctacctccccaccgcgccccagcccttcagcagccgccacagcagctccccactctccccaggaggtccaacacacttgacaaaaccaaccaccacgtcctcgtccgagcgggagcgagaccgggatcgagagcgggaccgggatcgggagcgggaaaagtccatcctcacgtccaccacgacggtggagcacgcacccatctggagacctggtacagagcagagcagcggcagcagcggcagcagcggcgggggtgggggcagcagcagccgccccgcctcccactcccatgcccaccagcactcgcccatctcccctcggacccaggatgccctccagcagagacccagtgtgcttcacaacacaggcatgaagggtatcatcaccgctgtggagcccagcacgcccacggtcctgaggtccacctccacctcctcacccgttcgcccggctgccacattcccacctgccacccactgcccactgggcggcaccctcgatggggtctaccctaccctcatggagcccgtcttgctgcccaaggaggccccccgggtcgcccggccagagcggccccgagcagacaccggccatgccttcctcgccaagcccccagcccgctccgggctggagcccgcctcctcccccagcaagggctcggagccccggcccctagtgcctcctgtctctggccacgccaccatcgcccgcacccctgcgaagaacctcgcacctcaccacgccagcccggacccgccggcgccacctgcctcggcctcggacccgcaccgggaaaagactcaaagtaaacccttttccatccaggaactggaactccgttctctgggttaccacggcagcagctacagccccgaaggggtggagcccgtcagccctgtgagctcacccagtctgacccacgacaaggggctccccaagcacctggaagagctcgacaagagccacctggagggggagctgcggcccaagcagccaggccccgtgaagcttggcggggaggccgcccacctcccacacctgcggccgctgcctgagagccagccctcgtccagcccgctgctccagaccgccccaggggtcaaaggtcaccagcgggtggtcaccctggcccagcacatcagtgaggtcatcacacaggactacacccggcaccacccacagcagctcagcgcacccctgcccgcccccctctactccttccctggggccagctgccccgtcctggacctccgccgcccacccagtgacctctacctcccgcccccggaccatggtgccccggcccgtggctccccccacagcgaagggggcaagaggtctccagagccaaacaagacgtcggtcttgggtggtggtgaggacggtattgaacctgtgtccccaccggagggcatgacggagccagggcactcccggagtgctgtgtacccgctgctgtaccgggatggggaacagacggagcccagcaggatgggctccaagtctccaggcaacaccagccagccgccagccttcttcagcaagctgaccgagagcaactccgccatggtcaagtccaagaagcaagagatcaacaagaagctgaacacccacaaccggaatgagcctgaatacagccttatgacctatagaagccaggcggtgcaggaacatgccagcaccaacatggggctggaggccataattagaaaggcactcatgggtaaatatgaccagtgggaagagtccccgccgctcagcgccaatgcttttaaccctctgaatgccagtgccagcctgcccgctgctatgcccataaccgctgctgacggacggagtgaccacacactcacctcgccaggtggcggcgggaaggccaaggtctctggcagacccagcagccgaaaagccaagtccccggccccgggcctggcatctggggaccggccaccctctgtctcctcagtgcactcggagggagactgcaaccgccggacgccgctcaccaaccgcgtgtgggaggacaggccctcgtccgcaggttccacgccattcccctacaaccccctgatcatgcggctgcaggcgggtgtcatggcttccccacccccaccgggcctccccgcgggcagcgggcccctcgctggcccccaccacgcctgggacgaggagcccaagccactgctctgctcgcagtacgagacactctccgacagcgagtgactcagaacagggcgggggggggcgggcggtgtcaggtcccagcgagccacaggaacggccctgcaggagcagggcggctgccgactcccccaaccaaggaaggagcccctgagtccgcctgcgcctccatccatctgtccgtccagagccggcatccttgcctgtctaaagccttaactaagactcccgccccgggctggccctgtgcagaccttactcaggggatgtttacctggtgctcgggaagggaggggaaggggccggggagggggcacggcaggcgtgtggcagccacacgcaggcggccagggcggccagggacccaaagcaggatgaccacgcacctccacgccactgcctcccccgaatgcatttggaaccaaagtctaaactgagctcgcagcccccgcgccctccctccgcctcccatcccgcttagcgctctggacagatggacgcaggccctgtccagcccccagtgcgctcgttccggtccccacagactgccccagccaacgagattgctggaaaccaagtcaggccaggtgggcggacaaaagggccaggtgcggcctggggggaacggatgctccgaggactggactgtttttttcacacatcgttgccgcagcggtgggaaggaaaggcagatgtaaatgatgtgttggtttacagggtatatttttgataccttcaatgaattaattcagatgttttacgcaaggaaggacttacccagtattactgctgctgtgcttttgatctctgcttaccgttcaagaggcgtgtgcaggccgacagtcggtgaccccatcactcgcaggaccaagggggcggggactgctggctcacgccccgctgtgtcctccctccctcccttccttgggcagaatgaattcgatgcgtattctgtggccgccatctgcgcagggtggtggtattctgtcatttacacacgtcgttctaattaaaaagcgaattatactcca

SEQ ID NO: 329098 - DNA, 8838 bp, Homo sapiens
  misc_feature (2538)..(2538): n is a, c, g, or t
gagtctttgaggacacagcctcgctggaggcagtttctggtgccagtgacggggtggcccgtgagctgatgacgaggactggcttttaatccttggtggtgattaagagaaagcttattgcggcctgggagcagctccccgccgacccccaccaccatgtcgggatccacacagcctgtggcacagacgtggagggccactgagccccgctacccgccccacagcctttcctacccagtgcagatcgcccggacgcacacggacgtcgggctcctggagtaccagcaccactcccgcgactatgcctcccacctgtcgcccggctccatcatccagccccagcggcggaggccctccctgctgtctgagttccagcccgggaatgaacggtcccaggagctccacctgcggccagagtcccactcatacctgcccgagctggggaagtcagagatggagttcattgaaagcaagcgccctcggctagagctgctgcctgaccccctgctgcgaccgtcacccctgctggccacgggccagcctgcgggatctgaagacctcaccaaggaccgtagcctgacgggcaagctggaaccggtgtctccccccagccccccgcacactgaccctgagctggagctggtgccgccacggctgtccaaggaggagctgatccagaacatggaccgcgtggaccgagagatcaccatggtagagcagcagatctctaagctgaagaagaagcagcaacagctggaggaggaggctgccaagccgcccgagcctgagaagcccgtgtcaccgccgcccatcgagtcgaagcaccgcagcctggtgcagatcatctacgacgagaaccggaagaaggctgaagctgcacatcggattctggaaggcctggggccccaggtggagctgccgctgtacaaccagccctccgacacccggcagtatcatgagaacatcaaaataaaccaggcgatgcggaagaagctaatcttgtacttcaagaggaggaatcacgctcggaaacaatgggagcagaagttctgccagcgctatgaccagctcatggaggcctgggagaagaaggtggagcgcatcgagaacaacccccggcggcgggccaaggagagcaaggtgcgcgagtactacgagaagcagttccctgagatccgcaagcagcgcgagctgcaggagcgcatgcagagcagggtgggccagcggggcagtgggctgtccatgtcggccgcccgcagcgagcacgaggtgtcagagatcatcgatggcctctcagagcaggagaacctggagaagcagatgcgccagctggccgtgatcccgcccatgctgtacgacgctgaccagcagcgcatcaagttcatcaacatgaacgggcttatggccgaccccatgaaggtgtacaaagaccgccaggtcatgaacatgtggagtgagcaggagaaggagaccttccgggagaagttcatgcagcatcccaagaactttggcctgatcgcatcattcctggagaggaagacagtggctgagtgcgtcctctattactacctgactaagaagaatgagaactataagagcctggtgagacggagctatcggcgccgcggcaagagccagcagcaacaacagcagcagcagcagcagcagcagcagcagcagcagcagcccatgccccgcagcagccaggaggagaaagatgagaaggagaaggaaaaggaggcggagaaggaggaggagaagccggaggtggagaacgacaaggaagacctcctcaaggagaagacagacgacacctcaggggaggacaacgacgagaaggaggctgtggcctccaaaggccgcaaaactgccaacagccagggaagacgcaaaggccgcatcacccgctcaatggctaatgaggccaacagcgaggaggccatcaccccccagcagagcgccgagctggcctccatggagctgaatgagagttctcgctggacagaagaagaaatggaaacagccaagaaaggtctcctggaacacggccgcaactggtcggccatcgcccggatggtgggctccaagactgtgtcgcagtgtaagaacttctacttcaactacaagaagaggcagaacctcgatgagatcttgcagcagcacaagctgaagatggagaaggagaggaacgcgcggaggaagaagaagaaagcgccggcggcggccagcgaggaggctgcattcccgcccgtggtggaggatgaggagatggaggcgtcgggcgtgagcggaaatgaggaggagatggtggaggaggctgaagccttacatgcctctgggaatgaggtgcccagaggggaatgcagtggcccagccactgtcaacaacagctcagacaccgagagcatcccctctcctcacactgaggccgccaaggacacagggcagaatgggcccaagcccccagccaccctgggcgccgacgggccacccccagggccacccaccccaccaccggaggacatcccgggcccccantgagcccaccccggcctctgaagccaccggagcccctacgcccccaccagcacccccatcgccctctgcacctcctcctgtggtccccaaggaggagaaggaggaggagaccgcagcagcgcccccagtggaggagggggaggagcagaagccccccgcggctgaggagctggcagtggacacagggaaggccgaggagcccgtcaagagcgagtgcacggaggaagccgaggaggggccggccaagggcaaggacgcggaggccgctgaggccacggccgagggggcgctcaaggcagagaagaaggagggcgggagcggcagggccaccactgccaagagctcgggcgccccccaggacagcgactccagtgctacctgcagtgcagacgaggtggatgaggccgagggcggcgacaagaaccggctgctgtccccaaggcccagcctcctcaccccgactggcgacccccgggccaatgcctcaccccagaagccactggacctgaagcagctgaagcagcgagcggctgccatcccccccatccaggtcaccaaagtccatgagcccccccgggaggacgcagctcccaccaagccagctcccccagccccaccgccaccgcaaaacctgcagccggagagcgacgcccctcagcagcctggcagcagcccccggggcaagagcaggagcccggcaccccccgccgacaaggaggcagagaagcctgtgttcttcccagccttcgcagccgaggcccagaagctgcctggggaccccccttgctggacttccggcctgcccttccccgtgcccccccgtgaggtgatcaaggcctccccgcatgccccggacccctcagccttctcctacgctccacctggtcacccactgcccctgggcctccatgacactgcccggcccgtcctgccgcgcccacccaccatctccaacccgcctcccctcatctcctctgccaagcaccccagcgtcctcgagaggcaaataggtgccatctcccaaggaatgtcggtccagctccacgtcccgtactcagagcatgccaaggccccggtgggccctgtcaccatggggctgcccctgcccatggaccccaaaaagctggcacccttcagcggagtgaagcaggagcagctgtccccacggggccaggctgggccaccggagagcctgggggtgcccacagcccaggaggcgtccgtgctgagagggacagctctgggctcagttccgggcggaagcatcaccaaaggcattcccagcacacgggtgccctcggacagcgccatcacataccgcggctccatcacccacggcacgccagctgacgtcctgtacaagggcaccatcaccaggatcatcggcgaggacagcccgagtcgcttggaccgcggccgggaggacagcctgcccaagggccacgtcatctacgaaggcaagaagggccacgtcttgtcctatgagggtggcatgtctgtgacccagtgctccaaggaggacggcagaagcagctcaggacccccccatgagacggccgcccccaagcgcacctatgacatgatggagggccgcgtgggcagagccatctcctcagccagcatcgaaggtctcatgggccgtgccatcccgccggagcgacacagcccccaccacctcaaagagcagcaccacatccgcgggtccatcacacaagggatccctcggtcctacgtggaggcacaggaggactacctgcgtcgggaggccaagctcctaaagcgggagggcacgcctccgcccccaccgccctcacgggacctgaccgaggcctacaagacgcaggccctgggccccctgaagctgaagccggcccatgagggcctggtggccacggtgaaggaggcgggccgctccatccatgagatcccgcgcgaggagctgcggcacacgcccgagctgcccctggccccgcggccgctcaaggagggctccatcacgcagggcaccccgctcaagtacgacaccggcgcgtccaccactggctccaaaaagcacgacgtacgctccctcatcggcagccccggccggacgttcccacccgtgcacccgctggatgtgatggccgacgcccgggcactggaacgtgcctgctacgaggagagcctgaagagccggccagggaccgccagcagctcggggggctccattgcgcgcggcgccccggtcattgtgcctgagctgggtaagccgcggcagagccccctgacctatgaggaccacggggcaccctttgccggccacctcccacgaggttcgcccgtgaccacgcgggagcccacgccgcgcctgcaggagggcagcctttcgtccagcaaggcatcccaggaccgaaagctgacgtcgacgcctcgtgagatcgccaagtccccgcacagcaccgtgcccgagcaccacccacaccccatctcgccctatgagcacctgcttcggggcgtgagtggcgtggacctgtatcgcagccacatccccctggccttcgaccccacctccataccccgcggcatccctctggacgcagccgctgcctactacctgccccgacacctggcccccaaccccacctacccgcacctgtacccaccctacctcatccgcggctaccccgacacggcggcgctggagaaccggcagaccatcatcaatgactacatcacctcgcagcagatgcaccacaacacggccaccgccatggcccagcgagctgatatgctgaggggcctctcgccccgcgagtcctcgctggcactcaactacgctgcgggtccccgaggcatcatcgacctgtcccaagtgccacacctgcctgtgctcgtgcccccgacaccaggcaccccagccaccgccatggaccgccttgcctacctccccaccgcgccccagcccttcagcagccgccacagcagctccccactctccccaggaggtccaacacacttgacaaaaccaaccaccacgtcctcgtccgagcgggagcgagaccgggatcgagagcgggaccgggatcgggagcgggaaaagtccatcctcacgtccaccacgacggtggagcacgcacccatctggagacctggtacagagcagagcagcggcagcagcggcagcagcggcgggggtgggggcagcagcagccgccccgcctcccactcccatgcccaccagcactcgcccatctcccctcggacccaggatgccctccagcagagacccagtgtgcttcacaacacaggcatgaagggtatcatcaccgctgtggagcccagcacgcccacggtcctgaggtccacctccacctcctcacccgttcgcccggctgccacattcccacctgccacccactgcccactgggcggcaccctcgatggggtctaccctaccctcatggagcccgtcttgctgcccaaggaggccccccgggtcgcccggccagagcggccccgagcagacaccggccatgccttcctcgccaagcccccagcccgctccgggctggagcccgcctcctcccccagcaagggctcggagccccggcccctagtgcctcctgtctctggccacgccaccatcgcccgcacccctgcgaagaacctcgcacctcaccacgccagcccggacccgccggcgccacctgcctcggcctcggacccgcaccgggaaaagactcaaagtaaacccttttccatccaggaactggaactccgttctctgggtaagaccaccctgacagcggccaccttcatagacgcgattatcatgcgtcaaattgctcacgataaaggggcgcgagaaggaggtgcgctggccaacggctcccctcgcgatggttaccacggcagcagctacagccccgaaggggtggagcccgtcagccctgtgagctcacccagtctgacccacgacaaggggctccccaagcacctggaagagctcgacaagagccacctggagggggagctgcggcccaagcagccaggccccgtgaagcttggcggggaggccgcccacctcccacacctgcggccgctgcctgagagccagccctcgtccagcccgctgctccagaccgccccaggggtcaaaggtcaccagcgggtggtcaccctggcccagcacatcagtgaggtcatcacacaggactacacccggcaccacccacagcagctcagcgcacccctgcccgcccccctctactccttccctggggccagctgccccgtcctggacctccgccgcccacccagtgacctctacctcccgcccccggaccatggtgccccggcccgtggctccccccacagcgaagggggcaagaggtctccagagccaaacaagacgtcggtcttgggtggtggtgaggacggtattgaacctgtgtccccaccggagggcatgacggagccagggcactcccggagtgctgtgtacccgctgctgtaccgggatggggaacagacggagcccagcaggatgggctccaagtctccaggcaacaccagccagccgccagccttcttcagcaagctgaccgagagcaactccgccatggtcaagtccaagaagcaagagatcaacaagaagctgaacacccacaaccggaatgagcctgaatacaatatcagccagcctgggacggagatcttcaatatgcccgccatcaccggaacaggccttatgacctatagaagccaggcggtgcaggaacatgccagcaccaacatggggctggaggccataattagaaaggcactcatgggtaaatatgaccagtgggaagagtccccgccgctcagcgccaatgcttttaaccctctgaatgccagtgccagcctgcccgctgctatgcccataaccgctgctgacggacggagtgaccacacactcacctcgccaggtggcggcgggaaggccaaggtctctggcagacccagcagccgaaaagccaagtccccggccccgggcctggcatctggggaccggccaccctctgtctcctcagtgcactcggagggagactgcaaccgccggacgccgctcaccaaccgcgtgtgggaggacaggccctcgtccgcaggttccacgccattcccctacaaccccctgatcatgcggctgcaggcgggtgtcatggcttccccacccccaccgggcctccccgcgggcagcgggcccctcgctggcccccaccacgcctgggacgaggagcccaagccactgctctgctcgcagtacgagacactctccgacagcgagtgactcagaacagggcgggggggggcgggcggtgtcaggtcccagcgagccacaggaacggccctgcaggagcagggcggctgccgactcccccaaccaaggaaggagcccctgagtccgcctgcgcctccatccatctgtccgtccagagccggcatccttgcctgtctaaagccttaactaagactcccgccccgggctggccctgtgcagaccttactcaggggatgtttacctggtgctcgggaagggaggggaaggggccggggagggggcacggcaggcgtgtggcagccacacgcaggcggccagggcggccagggacccaaagcaggatgaccacgcacctccacgccactgcctcccccgaatgcatttggaaccaaagtctaaactgagctcgcagcccccgcgccctccctccgcctcccatcccgcttagcgctctggacagatggacgcaggccctgtccagcccccagtgcgctcgttccggtccccacagactgccccagccaacgagattgctggaaaccaagtcaggccaggtgggcggacaaaagggccaggtgcggcctggggggaacggatgctccgaggactggactgtttttttcacacatcgttgccgcagcggtgggaaggaaaggcagatgtaaatgatgtgttggtttacagggtatatttttgataccttcaatgaattaattcagatgttttacgcaaggaaggacttacccagtattactgctgctgtgcttttgatctctgcttaccgttcaagaggcgtgtgcaggccgacagtcggtgaccccatcactcgcaggaccaagggggcggggactgctggctcacgccccgctgtgtcctccctccctcccttccttgggcagaatgaattcgatgcgtattctgtggccgccatctgcgcagggtggtggtattctgtcatttacacacgtcgttctaattaaaaagcgaattatactcca

SEQ ID NO: 329099 - DNA, 7374 bp, Homo sapiens
  misc_feature (2538)..(2538): n is a, c, g, or t
gagtctttgaggacacagcctcgctggaggcagtttctggtgccagtgacggggtggcccgtgagctgatgacgaggactggcttttaatccttggtggtgattaagagaaagcttattgcggcctgggagcagctccccgccgacccccaccaccatgtcgggatccacacagcctgtggcacagacgtggagggccactgagccccgctacccgccccacagcctttcctacccagtgcagatcgcccggacgcacacggacgtcgggctcctggagtaccagcaccactcccgcgactatgcctcccacctgtcgcccggctccatcatccagccccagcggcggaggccctccctgctgtctgagttccagcccgggaatgaacggtcccaggagctccacctgcggccagagtcccactcatacctgcccgagctggggaagtcagagatggagttcattgaaagcaagcgccctcggctagagctgctgcctgaccccctgctgcgaccgtcacccctgctggccacgggccagcctgcgggatctgaagacctcaccaaggaccgtagcctgacgggcaagctggaaccggtgtctccccccagccccccgcacactgaccctgagctggagctggtgccgccacggctgtccaaggaggagctgatccagaacatggaccgcgtggaccgagagatcaccatggtagagcagcagatctctaagctgaagaagaagcagcaacagctggaggaggaggctgccaagccgcccgagcctgagaagcccgtgtcaccgccgcccatcgagtcgaagcaccgcagcctggtgcagatcatctacgacgagaaccggaagaaggctgaagctgcacatcggattctggaaggcctggggccccaggtggagctgccgctgtacaaccagccctccgacacccggcagtatcatgagaacatcaaaataaaccaggcgatgcggaagaagctaatcttgtacttcaagaggaggaatcacgctcggaaacaatgggagcagaagttctgccagcgctatgaccagctcatggaggcctgggagaagaaggtggagcgcatcgagaacaacccccggcggcgggccaaggagagcaaggtgcgcgagtactacgagaagcagttccctgagatccgcaagcagcgcgagctgcaggagcgcatgcagagcagggtgggccagcggggcagtgggctgtccatgtcggccgcccgcagcgagcacgaggtgtcagagatcatcgatggcctctcagagcaggagaacctggagaagcagatgcgccagctggccgtgatcccgcccatgctgtacgacgctgaccagcagcgcatcaagttcatcaacatgaacgggcttatggccgaccccatgaaggtgtacaaagaccgccaggtcatgaacatgtggagtgagcaggagaaggagaccttccgggagaagttcatgcagcatcccaagaactttggcctgatcgcatcattcctggagaggaagacagtggctgagtgcgtcctctattactacctgactaagaagaatgagaactataagagcctggtgagacggagctatcggcgccgcggcaagagccagcagcaacaacagcagcagcagcagcagcagcagcagcagcagcagcagcccatgccccgcagcagccaggaggagaaagatgagaaggagaaggaaaaggaggcggagaaggaggaggagaagccggaggtggagaacgacaaggaagacctcctcaaggagaagacagacgacacctcaggggaggacaacgacgagaaggaggctgtggcctccaaaggccgcaaaactgccaacagccagggaagacgcaaaggccgcatcacccgctcaatggctaatgaggccaacagcgaggaggccatcaccccccagcagagcgccgagctggcctccatggagctgaatgagagttctcgctggacagaagaagaaatggaaacagccaagaaaggtctcctggaacacggccgcaactggtcggccatcgcccggatggtgggctccaagactgtgtcgcagtgtaagaacttctacttcaactacaagaagaggcagaacctcgatgagatcttgcagcagcacaagctgaagatggagaaggagaggaacgcgcggaggaagaagaagaaagcgccggcggcggccagcgaggaggctgcattcccgcccgtggtggaggatgaggagatggaggcgtcgggcgtgagcggaaatgaggaggagatggtggaggaggctgaagccttacatgcctctgggaatgaggtgcccagaggggaatgcagtggcccagccactgtcaacaacagctcagacaccgagagcatcccctctcctcacactgaggccgccaaggacacagggcagaatgggcccaagcccccagccaccctgggcgccgacgggccacccccagggccacccaccccaccaccggaggacatcccgggcccccantgagcccaccccggcctctgaagccaccggagcccctacgcccccaccagcacccccatcgccctctgcacctcctcctgtggtccccaaggaggagaaggaggaggagaccgcagcagcgcccccagtggaggagggggaggagcagaagccccccgcggctgaggagctggcagtggacacagggaaggccgaggagcccgtcaagagcgagtgcacggaggaagccgaggaggggccggccaagggcaaggacgcggaggccgctgaggccacggccgagggggcgctcaaggcagagaagaaggagggcgggagcggcagggccaccactgccaagagctcgggcgccccccaggacagcgactccagtgctacctgcagtgcagacgaggtggatgaggccgagggcggcgacaagaaccggctgctgtccccaaggcccagcctcctcaccccgactggcgacccccgggccaatgcctcaccccagaagccactggacctgaagctgaagccggcccatgagggcctggtggccacggtgaaggaggcgggccgctccatccatgagatcccgcgcgaggagctgcggcacacgcccgagctgcccctggccccgcggccgctcaaggagggctccatcacgcagggcaccccgctcaagtacgacaccggcgcgtccaccactggctccaaaaagcacgacgtacgctccctcatcggcagccccggccggacgttcccacccgtgcacccgctggatgtgatggccgacgcccgggcactggaacgtgcctgctacgaggagagcctgaagagccggccagggaccgccagcagctcggggggctccattgcgcgcggcgccccggtcattgtgcctgagctgggtaagccgcggcagagccccctgacctatgaggaccacggggcaccctttgccggccacctcccacgaggttcgcccgtgaccacgcgggagcccacgccgcgcctgcaggagggcagcctttcgtccagcaaggcatcccaggaccgaaagctgacgtcgacgcctcgtgagatcgccaagtccccgcacagcaccgtgcccgagcaccacccacaccccatctcgccctatgagcacctgcttcggggcgtgagtggcgtggacctgtatcgcagccacatccccctggccttcgaccccacctccataccccgcggcatccctctggacgcagccgctgcctactacctgccccgacacctggcccccaaccccacctacccgcacctgtacccaccctacctcatccgcggctaccccgacacggcggcgctggagaaccggcagaccatcatcaatgactacatcacctcgcagcagatgcaccacaacacggccaccgccatggcccagcgagctgatatgctgaggggcctctcgccccgcgagtcctcgctggcactcaactacgctgcgggtccccgaggcatcatcgacctgtcccaagtgccacacctgcctgtgctcgtgcccccgacaccaggcaccccagccaccgccatggaccgccttgcctacctccccaccgcgccccagcccttcagcagccgccacagcagctccccactctccccaggaggtccaacacacttgacaaaaccaaccaccacgtcctcgtccgagcgggagcgagaccgggatcgagagcgggaccgggatcgggagcgggaaaagtccatcctcacgtccaccacgacggtggagcacgcacccatctggagacctggtacagagcagagcagcggcagcagcggcagcagcggcgggggtgggggcagcagcagccgccccgcctcccactcccatgcccaccagcactcgcccatctcccctcggacccaggatgccctccagcagagacccagtgtgcttcacaacacaggcatgaagggtatcatcaccgctgtggagcccagcacgcccacggtcctgaggtccacctccacctcctcacccgttcgcccggctgccacattcccacctgccacccactgcccactgggcggcaccctcgatggggtctaccctaccctcatggagcccgtcttgctgcccaaggaggccccccgggtcgcccggccagagcggccccgagcagacaccggccatgccttcctcgccaagcccccagcccgctccgggctggagcccgcctcctcccccagcaagggctcggagccccggcccctagtgcctcctgtctctggccacgccaccatcgcccgcacccctgcgaagaacctcgcacctcaccacgccagcccggacccgccggcgccacctgcctcggcctcggacccgcaccgggaaaagactcaaagtaaacccttttccatccaggaactggaactccgttctctgggttaccacggcagcagctacagccccgaaggggtggagcccgtcagccctgtgagctcacccagtctgacccacgacaaggggctccccaagcacctggaagagctcgacaagagccacctggagggggagctgcggcccaagcagccaggccccgtgaagcttggcggggaggccgcccacctcccacacctgcggccgctgcctgagagccagccctcgtccagcccgctgctccagaccgccccaggggtcaaaggtcaccagcgggtggtcaccctggcccagcacatcagtgaggtcatcacacaggactacacccggcaccacccacagcagctcagcgcacccctgcccgcccccctctactccttccctggggccagctgccccgtcctggacctccgccgcccacccagtgacctctacctcccgcccccggaccatggtgccccggcccgtggctccccccacagcgaagggggcaagaggtctccagagccaaacaagacgtcggtcttgggtggtggtgaggacggtattgaacctgtgtccccaccggagggcatgacggagccagggcactcccggagtgctgtgtacccgctgctgtaccgggatggggaacagacggagcccagcaggatgggctccaagtctccaggcaacaccagccagccgccagccttcttcagcaagctgaccgagagcaactccgccatggtcaagtccaagaagcaagagatcaacaagaagctgaacacccacaaccggaatgagcctgaatacaatatcagccagcctgggacggagatcttcaatatgcccgccatcaccggaacaggccttatgacctatagaagccaggcggtgcaggaacatgccagcaccaacatggggctggaggccataattagaaaggcactcatgggtaaatatgaccagtgggaagagtccccgccgctcagcgccaatgcttttaaccctctgaatgccagtgccagcctgcccgctgctatgcccataaccgctgctgacggacggagtgaccacacactcacctcgccaggtggcggcgggaaggccaaggtctctggcagacccagcagccgaaaagccaagtccccggccccgggcctggcatctggggaccggccaccctctgtctcctcagtgcactcggagggagactgcaaccgccggacgccgctcaccaaccgcgtgtgggaggacaggccctcgtccgcaggttccacgccattcccctacaaccccctgatcatgcggctgcaggcgggtgtcatggcttccccacccccaccgggcctccccgcgggcagcgggcccctcgctggcccccaccacgcctgggacgaggagcccaagccactgctctgctcgcagtacgagacactctccgacagcgagtgactcagaacagggcgggggggggcgggcggtgtcaggtcccagcgagccacaggaacggccctgcaggagcagggcggctgccgactcccccaaccaaggaaggagcccctgagtccgcctgcgcctccatccatctgtccgtccagagccggcatccttgcctgtctaaagccttaactaagactcccgccccgggctggccctgtgcagaccttactcaggggatgtttacctggtgctcgggaagggaggggaaggggccggggagggggcacggcaggcgtgtggcagccacacgcaggcggccagggcggccagggacccaaagcaggatgaccacgcacctccacgccactgcctcccccgaatgcatttggaaccaaagtctaaactgagctcgcagcccccgcgccctccctccgcctcccatcccgcttagcgctctggacagatggacgcaggccctgtccagcccccagtgcgctcgttccggtccccacagactgccccagccaacgagattgctggaaaccaagtcaggccaggtgggcggacaaaagggccaggtgcggcctggggggaacggatgctccgaggactggactgtttttttcacacatcgttgccgcagcggtgggaaggaaaggcagatgtaaatgatgtgttggtttacagggtatatttttgataccttcaatgaattaattcagatgttttacgcaaggaaggacttacccagtattactgctgctgtgcttttgatctctgcttaccgttcaagaggcgtgtgcaggccgacagtcggtgaccccatcactcgcaggaccaagggggcggggactgctggctcacgccccgctgtgtcctccctccctcccttccttgggcagaatgaattcgatgcgtattctgtggccgccatctgcgcagggtggtggtattctgtcatttacacacgtcgttctaattaaaaagcgaattatactcca

SEQ ID NO: 329100 - DNA, 8670 bp, Homo sapiens
  misc_feature (2538)..(2538): n is a, c, g, or t
gagtctttgaggacacagcctcgctggaggcagtttctggtgccagtgacggggtggcccgtgagctgatgacgaggactggcttttaatccttggtggtgattaagagaaagcttattgcggcctgggagcagctccccgccgacccccaccaccatgtcgggatccacacagcctgtggcacagacgtggagggccactgagccccgctacccgccccacagcctttcctacccagtgcagatcgcccggacgcacacggacgtcgggctcctggagtaccagcaccactcccgcgactatgcctcccacctgtcgcccggctccatcatccagccccagcggcggaggccctccctgctgtctgagttccagcccgggaatgaacggtcccaggagctccacctgcggccagagtcccactcatacctgcccgagctggggaagtcagagatggagttcattgaaagcaagcgccctcggctagagctgctgcctgaccccctgctgcgaccgtcacccctgctggccacgggccagcctgcgggatctgaagacctcaccaaggaccgtagcctgacgggcaagctggaaccggtgtctccccccagccccccgcacactgaccctgagctggagctggtgccgccacggctgtccaaggaggagctgatccagaacatggaccgcgtggaccgagagatcaccatggtagagcagcagatctctaagctgaagaagaagcagcaacagctggaggaggaggctgccaagccgcccgagcctgagaagcccgtgtcaccgccgcccatcgagtcgaagcaccgcagcctggtgcagatcatctacgacgagaaccggaagaaggctgaagctgcacatcggattctggaaggcctggggccccaggtggagctgccgctgtacaaccagccctccgacacccggcagtatcatgagaacatcaaaataaaccaggcgatgcggaagaagctaatcttgtacttcaagaggaggaatcacgctcggaaacaatgggagcagaagttctgccagcgctatgaccagctcatggaggcctgggagaagaaggtggagcgcatcgagaacaacccccggcggcgggccaaggagagcaaggtgcgcgagtactacgagaagcagttccctgagatccgcaagcagcgcgagctgcaggagcgcatgcagagcagggtgggccagcggggcagtgggctgtccatgtcggccgcccgcagcgagcacgaggtgtcagagatcatcgatggcctctcagagcaggagaacctggagaagcagatgcgccagctggccgtgatcccgcccatgctgtacgacgctgaccagcagcgcatcaagttcatcaacatgaacgggcttatggccgaccccatgaaggtgtacaaagaccgccaggtcatgaacatgtggagtgagcaggagaaggagaccttccgggagaagttcatgcagcatcccaagaactttggcctgatcgcatcattcctggagaggaagacagtggctgagtgcgtcctctattactacctgactaagaagaatgagaactataagagcctggtgagacggagctatcggcgccgcggcaagagccagcagcaacaacagcagcagcagcagcagcagcagcagcagcagcagcagcccatgccccgcagcagccaggaggagaaagatgagaaggagaaggaaaaggaggcggagaaggaggaggagaagccggaggtggagaacgacaaggaagacctcctcaaggagaagacagacgacacctcaggggaggacaacgacgagaaggaggctgtggcctccaaaggccgcaaaactgccaacagccagggaagacgcaaaggccgcatcacccgctcaatggctaatgaggccaacagcgaggaggccatcaccccccagcagagcgccgagctggcctccatggagctgaatgagagttctcgctggacagaagaagaaatggaaacagccaagaaaggtctcctggaacacggccgcaactggtcggccatcgcccggatggtgggctccaagactgtgtcgcagtgtaagaacttctacttcaactacaagaagaggcagaacctcgatgagatcttgcagcagcacaagctgaagatggagaaggagaggaacgcgcggaggaagaagaagaaagcgccggcggcggccagcgaggaggctgcattcccgcccgtggtggaggatgaggagatggaggcgtcgggcgtgagcggaaatgaggaggagatggtggaggaggctgaagccttacatgcctctgggaatgaggtgcccagaggggaatgcagtggcccagccactgtcaacaacagctcagacaccgagagcatcccctctcctcacactgaggccgccaaggacacagggcagaatgggcccaagcccccagccaccctgggcgccgacgggccacccccagggccacccaccccaccaccggaggacatcccgggcccccantgagcccaccccggcctctgaagccaccggagcccctacgcccccaccagcacccccatcgccctctgcacctcctcctgtggtccccaaggaggagaaggaggaggagaccgcagcagcgcccccagtggaggagggggaggagcagaagccccccgcggctgaggagctggcagtggacacagggaaggccgaggagcccgtcaagagcgagtgcacggaggaagccgaggaggggccggccaagggcaaggacgcggaggccgctgaggccacggccgagggggcgctcaaggcagagaagaaggagggcgggagcggcagggccaccactgccaagagctcgggcgccccccaggacagcgactccagtgctacctgcagtgcagacgaggtggatgaggccgagggcggcgacaagaaccggctgctgtccccaaggcccagcctcctcaccccgactggcgacccccgggccaatgcctcaccccagaagccactggacctgaagcagctgaagcagcgagcggctgccatcccccccatccaggtcaccaaagtccatgagcccccccgggaggacgcagctcccaccaagccagctcccccagccccaccgccaccgcaaaacctgcagccggagagcgacgcccctcagcagcctggcagcagcccccggggcaagagcaggagcccggcaccccccgccgacaaggaggcagagaagcctgtgttcttcccagccttcgcagccgaggcccagaagctgcctggggaccccccttgctggacttccggcctgcccttccccgtgcccccccgtgaggtgatcaaggcctccccgcatgccccggacccctcagccttctcctacgctccacctggtcacccactgcccctgggcctccatgacactgcccggcccgtcctgccgcgcccacccaccatctccaacccgcctcccctcatctcctctgccaagcaccccagcgtcctcgagaggcaaataggtgccatctcccaaggaatgtcggtccagctccacgtcccgtactcagagcatgccaaggccccggtgggccctgtcaccatggggctgcccctgcccatggaccccaaaaagctggcacccttcagcggagtgaagcaggagcagctgtccccacggggccaggctgggccaccggagagcctgggggtgcccacagcccaggaggcgtccgtgctgagagggacagctctgggctcagttccgggcggaagcatcaccaaaggcattcccagcacacgggtgccctcggacagcgccatcacataccgcggctccatcacccacggcacgccagctgacgtcctgtacaagggcaccatcaccaggatcatcggcgaggacagcccgagtcgcttggaccgcggccgggaggacagcctgcccaagggccacgtcatctacgaaggcaagaagggccacgtcttgtcctatgagggtggcatgtctgtgacccagtgctccaaggaggacggcagaagcagctcaggacccccccatgagacggccgcccccaagcgcacctatgacatgatggagggccgcgtgggcagagccatctcctcagccagcatcgaaggtctcatgggccgtgccatcccgccggagcgacacagcccccaccacctcaaagagcagcaccacatccgcgggtccatcacacaagggatccctcggtcctacgtggaggcacaggaggactacctgcgtcgggaggccaagctcctaaagcgggagggcacgcctccgcccccaccgccctcacgggacctgaccgaggcctacaagacgcaggccctgggccccctgaagctgaagccggcccatgagggcctggtggccacggtgaaggaggcgggccgctccatccatgagatcccgcgcgaggagctgcggcacacgcccgagctgcccctggccccgcggccgctcaaggagggctccatcacgcagggcaccccgctcaagtacgacaccggcgcgtccaccactggctccaaaaagcacgacgtacgctccctcatcggcagccccggccggacgttcccacccgtgcacccgctggatgtgatggccgacgcccgggcactggaacgtgcctgctacgaggagagcctgaagagccggccagggaccgccagcagctcggggggctccattgcgcgcggcgccccggtcattgtgcctgagctgggtaagccgcggcagagccccctgacctatgaggaccacggggcaccctttgccggccacctcccacgaggttcgcccgtgaccacgcgggagcccacgccgcgcctgcaggagggcagcctttcgtccagcaaggcatcccaggaccgaaagctgacgtcgacgcctcgtgagatcgccaagtccccgcacagcaccgtgcccgagcaccacccacaccccatctcgccctatgagcacctgcttcggggcgtgagtggcgtggacctgtatcgcagccacatccccctggccttcgaccccacctccataccccgcggcatccctctggacgcagccgctgcctactacctgccccgacacctggcccccaaccccacctacccgcacctgtacccaccctacctcatccgcggctaccccgacacggcggcgctggagaaccggcagaccatcatcaatgactacatcacctcgcagcagatgcaccacaacacggccaccgccatggcccagcgagctgatatgctgaggggcctctcgccccgcgagtcctcgctggcactcaactacgctgcgggtccccgaggcatcatcgacctgtcccaagtgccacacctgcctgtgctcgtgcccccgacaccaggcaccccagccaccgccatggaccgccttgcctacctccccaccgcgccccagcccttcagcagccgccacagcagctccccactctccccaggaggtccaacacacttgacaaaaccaaccaccacgtcctcgtccgagcgggagcgagaccgggatcgagagcgggaccgggatcgggagcgggaaaagtccatcctcacgtccaccacgacggtggagcacgcacccatctggagacctggtacagagcagagcagcggcagcagcggcagcagcggcgggggtgggggcagcagcagccgccccgcctcccactcccatgcccaccagcactcgcccatctcccctcggacccaggatgccctccagcagagacccagtgtgcttcacaacacaggcatgaagggtatcatcaccgctgtggagcccagcacgcccacggtcctgaggtccacctccacctcctcacccgttcgcccggctgccacattcccacctgccacccactgcccactgggcggcaccctcgatggggtctaccctaccctcatggagcccgtcttgctgcccaaggaggccccccgggtcgcccggccagagcggccccgagcagacaccggccatgccttcctcgccaagcccccagcccgctccgggctggagcccgcctcctcccccagcaagggctcggagccccggcccctagtgcctcctgtctctggccacgccaccatcgcccgcacccctgcgaagaacctcgcacctcaccacgccagcccggacccgccggcgccacctgcctcggcctcggacccgcaccgggaaaagactcaaagtaaacccttttccatccaggaactggaactccgttctctgggttaccacggcagcagctacagccccgaaggggtggagcccgtcagccctgtgagctcacccagtctgacccacgacaaggggctccccaagcacctggaagagctcgacaagagccacctggagggggagctgcggcccaagcagccaggccccgtgaagcttggcggggaggccgcccacctcccacacctgcggccgctgcctgagagccagccctcgtccagcccgctgctccagaccgccccaggggtcaaaggtcaccagcgggtggtcaccctggcccagcacatcagtgaggtcatcacacaggactacacccggcaccacccacagcagctcagcgcacccctgcccgcccccctctactccttccctggggccagctgccccgtcctggacctccgccgcccacccagtgacctctacctcccgcccccggaccatggtgccccggcccgtggctccccccacagcgaagggggcaagaggtctccagagccaaacaagacgtcggtcttgggtggtggtgaggacggtattgaacctgtgtccccaccggagggcatgacggagccagggcactcccggagtgctgtgtacccgctgctgtaccgggatggggaacagacggagcccagcaggatgggctccaagtctccaggcaacaccagccagccgccagccttcttcagcaagctgaccgagagcaactccgccatggtcaagtccaagaagcaagagatcaacaagaagctgaacacccacaaccggaatgagcctgaatacaatatcagccagcctgggacggagatcttcaatatgcccgccatcaccggaacaggccttatgacctatagaagccaggcggtgcaggaacatgccagcaccaacatggggctggaggccataattagaaaggcactcatgggtaaatatgaccagtgggaagagtccccgccgctcagcgccaatgcttttaaccctctgaatgccagtgccagcctgcccgctgctatgcccataaccgctgctgacggacggagtgaccacacactcacctcgccaggtggcggcgggaaggccaaggtctctggcagacccagcagccgaaaagccaagtccccggccccgggcctggcatctggggaccggccaccctctgtctcctcagtgcactcggagggagactgcaaccgccggacgccgctcaccaaccgcgtgtgggaggacaggccctcgtccgcaggttccacgccattcccctacaaccccctgatcatgcggctgcaggcgggtgtcatggcttccccacccccaccgggcctccccgcgggcagcgggcccctcgctggcccccaccacgcctgggacgaggagcccaagccactgctctgctcgcagtacgagacactctccgacagcgagtgactcagaacagggcgggggggggcgggcggtgtcaggtcccagcgagccacaggaacggccctgcaggagcagggcggctgccgactcccccaaccaaggaaggagcccctgagtccgcctgcgcctccatccatctgtccgtccagagccggcatccttgcctgtctaaagccttaactaagactcccgccccgggctggccctgtgcagaccttactcaggggatgtttacctggtgctcgggaagggaggggaaggggccggggagggggcacggcaggcgtgtggcagccacacgcaggcggccagggcggccagggacccaaagcaggatgaccacgcacctccacgccactgcctcccccgaatgcatttggaaccaaagtctaaactgagctcgcagcccccgcgccctccctccgcctcccatcccgcttagcgctctggacagatggacgcaggccctgtccagcccccagtgcgctcgttccggtccccacagactgccccagccaacgagattgctggaaaccaagtcaggccaggtgggcggacttttcacacatcgttgccgcagcggtgggaaggaaaggcagatgtaaatgatgtgttggtttacagggtatatttttgataccttcaatgaattaattcagatgttttacgcaaggaaggacttacccagtattactgctgctgtgcttttgatctctgcttaccgttcaagaggcgtgtgcaggccgacagtcggtgaccccatcactcgcaggaccaagggggcggggactgctggctcacgccccgctgtgtcctccctccctcccttccttgggcagaatgaattcgatgcgtattctgtggccgccatctgcgcagggtggtggtattctgtcatttacacacgtcgttctaattaaaaagcgaattatactcca

SEQ ID NO: 329101 - DNA, 3754 bp, Homo sapiens
tttgttagtttgtctgtttgcacttaaagttctaagcactttggaaagtttctaagcaacttctcacttccaagcaacaacttaaccaacactaacaacttactattattaattagtattttcttggctcatccccgcacagcaccgtgcccgagcaccacccacaccccatctcgccctatgagcacctgcttcggggcgtgagtggcgtggacctgtatcgcagccacatccccctggccttcgaccccacctccataccccgcggcatccctctggacgcagccgctgcctactacctgccccgacacctggcccccaaccccacctacccgcacctgtacccaccctacctcatccgcggctaccccgacacggcggcgctggagaaccggcagaccatcatcaatgactacatcacctcgcagcagatgcaccacaacacggccaccgccatggcccagcgagctgatatgctgaggggcctctcgccccgcgagtcctcgctggcactcaactacgctgcgggtccccgaggcatcatcgacctgtcccaagtgccacacctgcctgtgctcgtgcccccgacaccaggcaccccagccaccgccatggaccgccttgcctacctccccaccgcgccccagcccttcagcagccgccacagcagctccccactctccccaggaggtccaacacacttgacaaaaccaaccaccacgtcctcgtccgagcgggagcgagaccgggatcgagagcgggaccgggatcgggagcgggaaaagtccatcctcacgtccaccacgacggtggagcacgcacccatctggagacctggtacagagcagagcagcggcagcagcggcagcagcggcgggggtgggggcagcagcagccgccccgcctcccactcccatgcccaccagcactcgcccatctcccctcggacccaggatgccctccagcagagacccagtgtgcttcacaacacaggcatgaagggtatcatcaccgctgtggagcccagcacgcccacggtcctgaggtccacctccacctcctcacccgttcgcccggctgccacattcccacctgccacccactgcccactgggcggcaccctcgatggggtctaccctaccctcatggagcccgtcttgctgcccaaggaggccccccgggtcgcccggccagagcggccccgagcagacaccggccatgccttcctcgccaagcccccagcccgctccgggctggagcccgcctcctcccccagcaagggctcggagccccggcccctagtgcctcctgtctctggccacgccaccatcgcccgcacccctgcgaagaacctcgcacctcaccacgccagcccggacccgccggcgccacctgcctcggcctcggacccgcaccgggaaaagactcaaagtaaacccttttccatccaggaactggaactccgttctctgggttaccacggcagcagctacagccccgaaggggtggagcccgtcagccctgtgagctcacccagtctgacccacgacaaggggctccccaagcacctggaagagctcgacaagagccacctggagggggagctgcggcccaagcagccaggccccgtgaagcttggcggggaggccgcccacctcccacacctgcggccgctgcctgagagccagccctcgtccagcccgctgctccagaccgccccaggggtcaaaggtcaccagcgggtggtcaccctggcccagcacatcagtgaggtcatcacacaggactacacccggcaccacccacagcagctcagcgcacccctgcccgcccccctctactccttccctggggccagctgccccgtcctggacctccgccgcccacccagtgacctctacctcccgcccccggaccatggtgccccggcccgtggctccccccacagcgaagggggcaagaggtctccagagccaaacaagacgtcggtcttgggtggtggtgaggacggtattgaacctgtgtccccaccggagggcatgacggagccagggcactcccggagtgctgtgtacccgctgctgtaccgggatggggaacagacggagcccagcaggatgggctccaagtctccaggcaacaccagccagccgccagccttcttcagcaagctgaccgagagcaactccgccatggtcaagtccaagaagcaagagatcaacaagaagctgaacacccacaaccggaatgagcctgaatacaatatcagccagcctgggacggagatcttcaatatgcccgccatcaccggaacaggccttatgacctatagaagccaggcggtgcaggaacatgccagcaccaacatggggctggaggccataattagaaaggcactcatgggtggcggcgggaaggccaaggtctctggcagacccagcagccgaaaagccaagtccccggccccgggcctggcatctggggaccggccaccctctgtctcctcagtgcactcggagggagactgcaaccgccggacgccgctcaccaaccgcgtgtgggaggacaggccctcgtccgcaggttccacgccattcccctacaaccccctgatcatgcggctgcaggcgggtgtcatggcttccccacccccaccgggcctccccgcgggcagcgggcccctcgctggcccccaccacgcctgggacgaggagcccaagccactgctctgctcgcagtacgagacactctccgacagcgagtgactcagaacagggcgggggggggcgggcggtgtcaggtcccagcgagccacaggaacggccctgcaggagcagggcggctgccgactcccccaaccaaggaaggagcccctgagtccgcctgcgcctccatccatctgtccgtccagagccggcatccttgcctgtctaaagccttaactaagactcccgccccgggctggccctgtgcagaccttactcaggggatgtttacctggtgctcgggaagggaggggaaggggccggggagggggcacggcaggcgtgtggcagccacacgcaggcggccagggcggccagggacccaaagcaggatgaccacgcacctccacgccactgcctcccccgaatgcatttggaaccaaagtctaaactgagctcgcagcccccgcgccctccctccgcctcccatcccgcttagcgctctggacagatggacgcaggccctgtccagcccccagtgcgctcgttccggtccccacagactgccccagccaacgagattgctggaaaccaagtcaggccaggtgggcggacaaaagggccaggtgcggcctggggggaacggatgctccgaggactggactgtttttttcacacatcgttgccgcagcggtgggaaggaaaggcagatgtaaatgatgtgttggtttacagggtatatttttgataccttcaatgaattaattcagatgttttacgcaaggaaggacttacccagtattactgctgctgtgcttttgatctctgcttaccgttcaagaggcgtgtgcaggccgacagtcggtgaccccatcactcgcaggaccaagggggcggggactgctggctcacgccccgctgtgtcctccctccctcccttccttgggcagaatgaattcgatgcgtattctgtggccgccatctgcgcagggtggtggtattctgtcatttacacacgtcgttctaattaaaaagcgaattatactcca

SEQ ID NO: 329102 - DNA, 7507 bp, Homo sapiens
  misc_feature (2538)..(2538): n is a, c, g, or t
gagtctttgaggacacagcctcgctggaggcagtttctggtgccagtgacggggtggcccgtgagctgatgacgaggactggcttttaatccttggtggtgattaagagaaagcttattgcggcctgggagcagctccccgccgacccccaccaccatgtcgggatccacacagcctgtggcacagacgtggagggccactgagccccgctacccgccccacagcctttcctacccagtgcagatcgcccggacgcacacggacgtcgggctcctggagtaccagcaccactcccgcgactatgcctcccacctgtcgcccggctccatcatccagccccagcggcggaggccctccctgctgtctgagttccagcccgggaatgaacggtcccaggagctccacctgcggccagagtcccactcatacctgcccgagctggggaagtcagagatggagttcattgaaagcaagcgccctcggctagagctgctgcctgaccccctgctgcgaccgtcacccctgctggccacgggccagcctgcgggatctgaagacctcaccaaggaccgtagcctgacgggcaagctggaaccggtgtctccccccagccccccgcacactgaccctgagctggagctggtgccgccacggctgtccaaggaggagctgatccagaacatggaccgcgtggaccgagagatcaccatggtagagcagcagatctctaagctgaagaagaagcagcaacagctggaggaggaggctgccaagccgcccgagcctgagaagcccgtgtcaccgccgcccatcgagtcgaagcaccgcagcctggtgcagatcatctacgacgagaaccggaagaaggctgaagctgcacatcggattctggaaggcctggggccccaggtggagctgccgctgtacaaccagccctccgacacccggcagtatcatgagaacatcaaaataaaccaggcgatgcggaagaagctaatcttgtacttcaagaggaggaatcacgctcggaaacaatgggagcagaagttctgccagcgctatgaccagctcatggaggcctgggagaagaaggtggagcgcatcgagaacaacccccggcggcgggccaaggagagcaaggtgcgcgagtactacgagaagcagttccctgagatccgcaagcagcgcgagctgcaggagcgcatgcagagcagggtgggccagcggggcagtgggctgtccatgtcggccgcccgcagcgagcacgaggtgtcagagatcatcgatggcctctcagagcaggagaacctggagaagcagatgcgccagctggccgtgatcccgcccatgctgtacgacgctgaccagcagcgcatcaagttcatcaacatgaacgggcttatggccgaccccatgaaggtgtacaaagaccgccaggtcatgaacatgtggagtgagcaggagaaggagaccttccgggagaagttcatgcagcatcccaagaactttggcctgatcgcatcattcctggagaggaagacagtggctgagtgcgtcctctattactacctgactaagaagaatgagaactataagagcctggtgagacggagctatcggcgccgcggcaagagccagcagcaacaacagcagcagcagcagcagcagcagcagcagcagcagcagcccatgccccgcagcagccaggaggagaaagatgagaaggagaaggaaaaggaggcggagaaggaggaggagaagccggaggtggagaacgacaaggaagacctcctcaaggagaagacagacgacacctcaggggaggacaacgacgagaaggaggctgtggcctccaaaggccgcaaaactgccaacagccagggaagacgcaaaggccgcatcacccgctcaatggctaatgaggccaacagcgaggaggccatcaccccccagcagagcgccgagctggcctccatggagctgaatgagagttctcgctggacagaagaagaaatggaaacagccaagaaaggtctcctggaacacggccgcaactggtcggccatcgcccggatggtgggctccaagactgtgtcgcagtgtaagaacttctacttcaactacaagaagaggcagaacctcgatgagatcttgcagcagcacaagctgaagatggagaaggagaggaacgcgcggaggaagaagaagaaagcgccggcggcggccagcgaggaggctgcattcccgcccgtggtggaggatgaggagatggaggcgtcgggcgtgagcggaaatgaggaggagatggtggaggaggctgaagccttacatgcctctgggaatgaggtgcccagaggggaatgcagtggcccagccactgtcaacaacagctcagacaccgagagcatcccctctcctcacactgaggccgccaaggacacagggcagaatgggcccaagcccccagccaccctgggcgccgacgggccacccccagggccacccaccccaccaccggaggacatcccgggcccccantgagcccaccccggcctctgaagccaccggagcccctacgcccccaccagcacccccatcgccctctgcacctcctcctgtggtccccaaggaggagaaggaggaggagaccgcagcagcgcccccagtggaggagggggaggagcagaagccccccgcggctgaggagctggcagtggacacagggaaggccgaggagcccgtcaagagcgagtgcacggaggaagccgaggaggggccggccaagggcaaggacgcggaggccgctgaggccacggccgagggggcgctcaaggcagagaagaaggagggcgggagcggcagggccaccactgccaagagctcgggcgccccccaggacagcgactccagtgctacctgcagtgcagacgaggtggatgaggccgagggcggcgacaagaaccggctgctgtccccaaggcccagcctcctcaccccgactggcgacccccgggccaatgcctcaccccagaagccactggacctgaagcagctgaagcagcgagcggctgccatcccccccatccaggtcaccaaagtccatgagcccccccgggaggacgcagctcccaccaagccagctcccccagccccaccgccaccgcaaaacctgcagccggagagcgacgcccctcagcagcctggcagcagcccccggggcaagagcaggagcccggcaccccccgccgacaaggaggcagagaagcctgtgttcttcccagccttcgcagccgaggcccagaagctgcctggggaccccccttgctggacttccggcctgcccttccccgtgcccccccgtgaggtgatcaaggcctccccgcatgccccggacccctcagccttctcctacgctccacctggtcacccactgcccctgggcctccatgacactgcccggcccgtcctgccgcgcccacccaccatctccaacccgcctcccctcatctcctctgccaagcaccccagcgtcctcgagaggcaaataggtgccatctcccaaggaatgtcggtccagctccacgtcccgtactcagagcatgccaaggccccggtgggccctgtcaccatggggctgcccctgcccatggaccccaaaaagctggcacccttcagcggagtgaagcaggagcagctgtccccacggggccaggctgggccaccggagagcctgggggtgcccacagcccaggaggcgtccgtgctgagagggacagctctgggctcagttccgggcggaagcatcaccaaaggcattcccagcacacgggtgccctcggacagcgccatcacataccgcggctccatcacccacggcacgccagctgacgtcctgtacaagggcaccatcaccaggatcatcggcgaggacagcccgagtcgcttggaccgcggccgggaggacagcctgcccaagggccacgtcatctacgaaggcaagaagggccacgtcttgtcctatgagggtggcatgtctgtgacccagtgctccaaggaggacggcagaagcagctcaggacccccccatgagacggccgcccccaagcgcacctatgacatgatggagggccgcgtgggcagagccatctcctcagccagcatcgaaggtctcatgggccgtgccatcccgccggagcgacacagcccccaccacctcaaagagcagcaccacatccgcgggtccatcacacaagggatccctcggtcctacgtggaggcacaggaggactacctgcgtcgggaggccaagctcctaaagcgggagggcacgcctccgcccccaccgccctcacgggacctgaccgaggcctacaagacgcaggccctgggccccctgaagctgaagccggcccatgagggcctggtggccacggtgaaggaggcgggccgctccatccatgagatcccgcgcgaggagctgcggcacacgcccgagctgcccctggccccgcggccgctcaaggagggctccatcacgcagggcaccccgctcaagtacgacaccggcgcgtccaccactggctccaaaaagcacgacgtacgctccctcatcggcagccccggccggacgttcccacccgtgcacccgctggatgtgatggccgacgcccgggcactggaacgtgcctgctacgaggagagcctgaagagccggccagggaccgccagcagctcggggggctccattgcgcgcggcgccccggtcattgtgcctgagctgggtaagccgcggcagagccccctgacctatgaggaccacggggcaccctttgccggccacctcccacgaggttcgcccgtgaccacgcgggagcccacgccgcgcctgcaggagggcagcctttcgtccagcaaggcatcccaggaccgaaagctgacgtcgacgcctcgtgagatcgccaagtccccgcacagcaccgtgcccgagcaccacccacaccccatctcgccctatgagcacctgcttcggggcgtgagtggcgtggacctgtatcgcagccacatccccctggccttcgaccccacctccataccccgcggcatccctctggacgcagccgctgcctactacctgccccgacacctggcccccaaccccacctacccgcacctgtacccaccctacctcatccgcggctaccccgacacggcggcgctggagaaccggcagaccatcatcaatgactacatcacctcgcagcagatgcaccacaacacggccaccgccatggcccagcgagctgatatgctgaggggcctctcgccccgcgagtcctcgctggcactcaactacgctgcgggtccccgaggcatcatcgacctgtcccaagtgccacacctgcctgtgctcgtgcccccgacaccaggcaccccagccaccgccatggaccgccttgcctacctccccaccgcgccccagcccttcagcagccgccacagcagctccccactctccccaggaggtccaacacacttgacaaaaccaaccaccacgtcctcgtccgagcgggagcgagaccgggatcgagagcgggaccgggatcgggagcgggaaaagtccatcctcacgtccaccacgacggtggagcacgcacccatctggagacctggtacagagcagagcagcggcagcagcggcagcagcggcgggggtgggggcagcagcagccgccccgcctcccactcccatgcccaccagcactcgcccatctcccctcggacccaggatgccctccagcagagacccagtgtgcttcacaacacaggcatgaagggtatcatcaccgctgtggagcccagcacgcccacggtcctgaggtccacctccacctcctcacccgttcgcccggctgccacattcccacctgccacccactgcccactgggcggcaccctcgatggggtctaccctaccctcatggagcccgtcttgctgcccaaggaggccccccgggtcgcccggccagagcggccccgagcagacaccggccatgccttcctcgccaagcccccagcccgctccgggctggagcccgcctcctcccccagcaagggctcggagccccggcccctagtgcctcctgtctctggccacgccaccatcgcccgcacccctgcgaagaacctcgcacctcaccacgccagcccggacccgccggcgccacctgcctcggcctcggacccgcaccgggaaaagactcaaagtaaacccttttccatccaggaactggaactccgttctctgggttaccacggcagcagctacagccccgaaggggtggagcccgtcagccctgtgagctcacccagtctgacccacgacaaggggctccccaagcacctggaagagctcgacaagagccacctggagggggagctgcggcccaagcagccaggccccgtgaagcttggcggggaggccgcccacctcccacacctgcggccgctgcctgagagccagccctcgtccagcccgctgctccagaccgccccaggggtcaaaggtcaccagcgggtggtcaccctggcccagcacatcagtgaggtcatcacacaggactacacccggcaccacccacagcagctcagcgcacccctgcccgcccccctctactccttccctggggccagctgccccgtcctggacctccgccgcccacccagtgacctctacctcccgcccccggaccatggtgccccggcccgtggctccccccacagcgaagggggcaagaggtctccagagccaaacaagacgtcggtcttgggtggtggtgaggacggtattgaacctgtgtccccaccggagggcatgacggagccagggcactcccggagtgctgtgtacccgctgctgtaccgggatggggaacagacggagcccagcaggatgggctccaagtctccaggcaacaccagccagccgccagccttcttcagcaagctgaccgagagcaactccgccatggtcaagtccaagaagcaagagatcaacaagaagctgaacacccacaaccggaatgagcctgaatacaatatcagccagcctgggacggagatcttcaatatgcccgccatcaccggaacaggccttatgacctatagaagccaggcggtgcaggaacatgccagcaccaacatggggctggaggccataattagaaaggcactcatgggtggcggcgggaaggccaaggtctctggcagacccagcagccgaaaagccaagtccccggccccgggcctggcatctggggaccggccaccctctgtctcctcagtgcactcggagggagactgcaaccgccggacgccgctcaccaaccgcgtgtgggaggacaggccctcgtccgcaggcaactccacggtggatgagattttacctgtgttattcaccaacccgttcccagtacctggaagaatgttggacacatagtaggagttcagt

SEQ ID NO: 329103 - DNA, 2453 bp, Homo sapiens
aggcacatgaatctagtatgtgcagctgatcaagaactggagacaatgggagccagcgaagccacgctgctgaacatgctcaacatctcccccttctcctttgggctggtcatccagcaggtgttcgacaatggcagctcgcccctgagttaactcaggggcgagctgcggcccaagcagccaggccccgtgaagcttggcggggaggccgcccacctcccacacctgcggccgctgcctgagagccagccctcgtccagcccgctgctccagaccgccccaggggtcaaaggtcaccagcgggtggtcaccctggcccagcacatcagtgaggtcatcacacaggactacacccggcaccacccacagcagctcagcgcacccctgcccgcccccctctactccttccctggggccagctgccccgtcctggacctccgccgcccacccagtgacctctacctcccgcccccggaccatggtgccccggcccgtggctccccccacagcgaagggggcaagaggtctccagagccaaacaagacgtcggtcttgggtggtggtgaggacggtattgaacctgtgtccccaccggagggcatgacggagccagggcactcccggagtgctgtgtacccgctgctgtaccgggatggggaacagacggagcccagcaggatgggctccaagtctccaggcaacaccagccagccgccagccttcttcagcaagctgaccgagagcaactccgccatggtcaagtccaagaagcaagagatcaacaagaagctgaacacccacaaccggaatgagcctgaatacaatatcagccagcctgggacggagatcttcaatatgcccgccatcaccggaacaggccttatgacctatagaagccaggcggtgcaggaacatgccagcaccaacatggggctggaggccataattagaaaggcactcatgggtaaatatgaccagtgggaagagtccccgccgctcagcgccaatgcttttaaccctctgaatgccagtgccagcctgcccgctgctatgcccataaccgctgctgacggacggagtgaccacacactcacctcgccaggtggcggcgggaaggccaaggtctctggcagacccagcagccgaaaagccaagtccccggccccgggcctggcatctggggaccggccaccctctgtctcctcagtgcactcggagggagactgcaaccgccggacgccgctcaccaaccgcgtgtgggaggacaggccctcgtccgcaggttccacgccattcccctacaaccccctgatcatgcggctgcaggcgggtgtcatggcttccccacccccaccgggcctccccgcgggcagcgggcccctcgctggcccccaccacgcctgggacgaggagcccaagccactgctctgctcgcagtacgagacactctccgacagcgagtgactcagaacagggcgggggggggcgggcggtgtcaggtcccagcgagccacaggaacggccctgcaggagcagggcggctgccgactcccccaaccaaggaaggagcccctgagtccgcctgcgcctccatccatctgtccgtccagagccggcatccttgcctgtctaaagccttaactaagactcccgccccgggctggccctgtgcagaccttactcaggggatgtttacctggtgctcgggaagggaggggaaggggccggggagggggcacggcaggcgtgtggcagccacacgcaggcggccagggcggccagggacccaaagcaggatgaccacgcacctccacgccactgcctcccccgaatgcatttggaaccaaagtctaaactgagctcgcagcccccgcgccctccctccgcctcccatcccgcttagcgctctggacagatggacgcaggccctgtccagcccccagtgcgctcgttccggtccccacagactgccccagccaacgagattgctggaaaccaagtcaggccaggtgggcggacaaaagggccaggtgcggcctggggggaacggatgctccgaggactggactgtttttttcacacatcgttgccgcagcggtgggaaggaaaggcagatgtaaatgatgtgttggtttacagggtatatttttgataccttcaatgaattaattcagatgttttacgcaaggaaggacttacccagtattactgctgctgtgcttttgatctctgcttaccgttcaagaggcgtgtgcaggccgacagtcggtgaccccatcactcgcaggaccaagggggcggggactgctggctcacgccccgctgtgtcctccctccctcccttccttgggcagaatgaattcgatgcgtattctgtggccgccatctgcgcagggtggtggtattctgtcatttacacacgtcgttctaattaaaaagcgaattatactcca

SEQ ID NO: 329104 - DNA, 5097 bp, Homo sapiens
  misc_feature (2538)..(2538): n is a, c, g, or t
gagtctttgaggacacagcctcgctggaggcagtttctggtgccagtgacggggtggcccgtgagctgatgacgaggactggcttttaatccttggtggtgattaagagaaagcttattgcggcctgggagcagctccccgccgacccccaccaccatgtcgggatccacacagcctgtggcacagacgtggagggccactgagccccgctacccgccccacagcctttcctacccagtgcagatcgcccggacgcacacggacgtcgggctcctggagtaccagcaccactcccgcgactatgcctcccacctgtcgcccggctccatcatccagccccagcggcggaggccctccctgctgtctgagttccagcccgggaatgaacggtcccaggagctccacctgcggccagagtcccactcatacctgcccgagctggggaagtcagagatggagttcattgaaagcaagcgccctcggctagagctgctgcctgaccccctgctgcgaccgtcacccctgctggccacgggccagcctgcgggatctgaagacctcaccaaggaccgtagcctgacgggcaagctggaaccggtgtctccccccagccccccgcacactgaccctgagctggagctggtgccgccacggctgtccaaggaggagctgatccagaacatggaccgcgtggaccgagagatcaccatggtagagcagcagatctctaagctgaagaagaagcagcaacagctggaggaggaggctgccaagccgcccgagcctgagaagcccgtgtcaccgccgcccatcgagtcgaagcaccgcagcctggtgcagatcatctacgacgagaaccggaagaaggctgaagctgcacatcggattctggaaggcctggggccccaggtggagctgccgctgtacaaccagccctccgacacccggcagtatcatgagaacatcaaaataaaccaggcgatgcggaagaagctaatcttgtacttcaagaggaggaatcacgctcggaaacaatgggagcagaagttctgccagcgctatgaccagctcatggaggcctgggagaagaaggtggagcgcatcgagaacaacccccggcggcgggccaaggagagcaaggtgcgcgagtactacgagaagcagttccctgagatccgcaagcagcgcgagctgcaggagcgcatgcagagcagggtgggccagcggggcagtgggctgtccatgtcggccgcccgcagcgagcacgaggtgtcagagatcatcgatggcctctcagagcaggagaacctggagaagcagatgcgccagctggccgtgatcccgcccatgctgtacgacgctgaccagcagcgcatcaagttcatcaacatgaacgggcttatggccgaccccatgaaggtgtacaaagaccgccaggtcatgaacatgtggagtgagcaggagaaggagaccttccgggagaagttcatgcagcatcccaagaactttggcctgatcgcatcattcctggagaggaagacagtggctgagtgcgtcctctattactacctgactaagaagaatgagaactataagagcctggtgagacggagctatcggcgccgcggcaagagccagcagcaacaacagcagcagcagcagcagcagcagcagcagcagcagcagcccatgccccgcagcagccaggaggagaaagatgagaaggagaaggaaaaggaggcggagaaggaggaggagaagccggaggtggagaacgacaaggaagacctcctcaaggagaagacagacgacacctcaggggaggacaacgacgagaaggaggctgtggcctccaaaggccgcaaaactgccaacagccagggaagacgcaaaggccgcatcacccgctcaatggctaatgaggccaacagcgaggaggccatcaccccccagcagagcgccgagctggcctccatggagctgaatgagagttctcgctggacagaagaagaaatggaaacagccaagaaaggtctcctggaacacggccgcaactggtcggccatcgcccggatggtgggctccaagactgtgtcgcagtgtaagaacttctacttcaactacaagaagaggcagaacctcgatgagatcttgcagcagcacaagctgaagatggagaaggagaggaacgcgcggaggaagaagaagaaagcgccggcggcggccagcgaggaggctgcattcccgcccgtggtggaggatgaggagatggaggcgtcgggcgtgagcggaaatgaggaggagatggtggaggaggctgaagccttacatgcctctgggaatgaggtgcccagaggggaatgcagtggcccagccactgtcaacaacagctcagacaccgagagcatcccctctcctcacactgaggccgccaaggacacagggcagaatgggcccaagcccccagccaccctgggcgccgacgggccacccccagggccacccaccccaccaccggaggacatcccgggcccccantgagcccaccccggcctctgaagccaccggagcccctacgcccccaccagcacccccatcgccctctgcacctcctcctgtggtccccaaggaggagaaggaggaggagaccgcagcagcgcccccagtggaggagggggaggagcagaagccccccgcggctgaggagctggcagtggacacagggaaggccgaggagcccgtcaagagcgagtgcacggaggaagccgaggaggggccggccaagggcaaggacgcggaggccgctgaggccacggccgagggggcgctcaaggcagagaagaaggagggcgggagcggcagggccaccactgccaagagctcgggcgccccccaggacagcgactccagtgctacctgcagtgcagacgaggtggatgaggccgagggcggcgacaagaaccggctgctgtccccaaggcccagcctcctcaccccgactggcgacccccgggccaatgcctcaccccagaagccactggacctgaagcagctgaagcagcgagcggctgccatcccccccatccaggtcaccaaagtccatgagcccccccgggaggacgcagctcccaccaagccagctcccccagccccaccgccaccgcaaaacctgcagccggagagcgacgcccctcagcagcctggcagcagcccccggggcaagagcaggagcccggcaccccccgccgacaaggaggcagagaagcctgtgttcttcccagccttcgcagccgaggcccagaagctgcctggggaccccccttgctggacttccggcctgcccttccccgtgcccccccgtgaggtgatcaaggcctccccgcatgccccggacccctcagccttctcctacgctccacctggtcacccactgcccctgggcctccatgacactgcccggcccgtcctgccgcgcccacccaccatctccaacccgcctcccctcatctcctctgccaagcaccccagcgtcctcgagaggcaaataggtgccatctcccaaggaatgtcggtccagctccacgtcccgtactcagagcatgccaaggccccggtgggccctgtcaccatggggctgcccctgcccatggaccccaaaaagctggcacccttcagcggagtgaagcaggagcagctgtccccacggggccaggctgggccaccggagagcctgggggtgcccacagcccaggaggcgtccgtgctgagagggacagctctgggctcagttccgggcggaagcatcaccaaaggcattcccagcacacgggtgccctcggacagcgccatcacataccgcggctccatcacccacggcacgccagctgacgtcctgtacaagggcaccatcaccaggatcatcggcgaggacagcccgagtcgcttggaccgcggccgggaggacagcctgcccaagggccacgtcatctacgaaggcaagaagggccacgtcttgtcctatgagggtggcatgtctgtgacccagtgctccaaggaggacggcagaagcagctcaggacccccccatgagacggccgcccccaagcgcacctatgacatgatggagggccgcgtgggcagagccatctcctcagccagcatcgaaggtctcatgggccgtgccatcccgccggagcgacacagcccccaccacctcaaagagcagcaccacatccgcgggtccatcacacaagggatccctcggtcctacgtggaggcacaggaggactacctgcgtcgggaggccaagctcctaaagcgggagggcacgcctccgcccccaccgccctcacgggacctgaccgaggcctacaagacgcaggccctgggccccctgaagctgaagccggcccatgagggcctggtggccacggtgaaggaggcgggccgctccatccatgagatcccgcgcgaggagctgcggcacacgcccgagctgcccctggccccgcggccgctcaaggagggctccatcacgcagggcaccccgctcaagtacgacaccggcgcgtccaccactggctccaaaaagcacgacgtacgctccctcatcggcagccccggccggacgttcccacccgtgcacccgctggatgtgatggccgacgcccgggcactggaacgtgcctgctacgaggagagcctgaagagccggccagggaccgccagcagctcggggggctccattgcgcgcggcgccccggtcattgtgcctgagctgggtaagccgcggcagagccccctgacctatgaggaccacggggcaccctttgccggccacctcccacgaggttcgcccgtgaccacgcgggagcccacgccgcgcctgcaggagggcagcctttcgtccagcaaggcatcccaggaccgaaagctgacgtcgacgcctcgtgagatcgccaagtccccgcacagcaccgtgcccgagcaccacccacaccccatctcgccctatgagcacctcgtgagtggcatgacggatatcgacctgactcacggcacagctatcgaccactgattacgcgacttcatctcgca

SEQ ID NO: 329105 - DNA, 4425 bp, Homo sapiens
  misc_feature (2538)..(2538): n is a, c, g, or t
gagtctttgaggacacagcctcgctggaggcagtttctggtgccagtgacggggtggcccgtgagctgatgacgaggactggcttttaatccttggtggtgattaagagaaagcttattgcggcctgggagcagctccccgccgacccccaccaccatgtcgggatccacacagcctgtggcacagacgtggagggccactgagccccgctacccgccccacagcctttcctacccagtgcagatcgcccggacgcacacggacgtcgggctcctggagtaccagcaccactcccgcgactatgcctcccacctgtcgcccggctccatcatccagccccagcggcggaggccctccctgctgtctgagttccagcccgggaatgaacggtcccaggagctccacctgcggccagagtcccactcatacctgcccgagctggggaagtcagagatggagttcattgaaagcaagcgccctcggctagagctgctgcctgaccccctgctgcgaccgtcacccctgctggccacgggccagcctgcgggatctgaagacctcaccaaggaccgtagcctgacgggcaagctggaaccggtgtctccccccagccccccgcacactgaccctgagctggagctggtgccgccacggctgtccaaggaggagctgatccagaacatggaccgcgtggaccgagagatcaccatggtagagcagcagatctctaagctgaagaagaagcagcaacagctggaggaggaggctgccaagccgcccgagcctgagaagcccgtgtcaccgccgcccatcgagtcgaagcaccgcagcctggtgcagatcatctacgacgagaaccggaagaaggctgaagctgcacatcggattctggaaggcctggggccccaggtggagctgccgctgtacaaccagccctccgacacccggcagtatcatgagaacatcaaaataaaccaggcgatgcggaagaagctaatcttgtacttcaagaggaggaatcacgctcggaaacaatgggagcagaagttctgccagcgctatgaccagctcatggaggcctgggagaagaaggtggagcgcatcgagaacaacccccggcggcgggccaaggagagcaaggtgcgcgagtactacgagaagcagttccctgagatccgcaagcagcgcgagctgcaggagcgcatgcagagcagggtgggccagcggggcagtgggctgtccatgtcggccgcccgcagcgagcacgaggtgtcagagatcatcgatggcctctcagagcaggagaacctggagaagcagatgcgccagctggccgtgatcccgcccatgctgtacgacgctgaccagcagcgcatcaagttcatcaacatgaacgggcttatggccgaccccatgaaggtgtacaaagaccgccaggtcatgaacatgtggagtgagcaggagaaggagaccttccgggagaagttcatgcagcatcccaagaactttggcctgatcgcatcattcctggagaggaagacagtggctgagtgcgtcctctattactacctgactaagaagaatgagaactataagagcctggtgagacggagctatcggcgccgcggcaagagccagcagcaacaacagcagcagcagcagcagcagcagcagcagcagcagcagcccatgccccgcagcagccaggaggagaaagatgagaaggagaaggaaaaggaggcggagaaggaggaggagaagccggaggtggagaacgacaaggaagacctcctcaaggagaagacagacgacacctcaggggaggacaacgacgagaaggaggctgtggcctccaaaggccgcaaaactgccaacagccagggaagacgcaaaggccgcatcacccgctcaatggctaatgaggccaacagcgaggaggccatcaccccccagcagagcgccgagctggcctccatggagctgaatgagagttctcgctggacagaagaagaaatggaaacagccaagaaaggtctcctggaacacggccgcaactggtcggccatcgcccggatggtgggctccaagactgtgtcgcagtgtaagaacttctacttcaactacaagaagaggcagaacctcgatgagatcttgcagcagcacaagctgaagatggagaaggagaggaacgcgcggaggaagaagaagaaagcgccggcggcggccagcgaggaggctgcattcccgcccgtggtggaggatgaggagatggaggcgtcgggcgtgagcggaaatgaggaggagatggtggaggaggctgaagccttacatgcctctgggaatgaggtgcccagaggggaatgcagtggcccagccactgtcaacaacagctcagacaccgagagcatcccctctcctcacactgaggccgccaaggacacagggcagaatgggcccaagcccccagccaccctgggcgccgacgggccacccccagggccacccaccccaccaccggaggacatcccgggcccccantgagcccaccccggcctctgaagccaccggagcccctacgcccccaccagcacccccatcgccctctgcacctcctcctgtggtccccaaggaggagaaggaggaggagaccgcagcagcgcccccagtggaggagggggaggagcagaagccccccgcggctgaggagctggcagtggacacagggaaggccgaggagcccgtcaagagcgagtgcacggaggaagccgaggaggggccggccaagggcaaggacgcggaggccgctgaggccacggccgagggggcgctcaaggcagagaagaaggagggcgggagcggcagggccaccactgccaagagctcgggcgccccccaggacagcgactccagtgctacctgcagtgcagacgaggtggatgaggccgagggcggcgacaagaaccggctgctgtccccaaggcccagcctcctcaccccgactggcgacccccgggccaatgcctcaccccagaagccactggacctgaagcagctgaagcagcgagcggctgccatcccccccatccaggtcaccaaagtccatgagcccccccgggaggacgcagctcccaccaagccagctcccccagccccaccgccaccgcaaaacctgcagccggagagcgacgcccctcagcagcctggcagcagcccccggggcaagagcaggagcccggcaccccccgccgacaaggaggcagagaagcctgtgttcttcccagccttcgcagccgaggcccagaagctgcctggggaccccccttgctggacttccggcctgcccttccccgtgcccccccgtgaggtgatcaaggcctccccgcatgccccggacccctcagccttctcctacgctccacctggtcacccactgcccctgggcctccatgacactgcccggcccgtcctgccgcgcccacccaccatctccaacccgcctcccctcatctcctctgccaagcaccccagcgtcctcgagaggcaaataggtgccatctcccaaggaatgtcggtccagctccacgtcccgtactcagagcatgccaaggccccggtgggccctgtcaccatggggctgcccctgcccatggaccccaaaaagctggcacccttcagcggagtgaagcaggagcagctgtccccacggggccaggctgggccaccggagagcctgggggtgcccacagcccaggaggcgtccgtgctgagagggacagctctgggctcagttccgggcggaagcatcaccaaaggcattcccagcacacgggtgccctcggacagcgccatcacataccgcggctccatcacccacggcacgccagctgacgtcctgtacaagggcaccatcaccaggatcatcggcgaggacagcccgagtcgcttggaccgcggccgggaggacagcctgcccaagggccacgtcatctacgaaggcaagaagggccacgtcttgtcctatgagggtggcatgtctgtgacccagtgctccaaggaggacggcagaagcagctcaggacccccccatgagacggccgcccccaagcgcacctatgacatgatggagggccgcgtgggcagagccatctcctcagccagcatcgaaggtctcatgggccgtgccatcccgccggagcgacacagcccccaccacctcaaagagcagcaccacatccgcgggtccatcacacaagggatccctcggtcctacgtggaggcacaggaggactacctgcgtcgggaggccaagctcctaaagcgggagggcacgcctccgcccccaccgccctcacgggacctgaccgaggcctacaagacgcaggccctgggccccctgaatggaggcaaaggggatcctcagatcga

SEQ ID NO: 329106 - DNA, 2506 bp, Homo sapiens
gagtctttgaggacacagcctcgctggaggcagtttctggtgccagtgacggggtggcccgtgagctgatgacgaggactggcttttaatccttggtggtgattaagagaaagcttattgcggcctgggagcagctccccgccgacccccaccaccatgtcgggatccacacagcctgtggcacagacgtggagggccactgagccccgctacccgccccacagcctttcctacccagtgcagatcgcccggacgcacacggacgtcgggctcctggagtaccagcaccactcccgcgactatgcctcccacctgtcgcccggctccatcatccagccccagcggcggaggccctccctgctgtctgagttccagcccgggaatgaacggtcccaggagctccacctgcggccagagtcccactcatacctgcccgagctggggaagtcagagatggagttcattgaaagcaagcgccctcggctagagctgctgcctgaccccctgctgcgaccgtcacccctgctggccacgggccagcctgcgggatctgaagacctcaccaaggaccgtagcctgacgggcaagctggaaccggtgtctccccccagccccccgcacactgaccctgagctggagctggtgccgccacggctgtccaaggaggagctgatccagaacatggaccgcgtggaccgagagatcaccatggtagagcagcagatctctaagctgaagaagaagcagcaacagctggaggaggaggctgccaagccgcccgagcctgagaagcccgtgtcaccgccgcccatcgagtcgaagcaccgcagcctggtgcagatcatctacgacgagaaccggaagaaggctgaagctgcacatcggattctggaaggcctggggccccaggtggagctgccgctgtacaaccagccctccgacacccggcagtatcatgagaacatcaaaataaaccaggcgatgcggaagaagctaatcttgtacttcaagaggaggaatcacgctcggaaacaatgggagcagaagttctgccagcgctatgaccagctcatggaggcctgggagaagaaggtggagcgcatcgagaacaacccccggcggcgggccaaggagagcaaggtgcgcgagtactacgagaagcagttccctgagatccgcaagcagcgcgagctgcaggagcgcatgcagagcagggtgggccagcggggcagtgggctgtccatgtcggccgcccgcagcgagcacgaggtgtcagagatcatcgatggcctctcagagcaggagaacctggagaagcagatgcgccagctggccgtgatcccgcccatgctgtacgacgctgaccagcagcgcatcaagttcatcaacatgaacgggcttatggccgaccccatgaaggtgtacaaagaccgccaggtcatgaacatgtggagtgagcaggagaaggagaccttccgggagaagttcatgcagcatcccaagaactttggcctgatcgcatcattcctggagaggaagacagtggctgagtgcgtcctctattactacctgactaagaagaatgagaactataagagcctggtgagacggagctatcggcgccgcggcaagagccagcagcaacaacagcagcagcagcagcagcagcagcagcagcagcagcagcccatgccccgcagcagccaggaggagaaagatgagaaggagaaggaaaaggaggcggagaaggaggaggagaagccggaggtggagaacgacaaggaagacctcctcaaggagaagacagacgacacctcaggggaggacaacgacgagaaggaggctgtggcctccaaaggccgcaaaactgccaacagccagggaagacgcaaaggccgcatcacccgctcaatggctaatgaggccaacagcgaggaggccatcaccccccagcagagcgccgagctggcctccatggagctgaatgagagttctcgctggacagaagaagaaatggaaacagccaagaaaggtctcctggaacacggccgcaactggtcggccatcgcccggatggtgggctccaagactgtgtcgcagtgtaagaacttctacttcaactacaagaagaggcagaacctcgatgagatcttgcagcagcacaagctgaagatggagaaggagaggaacgcgcggaggaagaagaagaaagcgccggcggcggccagcgaggaggctgcattcccgcccgtggtggaggatgaggagatggaggcgtcgggcgtgagcggaaatgaggaggagatggtggaggaggctgaagccttacatgcctctgggaatgaggtgcccagaggggaatgcagtggcccaggtacgaatgtggccggctggcctggggggtagggccgggccggggcgggcatcccaaggtccccggtcctccacaaggaaccagttgtgttggtactcttaaacctaataagatcggtagattcattaacac

SEQ ID NO: 329107 - DNA, 1475 bp, Homo sapiens
  misc_feature (1433)..(1433): n is a, c, g, or t
gagtctttgaggacacagcctcgctggaggcagtttctggtgccagtgacggggtggcccgtgagctgatgacgaggactggcttttaatccttggtggtgattaagagaaagcttattgcggcctgggagcagctccccgccgacccccaccaccatgtcgggatccacacagcctgtggcacagacgtggagggccactgagccccgctacccgccccacagcctttcctacccagtgcagatcgcccggacgcacacggacgtcgggctcctggagtaccagcaccactcccgcgactatgcctcccacctgtcgcccggctccatcatccagccccagcggcggaggccctccctgctgtctgagttccagcccgggaatgaacggtcccaggagctccacctgcggccagagtcccactcatacctgcccgagctggggaagtcagagatggagttcattgaaagcaagcgccctcggctagagctgctgcctgaccccctgctgcgaccgtcacccctgctggccacgggccagcctgcgggatctgaagacctcaccaaggaccgtagcctgacgggcaagctggaaccggtgtctccccccagccccccgcacactgaccctgagctggagctggtgccgccacggctgtccaaggaggagctgatccagaacatggaccgcgtggaccgagagatcaccatggtagagcagcagatctctaagctgaagaagaagcagcaacagctggaggaggaggctgccaagccgcccgagcctgagaagcccgtgtcaccgccgcccatcgagtcgaagcaccgcagcctggtgcagatcatctacgacgagaaccggaagaaggctgaagctgcacatcggattctggaaggcctggggccccaggtggagctgccgctgtacaaccagccctccgacacccggcagtatcatgagaacatcaaaataaaccaggcgatgcggaagaagctaatcttgtacttcaagaggaggaatcacgctcggaaacaatgggagcagaagttctgccagcgctatgaccagctcatggaggcctgggagaagaaggtggagcgcatcgagaacaacccccggcggcgggccaaggagagcaaggtgcgcgagtactacgagaagcagttccctgagatccgcaagcagcgcgagctgcaggagcgcatgcagagcagggtgggccagcggggcagtgggctgtccatgtcggccgcccgcagcgagcacgaggtgtcagagatcatcgatggcctctcagagcaggagaacctggagaagcagatgcgccagctggccgtgatcccgcccatgctgtacgacgctgaccagcagcgcatcaagttcatcaacatgaacgggcttatggccgaccccatgaaggggggatcctctangagtctgaaacctgcagtgcattgcaatgccttgtgcacttg

SEQ ID NO: 329108 - DNA, 1095 bp, Homo sapiens
gagtctttgaggacacagcctcgctggaggcagtttctggtgccagtgacggggtggcccgtgagctgatgacgaggactggcttttaatccttggtggtgattaagagaaagcttattgcggcctgggagcagctccccgccgacccccaccaccatgtcgggatccacacagcctgtggcacagacgtggagggccactgagccccgctacccgccccacagcctttcctacccagtgcagatcgcccggacgcacacggacgtcgggctcctggagtaccagcaccactcccgcgactatgcctcccacctgtcgcccggctccatcatccagccccagcggcggaggccctccctgctgtctgagttccagcccgggaatgaacggtcccaggagctccacctgcggccagagtcccactcatacctgcccgagctggggaagtcagagatggagttcattgaaagcaagcgccctcggctagagctgctgcctgaccccctgctgcgaccgtcacccctgctggccacgggccagcctgcgggatctgaagacctcaccaaggaccgtagcctgacgggcaagctggaaccggtgtctccccccagccccccgcacactgaccctgagctggagctggtgccgccacggctgtccaaggaggagctgatccagaacatggaccgcgtggaccgagagatcaccatggtagagcagcagatctctaagctgaagaagaagcagcaacagctggaggaggaggctgccaagccgcccgagcctgagaagcccgtgtcaccgccgcccatcgagtcgaagcaccgcagcctggtgcagatcatctacgacgagaaccggaagaaggctgaagctgcacatcggattctggaaggcctggggccccaggtggagctgcatcatgttttcgaggttcatccgtgtcgagcgtgggtcggtccttcgttcctttttgtggctgaatcatatttcactgtaggggtaggtcacgtgttgtttacccactcatcagtcggtggacgtgagattgtttgcatatttggggtattgtgaataaagttgctgtgaacatta

SEQ ID NO: 329109 - DNA, 305 bp, Homo sapiens
ggcttgtgtggaggttggccccgaccaacggcacgtgggactgcccagcacagctccagcccagcataaaggctcagggagtcaggtgccacggtgggtactggctggggaggggcgtctgaaatgtggccttcccacggggttcagagccgtgcggtgacaccgtcaaggcctggtctactccctccctggctcaaaggagagaaaagggcagaaggcaaagtgcctcctctcccggctcctgccaataacctggcatcttcttttcagcctccatggagctgaatgagagttctcgctggaca

SEQ ID NO: 329110 - DNA, 284 bp, Homo sapiens
gcattgaatgtcagcttgtgagggctgggatttctgtttcgttcactggggtgaccccagttctcacaacaatgcttgccacgtagtagaggctgcatcaatattttttaattgattgagtgagtgaatggatgaaagaatgaattttttaaaaactataacacaaaagcaaatgagtcagtgagcaaaaagtgaactaaggcaatgaagaaatgaaggagtgaatgaagagacctggtccttgggatcccgaggtccctatcctcaaacaactccccgtaaat

SEQ ID NO: 329111 - DNA, 473 bp, Homo sapiens
actccagggaccatcagagagcccaccactcgcggcagggagagttgactgttgaactttttacccctttctgcagtccccccagggagcgtggggaccagggtcaggcccagggtgcgcagggcagtaagtaacaagtgtgccatctcagggttagcaaagccctctgtctccctgcctctggaggcatcagatgtcacttccatcttatagatgacaaactttttgaggctcagaagggggatgcagctggtctgggctatggctgtggccagggctagagcttacatcccctctgccccagggcaccccgctcaagtacgacaccggcgcgtccaccactggctccaaaaagcacgacgtacgctccctcatcggcagccccggccggacgttcccacccgtgcacccgctggatgtgatggccgacgcccgggcactggaacgtgcctgctacgaggagagcctgaaga

SEQ ID NO: 329112 - DNA, 8673 bp, Homo sapiens
  misc_feature (2487)..(2487): n is a, c, g, or t
gagtctttgaggacacagcctcgctggaggcagtttctggtgccagtgacggggtggcccgtgagctgatgacgaggactggcttttaatccttggtggtgattaagagaaagcttattgcggcctgggagcagctccccgccgacccccaccaccatgtcgggatccacacagcctgtggcacagacgtggagggccactgagccccgctacccgccccacagcctttcctacccagtgcagatcgcccggacgcacacggacgtcgggctcctggagtaccagcaccactcccgcgactatgcctcccacctgtcgcccggctccatcatccagccccagcggcggaggccctccctgctgtctgagttccagcccgggaatgaacggtcccaggagctccacctgcggccagagtcccactcatacctgcccgagctggggaagtcagagatggagttcattgaaagcaagcgccctcggctagagctgctgcctgaccccctgctgcgaccgtcacccctgctggccacgggccagcctgcgggatctgaagacctcaccaaggaccgtagcctgacgggcaagctggaaccggtgtctccccccagccccccgcacactgaccctgagctggagctggtgccgccacggctgtccaaggaggagctgatccagaacatggaccgcgtggaccgagagatcaccatggtagagcagcagatctctaagctgaagaagaagcagcaacagctggaggaggaggctgccaagccgcccgagcctgagaagcccgtgtcaccgccgcccatcgagtcgaagcaccgcagcctggtgcagatcatctacgacgagaaccggaagaaggctgaagctgcacatcggattctggaaggcctggggccccaggtggagctgccgctgtacaaccagccctccgacacccggcagtatcatgagaacatcaaaataaaccaggcgatgcggaagaagctaatcttgtacttcaagaggaggaatcacgctcggaaacaatgggagcagaagttctgccagcgctatgaccagctcatggaggcctgggagaagaaggtggagcgcatcgagaacaacccccggcggcgggccaaggagagcaaggtgcgcgagtactacgagaagcagttccctgagatccgcaagcagcgcgagctgcaggagcgcatgcagagcagggtgggccagcggggcagtgggctgtccatgtcggccgcccgcagcgagcacgaggtgtcagagatcatcgatggcctctcagagcaggagaacctggagaagcagatgcgccagctggccgtgatcccgcccatgctgtacgacgctgaccagcagcgcatcaagttcatcaacatgaacgggcttatggccgaccccatgaaggtgtacaaagaccgccaggtcatgaacatgtggagtgagcaggagaaggagaccttccgggagaagttcatgcagcatcccaagaactttggcctgatcgcatcattcctggagaggaagacagtggctgagtgcgtcctctattactacctgactaagaagaatgagaactataagagcctggtgagacggagctatcggcgccgcggcaagagccagcagcaacaacagcagcagcagcagcagcagcagcagcagcagcagcagcccatgccccgcagcagccaggaggagaaagatgagaaggagaaggaaaaggaggcggagaaggaggaggagaagccggaggtggagaacgacaaggaagacctcctcaaggagaagacagacgacacctcaggggaggacaacgacgagaaggaggctgtggcctccaaaggccgcaaaactgccaacagccagggaagacgcaaaggccgcatcacccgctcaatggctaatgaggccaacagcgaggaggccatcaccccccagcagagcgccgagctggcctccatggagctgaatgagagttctcgctggacagaagaagaaatggaaacagccaagaaaggtctcctggaacacggccgcaactggtcggccatcgcccggatggtgggctccaagactgtgtcgcagtgtaagaacttctacttcaactacaagaagaggcagaacctcgatgagatcttgcagcagcacaagctgaagatggagaaggagaggaacgcgcggaggaagaagaagaaagcgccggcggcggccagcgaggaggctgcattcccgcccgtggtggaggatgaggagatggaggcgtcgggcgtgagcggaaatgaggaggagatggtggaggaggctgaagccactgtcaacaacagctcagacaccgagagcatcccctctcctcacactgaggccgccaaggacacagggcagaatgggcccaagcccccagccaccctgggcgccgacgggccacccccagggccacccaccccaccaccggaggacatcccgggcccccantgagcccaccccggcctctgaagccaccggagcccctacgcccccaccagcacccccatcgccctctgcacctcctcctgtggtccccaaggaggagaaggaggaggagaccgcagcagcgcccccagtggaggagggggaggagcagaagccccccgcggctgaggagctggcagtggacacagggaaggccgaggagcccgtcaagagcgagtgcacggaggaagccgaggaggggccggccaagggcaaggacgcggaggccgctgaggccacggccgagggggcgctcaaggcagagaagaaggagggcgggagcggcagggccaccactgccaagagctcgggcgccccccaggacagcgactccagtgctacctgcagtgcagacgaggtggatgaggccgagggcggcgacaagaaccggctgctgtccccaaggcccagcctcctcaccccgactggcgacccccgggccaatgcctcaccccagaagccactggacctgaagcagctgaagcagcgagcggctgccatcccccccatccaggtcaccaaagtccatgagcccccccgggaggacgcagctcccaccaagccagctcccccagccccaccgccaccgcaaaacctgcagccggagagcgacgcccctcagcagcctggcagcagcccccggggcaagagcaggagcccggcaccccccgccgacaaggaggcagagaagcctgtgttcttcccagccttcgcagccgaggcccagaagctgcctggggaccccccttgctggacttccggcctgcccttccccgtgcccccccgtgaggtgatcaaggcctccccgcatgccccggacccctcagccttctcctacgctccacctggtcacccactgcccctgggcctccatgacactgcccggcccgtcctgccgcgcccacccaccatctccaacccgcctcccctcatctcctctgccaagcaccccagcgtcctcgagaggcaaataggtgccatctcccaaggaatgtcggtccagctccacgtcccgtactcagagcatgccaaggccccggtgggccctgtcaccatggggctgcccctgcccatggaccccaaaaagctggcacccttcagcggagtgaagcaggagcagctgtccccacggggccaggctgggccaccggagagcctgggggtgcccacagcccaggaggcgtccgtgctgagagggacagctctgggctcagttccgggcggaagcatcaccaaaggcattcccagcacacgggtgccctcggacagcgccatcacataccgcggctccatcacccacggcacgccagctgacgtcctgtacaagggcaccatcaccaggatcatcggcgaggacagcccgagtcgcttggaccgcggccgggaggacagcctgcccaagggccacgtcatctacgaaggcaagaagggccacgtcttgtcctatgagggtggcatgtctgtgacccagtgctccaaggaggacggcagaagcagctcaggacccccccatgagacggccgcccccaagcgcacctatgacatgatggagggccgcgtgggcagagccatctcctcagccagcatcgaaggtctcatgggccgtgccatcccgccggagcgacacagcccccaccacctcaaagagcagcaccacatccgcgggtccatcacacaagggatccctcggtcctacgtggaggcacaggaggactacctgcgtcgggaggccaagctcctaaagcgggagggcacgcctccgcccccaccgccctcacgggacctgaccgaggcctacaagacgcaggccctgggccccctgaagctgaagccggcccatgagggcctggtggccacggtgaaggaggcgggccgctccatccatgagatcccgcgcgaggagctgcggcacacgcccgagctgcccctggccccgcggccgctcaaggagggctccatcacgcagggcaccccgctcaagtacgacaccggcgcgtccaccactggctccaaaaagcacgacgtacgctccctcatcggcagccccggccggacgttcccacccgtgcacccgctggatgtgatggccgacgcccgggcactggaacgtgcctgctacgaggagagcctgaagagccggccagggaccgccagcagctcggggggctccattgcgcgcggcgccccggtcattgtgcctgagctgggtaagccgcggcagagccccctgacctatgaggaccacggggcaccctttgccggccacctcccacgaggttcgcccgtgaccacgcgggagcccacgccgcgcctgcaggagggcagcctttcgtccagcaaggcatcccaggaccgaaagctgacgtcgacgcctcgtgagatcgccaagtccccgcacagcaccgtgcccgagcaccacccacaccccatctcgccctatgagcacctgcttcggggcgtgagtggcgtggacctgtatcgcagccacatccccctggccttcgaccccacctccataccccgcggcatccctctggacgcagccgctgcctactacctgccccgacacctggcccccaaccccacctacccgcacctgtacccaccctacctcatccgcggctaccccgacacggcggcgctggagaaccggcagaccatcatcaatgactacatcacctcgcagcagatgcaccacaacacggccaccgccatggcccagcgagctgatatgctgaggggcctctcgccccgcgagtcctcgctggcactcaactacgctgcgggtccccgaggcatcatcgacctgtcccaagtgccacacctgcctgtgctcgtgcccccgacaccaggcaccccagccaccgccatggaccgccttgcctacctccccaccgcgccccagcccttcagcagccgccacagcagctccccactctccccaggaggtccaacacacttgacaaaaccaaccaccacgtcctcgtccgagcgggagcgagaccgggatcgagagcgggaccgggatcgggagcgggaaaagtccatcctcacgtccaccacgacggtggagcacgcacccatctggagacctggtacagagcagagcagcggcagcagcggcagcagcggcgggggtgggggcagcagcagccgccccgcctcccactcccatgcccaccagcactcgcccatctcccctcggacccaggatgccctccagcagagacccagtgtgcttcacaacacaggcatgaagggtatcatcaccgctgtggagcccagcacgcccacggtcctgaggtccacctccacctcctcacccgttcgcccggctgccacattcccacctgccacccactgcccactgggcggcaccctcgatggggtctaccctaccctcatggagcccgtcttgctgcccaaggaggccccccgggtcgcccggccagagcggccccgagcagacaccggccatgccttcctcgccaagcccccagcccgctccgggctggagcccgcctcctcccccagcaagggctcggagccccggcccctagtgcctcctgtctctggccacgccaccatcgcccgcacccctgcgaagaacctcgcacctcaccacgccagcccggacccgccggcgccacctgcctcggcctcggacccgcaccgggaaaagactcaaagtaaacccttttccatccaggaactggaactccgttctctgggttaccacggcagcagctacagccccgaaggggtggagcccgtcagccctgtgagctcacccagtctgacccacgacaaggggctccccaagcacctggaagagctcgacaagagccacctggagggggagctgcggcccaagcagccaggccccgtgaagcttggcggggaggccgcccacctcccacacctgcggccgctgcctgagagccagccctcgtccagcccgctgctccagaccgccccaggggtcaaaggtcaccagcgggtggtcaccctggcccagcacatcagtgaggtcatcacacaggactacacccggcaccacccacagcagctcagcgcacccctgcccgcccccctctactccttccctggggccagctgccccgtcctggacctccgccgcccacccagtgacctctacctcccgcccccggaccatggtgccccggcccgtggctccccccacagcgaagggggcaagaggtctccagagccaaacaagacgtcggtcttgggtggtggtgaggacggtattgaacctgtgtccccaccggagggcatgacggagccagggcactcccggagtgctgtgtacccgctgctgtaccgggatggggaacagacggagcccagcaggatgggctccaagtctccaggcaacaccagccagccgccagccttcttcagcaagctgaccgagagcaactccgccatggtcaagtccaagaagcaagagatcaacaagaagctgaacacccacaaccggaatgagcctgaatacaatatcagccagcctgggacggagatcttcaatatgcccgccatcaccggaacaggccttatgacctatagaagccaggcggtgcaggaacatgccagcaccaacatggggctggaggccataattagaaaggcactcatgggtaaatatgaccagtgggaagagtccccgccgctcagcgccaatgcttttaaccctctgaatgccagtgccagcctgcccgctgctatgcccataaccgctgctgacggacggagtgaccacacactcacctcgccaggtggcggcgggaaggccaaggtctctggcagacccagcagccgaaaagccaagtccccggccccgggcctggcatctggggaccggccaccctctgtctcctcagtgcactcggagggagactgcaaccgccggacgccgctcaccaaccgcgtgtgggaggacaggccctcgtccgcaggttccacgccattcccctacaaccccctgatcatgcggctgcaggcgggtgtcatggcttccccacccccaccgggcctccccgcgggcagcgggcccctcgctggcccccaccacgcctgggacgaggagcccaagccactgctctgctcgcagtacgagacactctccgacagcgagtgactcagaacagggcgggggggggcgggcggtgtcaggtcccagcgagccacaggaacggccctgcaggagcagggcggctgccgactcccccaaccaaggaaggagcccctgagtccgcctgcgcctccatccatctgtccgtccagagccggcatccttgcctgtctaaagccttaactaagactcccgccccgggctggccctgtgcagaccttactcaggggatgtttacctggtgctcgggaagggaggggaaggggccggggagggggcacggcaggcgtgtggcagccacacgcaggcggccagggcggccagggacccaaagcaggatgaccacgcacctccacgccactgcctcccccgaatgcatttggaaccaaagtctaaactgagctcgcagcccccgcgccctccctccgcctcccatcccgcttagcgctctggacagatggacgcaggccctgtccagcccccagtgcgctcgttccggtccccacagactgccccagccaacgagattgctggaaaccaagtcaggccaggtgggcggacaaaagggccaggtgcggcctggggggaacggatgctccgaggactggactgtttttttcacacatcgttgccgcagcggtgggaaggaaaggcagatgtaaatgatgtgttggtttacagggtatatttttgataccttcaatgaattaattcagatgttttacgcaaggaaggacttacccagtattactgctgctgtgcttttgatctctgcttaccgttcaagaggcgtgtgcaggccgacagtcggtgaccccatcactcgcaggaccaagggggcggggactgctggctcacgccccgctgtgtcctccctccctcccttccttgggcagaatgaattcgatgcgtattctgtggccgccatctgcgcagggtggtggtattctgtcatttacacacgtcgttctaattaaaaagcgaattatactcca

SEQ ID NO: 329113 - DNA, 5972 bp, Homo sapiens
gtgttcctgtaatggtaatgatccgatcttcggatccttctaaaggctcatcaattttgatcgaagctcccgactcatgacggatttgtttaatccgctgaccacctttgccaataatagatccagccaaatctttgggaatagttacttgtgtagtaataataggtccaccaagatcaccatatgagccacgaccccctgcataggaataatcatatccggagccaccctgtggttcataagccatctgccattctgatgggctccatgtatctattgcagagtcccaagtttcatcagcactgaaaccaaccatgccgtcgtaacggtctccaggtctccctcttctgtcataggccatgaggtctccccctctaggtggtggtggtggaggaagaggaagattccgagctctgctaccaccccggccgcctcgtccgggaggagggggaggtggtcctcgacgagggctcatatcatcataatctcttctagatggaggcatgggacgcccaccccgacaaggaggccttcgcagccgaggcccagaagctgcctggggaccccccttgctggacttccggcctgcccttccccgtgcccccccgtgaggtgatcaaggcctccccgcatgccccggacccctcagccttctcctacgctccacctggtcacccactgcccctgggcctccatgacactgcccggcccgtcctgccgcgcccacccaccatctccaacccgcctcccctcatctcctctgccaagcaccccagcgtcctcgagaggcaaataggtgccatctcccaaggaatgtcggtccagctccacgtcccgtactcagagcatgccaaggccccggtgggccctgtcaccatggggctgcccctgcccatggaccccaaaaagctggcacccttcagcggagtgaagcaggagcagctgtccccacggggccaggctgggccaccggagagcctgggggtgcccacagcccaggaggcgtccgtgctgagagggacagctctgggctcagttccgggcggaagcatcaccaaaggcattcccagcacacgggtgccctcggacagcgccatcacataccgcggctccatcacccacggcacgccagctgacgtcctgtacaagggcaccatcaccaggatcatcggcgaggacagcccgagtcgcttggaccgcggccgggaggacagcctgcccaagggccacgtcatctacgaaggcaagaagggccacgtcttgtcctatgagggtggcatgtctgtgacccagtgctccaaggaggacggcagaagcagctcaggacccccccatgagacggccgcccccaagcgcacctatgacatgatggagggccgcgtgggcagagccatctcctcagccagcatcgaaggtctcatgggccgtgccatcccgccggagcgacacagcccccaccacctcaaagagcagcaccacatccgcgggtccatcacacaagggatccctcggtcctacgtggaggcacaggaggactacctgcgtcgggaggccaagctcctaaagcgggagggcacgcctccgcccccaccgccctcacgggacctgaccgaggcctacaagacgcaggccctgggccccctgaagctgaagccggcccatgagggcctggtggccacggtgaaggaggcgggccgctccatccatgagatcccgcgcgaggagctgcggcacacgcccgagctgcccctggccccgcggccgctcaaggagggctccatcacgcagggcaccccgctcaagtacgacaccggcgcgtccaccactggctccaaaaagcacgacgtacgctccctcatcggcagccccggccggacgttcccacccgtgcacccgctggatgtgatggccgacgcccgggcactggaacgtgcctgctacgaggagagcctgaagagccggccagggaccgccagcagctcggggggctccattgcgcgcggcgccccggtcattgtgcctgagctgggtaagccgcggcagagccccctgacctatgaggaccacggggcaccctttgccggccacctcccacgaggttcgcccgtgaccacgcgggagcccacgccgcgcctgcaggagggcagcctttcgtccagcaaggcatcccaggaccgaaagctgacgtcgacgcctcgtgagatcgccaagtccccgcacagcaccgtgcccgagcaccacccacaccccatctcgccctatgagcacctgcttcggggcgtgagtggcgtggacctgtatcgcagccacatccccctggccttcgaccccacctccataccccgcggcatccctctggacgcagccgctgcctactacctgccccgacacctggcccccaaccccacctacccgcacctgtacccaccctacctcatccgcggctaccccgacacggcggcgctggagaaccggcagaccatcatcaatgactacatcacctcgcagcagatgcaccacaacacggccaccgccatggcccagcgagctgatatgctgaggggcctctcgccccgcgagtcctcgctggcactcaactacgctgcgggtccccgaggcatcatcgacctgtcccaagtgccacacctgcctgtgctcgtgcccccgacaccaggcaccccagccaccgccatggaccgccttgcctacctccccaccgcgccccagcccttcagcagccgccacagcagctccccactctccccaggaggtccaacacacttgacaaaaccaaccaccacgtcctcgtccgagcgggagcgagaccgggatcgagagcgggaccgggatcgggagcgggaaaagtccatcctcacgtccaccacgacggtggagcacgcacccatctggagacctggtacagagcagagcagcggcagcagcggcagcagcggcgggggtgggggcagcagcagccgccccgcctcccactcccatgcccaccagcactcgcccatctcccctcggacccaggatgccctccagcagagacccagtgtgcttcacaacacaggcatgaagggtatcatcaccgctgtggagcccagcacgcccacggtcctgaggtccacctccacctcctcacccgttcgcccggctgccacattcccacctgccacccactgcccactgggcggcaccctcgatggggtctaccctaccctcatggagcccgtcttgctgcccaaggaggccccccgggtcgcccggccagagcggccccgagcagacaccggccatgccttcctcgccaagcccccagcccgctccgggctggagcccgcctcctcccccagcaagggctcggagccccggcccctagtgcctcctgtctctggccacgccaccatcgcccgcacccctgcgaagaacctcgcacctcaccacgccagcccggacccgccggcgccacctgcctcggcctcggacccgcaccgggaaaagactcaaagtaaacccttttccatccaggaactggaactccgttctctgggttaccacggcagcagctacagccccgaaggggtggagcccgtcagccctgtgagctcacccagtctgacccacgacaaggggctccccaagcacctggaagagctcgacaagagccacctggagggggagctgcggcccaagcagccaggccccgtgaagcttggcggggaggccgcccacctcccacacctgcggccgctgcctgagagccagccctcgtccagcccgctgctccagaccgccccaggggtcaaaggtcaccagcgggtggtcaccctggcccagcacatcagtgaggtcatcacacaggactacacccggcaccacccacagcagctcagcgcacccctgcccgcccccctctactccttccctggggccagctgccccgtcctggacctccgccgcccacccagtgacctctacctcccgcccccggaccatggtgccccggcccgtggctccccccacagcgaagggggcaagaggtctccagagccaaacaagacgtcggtcttgggtggtggtgaggacggtattgaacctgtgtccccaccggagggcatgacggagccagggcactcccggagtgctgtgtacccgctgctgtaccgggatggggaacagacggagcccagcaggatgggctccaagtctccaggcaacaccagccagccgccagccttcttcagcaagctgaccgagagcaactccgccatggtcaagtccaagaagcaagagatcaacaagaagctgaacacccacaaccggaatgagcctgaatacaatatcagccagcctgggacggagatcttcaatatgcccgccatcaccggaacaggccttatgacctatagaagccaggcggtgcaggaacatgccagcaccaacatggggctggaggccataattagaaaggcactcatgggtaaatatgaccagtgggaagagtccccgccgctcagcgccaatgcttttaaccctctgaatgccagtgccagcctgcccgctgctatgcccataaccgctgctgacggacggagtgaccacacactcacctcgccaggtggcggcgggaaggccaaggtctctggcagacccagcagccgaaaagccaagtccccggccccgggcctggcatctggggaccggccaccctctgtctcctcagtgcactcggagggagactgcaaccgccggacgccgctcaccaaccgcgtgtgggaggacaggccctcgtccgcaggttccacgccattcccctacaaccccctgatcatgcggctgcaggcgggtgtcatggcttccccacccccaccgggcctccccgcgggcagcgggcccctcgctggcccccaccacgcctgggacgaggagcccaagccactgctctgctcgcagtacgagacactctccgacagcgagtgactcagaacagggcgggggggggcgggcggtgtcaggtcccagcgagccacaggaacggccctgcaggagcagggcggctgccgactcccccaaccaaggaaggagcccctgagtccgcctgcgcctccatccatctgtccgtccagagccggcatccttgcctgtctaaagccttaactaagactcccgccccgggctggccctgtgcagaccttactcaggggatgtttacctggtgctcgggaagggaggggaaggggccggggagggggcacggcaggcgtgtggcagccacacgcaggcggccagggcggccagggacccaaagcaggatgaccacgcacctccacgccactgcctcccccgaatgcatttggaaccaaagtctaaactgagctcgcagcccccgcgccctccctccgcctcccatcccgcttagcgctctggacagatggacgcaggccctgtccagcccccagtgcgctcgttccggtccccacagactgccccagccaacgagattgctggaaaccaagtcaggccaggtgggcggacaaaagggccaggtgcggcctggggggaacggatgctccgaggactggactgtttttttcacacatcgttgccgcagcggtgggaaggaaaggcagatgtaaatgatgtgttggtttacagggtatatttttgataccttcaatgaattaattcagatgttttacgcaaggaaggacttacccagtattactgctgctgtgcttttgatctctgcttaccgttcaagaggcgtgtgcaggccgacagtcggtgaccccatcactcgcaggaccaagggggcggggactgctggctcacgccccgctgtgtcctccctccctcccttccttgggcagaatgaattcgatgcgtattctgtggccgccatctgcgcagggtggtggtattctgtcatttacacacgtcgttctaattaaaaagcgaattatactcca

SEQ ID NO: 329114 - DNA, 2842 bp, Homo sapiens
ctaggtagaggcctggttgaaatcggcagaggctgcaggcgggtgtcatggcttgcccactgggcggcaccctcgatggggtctaccctaccctcatggagcccgtcttgctgcccaaggaggccccccgggtcgcccggccagagcggccccgagcagacaccggccatgccttcctcgccaagcccccagcccgctccgggctggagcccgcctcctcccccagcaagggctcggagccccggcccctagtgcctcctgtctctggccacgccaccatcgcccgcacccctgcgaagaacctcgcacctcaccacgccagcccggacccgccggcgccacctgcctcggcctcggacccgcaccgggaaaagactcaaagtaaacccttttccatccaggaactggaactccgttctctgggttaccacggcagcagctacagccccgaaggggtggagcccgtcagccctgtgagctcacccagtctgacccacgacaaggggctccccaagcacctggaagagctcgacaagagccacctggagggggagctgcggcccaagcagccaggccccgtgaagcttggcggggaggccgcccacctcccacacctgcggccgctgcctgagagccagccctcgtccagcccgctgctccagaccgccccaggggtcaaaggtcaccagcgggtggtcaccctggcccagcacatcagtgaggtcatcacacaggactacacccggcaccacccacagcagctcagcgcacccctgcccgcccccctctactccttccctggggccagctgccccgtcctggacctccgccgcccacccagtgacctctacctcccgcccccggaccatggtgccccggcccgtggctccccccacagcgaagggggcaagaggtctccagagccaaacaagacgtcggtcttgggtggtggtgaggacggtattgaacctgtgtccccaccggagggcatgacggagccagggcactcccggagtgctgtgtacccgctgctgtaccgggatggggaacagacggagcccagcaggatgggctccaagtctccaggcaacaccagccagccgccagccttcttcagcaagctgaccgagagcaactccgccatggtcaagtccaagaagcaagagatcaacaagaagctgaacacccacaaccggaatgagcctgaatacaatatcagccagcctgggacggagatcttcaatatgcccgccatcaccggaacaggccttatgacctatagaagccaggcggtgcaggaacatgccagcaccaacatggggctggaggccataattagaaaggcactcatgggtaaatatgaccagtgggaagagtccccgccgctcagcgccaatgcttttaaccctctgaatgccagtgccagcctgcccgctgctatgcccataaccgctgctgacggacggagtgaccacacactcacctcgccaggtggcggcgggaaggccaaggtctctggcagacccagcagccgaaaagccaagtccccggccccgggcctggcatctggggaccggccaccctctgtctcctcagtgcactcggagggagactgcaaccgccggacgccgctcaccaaccgcgtgtgggaggacaggccctcgtccgcaggttccacgccattcccctacaaccccctgatcatgcggctgcaggcgggtgtcatggcttccccacccccaccgggcctccccgcgggcagcgggcccctcgctggcccccaccacgcctgggacgaggagcccaagccactgctctgctcgcagtacgagacactctccgacagcgagtgactcagaacagggcgggggggggcgggcggtgtcaggtcccagcgagccacaggaacggccctgcaggagcagggcggctgccgactcccccaaccaaggaaggagcccctgagtccgcctgcgcctccatccatctgtccgtccagagccggcatccttgcctgtctaaagccttaactaagactcccgccccgggctggccctgtgcagaccttactcaggggatgtttacctggtgctcgggaagggaggggaaggggccggggagggggcacggcaggcgtgtggcagccacacgcaggcggccagggcggccagggacccaaagcaggatgaccacgcacctccacgccactgcctcccccgaatgcatttggaaccaaagtctaaactgagctcgcagcccccgcgccctccctccgcctcccatcccgcttagcgctctggacagatggacgcaggccctgtccagcccccagtgcgctcgttccggtccccacagactgccccagccaacgagattgctggaaaccaagtcaggccaggtgggcggacaaaagggccaggtgcggcctggggggaacggatgctccgaggactggactgtttttttcacacatcgttgccgcagcggtgggaaggaaaggcagatgtaaatgatgtgttggtttacagggtatatttttgataccttcaatgaattaattcagatgttttacgcaaggaaggacttacccagtattactgctgctgtgcttttgatctctgcttaccgttcaagaggcgtgtgcaggccgacagtcggtgaccccatcactcgcaggaccaagggggcggggactgctggctcacgccccgctgtgtcctccctccctcccttccttgggcagaatgaattcgatgcgtattctgtggccgccatctgcgcagggtggtggtattctgtcatttacacacgtcgttctaattaaaaagcgaattatactcca

SEQ ID NO: 329115 - DNA, 8248 bp, Homo sapiens
  misc_feature (2062)..(2062): n is a, c, g, or t
tgttcctagagtatcacacaggcaccccctgctgcgaccgtcacccctgctggccacgggccagcctgcgggatctgaagacctcaccaaggaccgtagcctgacgggcaagctggaaccggtgtctccccccagccccccgcacactgaccctgagctggagctggtgccgccacggctgtccaaggaggagctgatccagaacatggaccgcgtggaccgagagatcaccatggtagagcagcagatctctaagctgaagaagaagcagcaacagctggaggaggaggctgccaagccgcccgagcctgagaagcccgtgtcaccgccgcccatcgagtcgaagcaccgcagcctggtgcagatcatctacgacgagaaccggaagaaggctgaagctgcacatcggattctggaaggcctggggccccaggtggagctgccgctgtacaaccagccctccgacacccggcagtatcatgagaacatcaaaataaaccaggcgatgcggaagaagctaatcttgtacttcaagaggaggaatcacgctcggaaacaatgggagcagaagttctgccagcgctatgaccagctcatggaggcctgggagaagaaggtggagcgcatcgagaacaacccccggcggcgggccaaggagagcaaggtgcgcgagtactacgagaagcagttccctgagatccgcaagcagcgcgagctgcaggagcgcatgcagagcagggtgggccagcggggcagtgggctgtccatgtcggccgcccgcagcgagcacgaggtgtcagagatcatcgatggcctctcagagcaggagaacctggagaagcagatgcgccagctggccgtgatcccgcccatgctgtacgacgctgaccagcagcgcatcaagttcatcaacatgaacgggcttatggccgaccccatgaaggtgtacaaagaccgccaggtcatgaacatgtggagtgagcaggagaaggagaccttccgggagaagttcatgcagcatcccaagaactttggcctgatcgcatcattcctggagaggaagacagtggctgagtgcgtcctctattactacctgactaagaagaatgagaactataagagcctggtgagacggagctatcggcgccgcggcaagagccagcagcaacaacagcagcagcagcagcagcagcagcagcagcagcagcagcccatgccccgcagcagccaggaggagaaagatgagaaggagaaggaaaaggaggcggagaaggaggaggagaagccggaggtggagaacgacaaggaagacctcctcaaggagaagacagacgacacctcaggggaggacaacgacgagaaggaggctgtggcctccaaaggccgcaaaactgccaacagccagggaagacgcaaaggccgcatcacccgctcaatggctaatgaggccaacagcgaggaggccatcaccccccagcagagcgccgagctggcctccatggagctgaatgagagttctcgctggacagaagaagaaatggaaacagccaagaaaggtctcctggaacacggccgcaactggtcggccatcgcccggatggtgggctccaagactgtgtcgcagtgtaagaacttctacttcaactacaagaagaggcagaacctcgatgagatcttgcagcagcacaagctgaagatggagaaggagaggaacgcgcggaggaagaagaagaaagcgccggcggcggccagcgaggaggctgcattcccgcccgtggtggaggatgaggagatggaggcgtcgggcgtgagcggaaatgaggaggagatggtggaggaggctgaagccttacatgcctctgggaatgaggtgcccagaggggaatgcagtggcccagccactgtcaacaacagctcagacaccgagagcatcccctctcctcacactgaggccgccaaggacacagggcagaatgggcccaagcccccagccaccctgggcgccgacgggccacccccagggccacccaccccaccaccggaggacatcccgggcccccantgagcccaccccggcctctgaagccaccggagcccctacgcccccaccagcacccccatcgccctctgcacctcctcctgtggtccccaaggaggagaaggaggaggagaccgcagcagcgcccccagtggaggagggggaggagcagaagccccccgcggctgaggagctggcagtggacacagggaaggccgaggagcccgtcaagagcgagtgcacggaggaagccgaggaggggccggccaagggcaaggacgcggaggccgctgaggccacggccgagggggcgctcaaggcagagaagaaggagggcgggagcggcagggccaccactgccaagagctcgggcgccccccaggacagcgactccagtgctacctgcagtgcagacgaggtggatgaggccgagggcggcgacaagaaccggctgctgtccccaaggcccagcctcctcaccccgactggcgacccccgggccaatgcctcaccccagaagccactggacctgaagcagctgaagcagcgagcggctgccatcccccccatccaggtcaccaaagtccatgagcccccccgggaggacgcagctcccaccaagccagctcccccagccccaccgccaccgcaaaacctgcagccggagagcgacgcccctcagcagcctggcagcagcccccggggcaagagcaggagcccggcaccccccgccgacaaggaggcagagaagcctgtgttcttcccagccttcgcagccgaggcccagaagctgcctggggaccccccttgctggacttccggcctgcccttccccgtgcccccccgtgaggtgatcaaggcctccccgcatgccccggacccctcagccttctcctacgctccacctggtcacccactgcccctgggcctccatgacactgcccggcccgtcctgccgcgcccacccaccatctccaacccgcctcccctcatctcctctgccaagcaccccagcgtcctcgagaggcaaataggtgccatctcccaaggaatgtcggtccagctccacgtcccgtactcagagcatgccaaggccccggtgggccctgtcaccatggggctgcccctgcccatggaccccaaaaagctggcacccttcagcggagtgaagcaggagcagctgtccccacggggccaggctgggccaccggagagcctgggggtgcccacagcccaggaggcgtccgtgctgagagggacagctctgggctcagttccgggcggaagcatcaccaaaggcattcccagcacacgggtgccctcggacagcgccatcacataccgcggctccatcacccacggcacgccagctgacgtcctgtacaagggcaccatcaccaggatcatcggcgaggacagcccgagtcgcttggaccgcggccgggaggacagcctgcccaagggccacgtcatctacgaaggcaagaagggccacgtcttgtcctatgagggtggcatgtctgtgacccagtgctccaaggaggacggcagaagcagctcaggacccccccatgagacggccgcccccaagcgcacctatgacatgatggagggccgcgtgggcagagccatctcctcagccagcatcgaaggtctcatgggccgtgccatcccgccggagcgacacagcccccaccacctcaaagagcagcaccacatccgcgggtccatcacacaagggatccctcggtcctacgtggaggcacaggaggactacctgcgtcgggaggccaagctcctaaagcgggagggcacgcctccgcccccaccgccctcacgggacctgaccgaggcctacaagacgcaggccctgggccccctgaagctgaagccggcccatgagggcctggtggccacggtgaaggaggcgggccgctccatccatgagatcccgcgcgaggagctgcggcacacgcccgagctgcccctggccccgcggccgctcaaggagggctccatcacgcagggcaccccgctcaagtacgacaccggcgcgtccaccactggctccaaaaagcacgacgtacgctccctcatcggcagccccggccggacgttcccacccgtgcacccgctggatgtgatggccgacgcccgggcactggaacgtgcctgctacgaggagagcctgaagagccggccagggaccgccagcagctcggggggctccattgcgcgcggcgccccggtcattgtgcctgagctgggtaagccgcggcagagccccctgacctatgaggaccacggggcaccctttgccggccacctcccacgaggttcgcccgtgaccacgcgggagcccacgccgcgcctgcaggagggcagcctttcgtccagcaaggcatcccaggaccgaaagctgacgtcgacgcctcgtgagatcgccaagtccccgcacagcaccgtgcccgagcaccacccacaccccatctcgccctatgagcacctgcttcggggcgtgagtggcgtggacctgtatcgcagccacatccccctggccttcgaccccacctccataccccgcggcatccctctggacgcagccgctgcctactacctgccccgacacctggcccccaaccccacctacccgcacctgtacccaccctacctcatccgcggctaccccgacacggcggcgctggagaaccggcagaccatcatcaatgactacatcacctcgcagcagatgcaccacaacacggccaccgccatggcccagcgagctgatatgctgaggggcctctcgccccgcgagtcctcgctggcactcaactacgctgcgggtccccgaggcatcatcgacctgtcccaagtgccacacctgcctgtgctcgtgcccccgacaccaggcaccccagccaccgccatggaccgccttgcctacctccccaccgcgccccagcccttcagcagccgccacagcagctccccactctccccaggaggtccaacacacttgacaaaaccaaccaccacgtcctcgtccgagcgggagcgagaccgggatcgagagcgggaccgggatcgggagcgggaaaagtccatcctcacgtccaccacgacggtggagcacgcacccatctggagacctggtacagagcagagcagcggcagcagcggcagcagcggcgggggtgggggcagcagcagccgccccgcctcccactcccatgcccaccagcactcgcccatctcccctcggacccaggatgccctccagcagagacccagtgtgcttcacaacacaggcatgaagggtatcatcaccgctgtggagcccagcacgcccacggtcctgaggtccacctccacctcctcacccgttcgcccggctgccacattcccacctgccacccactgcccactgggcggcaccctcgatggggtctaccctaccctcatggagcccgtcttgctgcccaaggaggccccccgggtcgcccggccagagcggccccgagcagacaccggccatgccttcctcgccaagcccccagcccgctccgggctggagcccgcctcctcccccagcaagggctcggagccccggcccctagtgcctcctgtctctggccacgccaccatcgcccgcacccctgcgaagaacctcgcacctcaccacgccagcccggacccgccggcgccacctgcctcggcctcggacccgcaccgggaaaagactcaaagtaaacccttttccatccaggaactggaactccgttctctgggttaccacggcagcagctacagccccgaaggggtggagcccgtcagccctgtgagctcacccagtctgacccacgacaaggggctccccaagcacctggaagagctcgacaagagccacctggagggggagctgcggcccaagcagccaggccccgtgaagcttggcggggaggccgcccacctcccacacctgcggccgctgcctgagagccagccctcgtccagcccgctgctccagaccgccccaggggtcaaaggtcaccagcgggtggtcaccctggcccagcacatcagtgaggtcatcacacaggactacacccggcaccacccacagcagctcagcgcacccctgcccgcccccctctactccttccctggggccagctgccccgtcctggacctccgccgcccacccagtgacctctacctcccgcccccggaccatggtgccccggcccgtggctccccccacagcgaagggggcaagaggtctccagagccaaacaagacgtcggtcttgggtggtggtgaggacggtattgaacctgtgtccccaccggagggcatgacggagccagggcactcccggagtgctgtgtacccgctgctgtaccgggatggggaacagacggagcccagcaggatgggctccaagtctccaggcaacaccagccagccgccagccttcttcagcaagctgaccgagagcaactccgccatggtcaagtccaagaagcaagagatcaacaagaagctgaacacccacaaccggaatgagcctgaatacaatatcagccagcctgggacggagatcttcaatatgcccgccatcaccggaacaggccttatgacctatagaagccaggcggtgcaggaacatgccagcaccaacatggggctggaggccataattagaaaggcactcatgggtaaatatgaccagtgggaagagtccccgccgctcagcgccaatgcttttaaccctctgaatgccagtgccagcctgcccgctgctatgcccataaccgctgctgacggacggagtgaccacacactcacctcgccaggtggcggcgggaaggccaaggtctctggcagacccagcagccgaaaagccaagtccccggccccgggcctggcatctggggaccggccaccctctgtctcctcagtgcactcggagggagactgcaaccgccggacgccgctcaccaaccgcgtgtgggaggacaggccctcgtccgcaggttccacgccattcccctacaaccccctgatcatgcggctgcaggcgggtgtcatggcttccccacccccaccgggcctccccgcgggcagcgggcccctcgctggcccccaccacgcctgggacgaggagcccaagccactgctctgctcgcagtacgagacactctccgacagcgagtgactcagaacagggcgggggggggcgggcggtgtcaggtcccagcgagccacaggaacggccctgcaggagcagggcggctgccgactcccccaaccaaggaaggagcccctgagtccgcctgcgcctccatccatctgtccgtccagagccggcatccttgcctgtctaaagccttaactaagactcccgccccgggctggccctgtgcagaccttactcaggggatgtttacctggtgctcgggaagggaggggaaggggccggggagggggcacggcaggcgtgtggcagccacacgcaggcggccagggcggccagggacccaaagcaggatgaccacgcacctccacgccactgcctcccccgaatgcatttggaaccaaagtctaaactgagctcgcagcccccgcgccctccctccgcctcccatcccgcttagcgctctggacagatggacgcaggccctgtccagcccccagtgcgctcgttccggtccccacagactgccccagccaacgagattgctggaaaccaagtcaggccaggtgggcggacaaaagggccaggtgcggcctggggggaacggatgctccgaggactggactgtttttttcacacatcgttgccgcagcggtgggaaggaaaggcagatgtaaatgatgtgttggtttacagggtatatttttgataccttcaatgaattaattcagatgttttacgcaaggaaggacttacccagtattactgctgctgtgcttttgatctctgcttaccgttcaagaggcgtgtgcaggccgacagtcggtgaccccatcactcgcaggaccaagggggcggggactgctggctcacgccccgctgtgtcctccctccctcccttccttgggcagaatgaattcgatgcgtattctgtggccgccatctgcgcagggtggtggtattctgtcatttacacacgtcgttctaattaaaaagcgaattatactcca

SEQ ID NO: 329116 - DNA, 8085 bp, Homo sapiens
  misc_feature (1899)..(1899): n is a, c, g, or t
cgcgtcttatgttcatataagcgggaggagctgatccagaacatggaccgcgtggaccgagagatcaccatggtagagcagcagatctctaagctgaagaagaagcagcaacagctggaggaggaggctgccaagccgcccgagcctgagaagcccgtgtcaccgccgcccatcgagtcgaagcaccgcagcctggtgcagatcatctacgacgagaaccggaagaaggctgaagctgcacatcggattctggaaggcctggggccccaggtggagctgccgctgtacaaccagccctccgacacccggcagtatcatgagaacatcaaaataaaccaggcgatgcggaagaagctaatcttgtacttcaagaggaggaatcacgctcggaaacaatgggagcagaagttctgccagcgctatgaccagctcatggaggcctgggagaagaaggtggagcgcatcgagaacaacccccggcggcgggccaaggagagcaaggtgcgcgagtactacgagaagcagttccctgagatccgcaagcagcgcgagctgcaggagcgcatgcagagcagggtgggccagcggggcagtgggctgtccatgtcggccgcccgcagcgagcacgaggtgtcagagatcatcgatggcctctcagagcaggagaacctggagaagcagatgcgccagctggccgtgatcccgcccatgctgtacgacgctgaccagcagcgcatcaagttcatcaacatgaacgggcttatggccgaccccatgaaggtgtacaaagaccgccaggtcatgaacatgtggagtgagcaggagaaggagaccttccgggagaagttcatgcagcatcccaagaactttggcctgatcgcatcattcctggagaggaagacagtggctgagtgcgtcctctattactacctgactaagaagaatgagaactataagagcctggtgagacggagctatcggcgccgcggcaagagccagcagcaacaacagcagcagcagcagcagcagcagcagcagcagcagcagcccatgccccgcagcagccaggaggagaaagatgagaaggagaaggaaaaggaggcggagaaggaggaggagaagccggaggtggagaacgacaaggaagacctcctcaaggagaagacagacgacacctcaggggaggacaacgacgagaaggaggctgtggcctccaaaggccgcaaaactgccaacagccagggaagacgcaaaggccgcatcacccgctcaatggctaatgaggccaacagcgaggaggccatcaccccccagcagagcgccgagctggcctccatggagctgaatgagagttctcgctggacagaagaagaaatggaaacagccaagaaaggtctcctggaacacggccgcaactggtcggccatcgcccggatggtgggctccaagactgtgtcgcagtgtaagaacttctacttcaactacaagaagaggcagaacctcgatgagatcttgcagcagcacaagctgaagatggagaaggagaggaacgcgcggaggaagaagaagaaagcgccggcggcggccagcgaggaggctgcattcccgcccgtggtggaggatgaggagatggaggcgtcgggcgtgagcggaaatgaggaggagatggtggaggaggctgaagccttacatgcctctgggaatgaggtgcccagaggggaatgcagtggcccagccactgtcaacaacagctcagacaccgagagcatcccctctcctcacactgaggccgccaaggacacagggcagaatgggcccaagcccccagccaccctgggcgccgacgggccacccccagggccacccaccccaccaccggaggacatcccgggcccccantgagcccaccccggcctctgaagccaccggagcccctacgcccccaccagcacccccatcgccctctgcacctcctcctgtggtccccaaggaggagaaggaggaggagaccgcagcagcgcccccagtggaggagggggaggagcagaagccccccgcggctgaggagctggcagtggacacagggaaggccgaggagcccgtcaagagcgagtgcacggaggaagccgaggaggggccggccaagggcaaggacgcggaggccgctgaggccacggccgagggggcgctcaaggcagagaagaaggagggcgggagcggcagggccaccactgccaagagctcgggcgccccccaggacagcgactccagtgctacctgcagtgcagacgaggtggatgaggccgagggcggcgacaagaaccggctgctgtccccaaggcccagcctcctcaccccgactggcgacccccgggccaatgcctcaccccagaagccactggacctgaagcagctgaagcagcgagcggctgccatcccccccatccaggtcaccaaagtccatgagcccccccgggaggacgcagctcccaccaagccagctcccccagccccaccgccaccgcaaaacctgcagccggagagcgacgcccctcagcagcctggcagcagcccccggggcaagagcaggagcccggcaccccccgccgacaaggaggcagagaagcctgtgttcttcccagccttcgcagccgaggcccagaagctgcctggggaccccccttgctggacttccggcctgcccttccccgtgcccccccgtgaggtgatcaaggcctccccgcatgccccggacccctcagccttctcctacgctccacctggtcacccactgcccctgggcctccatgacactgcccggcccgtcctgccgcgcccacccaccatctccaacccgcctcccctcatctcctctgccaagcaccccagcgtcctcgagaggcaaataggtgccatctcccaaggaatgtcggtccagctccacgtcccgtactcagagcatgccaaggccccggtgggccctgtcaccatggggctgcccctgcccatggaccccaaaaagctggcacccttcagcggagtgaagcaggagcagctgtccccacggggccaggctgggccaccggagagcctgggggtgcccacagcccaggaggcgtccgtgctgagagggacagctctgggctcagttccgggcggaagcatcaccaaaggcattcccagcacacgggtgccctcggacagcgccatcacataccgcggctccatcacccacggcacgccagctgacgtcctgtacaagggcaccatcaccaggatcatcggcgaggacagcccgagtcgcttggaccgcggccgggaggacagcctgcccaagggccacgtcatctacgaaggcaagaagggccacgtcttgtcctatgagggtggcatgtctgtgacccagtgctccaaggaggacggcagaagcagctcaggacccccccatgagacggccgcccccaagcgcacctatgacatgatggagggccgcgtgggcagagccatctcctcagccagcatcgaaggtctcatgggccgtgccatcccgccggagcgacacagcccccaccacctcaaagagcagcaccacatccgcgggtccatcacacaagggatccctcggtcctacgtggaggcacaggaggactacctgcgtcgggaggccaagctcctaaagcgggagggcacgcctccgcccccaccgccctcacgggacctgaccgaggcctacaagacgcaggccctgggccccctgaagctgaagccggcccatgagggcctggtggccacggtgaaggaggcgggccgctccatccatgagatcccgcgcgaggagctgcggcacacgcccgagctgcccctggccccgcggccgctcaaggagggctccatcacgcagggcaccccgctcaagtacgacaccggcgcgtccaccactggctccaaaaagcacgacgtacgctccctcatcggcagccccggccggacgttcccacccgtgcacccgctggatgtgatggccgacgcccgggcactggaacgtgcctgctacgaggagagcctgaagagccggccagggaccgccagcagctcggggggctccattgcgcgcggcgccccggtcattgtgcctgagctgggtaagccgcggcagagccccctgacctatgaggaccacggggcaccctttgccggccacctcccacgaggttcgcccgtgaccacgcgggagcccacgccgcgcctgcaggagggcagcctttcgtccagcaaggcatcccaggaccgaaagctgacgtcgacgcctcgtgagatcgccaagtccccgcacagcaccgtgcccgagcaccacccacaccccatctcgccctatgagcacctgcttcggggcgtgagtggcgtggacctgtatcgcagccacatccccctggccttcgaccccacctccataccccgcggcatccctctggacgcagccgctgcctactacctgccccgacacctggcccccaaccccacctacccgcacctgtacccaccctacctcatccgcggctaccccgacacggcggcgctggagaaccggcagaccatcatcaatgactacatcacctcgcagcagatgcaccacaacacggccaccgccatggcccagcgagctgatatgctgaggggcctctcgccccgcgagtcctcgctggcactcaactacgctgcgggtccccgaggcatcatcgacctgtcccaagtgccacacctgcctgtgctcgtgcccccgacaccaggcaccccagccaccgccatggaccgccttgcctacctccccaccgcgccccagcccttcagcagccgccacagcagctccccactctccccaggaggtccaacacacttgacaaaaccaaccaccacgtcctcgtccgagcgggagcgagaccgggatcgagagcgggaccgggatcgggagcgggaaaagtccatcctcacgtccaccacgacggtggagcacgcacccatctggagacctggtacagagcagagcagcggcagcagcggcagcagcggcgggggtgggggcagcagcagccgccccgcctcccactcccatgcccaccagcactcgcccatctcccctcggacccaggatgccctccagcagagacccagtgtgcttcacaacacaggcatgaagggtatcatcaccgctgtggagcccagcacgcccacggtcctgaggtccacctccacctcctcacccgttcgcccggctgccacattcccacctgccacccactgcccactgggcggcaccctcgatggggtctaccctaccctcatggagcccgtcttgctgcccaaggaggccccccgggtcgcccggccagagcggccccgagcagacaccggccatgccttcctcgccaagcccccagcccgctccgggctggagcccgcctcctcccccagcaagggctcggagccccggcccctagtgcctcctgtctctggccacgccaccatcgcccgcacccctgcgaagaacctcgcacctcaccacgccagcccggacccgccggcgccacctgcctcggcctcggacccgcaccgggaaaagactcaaagtaaacccttttccatccaggaactggaactccgttctctgggttaccacggcagcagctacagccccgaaggggtggagcccgtcagccctgtgagctcacccagtctgacccacgacaaggggctccccaagcacctggaagagctcgacaagagccacctggagggggagctgcggcccaagcagccaggccccgtgaagcttggcggggaggccgcccacctcccacacctgcggccgctgcctgagagccagccctcgtccagcccgctgctccagaccgccccaggggtcaaaggtcaccagcgggtggtcaccctggcccagcacatcagtgaggtcatcacacaggactacacccggcaccacccacagcagctcagcgcacccctgcccgcccccctctactccttccctggggccagctgccccgtcctggacctccgccgcccacccagtgacctctacctcccgcccccggaccatggtgccccggcccgtggctccccccacagcgaagggggcaagaggtctccagagccaaacaagacgtcggtcttgggtggtggtgaggacggtattgaacctgtgtccccaccggagggcatgacggagccagggcactcccggagtgctgtgtacccgctgctgtaccgggatggggaacagacggagcccagcaggatgggctccaagtctccaggcaacaccagccagccgccagccttcttcagcaagctgaccgagagcaactccgccatggtcaagtccaagaagcaagagatcaacaagaagctgaacacccacaaccggaatgagcctgaatacaatatcagccagcctgggacggagatcttcaatatgcccgccatcaccggaacaggccttatgacctatagaagccaggcggtgcaggaacatgccagcaccaacatggggctggaggccataattagaaaggcactcatgggtaaatatgaccagtgggaagagtccccgccgctcagcgccaatgcttttaaccctctgaatgccagtgccagcctgcccgctgctatgcccataaccgctgctgacggacggagtgaccacacactcacctcgccaggtggcggcgggaaggccaaggtctctggcagacccagcagccgaaaagccaagtccccggccccgggcctggcatctggggaccggccaccctctgtctcctcagtgcactcggagggagactgcaaccgccggacgccgctcaccaaccgcgtgtgggaggacaggccctcgtccgcaggttccacgccattcccctacaaccccctgatcatgcggctgcaggcgggtgtcatggcttccccacccccaccgggcctccccgcgggcagcgggcccctcgctggcccccaccacgcctgggacgaggagcccaagccactgctctgctcgcagtacgagacactctccgacagcgagtgactcagaacagggcgggggggggcgggcggtgtcaggtcccagcgagccacaggaacggccctgcaggagcagggcggctgccgactcccccaaccaaggaaggagcccctgagtccgcctgcgcctccatccatctgtccgtccagagccggcatccttgcctgtctaaagccttaactaagactcccgccccgggctggccctgtgcagaccttactcaggggatgtttacctggtgctcgggaagggaggggaaggggccggggagggggcacggcaggcgtgtggcagccacacgcaggcggccagggcggccagggacccaaagcaggatgaccacgcacctccacgccactgcctcccccgaatgcatttggaaccaaagtctaaactgagctcgcagcccccgcgccctccctccgcctcccatcccgcttagcgctctggacagatggacgcaggccctgtccagcccccagtgcgctcgttccggtccccacagactgccccagccaacgagattgctggaaaccaagtcaggccaggtgggcggacaaaagggccaggtgcggcctggggggaacggatgctccgaggactggactgtttttttcacacatcgttgccgcagcggtgggaaggaaaggcagatgtaaatgatgtgttggtttacagggtatatttttgataccttcaatgaattaattcagatgttttacgcaaggaaggacttacccagtattactgctgctgtgcttttgatctctgcttaccgttcaagaggcgtgtgcaggccgacagtcggtgaccccatcactcgcaggaccaagggggcggggactgctggctcacgccccgctgtgtcctccctccctcccttccttgggcagaatgaattcgatgcgtattctgtggccgccatctgcgcagggtggtggtattctgtcatttacacacgtcgttctaattaaaaagcgaattatactcca

SEQ ID NO: 329117 - DNA, 7883 bp, Homo sapiens
  misc_feature (1697)..(1697): n is a, c, g, or t
aacaaagaacaaacaaccaaacaaaaacccaggaaaacagagagggaccaggtataaaggtgaagcgagtgaaaggcccgctgtacaaccagccctccgacacccggcagtatcatgagaacatcaaaataaaccaggcgatgcggaagaagctaatcttgtacttcaagaggaggaatcacgctcggaaacaatgggagcagaagttctgccagcgctatgaccagctcatggaggcctgggagaagaaggtggagcgcatcgagaacaacccccggcggcgggccaaggagagcaaggtgcgcgagtactacgagaagcagttccctgagatccgcaagcagcgcgagctgcaggagcgcatgcagagcagggtgggccagcggggcagtgggctgtccatgtcggccgcccgcagcgagcacgaggtgtcagagatcatcgatggcctctcagagcaggagaacctggagaagcagatgcgccagctggccgtgatcccgcccatgctgtacgacgctgaccagcagcgcatcaagttcatcaacatgaacgggcttatggccgaccccatgaaggtgtacaaagaccgccaggtcatgaacatgtggagtgagcaggagaaggagaccttccgggagaagttcatgcagcatcccaagaactttggcctgatcgcatcattcctggagaggaagacagtggctgagtgcgtcctctattactacctgactaagaagaatgagaactataagagcctggtgagacggagctatcggcgccgcggcaagagccagcagcaacaacagcagcagcagcagcagcagcagcagcagcagcagcagcccatgccccgcagcagccaggaggagaaagatgagaaggagaaggaaaaggaggcggagaaggaggaggagaagccggaggtggagaacgacaaggaagacctcctcaaggagaagacagacgacacctcaggggaggacaacgacgagaaggaggctgtggcctccaaaggccgcaaaactgccaacagccagggaagacgcaaaggccgcatcacccgctcaatggctaatgaggccaacagcgaggaggccatcaccccccagcagagcgccgagctggcctccatggagctgaatgagagttctcgctggacagaagaagaaatggaaacagccaagaaaggtctcctggaacacggccgcaactggtcggccatcgcccggatggtgggctccaagactgtgtcgcagtgtaagaacttctacttcaactacaagaagaggcagaacctcgatgagatcttgcagcagcacaagctgaagatggagaaggagaggaacgcgcggaggaagaagaagaaagcgccggcggcggccagcgaggaggctgcattcccgcccgtggtggaggatgaggagatggaggcgtcgggcgtgagcggaaatgaggaggagatggtggaggaggctgaagccttacatgcctctgggaatgaggtgcccagaggggaatgcagtggcccagccactgtcaacaacagctcagacaccgagagcatcccctctcctcacactgaggccgccaaggacacagggcagaatgggcccaagcccccagccaccctgggcgccgacgggccacccccagggccacccaccccaccaccggaggacatcccgggcccccantgagcccaccccggcctctgaagccaccggagcccctacgcccccaccagcacccccatcgccctctgcacctcctcctgtggtccccaaggaggagaaggaggaggagaccgcagcagcgcccccagtggaggagggggaggagcagaagccccccgcggctgaggagctggcagtggacacagggaaggccgaggagcccgtcaagagcgagtgcacggaggaagccgaggaggggccggccaagggcaaggacgcggaggccgctgaggccacggccgagggggcgctcaaggcagagaagaaggagggcgggagcggcagggccaccactgccaagagctcgggcgccccccaggacagcgactccagtgctacctgcagtgcagacgaggtggatgaggccgagggcggcgacaagaaccggctgctgtccccaaggcccagcctcctcaccccgactggcgacccccgggccaatgcctcaccccagaagccactggacctgaagcagctgaagcagcgagcggctgccatcccccccatccaggtcaccaaagtccatgagcccccccgggaggacgcagctcccaccaagccagctcccccagccccaccgccaccgcaaaacctgcagccggagagcgacgcccctcagcagcctggcagcagcccccggggcaagagcaggagcccggcaccccccgccgacaaggaggcagagaagcctgtgttcttcccagccttcgcagccgaggcccagaagctgcctggggaccccccttgctggacttccggcctgcccttccccgtgcccccccgtgaggtgatcaaggcctccccgcatgccccggacccctcagccttctcctacgctccacctggtcacccactgcccctgggcctccatgacactgcccggcccgtcctgccgcgcccacccaccatctccaacccgcctcccctcatctcctctgccaagcaccccagcgtcctcgagaggcaaataggtgccatctcccaaggaatgtcggtccagctccacgtcccgtactcagagcatgccaaggccccggtgggccctgtcaccatggggctgcccctgcccatggaccccaaaaagctggcacccttcagcggagtgaagcaggagcagctgtccccacggggccaggctgggccaccggagagcctgggggtgcccacagcccaggaggcgtccgtgctgagagggacagctctgggctcagttccgggcggaagcatcaccaaaggcattcccagcacacgggtgccctcggacagcgccatcacataccgcggctccatcacccacggcacgccagctgacgtcctgtacaagggcaccatcaccaggatcatcggcgaggacagcccgagtcgcttggaccgcggccgggaggacagcctgcccaagggccacgtcatctacgaaggcaagaagggccacgtcttgtcctatgagggtggcatgtctgtgacccagtgctccaaggaggacggcagaagcagctcaggacccccccatgagacggccgcccccaagcgcacctatgacatgatggagggccgcgtgggcagagccatctcctcagccagcatcgaaggtctcatgggccgtgccatcccgccggagcgacacagcccccaccacctcaaagagcagcaccacatccgcgggtccatcacacaagggatccctcggtcctacgtggaggcacaggaggactacctgcgtcgggaggccaagctcctaaagcgggagggcacgcctccgcccccaccgccctcacgggacctgaccgaggcctacaagacgcaggccctgggccccctgaagctgaagccggcccatgagggcctggtggccacggtgaaggaggcgggccgctccatccatgagatcccgcgcgaggagctgcggcacacgcccgagctgcccctggccccgcggccgctcaaggagggctccatcacgcagggcaccccgctcaagtacgacaccggcgcgtccaccactggctccaaaaagcacgacgtacgctccctcatcggcagccccggccggacgttcccacccgtgcacccgctggatgtgatggccgacgcccgggcactggaacgtgcctgctacgaggagagcctgaagagccggccagggaccgccagcagctcggggggctccattgcgcgcggcgccccggtcattgtgcctgagctgggtaagccgcggcagagccccctgacctatgaggaccacggggcaccctttgccggccacctcccacgaggttcgcccgtgaccacgcgggagcccacgccgcgcctgcaggagggcagcctttcgtccagcaaggcatcccaggaccgaaagctgacgtcgacgcctcgtgagatcgccaagtccccgcacagcaccgtgcccgagcaccacccacaccccatctcgccctatgagcacctgcttcggggcgtgagtggcgtggacctgtatcgcagccacatccccctggccttcgaccccacctccataccccgcggcatccctctggacgcagccgctgcctactacctgccccgacacctggcccccaaccccacctacccgcacctgtacccaccctacctcatccgcggctaccccgacacggcggcgctggagaaccggcagaccatcatcaatgactacatcacctcgcagcagatgcaccacaacacggccaccgccatggcccagcgagctgatatgctgaggggcctctcgccccgcgagtcctcgctggcactcaactacgctgcgggtccccgaggcatcatcgacctgtcccaagtgccacacctgcctgtgctcgtgcccccgacaccaggcaccccagccaccgccatggaccgccttgcctacctccccaccgcgccccagcccttcagcagccgccacagcagctccccactctccccaggaggtccaacacacttgacaaaaccaaccaccacgtcctcgtccgagcgggagcgagaccgggatcgagagcgggaccgggatcgggagcgggaaaagtccatcctcacgtccaccacgacggtggagcacgcacccatctggagacctggtacagagcagagcagcggcagcagcggcagcagcggcgggggtgggggcagcagcagccgccccgcctcccactcccatgcccaccagcactcgcccatctcccctcggacccaggatgccctccagcagagacccagtgtgcttcacaacacaggcatgaagggtatcatcaccgctgtggagcccagcacgcccacggtcctgaggtccacctccacctcctcacccgttcgcccggctgccacattcccacctgccacccactgcccactgggcggcaccctcgatggggtctaccctaccctcatggagcccgtcttgctgcccaaggaggccccccgggtcgcccggccagagcggccccgagcagacaccggccatgccttcctcgccaagcccccagcccgctccgggctggagcccgcctcctcccccagcaagggctcggagccccggcccctagtgcctcctgtctctggccacgccaccatcgcccgcacccctgcgaagaacctcgcacctcaccacgccagcccggacccgccggcgccacctgcctcggcctcggacccgcaccgggaaaagactcaaagtaaacccttttccatccaggaactggaactccgttctctgggttaccacggcagcagctacagccccgaaggggtggagcccgtcagccctgtgagctcacccagtctgacccacgacaaggggctccccaagcacctggaagagctcgacaagagccacctggagggggagctgcggcccaagcagccaggccccgtgaagcttggcggggaggccgcccacctcccacacctgcggccgctgcctgagagccagccctcgtccagcccgctgctccagaccgccccaggggtcaaaggtcaccagcgggtggtcaccctggcccagcacatcagtgaggtcatcacacaggactacacccggcaccacccacagcagctcagcgcacccctgcccgcccccctctactccttccctggggccagctgccccgtcctggacctccgccgcccacccagtgacctctacctcccgcccccggaccatggtgccccggcccgtggctccccccacagcgaagggggcaagaggtctccagagccaaacaagacgtcggtcttgggtggtggtgaggacggtattgaacctgtgtccccaccggagggcatgacggagccagggcactcccggagtgctgtgtacccgctgctgtaccgggatggggaacagacggagcccagcaggatgggctccaagtctccaggcaacaccagccagccgccagccttcttcagcaagctgaccgagagcaactccgccatggtcaagtccaagaagcaagagatcaacaagaagctgaacacccacaaccggaatgagcctgaatacaatatcagccagcctgggacggagatcttcaatatgcccgccatcaccggaacaggccttatgacctatagaagccaggcggtgcaggaacatgccagcaccaacatggggctggaggccataattagaaaggcactcatgggtaaatatgaccagtgggaagagtccccgccgctcagcgccaatgcttttaaccctctgaatgccagtgccagcctgcccgctgctatgcccataaccgctgctgacggacggagtgaccacacactcacctcgccaggtggcggcgggaaggccaaggtctctggcagacccagcagccgaaaagccaagtccccggccccgggcctggcatctggggaccggccaccctctgtctcctcagtgcactcggagggagactgcaaccgccggacgccgctcaccaaccgcgtgtgggaggacaggccctcgtccgcaggttccacgccattcccctacaaccccctgatcatgcggctgcaggcgggtgtcatggcttccccacccccaccgggcctccccgcgggcagcgggcccctcgctggcccccaccacgcctgggacgaggagcccaagccactgctctgctcgcagtacgagacactctccgacagcgagtgactcagaacagggcgggggggggcgggcggtgtcaggtcccagcgagccacaggaacggccctgcaggagcagggcggctgccgactcccccaaccaaggaaggagcccctgagtccgcctgcgcctccatccatctgtccgtccagagccggcatccttgcctgtctaaagccttaactaagactcccgccccgggctggccctgtgcagaccttactcaggggatgtttacctggtgctcgggaagggaggggaaggggccggggagggggcacggcaggcgtgtggcagccacacgcaggcggccagggcggccagggacccaaagcaggatgaccacgcacctccacgccactgcctcccccgaatgcatttggaaccaaagtctaaactgagctcgcagcccccgcgccctccctccgcctcccatcccgcttagcgctctggacagatggacgcaggccctgtccagcccccagtgcgctcgttccggtccccacagactgccccagccaacgagattgctggaaaccaagtcaggccaggtgggcggacaaaagggccaggtgcggcctggggggaacggatgctccgaggactggactgtttttttcacacatcgttgccgcagcggtgggaaggaaaggcagatgtaaatgatgtgttggtttacagggtatatttttgataccttcaatgaattaattcagatgttttacgcaaggaaggacttacccagtattactgctgctgtgcttttgatctctgcttaccgttcaagaggcgtgtgcaggccgacagtcggtgaccccatcactcgcaggaccaagggggcggggactgctggctcacgccccgctgtgtcctccctccctcccttccttgggcagaatgaattcgatgcgtattctgtggccgccatctgcgcagggtggtggtattctgtcatttacacacgtcgttctaattaaaaagcgaattatactcca

SEQ ID NO: 329118 - DNA, 8499 bp, Homo sapiens
  misc_feature (2538)..(2538): n is a, c, g, or t
gagtctttgaggacacagcctcgctggaggcagtttctggtgccagtgacggggtggcccgtgagctgatgacgaggactggcttttaatccttggtggtgattaagagaaagcttattgcggcctgggagcagctccccgccgacccccaccaccatgtcgggatccacacagcctgtggcacagacgtggagggccactgagccccgctacccgccccacagcctttcctacccagtgcagatcgcccggacgcacacggacgtcgggctcctggagtaccagcaccactcccgcgactatgcctcccacctgtcgcccggctccatcatccagccccagcggcggaggccctccctgctgtctgagttccagcccgggaatgaacggtcccaggagctccacctgcggccagagtcccactcatacctgcccgagctggggaagtcagagatggagttcattgaaagcaagcgccctcggctagagctgctgcctgaccccctgctgcgaccgtcacccctgctggccacgggccagcctgcgggatctgaagacctcaccaaggaccgtagcctgacgggcaagctggaaccggtgtctccccccagccccccgcacactgaccctgagctggagctggtgccgccacggctgtccaaggaggagctgatccagaacatggaccgcgtggaccgagagatcaccatggtagagcagcagatctctaagctgaagaagaagcagcaacagctggaggaggaggctgccaagccgcccgagcctgagaagcccgtgtcaccgccgcccatcgagtcgaagcaccgcagcctggtgcagatcatctacgacgagaaccggaagaaggctgaagctgcacatcggattctggaaggcctggggccccaggtggagctgccgctgtacaaccagccctccgacacccggcagtatcatgagaacatcaaaataaaccaggcgatgcggaagaagctaatcttgtacttcaagaggaggaatcacgctcggaaacaatgggagcagaagttctgccagcgctatgaccagctcatggaggcctgggagaagaaggtggagcgcatcgagaacaacccccggcggcgggccaaggagagcaaggtgcgcgagtactacgagaagcagttccctgagatccgcaagcagcgcgagctgcaggagcgcatgcagagcagggtgggccagcggggcagtgggctgtccatgtcggccgcccgcagcgagcacgaggtgtcagagatcatcgatggcctctcagagcaggagaacctggagaagcagatgcgccagctggccgtgatcccgcccatgctgtacgacgctgaccagcagcgcatcaagttcatcaacatgaacgggcttatggccgaccccatgaaggtgtacaaagaccgccaggtcatgaacatgtggagtgagcaggagaaggagaccttccgggagaagttcatgcagcatcccaagaactttggcctgatcgcatcattcctggagaggaagacagtggctgagtgcgtcctctattactacctgactaagaagaatgagaactataagagcctggtgagacggagctatcggcgccgcggcaagagccagcagcaacaacagcagcagcagcagcagcagcagcagcagcagcagcagcccatgccccgcagcagccaggaggagaaagatgagaaggagaaggaaaaggaggcggagaaggaggaggagaagccggaggtggagaacgacaaggaagacctcctcaaggagaagacagacgacacctcaggggaggacaacgacgagaaggaggctgtggcctccaaaggccgcaaaactgccaacagccagggaagacgcaaaggccgcatcacccgctcaatggctaatgaggccaacagcgaggaggccatcaccccccagcagagcgccgagctggcctccatggagctgaatgagagttctcgctggacagaagaagaaatggaaacagccaagaaaggtctcctggaacacggccgcaactggtcggccatcgcccggatggtgggctccaagactgtgtcgcagtgtaagaacttctacttcaactacaagaagaggcagaacctcgatgagatcttgcagcagcacaagctgaagatggagaaggagaggaacgcgcggaggaagaagaagaaagcgccggcggcggccagcgaggaggctgcattcccgcccgtggtggaggatgaggagatggaggcgtcgggcgtgagcggaaatgaggaggagatggtggaggaggctgaagccttacatgcctctgggaatgaggtgcccagaggggaatgcagtggcccagccactgtcaacaacagctcagacaccgagagcatcccctctcctcacactgaggccgccaaggacacagggcagaatgggcccaagcccccagccaccctgggcgccgacgggccacccccagggccacccaccccaccaccggaggacatcccgggcccccantgagcccaccccggcctctgaagccaccggagcccctacgcccccaccagcacccccatcgccctctgcacctcctcctgtggtccccaaggaggagaaggaggaggagaccgcagcagcgcccccagtggaggagggggaggagcagaagccccccgcggctgaggagctggcagtggacacagggaaggccgaggagcccgtcaagagcgagtgcacggaggaagccgaggaggggccggccaagggcaaggacgcggaggccgctgaggccacggccgagggggcgctcaaggcagagaagaaggagggcgggagcggcagggccaccactgccaagagctcgggcgccccccaggacagcgactccagtgctacctgcagtgcagacgaggtggatgaggccgagggcggcgacaagaaccggctgctgtccccaaggcccagcctcctcaccccgactggcgacccccgggccaatgcctcaccccagaagccactggacctgaagcagctgaagcagcgagcggctgccatcccccccatccaggtcaccaaagtccatgagcccccccgggaggacgcagctcccaccaagccagctcccccagccccaccgccaccgcaaaacctgcagccggagagcgacgcccctcagcagcctggcagcagcccccggggcaagagcaggagcccggcaccccccgccgacaaggaggcagagaagcctgtgttcttcccagccttcgcagccgaggcccagaagctgcctggggaccccccttgctggacttccggcctgcccttccccgtgcccccccgtgaggtgatcaaggcctccccgcatgccccggacccctcagccttctcctacgctccacctggtcacccactgcccctgggcctccatgacactgcccggcccgtcctgccgcgcccacccaccatctccaacccgcctcccctcatctcctctgccaagcaccccagcgtcctcgagaggcaaataggtgccatctcccaaggaatgtcggtccagctccacgtcccgtactcagagcatgccaaggccccggtgggccctgtcaccatggggctgcccctgcccatggaccccaaaaagctggcacccttcagcggagtgaagcaggagcagctgtccccacggggccaggctgggccaccggagagcctgggggtgcccacagcccaggaggcgtccgtgctgagagggacagctctgggctcagttccgggcggaagcatcaccaaaggcattcccagcacacgggtgccctcggacagcgccatcacataccgcggctccatcacccacggcacgccagctgacgtcctgtacaagggcaccatcaccaggatcatcggcgaggacagcccgagtcgcttggaccgcggccgggaggacagcctgcccaagggccacgtcatctacgaaggcaagaagggccacgtcttgtcctatgagggtggcatgtctgtgacccagtgctccaaggaggacggcagaagcagctcaggacccccccatgagacggccgcccccaagcgcacctatgacatgatggagggccgcgtgggcagagccatctcctcagccagcatcgaaggtctcatgggccgtgccatcccgccggagcgacacagcccccaccacctcaaagagcagcaccacatccgcgggtccatcacacaagggatccctcggtcctacgtggaggcacaggaggactacctgcgtcgggaggccaagctcctaaagcgggagggcacgcctccgcccccaccgccctcacgggacctgaccgaggcctacaagacgcaggccctgggccccctgaagctgaagccggcccatgagggcctggtggccacggtgaaggaggcgggccgctccatccatgagatcccgcgcgaggagctgcggcacacgcccgagctgcccctggccccgcggccgctcaaggagggctccatcacgcagggcaccccgctcaagtacgacaccggcgcgtccaccactggctccaaaaagcacgacgtacgctccctcatcggcagccccggccggacgttcccacccgtgcacccgctggatgtgatggccgacgcccgggcactggaacgtgcctgctacgaggagagcctgaagagccggccagggaccgccagcagctcggggggctccattgcgcgcggcgccccggtcattgtgcctgagctgggtaagccgcggcagagccccctgacctatgaggaccacggggcaccctttgccggccacctcccacgaggttcgcccgtgaccacgcgggagcccacgccgcgcctgcaggagggcagcctttcgtccagcaaggcatcccaggaccgaaagctgacgtcgacgcctcgtgagatcgccaagtccccgcacagcaccgtgcccgagcaccacccacaccccatctcgccctatgagcacctgcttcggggcgtgagtggcgtggacctgtatcgcagccacatccccctggccttcgaccccacctccataccccgcggcatccctctggacgcagccgctgcctactacctgccccgacacctggcccccaaccccacctacccgcacctgtacccaccctacctcatccgcggctaccccgacacggcggcgctggagaaccggcagaccatcatcaatgactacatcacctcgcagcagatgcaccacaacacggccaccgccatggcccagcgagctgatatgctgaggggcctctcgccccgcgagtcctcgctggcactcaactacgctgcgggtccccgaggcatcatcgacctgtcccaagtgccacacctgcctgtgctcgtgcccccgacaccaggcaccccagccaccgccatggaccgccttgcctacctccccaccgcgccccagcccttcagcagccgccacagcagctccccactctccccaggaggtccaacacacttgacaaaaccaaccaccacgtcctcgtccgagcgggagcgagaccgggatcgagagcgggaccgggatcgggagcgggaaaagtccatcctcacgtccaccacgacggtggagcacgcacccatctggagacctggtacagagcagagcagcggcagcagcggcagcagcggcgggggtgggggcagcagcagccgccccgcctcccactcccatgcccaccagcactcgcccatctcccctcggacccaggatgccctccagcagagacccagtgtgcttcacaacacaggcatgaagggtatcatcaccgctgtggagcccagcacgcccacggtcctgaggtccacctccacctcctcacccgttcgcccggctgccacattcccacctgccacccactgcccactgggcggcaccctcgatggggtctaccctaccctcatggagcccgtcttgctgcccaaggaggccccccgggtcgcccggccagagcggccccgagcagacaccggccatgccttcctcgccaagcccccagcccgctccgggctggagcccgcctcctcccccagcaagggctcggagccccggcccctagtgcctcctgtctctggccacgccaccatcgcccgcacccctgcgaagaacctcgcacctcaccacgccagcccggacccgccggcgccacctgcctcggcctcggacccgcaccgggaaaagactcaaagtaaacccttttccatccaggaactggaactccgttctctgggttaccacggcagcagctacagccccgaaggggtggagcccgtcagccctgtgagctcacccagtctgacccacgacaaggggctccccaagcacctggaagagctcgacaagagccacctggagggggagctgcggcccaagcagccaggccccgtgaagcttggcggggaggccgcccacctcccacacctgcggccgctgcctgagagccagccctcgtccagcccgctgctccagaccgccccaggggtcaaaggtcaccagcgggtggtcaccctggcccagcacatcagtgaggtcatcacacaggactacacccggcaccacccacagcagctcagcgcacccctgcccgcccccctctactccttccctggggccagctgccccgtcctggacctccgccgcccacccagtgacctctacctcccgcccccggaccatggtgccccggcccgtggctccccccacagcgaagggggcaagaggtctccagagccaaacaagacgtcggtcttgggtggtggtgaggacggtattgaacctgtgtccccaccggagggcatgacggagccagggcactcccggagtgctgtgtacccgctgctgtaccgggatggggaacagacggagcccagcaggatgggctccaagtctccaggcaacaccagccagccgccagccttcttcagcaagctgaccgagagcaactccgccatggtcaagtccaagaagcaagagatcaacaagaagctgaacacccacaaccggaatgagcctgaatacaatatcagccagcctgggacggagatcttcaatatgcccgccatcaccggaacaggtggcggcgggaaggccaaggtctctggcagacccagcagccgaaaagccaagtccccggccccgggcctggcatctggggaccggccaccctctgtctcctcagtgcactcggagggagactgcaaccgccggacgccgctcaccaaccgcgtgtgggaggacaggccctcgtccgcaggttccacgccattcccctacaaccccctgatcatgcggctgcaggcgggtgtcatggcttccccacccccaccgggcctccccgcgggcagcgggcccctcgctggcccccaccacgcctgggacgaggagcccaagccactgctctgctcgcagtacgagacactctccgacagcgagtgactcagaacagggcgggggggggcgggcggtgtcaggtcccagcgagccacaggaacggccctgcaggagcagggcggctgccgactcccccaaccaaggaaggagcccctgagtccgcctgcgcctccatccatctgtccgtccagagccggcatccttgcctgtctaaagccttaactaagactcccgccccgggctggccctgtgcagaccttactcaggggatgtttacctggtgctcgggaagggaggggaaggggccggggagggggcacggcaggcgtgtggcagccacacgcaggcggccagggcggccagggacccaaagcaggatgaccacgcacctccacgccactgcctcccccgaatgcatttggaaccaaagtctaaactgagctcgcagcccccgcgccctccctccgcctcccatcccgcttagcgctctggacagatggacgcaggccctgtccagcccccagtgcgctcgttccggtccccacagactgccccagccaacgagattgctggaaaccaagtcaggccaggtgggcggacaaaagggccaggtgcggcctggggggaacggatgctccgaggactggactgtttttttcacacatcgttgccgcagcggtgggaaggaaaggcagatgtaaatgatgtgttggtttacagggtatatttttgataccttcaatgaattaattcagatgttttacgcaaggaaggacttacccagtattactgctgctgtgcttttgatctctgcttaccgttcaagaggcgtgtgcaggccgacagtcggtgaccccatcactcgcaggaccaagggggcggggactgctggctcacgccccgctgtgtcctccctccctcccttccttgggcagaatgaattcgatgcgtattctgtggccgccatctgcgcagggtggtggtattctgtcatttacacacgtcgttctaattaaaaagcgaattatactcca

SEQ ID NO: 329119 - DNA, 7550 bp, Homo sapiens
  misc_feature (2538)..(2538): n is a, c, g, or t
gagtctttgaggacacagcctcgctggaggcagtttctggtgccagtgacggggtggcccgtgagctgatgacgaggactggcttttaatccttggtggtgattaagagaaagcttattgcggcctgggagcagctccccgccgacccccaccaccatgtcgggatccacacagcctgtggcacagacgtggagggccactgagccccgctacccgccccacagcctttcctacccagtgcagatcgcccggacgcacacggacgtcgggctcctggagtaccagcaccactcccgcgactatgcctcccacctgtcgcccggctccatcatccagccccagcggcggaggccctccctgctgtctgagttccagcccgggaatgaacggtcccaggagctccacctgcggccagagtcccactcatacctgcccgagctggggaagtcagagatggagttcattgaaagcaagcgccctcggctagagctgctgcctgaccccctgctgcgaccgtcacccctgctggccacgggccagcctgcgggatctgaagacctcaccaaggaccgtagcctgacgggcaagctggaaccggtgtctccccccagccccccgcacactgaccctgagctggagctggtgccgccacggctgtccaaggaggagctgatccagaacatggaccgcgtggaccgagagatcaccatggtagagcagcagatctctaagctgaagaagaagcagcaacagctggaggaggaggctgccaagccgcccgagcctgagaagcccgtgtcaccgccgcccatcgagtcgaagcaccgcagcctggtgcagatcatctacgacgagaaccggaagaaggctgaagctgcacatcggattctggaaggcctggggccccaggtggagctgccgctgtacaaccagccctccgacacccggcagtatcatgagaacatcaaaataaaccaggcgatgcggaagaagctaatcttgtacttcaagaggaggaatcacgctcggaaacaatgggagcagaagttctgccagcgctatgaccagctcatggaggcctgggagaagaaggtggagcgcatcgagaacaacccccggcggcgggccaaggagagcaaggtgcgcgagtactacgagaagcagttccctgagatccgcaagcagcgcgagctgcaggagcgcatgcagagcagggtgggccagcggggcagtgggctgtccatgtcggccgcccgcagcgagcacgaggtgtcagagatcatcgatggcctctcagagcaggagaacctggagaagcagatgcgccagctggccgtgatcccgcccatgctgtacgacgctgaccagcagcgcatcaagttcatcaacatgaacgggcttatggccgaccccatgaaggtgtacaaagaccgccaggtcatgaacatgtggagtgagcaggagaaggagaccttccgggagaagttcatgcagcatcccaagaactttggcctgatcgcatcattcctggagaggaagacagtggctgagtgcgtcctctattactacctgactaagaagaatgagaactataagagcctggtgagacggagctatcggcgccgcggcaagagccagcagcaacaacagcagcagcagcagcagcagcagcagcagcagcagcagcccatgccccgcagcagccaggaggagaaagatgagaaggagaaggaaaaggaggcggagaaggaggaggagaagccggaggtggagaacgacaaggaagacctcctcaaggagaagacagacgacacctcaggggaggacaacgacgagaaggaggctgtggcctccaaaggccgcaaaactgccaacagccagggaagacgcaaaggccgcatcacccgctcaatggctaatgaggccaacagcgaggaggccatcaccccccagcagagcgccgagctggcctccatggagctgaatgagagttctcgctggacagaagaagaaatggaaacagccaagaaaggtctcctggaacacggccgcaactggtcggccatcgcccggatggtgggctccaagactgtgtcgcagtgtaagaacttctacttcaactacaagaagaggcagaacctcgatgagatcttgcagcagcacaagctgaagatggagaaggagaggaacgcgcggaggaagaagaagaaagcgccggcggcggccagcgaggaggctgcattcccgcccgtggtggaggatgaggagatggaggcgtcgggcgtgagcggaaatgaggaggagatggtggaggaggctgaagccttacatgcctctgggaatgaggtgcccagaggggaatgcagtggcccagccactgtcaacaacagctcagacaccgagagcatcccctctcctcacactgaggccgccaaggacacagggcagaatgggcccaagcccccagccaccctgggcgccgacgggccacccccagggccacccaccccaccaccggaggacatcccgggcccccantgagcccaccccggcctctgaagccaccggagcccctacgcccccaccagcacccccatcgccctctgcacctcctcctgtggtccccaaggaggagaaggaggaggagaccgcagcagcgcccccagtggaggagggggaggagcagaagccccccgcggctgaggagctggcagtggacacagggaaggccgaggagcccgtcaagagcgagtgcacggaggaagccgaggaggggccggccaagggcaaggacgcggaggccgctgaggccacggccgagggggcgctcaaggcagagaagaaggagggcgggagcggcagggccaccactgccaagagctcgggcgccccccaggacagcgactccagtgctacctgcagtgcagacgaggtggatgaggccgagggcggcgacaagaaccggctgctgtccccaaggcccagcctcctcaccccgactggcgacccccgggccaatgcctcaccccagaagccactggacctgaagcagctgaagcagcgagcggctgccatcccccccatccaggtcaccaaagtccatgagcccccccgggaggacgcagctcccaccaagccagctcccccagccccaccgccaccgcaaaacctgcagccggagagcgacgcccctcagcagcctggcagcagcccccggggcaagagcaggagcccggcaccccccgccgacaaggaggcagagaagcctgtgttcttcccagccttcgcagccgaggcccagaagctgcctggggaccccccttgctggacttccggcctgcccttccccgtgcccccccgtgaggtgatcaaggcctccccgcatgccccggacccctcagccttctcctacgctccacctggtcacccactgcccctgggcctccatgacactgcccggcccgtcctgccgcgcccacccaccatctccaacccgcctcccctcatctcctctgccaagcaccccagcgtcctcgagaggcaaataggtgccatctcccaaggaatgtcggtccagctccacgtcccgtactcagagcatgccaaggccccggtgggccctgtcaccatggggctgcccctgcccatggaccccaaaaagctggcacccttcagcggagtgaagcaggagcagctgtccccacggggccaggctgggccaccggagagcctgggggtgcccacagcccaggaggcgtccgtgctgagagggacagctctgggctcagttccgggcggaagcatcaccaaaggcattcccagcacacgggtgccctcggacagcgccatcacataccgcggctccatcacccacggcacgccagctgacgtcctgtacaagggcaccatcaccaggatcatcggcgaggacagcccgagtcgcttggaccgcggccgggaggacagcctgcccaagggccacgtcatctacgaaggcaagaagggccacgtcttgtcctatgagggtggcatgtctgtgacccagtgctccaaggaggacggcagaagcagctcaggacccccccatgagacggccgcccccaagcgcacctatgacatgatggagggccgcgtgggcagagccatctcctcagccagcatcgaaggtctcatgggccgtgccatcccgccggagcgacacagcccccaccacctcaaagagcagcaccacatccgcgggtccatcacacaagggatccctcggtcctacgtggaggcacaggaggactacctgcgtcgggaggccaagctcctaaagcgggagggcacgcctccgcccccaccgccctcacgggacctgaccgaggcctacaagacgcaggccctgggccccctgaagctgaagccggcccatgagggcctggtggccacggtgaaggaggcgggccgctccatccatgagatcccgcgcgaggagctgcggcacacgcccgagctgcccctggccccgcggccgctcaaggagggctccatcacgcagggcaccccgctcaagtacgacaccggcgcgtccaccactggctccaaaaagcacgacgtacgctccctcatcggcagccccggccggacgttcccacccgtgcacccgctggatgtgatggccgacgcccgggcactggaacgtgcctgctacgaggagagcctgaagagccggccagggaccgccagcagctcggggggctccattgcgcgcggcgccccggtcattgtgcctgagctgggtaagccgcggcagagccccctgacctatgaggaccacggggcaccctttgccggccacctcccacgaggttcgcccgtgaccacgcgggagcccacgccgcgcctgcaggagggcagcctttcgtccagcaaggcatcccaggaccgaaagctgacgtcgacgcctcgtgagatcgccaagtccccgcacagcaccgtgcccgagcaccacccacaccccatctcgccctatgagcacctgcttcggggcgtgagtggcgtggacctgtatcgcagccacatccccctggccttcgaccccacctccataccccgcggcatccctctggacgcagccgctgcctactacctgccccgacacctggcccccaaccccacctacccgcacctgtacccaccctacctcatccgcggctaccccgacacggcggcgctggagaaccggcagaccatcatcaatgactacatcacctcgcagcagatgcaccacaacacggccaccgccatggcccagcgagctgatatgctgaggggcctctcgccccgcgagtcctcgctggcactcaactacgctgcgggtccccgaggcatcatcgacctgtcccaagtgccacacctgcctgtgctcgtgcccccgacaccaggcaccccagccaccgccatggaccgccttgcctacctccccaccgcgccccagcccttcagcagccgccacagcagctccccactctccccaggaggtccaacacacttgacaaaaccaaccaccacgtcctcgtccgagcgggagcgagaccgggatcgagagcgggaccgggatcgggagcgggaaaagtccatcctcacgtccaccacgacggtggagcacgcacccatctggagacctggtacagagcagagcagcggcagcagcggcagcagcggcgggggtgggggcagcagcagccgccccgcctcccactcccatgcccaccagcactcgcccatctcccctcggacccaggatgccctccagcagagacccagtgtgcttcacaacacaggcatgaagggtatcatcaccgctgtggagcccagcacgcccacggtcctgaggtccacctccacctcctcacccgttcgcccggctgccacattcccacctgccacccactgcccactgggcggcaccctcgatggggtctaccctaccctcatggagcccgtcttgctgcccaaggaggccccccgggtcgcccggccagagcggccccgagcagacaccggccatgccttcctcgccaagcccccagcccgctccgggctggagcccgcctcctcccccagcaagggctcggagccccggcccctagtgcctcctgtctctggccacgccaccatcgcccgcacccctgcgaagaacctcgcacctcaccacgccagcccggacccgccggcgccacctgcctcggcctcggacccgcaccgggaaaagactcaaagtaaacccttttccatccaggaactggaactccgttctctgggttaccacggcagcagctacagccccgaaggggtggagcccgtcagccctgtgagctcacccagtctgacccacgacaaggggctccccaagcacctggaagagctcgacaagagccacctggagggggagctgcggcccaagcagccaggccccgtgaagcttggcggggaggccgcccacctcccacacctgcggccgctgcctgagagccagccctcgtccagcccgctgctccagaccgccccaggggtcaaaggtcaccagcgggtggtcaccctggcccagcacatcagtgaggtcatcacacaggactacacccggcaccacccacagcagctcagcgcacccctgcccgcccccctctactccttccctggggccagctgccccgtcctggacctccgccgcccacccagtgacctctacctcccgcccccggaccatggtgccccggccctgtgcagaccttactcaggggatgtttacctggtgctcgggaagggaggggaaggggccggggagggggcacggcaggcgtgtggcagccacacgcaggcggccagggcggccagggacccaaagcaggatgaccacgcacctccacgccactgcctcccccgaatgcatttggaaccaaagtctaaactgagctcgcagcccccgcgccctccctccgcctcccatcccgcttagcgctctggacagatggacgcaggccctgtccagcccccagtgcgctcgttccggtccccacagactgccccagccaacgagattgctggaaaccaagtcaggccaggtgggcggacaaaagggccaggtgcggcctggggggaacggatgctccgaggactggactgtttttttcacacatcgttgccgcagcggtgggaaggaaaggcagatgtaaatgatgtgttggtttacagggtatatttttgataccttcaatgaattaattcagatgttttacgcaaggaaggacttacccagtattactgctgctgtgcttttgatctctgcttaccgttcaagaggcgtgtgcaggccgacagtcggtgaccccatcactcgcaggaccaagggggcggggactgctggctcacgccccgctgtgtcctccctccctcccttccttgggcagaatgaattcgatgcgtattctgtggccgccatctgcgcagggtggtggtattctgtcatttacacacgtcgttctaattaaaaagcgaattatactcca

SEQ ID NO: 329120 - DNA, 7939 bp, Homo sapiens
  misc_feature (2538)..(2538): n is a, c, g, or t
gagtctttgaggacacagcctcgctggaggcagtttctggtgccagtgacggggtggcccgtgagctgatgacgaggactggcttttaatccttggtggtgattaagagaaagcttattgcggcctgggagcagctccccgccgacccccaccaccatgtcgggatccacacagcctgtggcacagacgtggagggccactgagccccgctacccgccccacagcctttcctacccagtgcagatcgcccggacgcacacggacgtcgggctcctggagtaccagcaccactcccgcgactatgcctcccacctgtcgcccggctccatcatccagccccagcggcggaggccctccctgctgtctgagttccagcccgggaatgaacggtcccaggagctccacctgcggccagagtcccactcatacctgcccgagctggggaagtcagagatggagttcattgaaagcaagcgccctcggctagagctgctgcctgaccccctgctgcgaccgtcacccctgctggccacgggccagcctgcgggatctgaagacctcaccaaggaccgtagcctgacgggcaagctggaaccggtgtctccccccagccccccgcacactgaccctgagctggagctggtgccgccacggctgtccaaggaggagctgatccagaacatggaccgcgtggaccgagagatcaccatggtagagcagcagatctctaagctgaagaagaagcagcaacagctggaggaggaggctgccaagccgcccgagcctgagaagcccgtgtcaccgccgcccatcgagtcgaagcaccgcagcctggtgcagatcatctacgacgagaaccggaagaaggctgaagctgcacatcggattctggaaggcctggggccccaggtggagctgccgctgtacaaccagccctccgacacccggcagtatcatgagaacatcaaaataaaccaggcgatgcggaagaagctaatcttgtacttcaagaggaggaatcacgctcggaaacaatgggagcagaagttctgccagcgctatgaccagctcatggaggcctgggagaagaaggtggagcgcatcgagaacaacccccggcggcgggccaaggagagcaaggtgcgcgagtactacgagaagcagttccctgagatccgcaagcagcgcgagctgcaggagcgcatgcagagcagggtgggccagcggggcagtgggctgtccatgtcggccgcccgcagcgagcacgaggtgtcagagatcatcgatggcctctcagagcaggagaacctggagaagcagatgcgccagctggccgtgatcccgcccatgctgtacgacgctgaccagcagcgcatcaagttcatcaacatgaacgggcttatggccgaccccatgaaggtgtacaaagaccgccaggtcatgaacatgtggagtgagcaggagaaggagaccttccgggagaagttcatgcagcatcccaagaactttggcctgatcgcatcattcctggagaggaagacagtggctgagtgcgtcctctattactacctgactaagaagaatgagaactataagagcctggtgagacggagctatcggcgccgcggcaagagccagcagcaacaacagcagcagcagcagcagcagcagcagcagcagcagcagcccatgccccgcagcagccaggaggagaaagatgagaaggagaaggaaaaggaggcggagaaggaggaggagaagccggaggtggagaacgacaaggaagacctcctcaaggagaagacagacgacacctcaggggaggacaacgacgagaaggaggctgtggcctccaaaggccgcaaaactgccaacagccagggaagacgcaaaggccgcatcacccgctcaatggctaatgaggccaacagcgaggaggccatcaccccccagcagagcgccgagctggcctccatggagctgaatgagagttctcgctggacagaagaagaaatggaaacagccaagaaaggtctcctggaacacggccgcaactggtcggccatcgcccggatggtgggctccaagactgtgtcgcagtgtaagaacttctacttcaactacaagaagaggcagaacctcgatgagatcttgcagcagcacaagctgaagatggagaaggagaggaacgcgcggaggaagaagaagaaagcgccggcggcggccagcgaggaggctgcattcccgcccgtggtggaggatgaggagatggaggcgtcgggcgtgagcggaaatgaggaggagatggtggaggaggctgaagccttacatgcctctgggaatgaggtgcccagaggggaatgcagtggcccagccactgtcaacaacagctcagacaccgagagcatcccctctcctcacactgaggccgccaaggacacagggcagaatgggcccaagcccccagccaccctgggcgccgacgggccacccccagggccacccaccccaccaccggaggacatcccgggcccccantgagcccaccccggcctctgaagccaccggagcccctacgcccccaccagcacccccatcgccctctgcacctcctcctgtggtccccaaggaggagaaggaggaggagaccgcagcagcgcccccagtggaggagggggaggagcagaagccccccgcggctgaggagctggcagtggacacagggaaggccgaggagcccgtcaagagcgagtgcacggaggaagccgaggaggggccggccaagggcaaggacgcggaggccgctgaggccacggccgagggggcgctcaaggcagagaagaaggagggcgggagcggcagggccaccactgccaagagctcgggcgccccccaggacagcgactccagtgctacctgcagtgcagacgaggtggatgaggccgagggcggcgacaagaaccggctgctgtccccaaggcccagcctcctcaccccgactggcgacccccgggccaatgcctcaccccagaagccactggacctgaagcagctgaagcagcgagcggctgccatcccccccatccaggtcaccaaagtccatgagcccccccgggaggacgcagctcccaccaagccagctcccccagccccaccgccaccgcaaaacctgcagccggagagcgacgcccctcagcagcctggcagcagcccccggggcaagagcaggagcccggcaccccccgccgacaaggaggcagagaagcctgtgttcttcccagccttcgcagccgaggcccagaagctgcctggggaccccccttgctggacttccggcctgcccttccccgtgcccccccgtgaggtgatcaaggcctccccgcatgccccggacccctcagccttctcctacgctccacctggtcacccactgcccctgggcctccatgacactgcccggcccgtcctgccgcgcccacccaccatctccaacccgcctcccctcatctcctctgccaagcaccccagcgtcctcgagaggcaaataggtgccatctcccaaggaatgtcggtccagctccacgtcccgtactcagagcatgccaaggccccggtgggccctgtcaccatggggctgcccctgcccatggaccccaaaaagctggcacccttcagcggagtgaagcaggagcagctgtccccacggggccaggctgggccaccggagagcctgggggtgcccacagcccaggaggcgtccgtgctgagagggacagctctgggctcagttccgggcggaagcatcaccaaaggcattcccagcacacgggtgccctcggacagcgccatcacataccgcggctccatcacccacggcacgccagctgacgtcctgtacaagggcaccatcaccaggatcatcggcgaggacagcccgagtcgcttggaccgcggccgggaggacagcctgcccaagggccacgtcatctacgaaggcaagaagggccacgtcttgtcctatgagggtggcatgtctgtgacccagtgctccaaggaggacggcagaagcagctcaggacccccccatgagacggccgcccccaagcgcacctatgacatgatggagggccgcgtgggcagagccatctcctcagccagcatcgaaggtctcatgggccgtgccatcccgccggagcgacacagcccccaccacctcaaagagcagcaccacatccgcgggtccatcacacaagggatccctcggtcctacgtggaggcacaggaggactacctgcgtcgggaggccaagctcctaaagcgggagggcacgcctccgcccccaccgccctcacgggacctgaccgaggcctacaagacgcaggccctgggccccctgaagctgaagccggcccatgagggcctggtggccacggtgaaggaggcgggccgctccatccatgagatcccgcgcgaggagctgcggcacacgcccgagctgcccctggccccgcggccgctcaaggagggctccatcacgcagggcaccccgctcaagtacgacaccggcgcgtccaccactggctccaaaaagcacgacgtacgctccctcatcggcagccccggccggacgttcccacccgtgcacccgctggatgtgatggccgacgcccgggcactggaacgtgcctgctacgaggagagcctgaagagccggccagggaccgccagcagctcggggggctccattgcgcgcggcgccccggtcattgtgcctgagctgggtaagccgcggcagagccccctgacctatgaggaccacggggcaccctttgccggccacctcccacgaggttcgcccgtgaccacgcgggagcccacgccgcgcctgcaggagggcagcctttcgtccagcaaggcatcccaggaccgaaagctgacgtcgacgcctcgtgagatcgccaagtccccgcacagcaccgtgcccgagcaccacccacaccccatctcgccctatgagcacctgcttcggggcgtgagtggcgtggacctgtatcgcagccacatccccctggccttcgaccccacctccataccccgcggcatccctctggacgcagccgctgcctactacctgccccgacacctggcccccaaccccacctacccgcacctgtacccaccctacctcatccgcggctaccccgacacggcggcgctggagaaccggcagaccatcatcaatgactacatcacctcgcagcagatgcaccacaacacggccaccgccatggcccagcgagctgatatgctgaggggcctctcgccccgcgagtcctcgctggcactcaactacgctgcgggtccccgaggcatcatcgacctgtcccaagtgccacacctgcctgtgctcgtgcccccgacaccaggcaccccagccaccgccatggaccgccttgcctacctccccaccgcgccccagcccttcagcagccgccacagcagctccccactctccccaggaggtccaacacacttgacaaaaccaaccaccacgtcctcgtccgagcgggagcgagaccgggatcgagagcgggaccgggatcgggagcgggaaaagtccatcctcacgtccaccacgacggtggagcacgcacccatctggagacctggtacagagcagagcagcggcagcagcggcagcagcggcgggggtgggggcagcagcagccgccccgcctcccactcccatgcccaccagcactcgcccatctcccctcggacccaggatgccctccagcagagacccagtgtgcttcacaacacaggcatgaagggtatcatcaccgctgtggagcccagcacgcccacggtcctgaggtccacctccacctcctcacccgttcgcccggctgccacattcccacctgccacccactgcccactgggcggcaccctcgatggggtctaccctaccctcatggagcccgtcttgctgcccaaggaggccccccgggtcgcccggccagagcggccccgagcagacaccggccatgccttcctcgccaagcccccagcccgctccgggctggagcccgcctcctcccccagcaagggctcggagccccggcccctagtgcctcctgtctctggccacgccaccatcgcccgcacccctgcgaagaacctcgcacctcaccacgccagcccggacccgccggcgccacctgcctcggcctcggacccgcaccgggaaaagactcaaagtaaacccttttccatccaggaactggaactccgttctctgggttaccacggcagcagctacagccccgaaggggtggagcccgtcagccctgtgagctcacccagtctgacccacgacaaggggctccccaagcacctggaagagctcgacaagagccacctggagggggagctgcggcccaagcagccaggccccgtgaagcttggcggggaggccgcccacctcccacacctgcggccgctgcctgagagccagccctcgtccagcccgctgctccagaccgccccaggggtcaaaggtcaccagcgggtggtcaccctggcccagcacatcagtgaggtcatcacacaggactacacccggcaccacccacagcagctcagcgcacccctgcccgcccccctctactccttccctggggccagctgccccgtcctggacctccgccgcccacccagtgacctctacctcccgcccccggaccatggtgccccggcccgtggctccccccacagcgaagggggcaagaggtctccagagccaaacaagacgtcggtcttgggtggtggtgaggacggtattgaacctgtgtccccaccggagggcatgacggagccagggcactcccggagtgctgtgtacccgctgctgtaccgggatggggaacagacggagcccagcaggatgggctccaagtctccaggcaacaccagccagccgccagccttcttcagcaagctgaccgagagcaactccgccatggtcaagtccaagaagcaagagatcaacaagaagctgaacacccacaaccggaatgagcctgaatacaatatcagccagcctgggacggagatcttcaatatgcccgccatcaccggaacaggccttatgacctatagaagccaggcggtgcaggaacatgccagcaccaacatggggctggaggccataattagaaaggcactcatgggtaaatatgaccagtgggaagagtccccgccgctcagcgccaatgcttttaaccctctgaatgccagtgccagcctgcccgctgctatgcccataaccgctgctgacggacggagtgaccacacactcacctcgccaggtggcggcgggaaggccaaggtctctggcagacccagcagccgaaaagccaagtccccggccccgggcctggcatctggggaccggccaccctctgtctcctcagtgcactcggagggagactgcaaccgccggacgccgctcaccaaccgcgtgtgggaggacaggccctcgtccgcaggttccacgccattcccctacaaccccctgatcatgcggctgcaggcgggtgtcatggcttccccacccccaccgggcctccccgcgggcagcgggcccctcgctggcccccaccacgcctgggacgaggagcccaagccactgctctgctcgcagtacgagacactctccgacagcgagtgactcagaacagggcgggggggggcgggcggtgtcaggtcccagcgagccacaggaacggccctgcaggagcagggcggctgccgactccctcccttccttgggcagaatgaattcgatgcgtattctgtggccgccatctgcgcagggtggtggtattctgtcatttacacacgtcgttctaattaaaaagcgaattatactcca

SEQ ID NO: 329121 - DNA, 7819 bp, Homo sapiens
  misc_feature (2538)..(2538): n is a, c, g, or t
gagtctttgaggacacagcctcgctggaggcagtttctggtgccagtgacggggtggcccgtgagctgatgacgaggactggcttttaatccttggtggtgattaagagaaagcttattgcggcctgggagcagctccccgccgacccccaccaccatgtcgggatccacacagcctgtggcacagacgtggagggccactgagccccgctacccgccccacagcctttcctacccagtgcagatcgcccggacgcacacggacgtcgggctcctggagtaccagcaccactcccgcgactatgcctcccacctgtcgcccggctccatcatccagccccagcggcggaggccctccctgctgtctgagttccagcccgggaatgaacggtcccaggagctccacctgcggccagagtcccactcatacctgcccgagctggggaagtcagagatggagttcattgaaagcaagcgccctcggctagagctgctgcctgaccccctgctgcgaccgtcacccctgctggccacgggccagcctgcgggatctgaagacctcaccaaggaccgtagcctgacgggcaagctggaaccggtgtctccccccagccccccgcacactgaccctgagctggagctggtgccgccacggctgtccaaggaggagctgatccagaacatggaccgcgtggaccgagagatcaccatggtagagcagcagatctctaagctgaagaagaagcagcaacagctggaggaggaggctgccaagccgcccgagcctgagaagcccgtgtcaccgccgcccatcgagtcgaagcaccgcagcctggtgcagatcatctacgacgagaaccggaagaaggctgaagctgcacatcggattctggaaggcctggggccccaggtggagctgccgctgtacaaccagccctccgacacccggcagtatcatgagaacatcaaaataaaccaggcgatgcggaagaagctaatcttgtacttcaagaggaggaatcacgctcggaaacaatgggagcagaagttctgccagcgctatgaccagctcatggaggcctgggagaagaaggtggagcgcatcgagaacaacccccggcggcgggccaaggagagcaaggtgcgcgagtactacgagaagcagttccctgagatccgcaagcagcgcgagctgcaggagcgcatgcagagcagggtgggccagcggggcagtgggctgtccatgtcggccgcccgcagcgagcacgaggtgtcagagatcatcgatggcctctcagagcaggagaacctggagaagcagatgcgccagctggccgtgatcccgcccatgctgtacgacgctgaccagcagcgcatcaagttcatcaacatgaacgggcttatggccgaccccatgaaggtgtacaaagaccgccaggtcatgaacatgtggagtgagcaggagaaggagaccttccgggagaagttcatgcagcatcccaagaactttggcctgatcgcatcattcctggagaggaagacagtggctgagtgcgtcctctattactacctgactaagaagaatgagaactataagagcctggtgagacggagctatcggcgccgcggcaagagccagcagcaacaacagcagcagcagcagcagcagcagcagcagcagcagcagcccatgccccgcagcagccaggaggagaaagatgagaaggagaaggaaaaggaggcggagaaggaggaggagaagccggaggtggagaacgacaaggaagacctcctcaaggagaagacagacgacacctcaggggaggacaacgacgagaaggaggctgtggcctccaaaggccgcaaaactgccaacagccagggaagacgcaaaggccgcatcacccgctcaatggctaatgaggccaacagcgaggaggccatcaccccccagcagagcgccgagctggcctccatggagctgaatgagagttctcgctggacagaagaagaaatggaaacagccaagaaaggtctcctggaacacggccgcaactggtcggccatcgcccggatggtgggctccaagactgtgtcgcagtgtaagaacttctacttcaactacaagaagaggcagaacctcgatgagatcttgcagcagcacaagctgaagatggagaaggagaggaacgcgcggaggaagaagaagaaagcgccggcggcggccagcgaggaggctgcattcccgcccgtggtggaggatgaggagatggaggcgtcgggcgtgagcggaaatgaggaggagatggtggaggaggctgaagccttacatgcctctgggaatgaggtgcccagaggggaatgcagtggcccagccactgtcaacaacagctcagacaccgagagcatcccctctcctcacactgaggccgccaaggacacagggcagaatgggcccaagcccccagccaccctgggcgccgacgggccacccccagggccacccaccccaccaccggaggacatcccgggcccccantgagcccaccccggcctctgaagccaccggagcccctacgcccccaccagcacccccatcgccctctgcacctcctcctgtggtccccaaggaggagaaggaggaggagaccgcagcagcgcccccagtggaggagggggaggagcagaagccccccgcggctgaggagctggcagtggacacagggaaggccgaggagcccgtcaagagcgagtgcacggaggaagccgaggaggggccggccaagggcaaggacgcggaggccgctgaggccacggccgagggggcgctcaaggcagagaagaaggagggcgggagcggcagggccaccactgccaagagctcgggcgccccccaggacagcgactccagtgctacctgcagtgcagacgaggtggatgaggccgagggcggcgacaagaaccggctgctgtccccaaggcccagcctcctcaccccgactggcgacccccgggccaatgcctcaccccagaagccactggacctgaagcagctgaagcagcgagcggctgccatcccccccatccaggtcaccaaagtccatgagcccccccgggaggacgcagctcccaccaagccagctcccccagccccaccgccaccgcaaaacctgcagccggagagcgacgcccctcagcagcctggcagcagcccccggggcaagagcaggagcccggcaccccccgccgacaaggaggcagagaagcctgtgttcttcccagccttcgcagccgaggcccagaagctgcctggggaccccccttgctggacttccggcctgcccttccccgtgcccccccgtgaggtgatcaaggcctccccgcatgccccggacccctcagccttctcctacgctccacctggtcacccactgcccctgggcctccatgacactgcccggcccgtcctgccgcgcccacccaccatctccaacccgcctcccctcatctcctctgccaagcaccccagcgtcctcgagaggcaaataggtgccatctcccaaggaatgtcggtccagctccacgtcccgtactcagagcatgccaaggccccggtgggccctgtcaccatggggctgcccctgcccatggaccccaaaaagctggcacccttcagcggagtgaagcaggagcagctgtccccacggggccaggctgggccaccggagagcctgggggtgcccacagcccaggaggcgtccgtgctgagagggacagctctgggctcagttccgggcggaagcatcaccaaaggcattcccagcacacgggtgccctcggacagcgccatcacataccgcggctccatcacccacggcacgccagctgacgtcctgtacaagggcaccatcaccaggatcatcggcgaggacagcccgagtcgcttggaccgcggccgggaggacagcctgcccaagggccacgtcatctacgaaggcaagaagggccacgtcttgtcctatgagggtggcatgtctgtgacccagtgctccaaggaggacggcagaagcagctcaggacccccccatgagacggccgcccccaagcgcacctatgacatgatggagggccgcgtgggcagagccatctcctcagccagcatcgaaggtctcatgggccgtgccatcccgccggagcgacacagcccccaccacctcaaagagcagcaccacatccgcgggtccatcacacaagggatccctcggtcctacgtggaggcacaggaggactacctgcgtcgggaggccaagctcctaaagcgggagggcacgcctccgcccccaccgccctcacgggacctgaccgaggcctacaagacgcaggccctgggccccctgaagctgaagccggcccatgagggcctggtggccacggtgaaggaggcgggccgctccatccatgagatcccgcgcgaggagctgcggcacacgcccgagctgcccctggccccgcggccgctcaaggagggctccatcacgcagggcaccccgctcaagtacgacaccggcgcgtccaccactggctccaaaaagcacgacgtacgctccctcatcggcagccccggccggacgttcccacccgtgcacccgctggatgtgatggccgacgcccgggcactggaacgtgcctgctacgaggagagcctgaagagccggccagggaccgccagcagctcggggggctccattgcgcgcggcgccccggtcattgtgcctgagctgggtaagccgcggcagagccccctgacctatgaggaccacggggcaccctttgccggccacctcccacgaggttcgcccgtgaccacgcgggagcccacgccgcgcctgcaggagggcagcctttcgtccagcaaggcatcccaggaccgaaagctgacgtcgacgcctcgtgagatcgccaagtccccgcacagcaccgtgcccgagcaccacccacaccccatctcgccctatgagcacctgcttcggggcgtgagtggcgtggacctgtatcgcagccacatccccctggccttcgaccccacctccataccccgcggcatccctctggacgcagccgctgcctactacctgccccgacacctggcccccaaccccacctacccgcacctgtacccaccctacctcatccgcggctaccccgacacggcggcgctggagaaccggcagaccatcatcaatgactacatcacctcgcagcagatgcaccacaacacggccaccgccatggcccagcgagctgatatgctgaggggcctctcgccccgcgagtcctcgctggcactcaactacgctgcgggtccccgaggcatcatcgacctgtcccaagtgccacacctgcctgtgctcgtgcccccgacaccaggcaccccagccaccgccatggaccgccttgcctacctccccaccgcgccccagcccttcagcagccgccacagcagctccccactctccccaggaggtccaacacacttgacaaaaccaaccaccacgtcctcgtccgagcgggagcgagaccgggatcgagagcgggaccgggatcgggagcgggaaaagtccatcctcacgtccaccacgacggtggagcacgcacccatctggagacctggtacagagcagagcagcggcagcagcggcagcagcggcgggggtgggggcagcagcagccgccccgcctcccactcccatgcccaccagcactcgcccatctcccctcggacccaggatgccctccagcagagacccagtgtgcttcacaacacaggcatgaagggtatcatcaccgctgtggagcccagcacgcccacggtcctgaggtccacctccacctcctcacccgttcgcccggctgccacattcccacctgccacccactgcccactgggcggcaccctcgatggggtctaccctaccctcatggagcccgtcttgctgcccaaggaggccccccgggtcgcccggccagagcggccccgagcagacaccggccatgccttcctcgccaagcccccagcccgctccgggctggagcccgcctcctcccccagcaagggctcggagccccggcccctagtgcctcctgtctctggccacgccaccatcgcccgcacccctgcgaagaacctcgcacctcaccacgccagcccggacccgccggcgccacctgcctcggcctcggacccgcaccgggaaaagactcaaagtaaacccttttccatccaggaactggaactccgttctctgggttaccacggcagcagctacagccccgaaggggtggagcccgtcagccctgtgagctcacccagtctgacccacgacaaggggctccccaagcacctggaagagctcgacaagagccacctggagggggagctgcggcccaagcagccaggccccgtgaagcttggcggggaggccgcccacctcccacacctgcggccgctgcctgagagccagccctcgtccagcccgctgctccagaccgccccaggggtcaaaggtcaccagcgggtggtcaccctggcccagcacatcagtgaggtcatcacacaggactacacccggcaccacccacagcagctcagcgcacccctgcccgcccccctctactccttccctggggccagctgccccgtcctggacctccgccgcccacccagtgacctctacctcccgcccccggaccatggtgccccggcccgtggctccccccacagcgaagggggcaagaggtctccagagccaaacaagacgtcggtcttgggtggtggtgaggacggtattgaacctgtgtccccaccggagggcatgacggagccagggcactcccggagtgctgtgtacccgctgctgtaccgggatggggaacagacggagcccagcaggatgggctccaagtctccaggcaacaccagccagccgccagccttcttcagcaagctgaccgagagcaactccgccatggtcaagtccaagaagcaagagatcaacaagaagctgaacacccacaaccggaatgagcctgaatacaatatcagccagcctgggacggagatcttcaatatgcccgccatcaccggaacagttttagtccacaagaagaaattttccaggctccagtctttgccactcaacctgtgtcagacttcacctttataaatggagatcgttaagcctggagccagctccatcaggtcacggactcgtggccttgggtagaaggcccagtcgcgctgctgtgatttcagcactcacccttgttggaaatgttgctttttcttcatgcacatggctgttttttcaaaagtgctgcagaaatgtggccaagacagcagaaaaggtgtgagcatccctggctacaaacgtatttgaaaccaaaagggaaaagaaaacgcaggcagccagcagttgctacagaaacgtgattttcaaagcatctgcatcacccgcaacctcatggaagcctcggtttggtttacaaaggagcgagtggtcggaaagacgatttgaccactttgtattcgtatgattcattcggagcagaagtttaaaactccatgaaacacttgccccgtggtgggcacggtggaatggggcttcactgggggcttttgaaagcaaaggctggtttaacaaaagttctgaaaagacagcacctctggggggtgtgcaaaggcccccacctccacgtggttcacaagaaagaaaaaagggaaaggaaatgtggttaacagaaaaggaggtttccccgattgt

SEQ ID NO: 329122 - DNA, 5924 bp, Homo sapiens
  misc_feature (2538)..(2538): n is a, c, g, or t
gagtctttgaggacacagcctcgctggaggcagtttctggtgccagtgacggggtggcccgtgagctgatgacgaggactggcttttaatccttggtggtgattaagagaaagcttattgcggcctgggagcagctccccgccgacccccaccaccatgtcgggatccacacagcctgtggcacagacgtggagggccactgagccccgctacccgccccacagcctttcctacccagtgcagatcgcccggacgcacacggacgtcgggctcctggagtaccagcaccactcccgcgactatgcctcccacctgtcgcccggctccatcatccagccccagcggcggaggccctccctgctgtctgagttccagcccgggaatgaacggtcccaggagctccacctgcggccagagtcccactcatacctgcccgagctggggaagtcagagatggagttcattgaaagcaagcgccctcggctagagctgctgcctgaccccctgctgcgaccgtcacccctgctggccacgggccagcctgcgggatctgaagacctcaccaaggaccgtagcctgacgggcaagctggaaccggtgtctccccccagccccccgcacactgaccctgagctggagctggtgccgccacggctgtccaaggaggagctgatccagaacatggaccgcgtggaccgagagatcaccatggtagagcagcagatctctaagctgaagaagaagcagcaacagctggaggaggaggctgccaagccgcccgagcctgagaagcccgtgtcaccgccgcccatcgagtcgaagcaccgcagcctggtgcagatcatctacgacgagaaccggaagaaggctgaagctgcacatcggattctggaaggcctggggccccaggtggagctgccgctgtacaaccagccctccgacacccggcagtatcatgagaacatcaaaataaaccaggcgatgcggaagaagctaatcttgtacttcaagaggaggaatcacgctcggaaacaatgggagcagaagttctgccagcgctatgaccagctcatggaggcctgggagaagaaggtggagcgcatcgagaacaacccccggcggcgggccaaggagagcaaggtgcgcgagtactacgagaagcagttccctgagatccgcaagcagcgcgagctgcaggagcgcatgcagagcagggtgggccagcggggcagtgggctgtccatgtcggccgcccgcagcgagcacgaggtgtcagagatcatcgatggcctctcagagcaggagaacctggagaagcagatgcgccagctggccgtgatcccgcccatgctgtacgacgctgaccagcagcgcatcaagttcatcaacatgaacgggcttatggccgaccccatgaaggtgtacaaagaccgccaggtcatgaacatgtggagtgagcaggagaaggagaccttccgggagaagttcatgcagcatcccaagaactttggcctgatcgcatcattcctggagaggaagacagtggctgagtgcgtcctctattactacctgactaagaagaatgagaactataagagcctggtgagacggagctatcggcgccgcggcaagagccagcagcaacaacagcagcagcagcagcagcagcagcagcagcagcagcagcccatgccccgcagcagccaggaggagaaagatgagaaggagaaggaaaaggaggcggagaaggaggaggagaagccggaggtggagaacgacaaggaagacctcctcaaggagaagacagacgacacctcaggggaggacaacgacgagaaggaggctgtggcctccaaaggccgcaaaactgccaacagccagggaagacgcaaaggccgcatcacccgctcaatggctaatgaggccaacagcgaggaggccatcaccccccagcagagcgccgagctggcctccatggagctgaatgagagttctcgctggacagaagaagaaatggaaacagccaagaaaggtctcctggaacacggccgcaactggtcggccatcgcccggatggtgggctccaagactgtgtcgcagtgtaagaacttctacttcaactacaagaagaggcagaacctcgatgagatcttgcagcagcacaagctgaagatggagaaggagaggaacgcgcggaggaagaagaagaaagcgccggcggcggccagcgaggaggctgcattcccgcccgtggtggaggatgaggagatggaggcgtcgggcgtgagcggaaatgaggaggagatggtggaggaggctgaagccttacatgcctctgggaatgaggtgcccagaggggaatgcagtggcccagccactgtcaacaacagctcagacaccgagagcatcccctctcctcacactgaggccgccaaggacacagggcagaatgggcccaagcccccagccaccctgggcgccgacgggccacccccagggccacccaccccaccaccggaggacatcccgggcccccantgagcccaccccggcctctgaagccaccggagcccctacgcccccaccagcacccccatcgccctctgcacctcctcctgtggtccccaaggaggagaaggaggaggagaccgcagcagcgcccccagtggaggagggggaggagcagaagccccccgcggctgaggagctggcagtggacacagggaaggccgaggagcccgtcaagagcgagtgcacggaggaagccgaggaggggccggccaagggcaaggacgcggaggccgctgaggccacggccgagggggcgctcaaggcagagaagaaggagggcgggagcggcagggccaccactgccaagagctcgggcgccccccaggacagcgactccagtgctacctgcagtgcagacgaggtggatgaggccgagggcggcgacaagaaccggctgctgtccccaaggcccagcctcctcaccccgactggcgacccccgggccaatgcctcaccccagaagccactggacctgaagcagctgaagcagcgagcggctgccatcccccccatccaggtcaccaaagtccatgagcccccccgggaggacgcagctcccaccaagccagctcccccagccccaccgccaccgcaaaacctgcagccggagagcgacgcccctcagcagcctggcagcagcccccggggcaagagcaggagcccggcaccccccgccgacaaggaggcagagaagcctgtgttcttcccagccttcgcagccgaggcccagaagctgcctggggaccccccttgctggacttccggcctgcccttccccgtgcccccccgtgaggtgatcaaggcctccccgcatgccccggacccctcagccttctcctacgctccacctggtcacccactgcccctgggcctccatgacactgcccggcccgtcctgccgcgcccacccaccatctccaacccgcctcccctcatctcctctgccaagcaccccagcgtcctcgagaggcaaataggtgccatctcccaaggaatgtcggtccagctccacgtcccgtactcagagcatgccaaggccccggtgggccctgtcaccatggggctgcccctgcccatggaccccaaaaagctggcacccttcagcggagtgaagcaggagcagctgtccccacggggccaggctgggccaccggagagcctgggggtgcccacagcccaggaggcgtccgtgctgagagggacagctctgggctcagttccgggcggaagcatcaccaaaggcattcccagcacacgggtgccctcggacagcgccatcacataccgcggctccatcacccacggcacgccagctgacgtcctgtacaagggcaccatcaccaggatcatcggcgaggacagcccgagtcgcttggaccgcggccgggaggacagcctgcccaagggccacgtcatctacgaaggcaagaagggccacgtcttgtcctatgagggtggcatgtctgtgacccagtgctccaaggaggacggcagaagcagctcaggacccccccatgagacggccgcccccaagcgcacctatgacatgatggagggccgcgtgggcagagccatctcctcagccagcatcgaaggtctcatgggccgtgccatcccgccggagcgacacagcccccaccacctcaaagagcagcaccacatccgcgggtccatcacacaagggatccctcggtcctacgtggaggcacaggaggactacctgcgtcgggaggccaagctcctaaagcgggagggcacgcctccgcccccaccgccctcacgggacctgaccgaggcctacaagacgcaggccctgggccccctgaagctgaagccggcccatgagggcctggtggccacggtgaaggaggcgggccgctccatccatgagatcccgcgcgaggagctgcggcacacgcccgagctgcccctggccccgcggccgctcaaggagggctccatcacgcagggcaccccgctcaagtacgacaccggcgcgtccaccactggctccaaaaagcacgacgtacgctccctcatcggcagccccggccggacgttcccacccgtgcacccgctggatgtgatggccgacgcccgggcactggaacgtgcctgctacgaggagagcctgaagagccggccagggaccgccagcagctcggggggctccattgcgcgcggcgccccggtcattgtgcctgagctgggtaagccgcggcagagccccctgacctatgaggaccacggggcaccctttgccggccacctcccacgaggttcgcccgtgaccacgcgggagcccacgccgcgcctgcaggagggcagcctttcgtccagcaaggcatcccaggaccgaaagctgacgtcgacgcctcgtgagatcgccaagtccccgcacagcaccgtgcccgagcaccacccacaccccatctcgccctatgagcacctgcttcggggcgtgagtggcgtggacctgtatcgcagccacatccccctggccttcgaccccacctccataccccgcggcatccctctggacgcagccgctgcctactacctgccccgacacctggcccccaaccccacctacccgcacctgtacccaccctacctcatccgcggctaccccgacacggcggcgctggagaaccggcagaccatcatcaatgactacatcacctcgcagcagatgcaccacaacacggccaccgccatggcccagcgagctgatatgctgaggggcctctcgccccgcgagtcctcgctggcactcaactacgctgcgggtccccgaggcatcatcgacctgtcccaagtgccacacctgcctgtgctcgtgcccccgacaccaggcaccccagccaccgccatggaccgccttgcctacctccccaccgcgccccagcccttcagcagccgccacagcagctccccactctccccaggaggtccaacacacttgacaaaaccaaccaccacgtcctcgtccgagcgggagcgagaccgggatcgagagcgggaccgggatcgggagcgggaaaagtccatcctcacgtccaccacgacggtggagcacgcacccatctggagacctggtacagagcagagcagcggcagcagcggcagcagcggcgggggtgggggcagcagcagccgccccgcctcccactcccatgcccaccagcactcgcccatctcccctcggacccaggatgccctccagcagagacccagtgtgcttcacaacacaggcatgaagggtatcatcaccgctgtggagcccagcacgcccacggtcctgaggtccaccatcaacctcctacccgtccccgccgcggatcctctaacag

SEQ ID NO: 329123 - DNA, 4922 bp, Homo sapiens
  misc_feature (2538)..(2538): n is a, c, g, or t
gagtctttgaggacacagcctcgctggaggcagtttctggtgccagtgacggggtggcccgtgagctgatgacgaggactggcttttaatccttggtggtgattaagagaaagcttattgcggcctgggagcagctccccgccgacccccaccaccatgtcgggatccacacagcctgtggcacagacgtggagggccactgagccccgctacccgccccacagcctttcctacccagtgcagatcgcccggacgcacacggacgtcgggctcctggagtaccagcaccactcccgcgactatgcctcccacctgtcgcccggctccatcatccagccccagcggcggaggccctccctgctgtctgagttccagcccgggaatgaacggtcccaggagctccacctgcggccagagtcccactcatacctgcccgagctggggaagtcagagatggagttcattgaaagcaagcgccctcggctagagctgctgcctgaccccctgctgcgaccgtcacccctgctggccacgggccagcctgcgggatctgaagacctcaccaaggaccgtagcctgacgggcaagctggaaccggtgtctccccccagccccccgcacactgaccctgagctggagctggtgccgccacggctgtccaaggaggagctgatccagaacatggaccgcgtggaccgagagatcaccatggtagagcagcagatctctaagctgaagaagaagcagcaacagctggaggaggaggctgccaagccgcccgagcctgagaagcccgtgtcaccgccgcccatcgagtcgaagcaccgcagcctggtgcagatcatctacgacgagaaccggaagaaggctgaagctgcacatcggattctggaaggcctggggccccaggtggagctgccgctgtacaaccagccctccgacacccggcagtatcatgagaacatcaaaataaaccaggcgatgcggaagaagctaatcttgtacttcaagaggaggaatcacgctcggaaacaatgggagcagaagttctgccagcgctatgaccagctcatggaggcctgggagaagaaggtggagcgcatcgagaacaacccccggcggcgggccaaggagagcaaggtgcgcgagtactacgagaagcagttccctgagatccgcaagcagcgcgagctgcaggagcgcatgcagagcagggtgggccagcggggcagtgggctgtccatgtcggccgcccgcagcgagcacgaggtgtcagagatcatcgatggcctctcagagcaggagaacctggagaagcagatgcgccagctggccgtgatcccgcccatgctgtacgacgctgaccagcagcgcatcaagttcatcaacatgaacgggcttatggccgaccccatgaaggtgtacaaagaccgccaggtcatgaacatgtggagtgagcaggagaaggagaccttccgggagaagttcatgcagcatcccaagaactttggcctgatcgcatcattcctggagaggaagacagtggctgagtgcgtcctctattactacctgactaagaagaatgagaactataagagcctggtgagacggagctatcggcgccgcggcaagagccagcagcaacaacagcagcagcagcagcagcagcagcagcagcagcagcagcccatgccccgcagcagccaggaggagaaagatgagaaggagaaggaaaaggaggcggagaaggaggaggagaagccggaggtggagaacgacaaggaagacctcctcaaggagaagacagacgacacctcaggggaggacaacgacgagaaggaggctgtggcctccaaaggccgcaaaactgccaacagccagggaagacgcaaaggccgcatcacccgctcaatggctaatgaggccaacagcgaggaggccatcaccccccagcagagcgccgagctggcctccatggagctgaatgagagttctcgctggacagaagaagaaatggaaacagccaagaaaggtctcctggaacacggccgcaactggtcggccatcgcccggatggtgggctccaagactgtgtcgcagtgtaagaacttctacttcaactacaagaagaggcagaacctcgatgagatcttgcagcagcacaagctgaagatggagaaggagaggaacgcgcggaggaagaagaagaaagcgccggcggcggccagcgaggaggctgcattcccgcccgtggtggaggatgaggagatggaggcgtcgggcgtgagcggaaatgaggaggagatggtggaggaggctgaagccttacatgcctctgggaatgaggtgcccagaggggaatgcagtggcccagccactgtcaacaacagctcagacaccgagagcatcccctctcctcacactgaggccgccaaggacacagggcagaatgggcccaagcccccagccaccctgggcgccgacgggccacccccagggccacccaccccaccaccggaggacatcccgggcccccantgagcccaccccggcctctgaagccaccggagcccctacgcccccaccagcacccccatcgccctctgcacctcctcctgtggtccccaaggaggagaaggaggaggagaccgcagcagcgcccccagtggaggagggggaggagcagaagccccccgcggctgaggagctggcagtggacacagggaaggccgaggagcccgtcaagagcgagtgcacggaggaagccgaggaggggccggccaagggcaaggacgcggaggccgctgaggccacggccgagggggcgctcaaggcagagaagaaggagggcgggagcggcagggccaccactgccaagagctcgggcgccccccaggacagcgactccagtgctacctgcagtgcagacgaggtggatgaggccgagggcggcgacaagaaccggctgctgtccccaaggcccagcctcctcaccccgactggcgacccccgggccaatgcctcaccccagaagccactggacctgaagcagctgaagcagcgagcggctgccatcccccccatccaggtcaccaaagtccatgagcccccccgggaggacgcagctcccaccaagccagctcccccagccccaccgccaccgcaaaacctgcagccggagagcgacgcccctcagcagcctggcagcagcccccggggcaagagcaggagcccggcaccccccgccgacaaggaggcagagaagcctgtgttcttcccagccttcgcagccgaggcccagaagctgcctggggaccccccttgctggacttccggcctgcccttccccgtgcccccccgtgaggtgatcaaggcctccccgcatgccccggacccctcagccttctcctacgctccacctggtcacccactgcccctgggcctccatgacactgcccggcccgtcctgccgcgcccacccaccatctccaacccgcctcccctcatctcctctgccaagcaccccagcgtcctcgagaggcaaataggtgccatctcccaaggaatgtcggtccagctccacgtcccgtactcagagcatgccaaggccccggtgggccctgtcaccatggggctgcccctgcccatggaccccaaaaagctggcacccttcagcggagtgaagcaggagcagctgtccccacggggccaggctgggccaccggagagcctgggggtgcccacagcccaggaggcgtccgtgctgagagggacagctctgggctcagttccgggcggaagcatcaccaaaggcattcccagcacacgggtgccctcggacagcgccatcacataccgcggctccatcacccacggcacgccagctgacgtcctgtacaagggcaccatcaccaggatcatcggcgaggacagcccgagtcgcttggaccgcggccgggaggacagcctgcccaagggccacgtcatctacgaaggcaagaagggccacgtcttgtcctatgagggtggcatgtctgtgacccagtgctccaaggaggacggcagaagcagctcaggacccccccatgagacggccgcccccaagcgcacctatgacatgatggagggccgcgtgggcagagccatctcctcagccagcatcgaaggtctcatgggccgtgccatcccgccggagcgacacagcccccaccacctcaaagagcagcaccacatccgcgggtccatcacacaagggatccctcggtcctacgtggaggcacaggaggactacctgcgtcgggaggccaagctcctaaagcgggagggcacgcctccgcccccaccgccctcacgggacctgaccgaggcctacaagacgcaggccctgggccccctgaagctgaagccggcccatgagggcctggtggccacggtgaaggaggcgggccgctccatccatgagatcccgcgcgaggagctgcggcacacgcccgagctgcccctggccccgcggccgctcaaggagggctccatcacgcagggcaccccgctcaagtacgacaccggcgcgtccaccactggctccaaaaagcacgacgtacgctccctcatcggcagccccggccggacgttcccacccgtgcacccgctggatgtgatggccgacgcccgggcactggaacgtgcctgctacgaggagagcctgaagagccggccagggaccgccagcagctcggggggctccattgcgcgcggcgccccggtcattgtgcctgagctgggtaagccgcggcagagccccctgacctatgaggaccacggggcaccctttgccggccacctcccacgaggttcgcccgtgaccacgcgggagcccacgccgcgcctgcaggaggtccacctcctgggttcacgccattctc

SEQ ID NO: 329124 - DNA, 4248 bp, Homo sapiens
  misc_feature (2538)..(2538): n is a, c, g, or t
gagtctttgaggacacagcctcgctggaggcagtttctggtgccagtgacggggtggcccgtgagctgatgacgaggactggcttttaatccttggtggtgattaagagaaagcttattgcggcctgggagcagctccccgccgacccccaccaccatgtcgggatccacacagcctgtggcacagacgtggagggccactgagccccgctacccgccccacagcctttcctacccagtgcagatcgcccggacgcacacggacgtcgggctcctggagtaccagcaccactcccgcgactatgcctcccacctgtcgcccggctccatcatccagccccagcggcggaggccctccctgctgtctgagttccagcccgggaatgaacggtcccaggagctccacctgcggccagagtcccactcatacctgcccgagctggggaagtcagagatggagttcattgaaagcaagcgccctcggctagagctgctgcctgaccccctgctgcgaccgtcacccctgctggccacgggccagcctgcgggatctgaagacctcaccaaggaccgtagcctgacgggcaagctggaaccggtgtctccccccagccccccgcacactgaccctgagctggagctggtgccgccacggctgtccaaggaggagctgatccagaacatggaccgcgtggaccgagagatcaccatggtagagcagcagatctctaagctgaagaagaagcagcaacagctggaggaggaggctgccaagccgcccgagcctgagaagcccgtgtcaccgccgcccatcgagtcgaagcaccgcagcctggtgcagatcatctacgacgagaaccggaagaaggctgaagctgcacatcggattctggaaggcctggggccccaggtggagctgccgctgtacaaccagccctccgacacccggcagtatcatgagaacatcaaaataaaccaggcgatgcggaagaagctaatcttgtacttcaagaggaggaatcacgctcggaaacaatgggagcagaagttctgccagcgctatgaccagctcatggaggcctgggagaagaaggtggagcgcatcgagaacaacccccggcggcgggccaaggagagcaaggtgcgcgagtactacgagaagcagttccctgagatccgcaagcagcgcgagctgcaggagcgcatgcagagcagggtgggccagcggggcagtgggctgtccatgtcggccgcccgcagcgagcacgaggtgtcagagatcatcgatggcctctcagagcaggagaacctggagaagcagatgcgccagctggccgtgatcccgcccatgctgtacgacgctgaccagcagcgcatcaagttcatcaacatgaacgggcttatggccgaccccatgaaggtgtacaaagaccgccaggtcatgaacatgtggagtgagcaggagaaggagaccttccgggagaagttcatgcagcatcccaagaactttggcctgatcgcatcattcctggagaggaagacagtggctgagtgcgtcctctattactacctgactaagaagaatgagaactataagagcctggtgagacggagctatcggcgccgcggcaagagccagcagcaacaacagcagcagcagcagcagcagcagcagcagcagcagcagcccatgccccgcagcagccaggaggagaaagatgagaaggagaaggaaaaggaggcggagaaggaggaggagaagccggaggtggagaacgacaaggaagacctcctcaaggagaagacagacgacacctcaggggaggacaacgacgagaaggaggctgtggcctccaaaggccgcaaaactgccaacagccagggaagacgcaaaggccgcatcacccgctcaatggctaatgaggccaacagcgaggaggccatcaccccccagcagagcgccgagctggcctccatggagctgaatgagagttctcgctggacagaagaagaaatggaaacagccaagaaaggtctcctggaacacggccgcaactggtcggccatcgcccggatggtgggctccaagactgtgtcgcagtgtaagaacttctacttcaactacaagaagaggcagaacctcgatgagatcttgcagcagcacaagctgaagatggagaaggagaggaacgcgcggaggaagaagaagaaagcgccggcggcggccagcgaggaggctgcattcccgcccgtggtggaggatgaggagatggaggcgtcgggcgtgagcggaaatgaggaggagatggtggaggaggctgaagccttacatgcctctgggaatgaggtgcccagaggggaatgcagtggcccagccactgtcaacaacagctcagacaccgagagcatcccctctcctcacactgaggccgccaaggacacagggcagaatgggcccaagcccccagccaccctgggcgccgacgggccacccccagggccacccaccccaccaccggaggacatcccgggcccccantgagcccaccccggcctctgaagccaccggagcccctacgcccccaccagcacccccatcgccctctgcacctcctcctgtggtccccaaggaggagaaggaggaggagaccgcagcagcgcccccagtggaggagggggaggagcagaagccccccgcggctgaggagctggcagtggacacagggaaggccgaggagcccgtcaagagcgagtgcacggaggaagccgaggaggggccggccaagggcaaggacgcggaggccgctgaggccacggccgagggggcgctcaaggcagagaagaaggagggcgggagcggcagggccaccactgccaagagctcgggcgccccccaggacagcgactccagtgctacctgcagtgcagacgaggtggatgaggccgagggcggcgacaagaaccggctgctgtccccaaggcccagcctcctcaccccgactggcgacccccgggccaatgcctcaccccagaagccactggacctgaagcagctgaagcagcgagcggctgccatcccccccatccaggtcaccaaagtccatgagcccccccgggaggacgcagctcccaccaagccagctcccccagccccaccgccaccgcaaaacctgcagccggagagcgacgcccctcagcagcctggcagcagcccccggggcaagagcaggagcccggcaccccccgccgacaaggaggcagagaagcctgtgttcttcccagccttcgcagccgaggcccagaagctgcctggggaccccccttgctggacttccggcctgcccttccccgtgcccccccgtgaggtgatcaaggcctccccgcatgccccggacccctcagccttctcctacgctccacctggtcacccactgcccctgggcctccatgacactgcccggcccgtcctgccgcgcccacccaccatctccaacccgcctcccctcatctcctctgccaagcaccccagcgtcctcgagaggcaaataggtgccatctcccaaggaatgtcggtccagctccacgtcccgtactcagagcatgccaaggccccggtgggccctgtcaccatggggctgcccctgcccatggaccccaaaaagctggcacccttcagcggagtgaagcaggagcagctgtccccacggggccaggctgggccaccggagagcctgggggtgcccacagcccaggaggcgtccgtgctgagagggacagctctgggctcagttccgggcggaagcatcaccaaaggcattcccagcacacgggtgccctcggacagcgccatcacataccgcggctccatcacccacggcacgccagctgacgtcctgtacaagggcaccatcaccaggatcatcggcgaggacagcccgagtcgcttggaccgcggccgggaggacagcctgcccaagggccacgtcatctacgaaggcaagaagggccacgtcttgtcctatgagggtggcatgtctgtgacccagtgctccaaggaggacggcagaagcagctcaggacccccccatgagacggccgcccccaagcgcacctatgacatgatggagggccgcgtgggcagagccatctcctcagccagcatcgaaggtctcatgggccgtgccatcccgccggagcgacacagcccccaccacctcaaagagcctcatgtgtaggagcctcatgtgta

SEQ ID NO: 329125 - DNA, 1523 bp, Homo sapiens
gagtctttgaggacacagcctcgctggaggcagtttctggtgccagtgacggggtggcccgtgagctgatgacgaggactggcttttaatccttggtggtgattaagagaaagcttattgcggcctgggagcagctccccgccgacccccaccaccatgtcgggatccacacagcctgtggcacagacgtggagggccactgagccccgctacccgccccacagcctttcctacccagtgcagatcgcccggacgcacacggacgtcgggctcctggagtaccagcaccactcccgcgactatgcctcccacctgtcgcccggctccatcatccagccccagcggcggaggccctccctgctgtctgagttccagcccgggaatgaacggtcccaggagctccacctgcggccagagtcccactcatacctgcccgagctggggaagtcagagatggagttcattgaaagcaagcgccctcggctagagctgctgcctgaccccctgctgcgaccgtcacccctgctggccacgggccagcctgcgggatctgaagacctcaccaaggaccgtagcctgacgggcaagctggaaccggtgtctccccccagccccccgcacactgaccctgagctggagctggtgccgccacggctgtccaaggaggagctgatccagaacatggaccgcgtggaccgagagatcaccatggtagagcagcagatctctaagctgaagaagaagcagcaacagctggaggaggaggctgccaagccgcccgagcctgagaagcccgtgtcaccgccgcccatcgagtcgaagcaccgcagcctggtgcagatcatctacgacgagaaccggaagaaggctgaagctgcacatcggattctggaaggcctggggccccaggtggagctgccgctgtacaaccagccctccgacacccggcagtatcatgagaacatcaaaataaaccaggcgatgcggaagaagctaatcttgtacttcaagaggaggaatcacgctcggaaacaatgggagcagaagttctgccagcgctatgaccagctcatggaggcctgggagaagaaggtggagcgcatcgagaacaacccccggcggcgggccaaggagagcaaggtgcgcgagtactacgagaagcagttccctgagatccgcaagcagcgcgagctgcaggagcgcatgcagagcagggtgggccagcggggcagtgggctgtccatgtcggccgcccgcagcgagcacgaggtgtcagagatcatcgatggcctctcagagcaggaggtgagtccaggccctgactctggcctcagctccttttccctggcatcccccgtgagggtgcagaggccctagccagaaaccacctcccgggtggtttacgtcgaggggctttgccaccgaagcgcgggtggaatcaaggtgggtattgaggtacccgtcccaggcctgcaggggcgagcagagagaggggtgttaatgtgtctgagagggagggtagc

SEQ ID NO: 329126 - DNA, 430 bp, Homo sapiens
cgggtgaagcttgcttccaaatgtctaaggcatctcaggtggtgagttccccatcatcaaaggcatgcaagctcggcaccaagtgagctgatgtgaggtgtttgatcctcacagcaggatgggctccaagtctccaggcaacaccagccagccgccagccttcttcagcaagctgaccgagagcaactccgccatggtcaagtccaagaagcaagagatcaacaagaagctgaacacccacaaccggaatgagcctgaatacagtaaggggcctgcaggctcccggggaagcatggggccacaggtgggcgggtggcctgcctgggcagctggagccgcccagtggcagaaacccacggtgcaccttcgaaagctaagtggccctgctgaccacctccccccaggccctttgcctcacatttggggagcc

SEQ ID NO: 329127 - DNA, 446 bp, Homo sapiens
accctgggcccggtgcctgactctgcaccccccgcctgccctaggttaccacggcagcagctacagccccgaaggggtggagcccgtcagccctgtgagctcacccagtctgacccacgacaaggggctccccaagcacctggaagagctcgacaagagccacctggagggggagctgcggcccaagcagccaggtacgccccacccagtacccaggcccccgaagccctgcacagtgaggaccctcaaggccccatcatgcagataggaaaacagaggtgcctaaaggccaaggaattggctggatcatgaggctcaaaggcatggggctgggatttgggcccagcagccctggggccagcagacaccccctgaccagctctgctctgcctgcaggccccgtgaagcttggcggggaggccgcccacctcccacacctgcggccg

SEQ ID NO: 329128 - DNA, 561 bp, Homo sapiens
  misc_feature (43)..(44): n is a, c, g, or t
ggccgaataggaacagctccggtctacagctcccagcgtgagnnacgcagaagacgggtgatttctgcatttccatctgagtatggatttatcaacacctgtctgcaatctcttgtgatagagaaatttggtgaagaaacatgggaaaaattgaaaagcaagtgctcagggaaatgaagacaggagaactgctgccgtcatgagctatgccgacagtcagcagctgatccccgacagaaacgcagcagatgcagacgctcctgatgaaatcatccctgtggggagtgcagggccagatggggactccatggagacagccgaccggcgacagccttcagctccgacaaagacacatcaccttgcaaatgacactttgccgtctggtttctgtgttttgttgtaacaggttaaatgaacccctgggcttaattttccccctacttagttctgtggcagcaaagaaaagtgacttcttttcatttctcagctcaaaacttcttaagccgtgtctcttcctcatcatccctttgagaataaaagtctagaaatgaaacacaatcc

SEQ ID NO: 329129 - DNA, 986 bp, Homo sapiens
tgatacctggtttctgttgtaggagaatttaaaagctgcacgattcttttcagcgatgtagtgacatttactaacatctgtactgcctgtgaacctatacaaatagtgaacgtgctgaattccatgtactccaagtttgacagattaaccagtgtgcacgcagtctataaagtagaaacaataggagatgcttatatggtggtaggaggtgtaccagtgcctattggaaaccatgctcaaagagtggctaattttgccttggggatgagaatttctgcaaaggaagtgacgaatcctgttactggagaacccatccaggtagagagcaactgagtacttggcttaatgccaaacatctcacacacaaaagtagaattctgcttatgtgcttaggtgattactgggtaagttgctgtcattaaaatgggtaatgtatcctagcccttttcttctcttgcatatgtccctaatagagatattcctaaggctcctatagtctcaacttttctcaaatttcagaggaggctgcggtgctcaaggttttcctacgattgactgcaagcttcctttgttggtaattcaggacagtgctgagcagttcttcctatttacctagcagggctcaatccatcttaaacaccagctcatttataattcctgcttttatgttcaagcatttcaacaagtggttcaggtttaatgagcagccaacttttcctgcttaggaaattgtgtctccaacatgccatctgacaggttcagaactcaggctgaggtgtgaggctgcctgcagtcagcaggccaggcaccgtgatgccgtaagatattcagaatggctttccttccaccaagtggccactagcgagacatctgctcgcctttctcacagaaaagtacgcttccaagtctggaagtttgttcacactctaaaagttgaacagttttggaggtgaaaaatgaatgtcctcctccgctggctcagcaga

SEQ ID NO: 329130 - DNA, 2752 bp, Homo sapiens
  misc_feature (43)..(44): n is a, c, g, or t
ggccgaataggaacagctccggtctacagctcccagcgtgagnnacgcagaagacgggtgatttctgcatttccatctgaggtgactgaggacccaacagtgtgctccttgcttggaggctagtgatgagctcctaatttcactgtggactgcccagatttctacaagacaggcttctggagacgctgtggattctctcctgagtgactaggggctggcaggaagggcgggcgcttggtgctgcatctcaatccctgtggccccaggagcagctgcggcaggaacatgtatggatttatcaacacctgtctgcaatctcttgtgatagagaaatttggtgaagaaacatgggaaaaattgaaaacttctgcagaagtacaagatgccttcatgacctacacaatgtatgatgacgtcatcaccattaagctcatccaagaggcctgcaacattctgggagatgaatgcaccatcgtttcgtgtggagagaggagcagatgggaaaatgtttctccattactactcggatagaagtggtctgtgccacattgtaccaggccctccaggcagctttcctcaagatgaaggagaaatatttgaatgtctctgcttgtcctgtgaaaaaatcccactgggatgttgtgagaagcatagtcatgtttggaaaagggcatctcatgaacacctttgagccaatttatcctgagagactctggattgaagagaagacattctgcaacgcttttcctttccacattgtattcgatgaatcactacaggtgaagcaagccagagtgaacattcagaagtacgtaccaggactccaaacccagaatattcaactggatgagtatttctccatcattcatcctcaagttaccttcaacattttcagcatccgcagatttatcaacagtcaatttgtcctgaagacacgaagagaaatgatgcctgtagcatggcaaagtcggactacactcaaacttcaaggccagatgatctggatggagtccatgtggtgcatggtgtacctgtgctctccgaagctccgcagcctgcaagagctggaagaactcaatatgcatctttctgacatcgcccccaacgacaccaccagggatctcatcctcctgaaccagcagcggctggctgagatagagctgtccaaccagctggaaaggaagaaggaggagctacaggtcctctccaagcacttggccattgaaaagaagaaaacagagaccttactttatgccatgctgcccaaacacgtggccaaccagctgagggagggcaaaaaggtggctgcaggagaatttaaaagctgcacgattcttttcagcgatgtagtgacatttactaacatctgtactgcctgtgaacctatacaaatagtgaacgtgctgaattccatgtactccaagtttgacagattaaccagtgtgcacgcagtctataaagtagaaacaataggagatgcttatatggtggtaggaggtgtaccagtgcctattggaaaccatgctcaaagagtggctaattttgccttggggatgagaatttctgcaaaggaagtgacgaatcctgttactggagaacccatccagctcagagtggggatccatactggaccagtcttagcagatgttgtaggagacaagatgccacggtactgcttgtttggtgacactgtgaacacagcttctaggatggaaagtcatgggcttcccaacaaagtgcacctcagtcccacagcctacagagccttgaaaaatcaagggtttaaaatcattgagaggggtgaaattgaagtgaaaggtaaagggagaatgaccacatactttttgatccagaacttgaatgccacagaggatgagatcatggggagatctaaaaccccagttgatcacaaggggtcaacacagaaagcatccttgcccaccaccaagctccagggctcagttcaaccatcttgccctgaacactcttctcttgcatcctggttattatgacgttctttgagctgggccgatagatccagctgaagagttctacatacattagtcttcaaggttcttctctgggcgtttcccatgcagctctctggtagctggggaatgatttgtaatgagtacatgaaacacgttaaatgtccttcagcctccctaccacgacatccaacagctggaacttccatccagtccttcacatgatgggcacctgtgggaaacctgccaggggcagccgatgttcagaggcatccaaaaaaagtctcccacttcggcagccatgaagcccactcatgcaaccgtcctcacttttccttcctctcacggttttttgcagaagcaagtgctcagggaaatgaagacaggagaactgctgccgtcatgagctatgccgacagtcagcagctgatccccgacagaaacgcagcagatgcagacgctcctgatgaaatcatccctgtggggagtgcagggccagatggggactccatggagacagccgaccggcgacagccttcagctccgacaaagacacatcaccttgcaaatgacactttgccgtctggtttctgtgttttgttgtaacaggttaaatgaacccctgggcttaattttccccctacttagttctgtggcagcaaagaaaagtgacttcttttcatttctcagctcaaaacttcttaagccgtgtctcttcctcatcatccctttgagaataaaagtctagaaatgaaacacaatcc

SEQ ID NO: 329131 - DNA, 921 bp, Homo sapiens
attatctcccatgggacacacacgacttttttgggggggttacttagggaggagcagcagcgagggcacttcagtgattctagtgtgcagtcagcattaagaactatgtctaagaccaaagcaatgcagaagaaagggccctgcagggtctttcttgtgccccactccaccctagcacaaaaagacccagaaggtgacagaaacaagaaaggatagtgtccaggagagctcttcctcaaatgagcctcctctcctccacttcgttctcaagacagtgcatttcctcgttctaggtaatgagtacatgaaacacgttaaatgtccttcagcctccctaccacgacatccaacagctggaacttccatccagtccttcacatgatgggcacctgtgggaaacctgccaggggcagccgatgttcagaggcatccaaaaaaagtctcccacttcggcagccatgaagcccactcatgcaaccgtcctcacttttccttcctctcacggttttttgcagaagcaagtgctcagggaaatgaagacaggagaactgctgccgtcatgagctatgccgacagtcagcagctgatccccgacagaaacgcagcagatgcagacgctcctgatgaaatcatccctgtggggagtgcagggccagatggggactccatggagacagccgaccggcgacagccttcagctccgacaaagacacatcaccttgcaaatgacactttgccgtctggtttctgtgttttgttgtaacaggttaaatgaacccctgggcttaattttccccctacttagttctgtggcagcaaagaaaagtgacttcttttcatttctcagctcaaaacttcttaagccgtgtctcttcctcatcatccctttgagaataaaagtctagaaatgaaacacaatcc

SEQ ID NO: 329132 - DNA, 855 bp, Homo sapiens
aaatggaggcccatgaggactgtggtgaaggtctgaactctctaccaacctggccaagggcaagggaaggctcgatggagtgccgagagccttgaaaaatcaagggtttaaaatcattgagaggggtgaaattgaagtgaaaggtaaagggagaatgaccacatactttttgatccagaacttgaatgccacagaggatgagatcatggggagatctaaaaccccagttgatcacaaggggtcaacacagaaagcatccttgcccaccaccaagctccagggctcagttcaaccatcttgccctgaacactcttctcttgcatcctggttattatgacgttctttgagctgggccgatagatccagctgaagagttctacatacattagtcttcaaggttcttctctgggcgtttcccatgcagctctctggtagctggggaatgatttaagcaagtgctcagggaaatgaagacaggagaactgctgccgtcatgagctatgccgacagtcagcagctgatccccgacagaaacgcagcagatgcagacgctcctgatgaaatcatccctgtggggagtgcagggccagatggggactccatggagacagccgaccggcgacagccttcagctccgacaaagacacatcaccttgcaaatgacactttgccgtctggtttctgtgttttgttgtaacaggttaaatgaacccctgggcttaattttccccctacttagttctgtggcagcaaagaaaagtgacttcttttcatttctcagctcaaaacttcttaagccgtgtctcttcctcatcatccctttgagaataaaagtctagaaatgaaacacaatcc

SEQ ID NO: 329133 - DNA, 456 bp, Homo sapiens
gattgtttcaaaaaaatttattacttccatgatgttgattccattactgaccccctttcccgatagtgagccacagaacatggctagaatgttatttccaaggggaagtttatgggaagggaggttgctttctattcctcagcttatatctgtcctctgtggatagctacaggtgaagcaagccagagtgaacattcagaagtacgtaccaggactccaaacccagaatattcaactggatgagtatttctccatcattcatcctcaagttaccttcaacattttcagcatccgcagatttatcaacagtcaatttgtcctgaagacacgaagagaaatgatgcctgtagcatggcaaagtcggactacactcaaacttcaaggtaatcactcactcctttcctgttgctccccacctgtttgagagattgatccgaaagggaagaggcagttttc

SEQ ID NO: 329134 - DNA, 3106 bp, Homo sapiens
  misc_feature (43)..(44): n is a, c, g, or t
ggccgaataggaacagctccggtctacagctcccagcgtgagnnacgcagaagacgggtgatttctgcatttccatctgaggtgactgaggacccaacagtgtgctccttgcttggaggctagtgatgagctcctaatttcactgtggactgcccagatttctacaagacaggcttctggagacgctgtggattctctcctgagtgactaggggctggcaggaagggcgggcgcttggtgctgcatctcaatccctgtggccccaggagcagctgcggcaggaacatgtatggatttatcaacacctgtctgcaatctcttgtgatagagaaatttggtgaagaaacatgggaaaaattgaaaacttctgcagaagtacaagatgccttcatgacctacacaatgtatgatgacgtcatcaccattaagctcatccaagaggcctgcaacattctgggtgtctccatggaagccatcctgaaactctttggagaatactttcaattctgaagatgtctggctatgacaggatgctacggacactgggaggaaatctcatggagtttattgaaaacctggatgccctccacagttacctggcactctcttatcaggagatgaatgcaccatcgtttcgtgtggagagaggagcagatgggaaaatgtttctccattactactcggatagaagtggtctgtgccacattgtaccaggtatcattgaggctgtggccaaagacttctttgatattgatgtaatcatggacattcttgacatgaatgaagaagtggagaggacagggaagaaggagcatgttgtgtttctgattgtacagaaggctcacaggaagatgagaaagacaaagccaaaaaggttacaagacagtcagggcatggagagagaccaagaggccctccaggcagctttcctcaagatgaaggagaaatatttgaatgtctctgcttgtcctgtgaaaaaatcccactgggatgttgtgagaagcatagtcatgtttggaaaagggcatctcatgaacacctttgagccaatttatcctgagagactctggattgaagagaagacattctgcaacgcttttcctttccacattgtattcgatgaatcactacaggtgaagcaagccagagtgaacattcagaagtacgtaccaggactccaaacccagaatattcaactggatgagtatttctccatcattcatcctcaagttaccttcaacattttcagcatccgcagatttatcaacagtcaatttgtcctgaagacacgaagagaaatgatgcctgtagcatggcaaagtcggactacactcaaacttcaaggccagatgatctggatggagtccatgtggtgcatggtgtacctgtgctctccgaagctccgcagcctgcaagagctggaagaactcaatatgcatctttctgacatcgcccccaacgacaccaccagggatctcatcctcctgaaccagcagcggctggctgagatagagctgtccaaccagctggaaaggaagaaggaggagctacaggtcctctccaagcacttggccattgaaaagaagaaaacagagaccttactttatgccatgctgcccaaacacgtggccaaccagctgagggagggcaaaaaggtggctgcaggagaatttaaaagctgcacgattcttttcagcgatgtagtgacatttactaacatctgtactgcctgtgaacctatacaaatagtgaacgtgctgaattccatgtactccaagtttgacagattaaccagtgtgcacgcagtctataaagtagaaacaataggagatgcttatatggtggtaggaggtgtaccagtgcctattggaaaccatgctcaaagagtggctaattttgccttggggatgagaatttctgcaaaggaagtgacgaatcctgttactggagaacccatccagctcagagtggggatccatactggaccagtcttagcagatgttgtaggagacaagatgccacggtactgcttgtttggtgacactgtgaacacagcttctaggatggaaagtcatgggcttcccaacaaagtgcacctcagtcccacagcctacagagccttgaaaaatcaagggtttaaaatcattgagaggggtgaaattgaagtgaaaggtaaagggagaatgaccacatactttttgatccagaacttgaatgccacagaggatgagatcatggggagatctaaaaccccagttgatcacaaggggtcaacacagaaagcatccttgcccaccaccaagctccagggctcagttcaaccatcttgccctgaacactcttctcttgcatcctggttattatgacgttctttgagctgggccgatagatccagctgaagagttctacatacattagtcttcaaggttcttctctgggcgtttcccatgcagctctctggtagctggggaatgatttgtaatgagtacatgaaacacgttaaatgtccttcagcctccctaccacgacatccaacagctggaacttccatccagtccttcacatgatgggcacctgtgggaaacctgccaggggcagccgatgttcagaggcatccaaaaaaagtctcccacttcggcagccatgaagcccactcatgcaaccgtcctcacttttccttcctctcacggttttttgcagaagcaagtgctcagggaaatgaagacaggagaactgctgccgtcatgagctatgccgacagtcagcagctgatccccgacagaaacgcagcagatgcagacgctcctgatgaaatcatccctgtggggagtgcagggccagatggggactccatggagacagccgaccggcgacagccttcagctccgacaaagacacatcaccttgcaaatgacactttgccgtctggtttctgtgttttgttgtaacaggttaaatgaacccctgggcttaattttccccctacttagttctgtggcagcaaagaaaagtgacttcttttcatttctcagctcaaaacttcttaagccgtgtctcttcctcatcatccctttgagaataaaagtctagaaatgaaacacaatcc

SEQ ID NO: 329135 - DNA, 624 bp, Homo sapiens
ccgtgggactcttttacactttgaacagaaaaatctgtttttaaaactaacttttaattttagaatagtcttagactcacagaaaagttgcaaagatcagtcctgcaaacctcatcccagtctccacattgttaacagactacagaacatgtgtcacaagtagtgagccagggtccatgtattattttaaccgagttcatactttattctgatttcctcagttttttccagctgtcctttttcccttacgttatatttaatccttgcgtctccctagattccttggactatgacagtttctcgtactttctttgttttgggttaccttgtcagttttgaggagcagaggtcaagtgttctgtagaatgtcagtgcattgggatttgtcagatgcttttctcacaggcaggtgatggatttgggggaggaagaccacagagggtgaagtgctcttctcgtcacatcatatcaaaggtactgctggtcttgaatgaacgatcgttttggtgaggtgccatttgtcaggtttttctactgtaaagttacccttccctccttcccctgctccaccatttccatactgtcctctttggaaggaagttactatgtgtggcccactctttt

SEQ ID NO: 329136 - DNA, 136 bp, Homo sapiens
gagaaaaaggagagagatttggatacagtgacacagactctcaaggagaaggccctatgaccacagagacagagactggagtgacgcatctagaagccaaggaccaccaaggatcgcagaaaccatgagaagctga

SEQ ID NO: 329137 - DNA, 4094 bp, Homo sapiens
gcgcgtcgagcgggagcagaggaggcgagggaggagggccagagaggcagttggaagatggcggacgaggcggccctcgcccttcagcccggcggctccccctcggcggcgggggccgacagggaggccgcgtcgtcccccgccggggagccgctccgcaagaggccgcggagagatggtcccggcctcgagcggagcccgggcgagcccggtggggcggccccagagcgtgaggtgccggcggcggccaggggctgcccgggtgcggcggcggcggcgctgtggcgggaggcggaggcagaggcggcggcggcaggcggggagcaagaggcccaggcgactgcggcggctggggaaggagacaatgggccgggcctgcagggcccatctcgggagccaccgctggccgacaacttgtacgacgaagacgacgacgacgagggcgaggaggaggaagaggcggcggcggcggcgattgggtaccgagataaccttctgttcggtgatgaaattatcactaatggttttcattcctgtgaaagtgatgaggaggatagagcctcacatgcaagctctagtgactggactccaaggccacggataggtccatatacttttgttcagcaacatcttatgattggcacagatcctcgaacaattcttaaagatttattgccggaaacaatacctccacctgagttggatgatatgacactgtggcagattgttattaatatcctttcagaaccaccaaaaaggaaaaaaagaaaagatattaatacaattgaagatgctgtgaaattactgcaagagtgcaaaaaaattatagttctaactggagctggggtgtctgtttcatgtggaatacctgacttcaggtcaagggatggtatttatgctcgccttgctgtagacttcccagatcttccagatcctcaagcgatgtttgatattgaatatttcagaaaagatccaagaccattcttcaagtttgcaaaggaaatatatcctggacaattccagccatctctctgtcacaaattcatagccttgtcagataaggaaggaaaactacttcgcaactatacccagaacatagacacgctggaacaggttgcgggaatccaaaggataattcagtgtcatggttcctttgcaacagcatcttgcctgatttgtaaatacaaagttgactgtgaagctgtacgaggagatatttttaatcaggtagttcctcgatgtcctaggtgcccagctgatgaaccgcttgctatcatgaaaccagagattgtgttttttggtgaaaatttaccagaacagtttcatagagccatgaagtatgacaaagatgaagttgacctcctcattgttattgggtcttccctcaaagtaagaccagtagcactaattccaagttccataccccatgaagtgcctcagatattaattaatagagaacctttgcctcatctgcattttgatgtagagcttcttggagactgtgatgtcataattaatgaattgtgtcataggttaggtggtgaatatgccaaactttgctgtaaccctgtaaagctttcagaaattactgaaaaacctccacgaacacaaaaagaattggcttatttgtcagagttgccacccacacctcttcatgtttcagaagactcaagttcaccagaaagaacttcaccaccagattcttcagtgattgtcacacttttagaccaagcagctaagagtaatgatgatttagatgtgtctgaatcaaaaggttgtatggaagaaaaaccacaggaagtacaaacttctaggaatgttgaaagtattgctgaacagatggaaaatccggatttgaagaatgttggttctagtactggggagaaaaatgaaagaacttcagtggctggaacagtgagaaaatgctggcctaatagagtggcaaaggagcagattagtaggcggcttgatggtaatcagtatctgtttttgccaccaaatcgttacattttccatggcgctgaggtatattcagactctgaagatgacgtcttatcctctagttcttgtggcagtaacagtgatagtgggacatgccagagtccaagtttagaagaacccatggaggatgaaagtgaaattgaagaattctacaatggcttagaagatgagcctgatgttccagagagagctggaggagctggatttgggactgatggagatgatcaagaggcaattaatgaagctatatctgtgaaacaggaagtaacagacatgaactatccatcaaacaaatcatagtgtaataattgtgcaggtacaggaattgttccaccagcattaggaactttagcatgtcaaaatgaatgtttacttgtgaactcgatagagcaaggaaaccagaaaggtgtaatatttataggttggtaaaatagattgtttttcatggataatttttaacttcattatttctgtacttgtacaaactcaacactaacttttttttttttaaaaaaaaaaaggtactaagtatcttcaatcagctgttggtcaagactaactttcttttaaaggttcatttgtatgataaattcatatgtgtatatataattttttttgttttgtctagtgagtttcaacatttttaaagttttcaaaaagccatcggaatgttaaattaatgtaaagggaacagctaatctagaccaaagaatggtattttcacttttctttgtaacattgaatggtttgaagtactcaaaatctgttacgctaaacttttgattctttaacacaattatttttaaacactggcattttccaaaactgtggcagctaactttttaaaatctcaaatgacatgcagtgtgagtagaaggaagtcaacaatatgtggggagagcactcggttgtctttacttttaaaagtaatacttggtgctaagaatttcaggattattgtatttacgttcaaatgaagatggcttttgtacttcctgtggacatgtagtaatgtctatattggctcataaaactaacctgaaaaacaaataaatgctttggaaatgtttcagttgctttagaaacattagtgcctgcctggatccccttagttttgaaatatttgccattgttgtttaaatacctatcactgtggtagagcttgcattgatcttttccacaagtattaaactgccaaaatgtgaatatgcaaagcctttctgaatctataataatggtacttctactggggagagtgtaatattttggactgctgttttccattaatgaggagagcaacaggcccctgattatacagttccaaagtaataagatgttaattgtaattcagccagaaagtacatgtctcccattgggaggatttggtgttaaataccaaactgctagccctagtattatggagatgaacatgatgatgtaacttgtaatagcagaatagttaatgaatgaaactagttcttataatttatctttatttaaaagcttagcctgccttaaaactagagatcaactttctcagctgcaaaagcttctagtctttcaagaagttcatactttatgaaattgcacagtaagcatttatttttcagaccatttttgaacatcactcctaaattaataaagtattcctctgttgctttagtatttattacaataaaaagggtttgaaatatagctgttctttatgcataaaacacccagctaggaccattactgccagagaaaaaaatcgtattgaatggccatttccctacttataagatgtctcaatctgaatttatttggctacactaaagaatgcagtatatttagttttccatttgcatgatgtttgtgtgctatagatgatattttaaattgaaaagtttgttttaaattatttttacagtgaagactgttttcagctctttttatattgtacatagtcttttatgtaatttactggcatatgttttgtagactgtttaatgactggatatcttccttcaacttttgaaatacaaaaccagtgttttttacttgtacactgttttaaagtctattaaaattgtcatttgacttttttctgttaa

SEQ ID NO: 329138 - DNA, 754 bp, Homo sapiens
tcataaggacacttataataaaggcagagctggaacccacacttcattccagactgctcagactgagttagtgttagaaaactgaaagtaacatttttattactgtatttcaggtaatcagtatctgtttttgccaccaaatcgttacattttccatggcgctgaggtatattcagactctgaagatgacgtcttatcctctagttcttgtggcagtaacagtgatagtgggacatgccagagtccaagtttagaagaacccatggaggatgaaagtgaaattgaagaattctacaatggcttagaagatgagcctgatgttccagagagagctggaggagctggatttgggactgatggagatgatcaagaggcaattaatgaagctatatctgtgaaacaggaagtaacagacatgaactatccatcaaacaaatcatagtgtaataattgtgcaggtacaggaattgttccaccagcattaggaactttagcatgtcaaaatgaatgtttacttgtgaactcgatagagcaaggaaaccagaaaggtgtaatatttataggttggtaaaatagattgtttttcatggataatttttaacttcattatttctgtacttgtacaaactcaacactaacttttttttttttttttcctttttttttttttttttttttttttttttttttttttttttttttttttatatacaaaaaaaacaaaaaaattaagggggagaaacaccacgccacc

SEQ ID NO: 329139 - DNA, 2613 bp, Homo sapiens
gcgcgtcgagcgggagcagaggaggcgagggaggagggccagagaggcagttggaagatggcggacgaggcggccctcgcccttcagcccggcggctccccctcggcggcgggggccgacagggaggccgcgtcgtcccccgccggggagccgctccgcaagaggccgcggagagatggtcccggcctcgagcggagcccgggcgagcccggtggggcggccccagagcgtgaggtgccggcggcggccaggggctgcccgggtgcggcggcggcggcgctgtggcgggaggcggaggcagaggcggcggcggcaggcggggagcaagaggcccaggcgactgcggcggctggggaaggagacaatgggccgggcctgcagggcccatctcgggagccaccgctggccgacaacttgtacgacgaagacgacgacgacgagggcgaggaggaggaagaggcggcggcggcggcgattgggtaccgagataaccttctgttcggtgatgaaattatcactaatggttttcattcctgtgaaagtgatgaggaggatagagcctcacatgcaagctctagtgactggactccaaggccacggataggtccatatacttttgttcagcaacatcttatgattggcacagatcctcgaacaattcttaaagatttattgccggaaacaatacctccacctgagttggatgatatgacactgtggcagattgttattaatatcctttcagaaccaccaaaaaggaaaaaaagaaaagatattaatacaattgaagatgctgtgaaattactgcaagagtgcaaaaaaattatagttctaactggagctggggtgtctgtttcatgtggaatacctgacttcaggtcaagggatggtatttatgctcgccttgctgtagacttcccagatcttccagatcctcaagcgatgtttgatattgaatatttcagaaaagatccaagaccattcttcaagtttgcaaaggaaatatatcctggacaattccagccatctctctgtcacaaattcatagccttgtcagataaggaaggaaaactacttcgcaactatacccagaacatagacacgctggaacaggttgcgggaatccaaaggataattcagtgtcatggttcctttgcaacagcatcttgcctgatttgtaaatacaaagttgactgtgaagctgtacgaggagatatttttaatcaggtagttcctcgatgtcctaggtgcccagctgatgaaccgcttgctatcatgaaaccagagattgtgttttttggtgaaaatttaccagaacagtttcatagagccatgaagtatgacaaagatgaagttgacctcctcattgttattgggtcttccctcaaagtaagaccagtagcactaattccaagttccataccccatgaagtgcctcagatattaattaatagagaacctttgcctcatctgcattttgatgtagagcttcttggagactgtgatgtcataattaatgaattgtgtcataggttaggtggtgaatatgccaaactttgctgtaaccctgtaaagctttcagaaattactgaaaaacctccacgaacacaaaaagaattggcttatttgtcagagttgccacccacacctcttcatgtttcagaagactcaagttcaccagaaagaacttcaccaccagattcttcagtgattgtcacacttttagaccaagcagctaagagtaatgatgatttagatgtgtctgaatcaaaaggttgtatggaagaaaaaccacaggaagtacaaacttctaggaatgttgaaagtattgctgaacagatggaaaatccggatttgaagaatgttggttctagtactggggagaaaaatgaaagaacttcagtggctggaacagtgagaaaatgctggcctaatagagtggcaaaggagcagattagtaggcggcttgatggtaatcagtatctgtttttgccaccaaatcgttacattttccatggcgctgaggtatattcagactctgaagatgacgtcttatcctctagttcttgtggcagtaacagtgatagtgggacatgccagagtccaagtttagaagaacccatggaggatgaaagtgaaattgaagaattctacaatggcttagaagatgagcctgatgttccagagagagctggaggagctggatttgggactgatggagatgatcaagaggcaattaatgaagctatatctgtgaaacaggaagtaacagacatgaactatccatcaaacaaatcatagtgtaataattgtgcaggtacaggaattgttccaccagcattaggaactttagcatgtcaaaatgaatgtttacttgtgaactcgatagagcaaggaaaccagaaaggtgtaatatttataggttggtaaaatagattgtttttcatggataatttttaacttcattatttctgtacttgtacaaactcaacactaacttttttttttttttttcctttttttttttttttttttttttttttttttttttttttttttttttttatatacaaaaaaaacaaaaaaattaagggggagaaacaccacgccacc

SEQ ID NO: 329140 - DNA, 1697 bp, Homo sapiens
gcgcgtcgagcgggagcagaggaggcgagggaggagggccagagaggcagttggaagatggcggacgaggcggccctcgcccttcagcccggcggctccccctcggcggcgggggccgacagggaggccgcgtcgtcccccgccggggagccgctccgcaagaggccgcggagagatggtcccggcctcgagcggagcccgggcgagcccggtggggcggccccagagcgtgaggtgccggcggcggccaggggctgcccgggtgcggcggcggcggcgctgtggcgggaggcggaggcagaggcggcggcggcaggcggggagcaagaggcccaggcgactgcggcggctggggaaggagacaatgggccgggcctgcagggcccatctcgggagccaccgctggccgacaacttgtacgacgaagacgacgacgacgagggcgaggaggaggaagaggcggcggcggcggcgattgggtaccgagataaccttctgttcggtgatgaaattatcactaatggttttcattcctgtgaaagtgatgaggaggatagagcctcacatgcaagctctagtgactggactccaaggccacggataggtccatatacttttgttcagcaacatcttatgattggcacagatcctcgaacaattcttaaagatttattgccggaaacaatacctccacctgagttggatgatatgacactgtggcagattgttattaatatcctttcagaaccaccaaaaaggaaaaaaagaaaagatattaatacaattgaagatgctgtgaaattactgcaagagtgcaaaaaaattatagttctaactggagctggggtgtctgtttcatgtggaatacctgacttcaggtcaagggatggtatttatgctcgccttgctgtagacttcccagatcttccagatcctcaagcgatgtttgatattgaatatttcagaaaagatccaagaccattcttcaagtttgcaaaggaaatatatcctggacaattccagccatctctctgtcacaaattcatagccttgtcagataaggaaggaaaactacttcgcaactatacccagaacatagacacgctggaacaggttgcgggaatccaaaggataattcagtgtcatggttagtaaacttcagagtggttttctgtaatttattttagttttataggaagatatttcctataaagctgactgccatcgagaagtggagataaagcattatttaatcatgttatctcatttatcgataacctcagaaaagtagaaaacaaaaataataaaaacagaagtattggccttgacagttaattatagaaaacctcagatattaatttgcttttgatttcaaaagatgctgcagttgcatgcattcaattattttaaataatcttttctggctgagtgcagtggctcacgcctgtaatcctagcactttgggaagccgaggcgggcagatcccatgaagccaagagttcgagaacagcttggccaacatggtgaaatcccaactctactagaaatactaaaattagccgggcatggtggcaggcgcctgtaatcccagctactcaggaggctgaggcacgagaatcacttgaacctgggagttggaggttgcagcgagccaagattgcaccattgcgctccagcctgggagacagtgagactct

SEQ ID NO: 329141 - DNA, 4040 bp, Homo sapiens
gcgcgtcgagcgggagcagaggaggcgagggaggagggccagagaggcagttggaagatggcggacgaggcggccctcgcccttcagcccggcggctccccctcggcggcgggggccgacagggaggccgcgtcgtcccccgccggggagccgctccgcaagaggccgcggagagatggtcccggcctcgagcggagcccgggcgagcccggtggggcggccccagagcgtgaggtgccggcggcggccaggggctgcccgggtgcggcggcggcggcgctgtggcgggaggcggaggcagaggcggcggcggcaggcggggagcaagaggcccaggcgactgcggcggctggggaaggagacaatgggccgggcctgcagggcccatctcgggagccaccgctggccgacaacttgtacgacgaagacgacgacgacgagggcgaggaggaggaagaggcggcggcggcggcgattgggtaccgagataaccttctgttcggtgatgaaattatcactaatggttttcattcctgtgaaagtgatgaggaggatagagcctcacatgcaagctctagtgactggactccaaggccacggataggtccatatacttttgttcagcaacatcttatgattggcacagatcctcgaacaattcttaaagatttattgccggaaacaatacctccacctgagttggatgatatgacactgtggcagattgttattaatatcctttcagaaccaccaaaaaggaaaaaaagaaaagatattaatacaattgaagatgctgtgaaattactgcaagagtgcaaaaaaattatagttctaactggagctggggtgtctgtttcatgtggaatacctgacttcaggtcaagggatggtatttatgctcgccttgctgtagacttcccagatcttccagatcctcaagcgatgtttgatattgaatatttcagaaaagatccaagaccattcttcaagtttgcaaaggaaatatatcctggacaattccagccatctctctgtcacaaattcatagccttgtcagataaggaaggaaaactacttcgcaactatacccagaacatagacacgctggaacaggttgcgggaatccaaaggataattcagtgtcatggttcctttgcaacagcatcttgcctgatttgtaaatacaaagttgactgtgaagctgtacgaggagatatttttaatcaggtagttcctcgatgtcctaggtgcccagctgatgaaccgcttgctatcatgaaaccagagattgtgttttttggtgaaaatttaccagaacagtttcatagagccatgaagtatgacaaagatgaagttgacctcctcattgttattgggtcttccctcaaagtaagaccagtagcactaattccaagttccataccccatgaagtgcctcagatattaattaatagagaacctttgcctcatctgcattttgatgtagagcttcttggagactgtgatgtcataattaatgaattgtgtcataggttaggtggtgaatatgccaaactttgctgtaaccctgtaaagctttcagaaattactgaaaaacctccacgaacacaaaaagaattggcttatttgtcagagttgccacccacacctcttcatgtttcagaagactcaagttcaccagaaagaacttcaccaccagattcttcagtgattgtcacacttttagaccaagcagctaagagtaatgatgatttagatgtgtctgaatcaaaaggttgtatggaagaaaaaccacaggaagtacaaacttctaggaatgttgaaagtattgctgaacagatggaaaatccggatttgaagaatgttggttctagtactggggagaaaaatgaaagaacttcagtggctggaacagtgagaaaatgctggcctaatagagtggcaaaggagcagattagtaggcggcttgatggtaatcagtatctgtttttgccaccaaatcgttacattttccatggcgctgaggtatattcagactctgaagatgacgtcttatcctctagttcttgtggcagtaacagtgatagtgggacatgccagagtccaagtttagaagaacccatggaggatgaaagtgaaattgaagaattctacaatggcttagaagatgagcctgatgttccagagagagctggaggagctggatttgggactgatggagatgatcaagaggcaattaatgaagctatatctgtgaaacaggaagtaacagacatgaactatccatcaaacaaatcatagtgtaataattgtgcaggtacaggaattgttccaccagcattaggaactttagcatgtcaaaatgaatgtttacttgtgaactcgatagagcaaggaaaccagaaaggtgtaatatttataggttggtaaaatagattgtttttcatggataatttttaacttcattatttctgtacttgtacaaactcaacactaacttttttttttttaaaaaaaaaaaggtactaagtatcttcaatcagctgttggtcaagactaactttcttttaaaggttcatttgtatgataaattcatatgtgtatatataattttttttgttttgtctagtgagtttcaacatttttaaagttttcaaaaagccatcggaatgttaaattaatgtaaagggaacagctaatctagaccaaagaatggtattttcacttttctttgtaacattgaatggtttgaagtactcaaaatctgttacgctaaacttttgattctttaacacaattatttttaaacactggcattttccaaaactgtggcagctaactttttaaaatctcaaatgacatgcagtgtgagtagaaggaagtcaacaatatgtggggagagcactcggttgtctttacttttaaaagtaatacttggtgctaagaatttcaggattattgtatttacgttcaaatgaagatggcttttgtacttcctgtggacatgtagtaatgtctatattggctcataaaactaacctgaaaaacaaataaatgctttggaaatgtttcagttgctttagaaacattagtgcctgcctggatccccttagttttgaaatatttgccattgttgtttaaatacctatcactgtggtagagcttgcattgatcttttccacaagtattaaactgccaaaatgtgaatatgcaaagcctttctgaatctataataatggtacttctactggggagagtgtaatattttggactgctgttttccattaatgaggagagcaacaggcccctgattatacagttccaaagtaataagatgttaattgtaattcagccagaaagtacatgtctcccattgggaggatttggtgttaaataccaaactgctagccctagtattatggagatgaacatgatgatgtaacttgtaatagcagaatagttaatgaatgaaactagttcttataatttatctttatttaaaagcttagcctgccttaaaactagagatcaactttctcagctgctttatttttcagaccatttttgaacatcactcctaaattaataaagtattcctctgttgctttagtatttattacaataaaaagggtttgaaatatagctgttctttatgcataaaacacccagctaggaccattactgccagagaaaaaaatcgtattgaatggccatttccctacttataagatgtctcaatctgaatttatttggctacactaaagaatgcagtatatttagttttccatttgcatgatgtttgtgtgctatagatgatattttaaattgaaaagtttgttttaaattatttttacagtgaagactgttttcagctctttttatattgtacatagtcttttatgtaatttactggcatatgttttgtagactgtttaatgactggatatcttccttcaacttttgaaatacaaaaccagtgttttttacttgtacactgttttaaagtctattaaaattgtcatttgacttttttctgttaa

SEQ ID NO: 329142 - DNA, 3949 bp, Homo sapiens
  misc_feature (5)..(6): n is a, c, g, or t
  misc_feature (14)..(14): n is a, c, g, or t
  misc_feature (3044)..(3044): n is a, c, g, or t
cccannctgtcttncagagactttggccagctggctgtggagctcctggaccagtcctacaagcaggacgaacagctggccatgaaactgctgacgtatgagctgaagaactggagcaacgccacgtgcctgcagcttgccgtggctgccaaacaccgcgacttcatcgcgcacacgtgcagccagatgctgctcaccgacatgtggatgggccggctccgcatgcgcaagaactcaggcctcaaggtaattctgggaattctacttcctccttcaattctcagcttggagttcaagaacaaagacgacatgccctatatgtctcaggcccaggaaatccacctccaagagaaggaggcagaagaaccagagaagcccacaaaggaaaaagaggaagaggacatggagctcacagcaatgttgggacgaaacaacggggagtcctccaggaagaaggatgaagaggaagttcagagcaagcaccggttaatccccctcggcagaaaaatctatgaattctacaatgcacccatcgtgaagttctggttctacacactggcgtatatcggatacctgatgctcttcaactatatcgtgttagtgaagatggaacgctggccgtccacccaggaatggatcgtaatctcctatattttcaccctgggaatagaaaagatgagagagattctgatgtcagagccagggaagttgctacagaaagtgaaggtatggctgcaggagtactggaatgtcacggacctcatcgccatccttctgttttctgtcggaatgatccttcgtctccaagaccagcccttcaggagtgacgggagggtcatctactgcgtgaacatcatttactggtatatccgtctcctagacatcttcggcgtgaacaagtatttgggcccgtatgtaatgatgattggaaaaatgatgatagacatgatgtactttgtcatcattatgctggtggttctgatgagctttggggtcgccaggcaagccatcctttttcccaatgaggagccatcatggaaactggccaagaacatcttctacatgccctattggatgatttatggggaagtgtttgcggaccagatagaccctccctgtggacagaatgagacccgagaggatggtaaaataatccagctgcctccctgcaagacaggagcttggatcgtgccggccatcatggcctgctacctcttagtggcaaacatcttgctggtcaacctcctcattgctgtctttaacaatacattttttgaagtaaaatcgatatccaaccaagtctggaagtttcagaggtatcagctcatcatgactttccatgaaaggccagttctgcccccaccactgatcatcttcagccacatgaccatgatattccagcacctgtgctgccgatggaggaaacacgagagcgacccggatgaaagggactacggcctgaaactcttcataaccgatgatgagctcaagaaagtacatgactttgaagagcaatgcatagaagaatacttcagagaaaaggatgatcggttcaactcatctaatgatgagaggatacgggtgacttcagaaagggtggagaacatgtctatgcggctggaggaagtcaacgagagagagcactccatgaaggcttcactccagaccgtggacatccggctggcgcagctggaagaccttatcgggcgcatggccacggccctggagcgcctgacaggtctggagcgggccgagtccaacaaaatccgctcgaggacctcgtcagactgcacggacgccgcctacattgtccgtcagagcagcttcaacagccaggaagggaacaccttcaagctccaagagagtatagaccctgcaggtgaggagaccatgtccccaacttctccaaccttaatgccccgtatgcgaagccattctttctattcggtcaatatgaaagacaaaggtggtatagaaaagttggaaagtatttttaaagaaaggtccctgagcctacaccgggctactagttcccactctgtagcaaaagaacccaaagctcctgcagcccctgccaacaccttggccattgttcctgattccagaagaccatcatcgtgtatagacatctatgtctctgctatggatgagctccactgtgatatagaccctctggacaattccgtgaacatccttgggctaggcgagccaagcttttcaactccagtaccttccacagccccttcaagtagtgcctatgcaacacttgcacccacagacagacctccaagccggagcattgattttgaggacatcacctccatggacactagatctttttcttcagactacacccacctcccagaatgccaaaacccctgggactcagagcctccgatgtaccacaccattgagcgttccaaaagtagccgctacctagccaccacaccctttcttctagaagaggctcccattgtgaaatctcatagctttatgttttccccctcaaggagctattatgccaactttggggtgcctgtaaaaacagcagaatacacaagtattacagactgtattgacacaaggtgtgtcaatgcccctcaagcaattgcggacagagctgccttccctggaggtcttggagacaaagtggaggacttaacttgctgccatccagagcgagaagcagaactgagtcaccccagctctgacagtgaggagaatgaggccaaaggccgcagagccaccattgcaatatcctcccaggagggtgataactcagagagaaccctgtccaacaacatcactgttcccaagatagagcgcgccaacagctactcggcagaggagccaagtgcgccatatgcacacaccaggaagagcttctccatcagtgacaaactcgacaggcagcggaacacagcaagcctgcgaaatcccttccagagaagcaagtcctccaagccggagggccgaggggacagcctgtccatgaggagactgtccagaacatcggctttccaaagctttgaaagcaagcacanctaaaccttcttaatatccgccacagaaggctcaagaatccagccctaaaattctctccaactccagtttttcccctttccttgaatcatacctgctttattcttagctgagcaaaacaagcaatgctttgggaggtgttaactcaaaggtgacttctgggccacagatcaagaaagcatttgatctgacccagtgccagacacaggggatttaaggcatgttcacacttgctgggcagggagggggaagagagggagaaggaagggttagagatgaatgtgtatccgcagtcacagcagaaagccatgagagcaggggaaacaaggggcttcgagcacgctccatgccaggaggcatctgttgatttctgaccattatcaagagttgtaggatgcagggctaaattgcaaaataaaataaaatagccagcgtacacaatgagatattctaaacttccattctgttttcttttcacattggctccatcactggtgactgatgaagagcatcctctttattcagtataagccggcagcaagcagttctacctaacgtcccacatccttctcatgccaacacttctgtaattgatcattataaagaaaaaacaaggtaacagtcatagttcacctgtctcttatctattcacttctggtgccacaactgtttatccttttttgaagaaaataagggaacagaaatgcctttttgtattgcaatcgaaatgaaagaagagttgatgttaaaaaaacaaaagtcaagtgatttattatatacagtgggcgttcaagtctagtcgagcaagctcaggagaatgtaattaaataattttatattttttaatttattttgtatctcacctgtcatggatgaattcattcactgaatatgtaatattgaactt

SEQ ID NO: 329143 - DNA, 866 bp, Homo sapiens
  misc_feature (52)..(52): n is a, c, g, or t
gacgacatatactaaccttatgtatatcatatactatgcagggccgccagantaaggaggtggagcaatgttgggacgaaacaacggggagtcctccaggaagaaggatgaagaggaagttcagagcaagcaccggttaatccccctcggcagaaaaatctatgaattctacaatgcacccatcgtgaagttctggttctacacactggcgtatatcggatacctgatgctcttcaactatatcgtgttagtgaagatggaacgctggccgtccacccaggaatggatcgtaatctcctatattttcaccctgggaatagaaaagatgagagagattctgatgtcagagccagggaagttgctacagaaagtgaaggtatggctgcaggagtactggaatgtcacggacctcatcgccatccttctgttttctgtcggaatgatccttcgtctccaagaccagcccttcaggagtgacgggagggtcatctactgcgtgaacatcatttactggtatatccgtctcctagacatcttcggcgtgaacaagtatttgggcccgtatgtaatgatgattggaaaaatgatgatagacatgatgtactttgtcatcattatgctggtggttctgatgagctttggggtcgccaggcaagccatcctttttcccaatgaggagccatcatggaaactggccaagaacatcttctacatgccctattggatgatttatggggaagtgtttgcggaccagatagaccgtaagcaagtttatgattctcatacaccaaagtcaggtatttaaattcaattcggttatgtcttttccaagttcatttgtttgttctcaataaatggctcaagat

SEQ ID NO: 329144 - DNA, 601 bp, Homo sapiens
agccaaggctccctttttagccaagaaaacacacaaaaatgggtaactgcaaggcgaaatgatgcatcatgacacatagatttaaacgaagcaccagagccccagagatacatgtacaggtcaaaaggaagattgcatattataatccttcaagtattactgtcttttctaattcttttgttagtttagcaccttcaagttccttttgtcataaagtctgtgtcctgcttgctgaccctgctctgtgctgctgtgcagtggccttggctgatgctggggctcctgggcctgaacagccagagcactgtattgtgtctccttacagctggcgtatatcggatacctgatgctcttcaactatatcgtgttagtgaagatggaacgctggccgtccacccaggaatggatcgtaatctcctatattttcaccctgggaatagaaaagatgagagaggtaacggcttttataaaagaaaacgtaagagaaagacagtggttaagttctatctgtggatggaggggacaggaagatgcctgggatgcaaattaagccggaaactgttttctctaactctaccacagctgcttctttgctcctctg

SEQ ID NO: 329145 - DNA, 2917 bp, Homo sapiens
  misc_feature (52)..(52): n is a, c, g, or t
  misc_feature (2722)..(2722): n is a, c, g, or t
  misc_feature (2851)..(2851): n is a, c, g, or t
gacgacatatactaaccttatgtatatcatatactatgcagggccgccagantaaggaggtggagcaatgttgggacgaaacaacggggagtcctccaggaagaaggatgaagaggaagttcagagcaagcaccggttaatccccctcggcagaaaaatctatgaattctacaatgcacccatcgtgaagttctggttctacacactggcgtatatcggatacctgatgctcttcaactatatcgtgttagtgaagatggaacgctggccgtccacccaggaatggatcgtaatctcctatattttcaccctgggaatagaaaagatgagagagattctgatgtcagagccagggaagttgctacagaaagtgaaggtatggctgcaggagtactggaatgtcacggacctcatcgccatccttctgttttctgtcggaatgatccttcgtctccaagaccagcccttcaggagtgacgggagggtcatctactgcgtgaacatcatttactggtatatccgtctcctagacatcttcggcgtgaacaagtatttgggcccgtatgtaatgatgattggaaaaatgatgatagacatgatgtactttgtcatcattatgctggtggttctgatgagctttggggtcgccaggcaagccatcctttttcccaatgaggagccatcatggaaactggccaagaacatcttctacatgccctattggatgatttatggggaagtgtttgcggaccagatagaccctccctgtggacagaatgagacccgagaggatggtaaaataatccagctgcctccctgcaagacaggagcttggatcgtgccggccatcatggcctgctacctcttagtggcaaacatcttgctggtcaacctcctcattgctgtctttaacaatacattttttgaagtaaaatcgatatccaaccaagtctggaagtttcagaggtatcagctcatcatgactttccatgaaaggccagttctgcccccaccactgatcatcttcagccacatgaccatgatattccagcacctgtgctgccgatggaggaaacacgagagcgacccggatgaaagggactacggcctgaaactcttcataaccgatgatgagctcaagaaagtacatgactttgaagagcaatgcatagaagaatacttcagagaaaaggatgatcggttcaactcatctaatgatgagaggatacgggtgacttcagaaagggtggagaacatgtctatgcggctggaggaagtcaacgagagagagcactccatgaaggcttcactccagaccgtggacatccggctggcgcagctggaagaccttatcgggcgcatggccacggccctggagcgcctgacaggtctggagcgggccgagtccaacaaaatccgctcgaggacctcgtcagactgcacggacgccgcctacattgtccgtcagagcagcttcaacagccaggaagggaacaccttcaagctccaagagagtatagaccctgcaggtgaggagaccatgtccccaacttctccaaccttaatgccccgtatgcgaagccattctttctattcggtcaatatgaaagacaaaggtggtatagaaaagttggaaagtatttttaaagaaaggtccctgagcctacaccgggctactagttcccactctgtagcaaaagaacccaaagctcctgcagcccctgccaacaccttggccattgttcctgattccagaagaccatcatcgtgtatagacatctatgtctctgctatggatgagctccactgtgatatagaccctctggacaattccgtgaacatccttgggctaggcgagccaagcttttcaactccagtaccttccacagccccttcaagtagtgcctatgcaacacttgcacccacagacagacctccaagccggagcattgattttgaggacatcacctccatggacactagatctttttcttcagactacacccacctcccagaatgccaaaacccctgggactcagagcctccgatgtaccacaccattgagcgttccaaaagtagccgctacctagccaccacaccctttcttctagaagaggctcccattgtgaaatctcatagctttatgttttccccctcaaggagctattatgccaactttggggtgcctgtaaaaacagcagaatacacaagtattacagactgtattgacacaaggtgtgtcaatgcccctcaagcaattgcggacagagctgccttccctggaggtcttggagacaaagtggaggacttaacttgctgccatccagagcgagaagcagaactgagtcaccccagctctgacagtgaggagaatgaggccaaaggccgcagagccaccattgcaatatcctcccaggagggtgataactcagagagaaccctgtccaacaacatcactgttcccaagatagagcgcgccaacagctactcggcagaggagccaagtgcgccatatgcacacaccaggaagagcttctccatcagtgacaaactcgacaggcagcggaacacagcaagcctgcgaaatcccttccagagaagcaagtcctccaagccggagggccgaggggacagcctgtccatgaggagactgtccagaacatcggctttccaaaggaatccagccctttctagcttgaccaaacaaaggcatgcctttggnagtgctgaactcaaagtgaacttctggcccaccatccagaaagcttttcgacttgacacatgccgatccaagggatttataggatgttacacctgccttgcacggaggcggatcagaaggggaaagaanagctatagatggatatgtctccgacgtctccccgctaagccctcagacgcgggcaaccaaggcgct

SEQ ID NO: 329146 - DNA, 392 bp, Homo sapiens
  misc_feature (52)..(52): n is a, c, g, or t
gacgacatatactaaccttatgtatatcatatactatgcagggccgccagantaaggaggtggagcaatgttgggacgaaacaacggggagtcctccaggaagaaggatgaagaggaagttcagagcaagcaccggttaatccccctcggcagaaaaatctatgaattctacaatgcacccatcgtgaagttctggttctacacactggcgtatatcggatacctgatgctcttcaactatatcgtgttagtgaagatggaacgctggccgtccacccaggaatggatcgtaatctcctatattttcaccctgggaatagaaaagatgagagaggtaacggcttttataaaagaaaacgtaagagaaagacagtggttaagttctatctgtg

SEQ ID NO: 329147 - DNA, 95 bp, Homo sapiens
ttcataccaagctcacatactgtggcgaagagctttctgagaaacttcataagattttgctaagatattaatgaataatttagtatattgttgca

SEQ ID NO: 329148 - DNA, 429 bp, Homo sapiens
agtcggctgcttccacaggggctgttcctgttctcggttcggtttcaggcaggtagggctgctggttcctgaatactgtgagtgagcatttccaggttctgtcataactgatctctcatttgctcttcctcaccttcactgctacagctccaccccatggaaccatcttaaagaatcgcctcattactattttgggacatcaaaaatactttaaacacacatgaagtgtcagacaaaatctgcacctaagaaagagggggataatttctttccaacattctcataggaagacactgaaaattctatctttctaaagaaagaggaaaaacaactgtcattttggacaccatcaatatggaagctttgatgatttagctccactcgctctcttgactgcacacactgagaagcattcccagatcatgtcca

SEQ ID NO: 329149 - DNA, 467 bp, Homo sapiens
aatatggtttctcttctcactcaagtttcagattgcagaagactttactgtttgctctgtaattcctgtaacagcaagagtgatatgaaggacaacagaatgccatgaagttctctaatcaggtgagcccatctcattgctgacctaaagcgtatggttggctagctgagaatcctctgatgacggcttgccagttgggcagtagatttctgatgtgaataaacctcaaactgaaaacatgttgagcctatcaatcttgttttgtctgtgaaagggtccacaaaagagcttaggccactggaaatgattagtactagttcatatagaagaaatagtgttgtttaaatgctgtcattgtcttcacgcacagaggtgtgcttaaatctaagtactcccaaatttggaaagaaattattttgaacggattggcataacaagcataactcaaaatgactaagagaagccgg

SEQ ID NO: 329150 - DNA, 216 bp, Homo sapiens
gcggccgcctactactactactactgctcgaattcaagcttctaacgatgtacggggaacagcatggaagatgtgtgctctggctcggataagagatgggacatcattcagtcactagttggatggcacaaggctcttcacagacgcatctgtagcagagtggaacttgtactaacttatgatagaatgtatcagaataaatgtttttaacagtgt

SEQ ID NO: 329151 - DNA, 439 bp, Homo sapiens
aaaaaaaaaaaaaaaaaaaaaaaaaaaaaagtggttgctgtaaggggtcctccctgcgccacacggccgtcgccatggtgaagctgagcaaagaggccaagcagagactacagcagctcttcaaggggagccagtttgccattcgctggggctttatccctcttgtgatttacctgggatttaagaggggtgcagatcccggaatgcctgaaccaactgttttgagcctactttggggataaaggattatttggtcttctggatttggaggcaatcagcggacagcatggaagatgtgtgctctggctcggataagagatgggacatcattcagtcactagttggatggcacaaggctcttcacagacgcatctgtagcagagtggaacttgtactaacttatgatagaatgtatcagaataaatgtttttaacagtgt

SEQ ID NO: 329152 - DNA, 451 bp, Homo sapiens
  misc_feature (9)..(10): n is a, c, g, or t
gcggccgcnncgcctactactactaattcgcggccgcgtcgagtggttgctgtaaggggtcctccctgcgccacacggccgtcgccatggtgaagctgagcaaagaggccaagcagagactacagcagctcttcaaggggagccagtttgccattcgctggggctttatccctcttgtgatttacctgggatttaagaggggtgcagatcccggaatgcctgaaccaactgttttgagcctactttggggataaaggattatttggtcttctggatttggaggcaatcagcggacagcatggaagatgtgtgctctggctcggataagagatgggacatcattcagtcactagttggatggcacaaggctcttcacagacgcatctgtagcagagtggaacttgtactaacttatgatagaatgtatcagaataaatgtttttaacagtgt

SEQ ID NO: 329153 - DNA, 502 bp, Homo sapiens
  misc_feature (9)..(10): n is a, c, g, or t
gcggccgcnncgcctactactactaattcgcggccgcgtcgagtggttgctgtaaggggtcctccctgcgccacacggccgtcgccatggtgaagctgagcaaagaggccaagcagagactacagcagctcttcaaggggagccagtttgccattcgctggggctttatccctcttgtgatttacctgggatttaagaggggtgcagatcccggaatgcctgaaccaactgttttgagcctactttggggataaaggattatttggtcttctggatttggaggcaatcagcggacagcatggaagatgtgtgctctggctcggataagagatgggacatcattcagtcactagttggatggcacaaggctcttcacagacgcatctgtagcagagtggaacttgtactaacttatgatagaatgtatcagaataaatgtttttaacagtgtaaaaaaaaaaaagtcgacgcggccgcgaatttagtagtagtaggcggccgc

SEQ ID NO: 329154 - DNA, 637 bp, Homo sapiens
tgatatcgaattcgcggccgcgtcgacacggctgcgagaatacgacagaagggggacgtggttgctgtaaggggtcctccctgcgccacacggccgtcgccatggtgaagctgagcaaagaggccaagcagagactacagcagctcttcaaggggagccagtttgccattcgctggggctttatccctcttgtgatttacctgggatttaagaggggtgcagatcccggaatgcctgaaccaactgttttgagcctactttggggataaaggattatttggtcttctggatttggaggcaatcagcggacagcatggaagatgtgtgctctggctcggataagagatgggacatcattcagtcactagttggatggcacaaggctcttcacagacgcatctgtagcagagtggaacttgtactaacttatgatagaatgtatcagaataaatgtttttaacagtgtcacaaaacaaaaacaaaaataaaaaaatcttctctcctctcatcatctcctctcctctcccctctctactccttccctcctctcccctctcctctatctctccttctctttacactccctctactctcccttccttcttctcttactacacttcatcctctccctctcccc

SEQ ID NO: 329155 - DNA, 808 bp, Homo sapiens
tttgggcttcttaacggctgaatgtttggggtaagagttagttgaggtggaagtggaggctaattgctccccaggaacttaatggttgtaagggcacttaggccacatcgcactctacccacttaaatgatatataactatctcagagcctcaattcccacattaaaatagggatcgtagttgggagttgtgaactttcctcagtgtctaatgcacagaaaccattcaataaatgttattttagtattactgatactgcatctagtaatgagatagctttgttttctgggtttatcaggcctacctgttaatggaaatcagtaatcgttttccttttgattgacttcattttatgtctgctcacatttttgtttttgtttatgataggtaactgtgctcaaaagaaaagtgtatttgaatacagttctgtatatttaatttgtttgttcagtgggattgatccttgtctttcacaactgaatttgatagatgaggaaacaaacataaatgtataaaattttctaggtcttaggttatgtctagaagatttttatttcggaatttaatttctttcttctcttcacaaacattttgacctactttggggataaaggattatttggtcttctggatttggaggcaatcagcggacagcatggaagatgtgtgctctggctcggataagagatgggacatcattcagtcactagttggatggcacaaggctcttcacagacgcatctgtagcagagtggaacttgtactaacttatgatagaatgtatcagaataaatgtttttaacagtgt

SEQ ID NO: 329156 - DNA, 393 bp, Homo sapiens
gcgtcgactgcttggcctctttgctcagcttcaccatggcgacggccgtgtggcgcagggaggacccgagctcttcaaggggagccagtttgccattcgctggggctttatccctcttgtgatttacctgggatttaagaggggtgcagatcccggaatgcctgaaccaactgttttgagcctactttggggataaaggattatttggtcttctggatttggaggcaatcagcggacagcatggaagatgtgtgctctggctcggataagagatgggacatcattcagtcactagttggatggcacaaggctcttcacagacgcatctgtagcagagtggaacttgtactaacttatgatagaatgtatcagaataaatgtttttaacagtgt

SEQ ID NO: 329157 - DNA, 315 bp, Homo sapiens
  misc_feature (39)..(39): n is a, c, g, or t
gctcccacatatattttcaatttcttttcatatactaanatttatggttaccagatttaagaggggtgcagatcccggaatgcctgaaccaactgttttgagcctactttggggataaaggattatttggtcttctggatttggaggcaatcagcggacagcatggaagatgtgtgctctggctcggataagagatgggacatcattcagtcactagttggatggcacaaggctcttcacagacgcatctgtagcagagtggaacttgtactaacttatgatagaatgtatcagaataaatgtttttaacagtgt

SEQ ID NO: 329158 - DNA, 277 bp, Homo sapiens
  misc_feature (34)..(35): n is a, c, g, or t
  misc_feature (44)..(44): n is a, c, g, or t
  misc_feature (58)..(58): n is a, c, g, or t
ccgtccgagactaacggtcgcgccgtgggttctnnccctcagtntcctcctatctccncatccacaccaccccaacgcgctagattatttggtcttctggatttggaggcaatcagcggacagcatggaagatgtgtgctctggctcggataagagatgggacatcattcagtcactagttggatggcacaaggctcttcacagacgcatctgtagcagagtggaacttgtactaacttatgatagaatgtatcagaataaatgtttttaacagtgt

SEQ ID NO: 329159 - DNA, 372 bp, Homo sapiens
caatgattgaagctcacgttgatgtcaagactaccgatggttacttgctttcgtctgttctgtgttggttttactaaaaaacgcaacaatcagatacggaagacctcttatgctcagcaccaacaggtccgccaaatccggaagaagatgatggaaatcatgacccgagaggtgcagacaaatgacttgaaagaagtggtcaataaattgattcacagcatggaagatgtgtgctctggctcggataagagatgggacatcattcagtcactagttggatggcacaaggctcttcacagacgcatctgtagcagagtggaacttgtactaacttatgatagaatgtatcagaataaatgtttttaacagtgt

SEQ ID NO: 329160 - DNA, 200 bp, Homo sapiens
  misc_feature (9)..(10): n is a, c, g, or t
gcggccgcnncgcctactactactaattcgcggccgcgtcgaacagcatggaagatgtgtgctctggctcggataagagatgggacatcattcagtcactagttggatggcacaaggctcttcacagacgcatctgtagcagagtggaacttgtactaacttatgatagaatgtatcagaataaatgtttttaacagtgt

SEQ ID NO: 329161 - DNA, 2037 bp, Homo sapiens
  misc_feature (1394)..(1394): n is a, c, g, or t
gcgagtggttaaaagacagttggtgtcggttcgccttctcgggtcggattccgcggtcccaacccttccccatggccgaccctgaggagttgcaggtttcttcgccgcccccgccgcctccctcttctccctcctcttcagacgcctctgcagcatcttccccgggcggcccagtgagtttgggctggccagttccgagcaggagcagcggcccaacggtggaccagctggaggaagtggagctgcagatcggagacgcagccttttcattaaccaaacttcttgaagccacatctgcagtatcagctcaagtggaagaacttgccttcaaatgtacagaaaatgcacgtttccttaaaacgtggcgggacctcttgaaagaaggctatgattctttgaaacctgatgactgatttggcatacttcgttgtttaataatgactgcaataattcatacttcttatgtcatattttgtacatgtaccacacatataggatgacctctgtccagcagttctgtatatactcagaatgaaatttttcttggttttcttggtttttgtgaaagcagaataccgatgctatttttgttgcggaccagtacttgtttgtccttaaatactttatgcctctgaactttcatagaatcctttatgaaagttaacttcatcaatagacggttaatattaatagagccacagtgctaccagtagcaaactaggtagaccattatttgttttgcaacaagatgctaagcatggcagactttgaagttgcgtttcatcttaaggaccaagggaggtaactttaaggttgccagtggtggatccagctccgttaggctaagttgtctacagctaatgattgtgtctttattctatatccccagcacctaaaacagggtcacacaacattcactaaatgtttgttgaataaaagagttaacaaacataattgaaagctttttttcttcctatatttagcatgaagactgtcattgtttctctaggaaatgtatgaatctgaacttttttgacttgaagaaaaacattctttttttacagagatttggactttgatgataggttttaaaaatatatgataaatattttttgtacttgtttgatttttttttaaagactttacttcagaaagggaaagactgtttagaaagaatgcatattttttccctatttatttctgtggttactgcttttgcagtttaacagtgtttgtatttgatatttgtatatgtttgattgctatctttaaagtgccttatcagatttatggctctgtgctattactttttgagctttgcaagttgtgtacataataattctaaagaagttactttgtttgcaatgcatcaaatttaaatgatgtgatttttntcctttccctttcggattcccgacgctgtggttgctgtaaggggtcctccctgcgccacacggccgtcgccatggtgaagctgagcaaagaggccaagcagagactacagcagctcttcaaggggagccagtttgccattcgctggggctttatccctcttgtgatttacctgggatttaagaggggtgcagatcccggaatgcctgaaccaactgttttgagcctactttggggataaaggattatttggtcttctggatttggaggcaatcagcggacagcatggaagatgtgtgctctggctcggataagagatgggacatcattcagtcactagttggatggcacaaggctcttcacagacgcatctgtagcagagtggaacttgtactaacttatgatagaatgtatcagaataaatgtttttaacagtgtaaaaaaaaaaaacaaaaaaaaaaaaaaaaaaaaaaaaaaaaaaaaaaagaaaaaaaaaaaaacaaaaaaacaagaaaaacaaaaacaaaaaaaaaaaaagggggggggcgggcagagaagagatcccagggggggcggcccacgcagcacgcgcgcagcccgccgtgtttgttgcacaagggggcgccccacagagagggggcaaaa

SEQ ID NO: 329162 - DNA, 1881 bp, Homo sapiens
  misc_feature (1394)..(1394): n is a, c, g, or t
gcgagtggttaaaagacagttggtgtcggttcgccttctcgggtcggattccgcggtcccaacccttccccatggccgaccctgaggagttgcaggtttcttcgccgcccccgccgcctccctcttctccctcctcttcagacgcctctgcagcatcttccccgggcggcccagtgagtttgggctggccagttccgagcaggagcagcggcccaacggtggaccagctggaggaagtggagctgcagatcggagacgcagccttttcattaaccaaacttcttgaagccacatctgcagtatcagctcaagtggaagaacttgccttcaaatgtacagaaaatgcacgtttccttaaaacgtggcgggacctcttgaaagaaggctatgattctttgaaacctgatgactgatttggcatacttcgttgtttaataatgactgcaataattcatacttcttatgtcatattttgtacatgtaccacacatataggatgacctctgtccagcagttctgtatatactcagaatgaaatttttcttggttttcttggtttttgtgaaagcagaataccgatgctatttttgttgcggaccagtacttgtttgtccttaaatactttatgcctctgaactttcatagaatcctttatgaaagttaacttcatcaatagacggttaatattaatagagccacagtgctaccagtagcaaactaggtagaccattatttgttttgcaacaagatgctaagcatggcagactttgaagttgcgtttcatcttaaggaccaagggaggtaactttaaggttgccagtggtggatccagctccgttaggctaagttgtctacagctaatgattgtgtctttattctatatccccagcacctaaaacagggtcacacaacattcactaaatgtttgttgaataaaagagttaacaaacataattgaaagctttttttcttcctatatttagcatgaagactgtcattgtttctctaggaaatgtatgaatctgaacttttttgacttgaagaaaaacattctttttttacagagatttggactttgatgataggttttaaaaatatatgataaatattttttgtacttgtttgatttttttttaaagactttacttcagaaagggaaagactgtttagaaagaatgcatattttttccctatttatttctgtggttactgcttttgcagtttaacagtgtttgtatttgatatttgtatatgtttgattgctatctttaaagtgccttatcagatttatggctctgtgctattactttttgagctttgcaagttgtgtacataataattctaaagaagttactttgtttgcaatgcatcaaatttaaatgatgtgatttttntcctttccctttcggattcccgacgctgtggttgctgtaaggggtcctccctgcgccacacggccgtcgccatggtgaagctgagcaaagaggccaagcagagactacagcagctcttcaaggggagccagtttgccattcgctggggctttatccctcttgtgatttacctgggatttaagaggggtgcagatcccggaatgcctgaaccaactgttttgagcctactttggggataaaggattatttggtcttctggatttggaggcaatcagcggacagcatggaagatgtgtgctctggctcggataagagatgggacatcattcagtcactagttggatggcacaaggctcttcacagacgcatctgtagcagagtggaacttgtactaacttatgatagaatgtatcagaataaatgtttttaacagtgtaaaaaaaaaaaagtcgacgcggccgcgaatttagtagtagtaggcggccgc

SEQ ID NO: 329163 - DNA, 2172 bp, Homo sapiens
  misc_feature (1394)..(1394): n is a, c, g, or t
gcgagtggttaaaagacagttggtgtcggttcgccttctcgggtcggattccgcggtcccaacccttccccatggccgaccctgaggagttgcaggtttcttcgccgcccccgccgcctccctcttctccctcctcttcagacgcctctgcagcatcttccccgggcggcccagtgagtttgggctggccagttccgagcaggagcagcggcccaacggtggaccagctggaggaagtggagctgcagatcggagacgcagccttttcattaaccaaacttcttgaagccacatctgcagtatcagctcaagtggaagaacttgccttcaaatgtacagaaaatgcacgtttccttaaaacgtggcgggacctcttgaaagaaggctatgattctttgaaacctgatgactgatttggcatacttcgttgtttaataatgactgcaataattcatacttcttatgtcatattttgtacatgtaccacacatataggatgacctctgtccagcagttctgtatatactcagaatgaaatttttcttggttttcttggtttttgtgaaagcagaataccgatgctatttttgttgcggaccagtacttgtttgtccttaaatactttatgcctctgaactttcatagaatcctttatgaaagttaacttcatcaatagacggttaatattaatagagccacagtgctaccagtagcaaactaggtagaccattatttgttttgcaacaagatgctaagcatggcagactttgaagttgcgtttcatcttaaggaccaagggaggtaactttaaggttgccagtggtggatccagctccgttaggctaagttgtctacagctaatgattgtgtctttattctatatccccagcacctaaaacagggtcacacaacattcactaaatgtttgttgaataaaagagttaacaaacataattgaaagctttttttcttcctatatttagcatgaagactgtcattgtttctctaggaaatgtatgaatctgaacttttttgacttgaagaaaaacattctttttttacagagatttggactttgatgataggttttaaaaatatatgataaatattttttgtacttgtttgatttttttttaaagactttacttcagaaagggaaagactgtttagaaagaatgcatattttttccctatttatttctgtggttactgcttttgcagtttaacagtgtttgtatttgatatttgtatatgtttgattgctatctttaaagtgccttatcagatttatggctctgtgctattactttttgagctttgcaagttgtgtacataataattctaaagaagttactttgtttgcaatgcatcaaatttaaatgatgtgatttttntcctttccctttcggattcccgacgctgtggttgctgtaaggggtcctccctgcgccacacggccgtcgccatggtgaagctgagcaaagaggccaagcagagactacagcagctcttcaaggggagccagtttgccattcgctggggctttatccctcttgtgatttacctgggatttaagaggggtgcagatcccggaatgcctgaaccaactgttttgagcctactttggggataaaggattatttggtcttctggatttggaggcaatcagcggacagcatggaagatgtgtgctctggctcggataagagatgggacatcattcagtcactagttggatggcacaaggctcttcacagacgcatctgtagcagagtggaacttgtactaacttatgatagaatgtatcagaataaatgtttttaacagtgtgtgttatgcttgagtcttttttgaattgaacatgctaggattatcaggtaaaaattaagccttttggtactttctcaaaacagggaatttatgtgtgtacctaggtgctatttaagcctgtaaatcccagcactttgggaggccagggcgggtggatcacgatataaaaaaatttttccaagttattcctgcccattgacctaacatatggattacagtttccctttgcagtgaattaataactccttctaggatattccgaggtagtaagaatacagatagttctgtttgtgacaaaccaagctgttacttcctcctctgcattaaagttctgactgcaag

SEQ ID NO: 329164 - DNA, 2001 bp, Homo sapiens
  misc_feature (1394)..(1394): n is a, c, g, or t
gcgagtggttaaaagacagttggtgtcggttcgccttctcgggtcggattccgcggtcccaacccttccccatggccgaccctgaggagttgcaggtttcttcgccgcccccgccgcctccctcttctccctcctcttcagacgcctctgcagcatcttccccgggcggcccagtgagtttgggctggccagttccgagcaggagcagcggcccaacggtggaccagctggaggaagtggagctgcagatcggagacgcagccttttcattaaccaaacttcttgaagccacatctgcagtatcagctcaagtggaagaacttgccttcaaatgtacagaaaatgcacgtttccttaaaacgtggcgggacctcttgaaagaaggctatgattctttgaaacctgatgactgatttggcatacttcgttgtttaataatgactgcaataattcatacttcttatgtcatattttgtacatgtaccacacatataggatgacctctgtccagcagttctgtatatactcagaatgaaatttttcttggttttcttggtttttgtgaaagcagaataccgatgctatttttgttgcggaccagtacttgtttgtccttaaatactttatgcctctgaactttcatagaatcctttatgaaagttaacttcatcaatagacggttaatattaatagagccacagtgctaccagtagcaaactaggtagaccattatttgttttgcaacaagatgctaagcatggcagactttgaagttgcgtttcatcttaaggaccaagggaggtaactttaaggttgccagtggtggatccagctccgttaggctaagttgtctacagctaatgattgtgtctttattctatatccccagcacctaaaacagggtcacacaacattcactaaatgtttgttgaataaaagagttaacaaacataattgaaagctttttttcttcctatatttagcatgaagactgtcattgtttctctaggaaatgtatgaatctgaacttttttgacttgaagaaaaacattctttttttacagagatttggactttgatgataggttttaaaaatatatgataaatattttttgtacttgtttgatttttttttaaagactttacttcagaaagggaaagactgtttagaaagaatgcatattttttccctatttatttctgtggttactgcttttgcagtttaacagtgtttgtatttgatatttgtatatgtttgattgctatctttaaagtgccttatcagatttatggctctgtgctattactttttgagctttgcaagttgtgtacataataattctaaagaagttactttgtttgcaatgcatcaaatttaaatgatgtgatttttntcctttccctttcggattcccgacgctgtggttgctgtaaggggtcctccctgcgccacacggccgtcgccatggtgaagctgagcaaagaggccaagcagagactacagcagctcttcaaggggagccagtttgccattcgctggggctttatccctcttgtgatttacctgggatttaagaggggtgcagatcccggaatgcctgaaccaactgttttgagcctactttggggataaaggattatttggtcttctggatttggaggcaatcagcggacagcatggaagatgtgtgctctggctcggataagagatgggacatcattcagtcactagttggatggcacaaggctcttcacagacgcatctgtagcagagtggaacttgtactaacttatgatagaatgtatcagaataaatgtttttaacagtgtcacaaaacaaaaacaaaaataaaaaaatcttctctcctctcatcatctcctctcctctcccctctctactccttccctcctctcccctctcctctatctctccttctctttacactccctctactctcccttccttcttctcttactacacttcatcctctccctctcccc

SEQ ID NO: 329165 - DNA, 974 bp, Homo sapiens
  misc_feature (9)..(10): n is a, c, g, or t
gcggccgcnncgcctactactactaattcgcggccgcgtcgagtggttgctgtaaggggtcctccctgcgccacacggccgtcgccatggtgaagctgagcaaagaggccaagcagagactacagcagctcttcaaggggagccagtttgccattcgctggggctttatccctcttgtgatttacctgggtcagtgggagaagaaccgggaaagtgactggagggaagagggtggcggagacagcagccccatttttggccgtcgggggagggagagaaaaataggggacactgccgtgcacggcccctgaggctgtctggtcaagtggggccgatctaacctgagttcgagttcccgttctatcgctttatagttgcatggtctttaagcagtcttgcaatccctccttttctatttttgcatccttaaagtggaggtcatatttctcgggattgtagggagggttggatgaccccagtggatgtgaaagtcactaattcactctctagcactaggtggttctcggggtgtttttcctcaccgctccatgtggtcctaagtggaaagagtcctgttcagggaatcgagacacctcgtgaaagtaccactgccatgaaagcatgattataataatagtcgttggatgcctctgctttcttacctgtacgatgaagggtttggatgatttctattactgcccccattttacaggatttaagaggggtgcagatcccggaatgcctgaaccaactgttttgagcctactttggggataaaggattatttggtcttctggatttggaggcaatcagcggacagcatggaagatgtgtgctctggctcggataagagatgggacatcattcagtcactagttggatggcacaaggctcttcacagacgcatctgtagcagagtggaacttgtactaacttatgatagaatgtatcagaataaatgtttttaacagtgt

SEQ ID NO: 329166 - DNA, 402 bp, Homo sapiens
  misc_feature (9)..(10): n is a, c, g, or t
gcggccgcnncgcctactactactaattcgcggccgcgtcgagtggttgctgtaaggggtcctccctgcgccacacggccgtcgccatggtgaagctgagcaaagaggccaagcagagactacagcagctcttcaaggggagccagtttgccattcgctggggctttatccctcttgtgatttacctggcctactttggggataaaggattatttggtcttctggatttggaggcaatcagcggacagcatggaagatgtgtgctctggctcggataagagatgggacatcattcagtcactagttggatggcacaaggctcttcacagacgcatctgtagcagagtggaacttgtactaacttatgatagaatgtatcagaataaatgtttttaacagtgt

SEQ ID NO: 329167 - DNA, 730 bp, Homo sapiens
  misc_feature (9)..(10): n is a, c, g, or t
gcggccgcnncgcctactactactaattcgcggccgcgtcgagtggttgctgtaaggggtcctccctgcgccacacggccgtcgccatggtgaagctgagcaaagaggccaagcagagactacagcgatttaagaggggtgcagatcccggaatgcctgaaccaactgttttgagcctactttggggataaaggattatttggtcttctggatttggaggcaatcagcggacagcatggaagatgtgtgctctggctcggataagagatgggacatcattcagtcactagttggatggcacaaggctcttcacagacgcatctgtagcagagtggaacttgtactaacttatgatagaatgtatcagaataaatgtttttaacagtgtgtgttatgcttgagtcttttttgaattgaacatgctaggattatcaggtaaaaattaagccttttggtactttctcaaaacagggaatttatgtgtgtacctaggtgctatttaagcctgtaaatcccagcactttgggaggccagggcgggtggatcacgatataaaaaaatttttccaagttattcctgcccattgacctaacatatggattacagtttccctttgcagtgaattaataactccttctaggatattccgaggtagtaagaatacagatagttctgtttgtgacaaaccaagctgttacttcctcctctgcattaaagttctgactgcaag

SEQ ID NO: 329168 - DNA, 1830 bp, Homo sapiens
  misc_feature (1394)..(1394): n is a, c, g, or t
gcgagtggttaaaagacagttggtgtcggttcgccttctcgggtcggattccgcggtcccaacccttccccatggccgaccctgaggagttgcaggtttcttcgccgcccccgccgcctccctcttctccctcctcttcagacgcctctgcagcatcttccccgggcggcccagtgagtttgggctggccagttccgagcaggagcagcggcccaacggtggaccagctggaggaagtggagctgcagatcggagacgcagccttttcattaaccaaacttcttgaagccacatctgcagtatcagctcaagtggaagaacttgccttcaaatgtacagaaaatgcacgtttccttaaaacgtggcgggacctcttgaaagaaggctatgattctttgaaacctgatgactgatttggcatacttcgttgtttaataatgactgcaataattcatacttcttatgtcatattttgtacatgtaccacacatataggatgacctctgtccagcagttctgtatatactcagaatgaaatttttcttggttttcttggtttttgtgaaagcagaataccgatgctatttttgttgcggaccagtacttgtttgtccttaaatactttatgcctctgaactttcatagaatcctttatgaaagttaacttcatcaatagacggttaatattaatagagccacagtgctaccagtagcaaactaggtagaccattatttgttttgcaacaagatgctaagcatggcagactttgaagttgcgtttcatcttaaggaccaagggaggtaactttaaggttgccagtggtggatccagctccgttaggctaagttgtctacagctaatgattgtgtctttattctatatccccagcacctaaaacagggtcacacaacattcactaaatgtttgttgaataaaagagttaacaaacataattgaaagctttttttcttcctatatttagcatgaagactgtcattgtttctctaggaaatgtatgaatctgaacttttttgacttgaagaaaaacattctttttttacagagatttggactttgatgataggttttaaaaatatatgataaatattttttgtacttgtttgatttttttttaaagactttacttcagaaagggaaagactgtttagaaagaatgcatattttttccctatttatttctgtggttactgcttttgcagtttaacagtgtttgtatttgatatttgtatatgtttgattgctatctttaaagtgccttatcagatttatggctctgtgctattactttttgagctttgcaagttgtgtacataataattctaaagaagttactttgtttgcaatgcatcaaatttaaatgatgtgatttttntcctttccctttcggattcccgacgctgtggttgctgtaaggggtcctccctgcgccacacggccgtcgccatggtgaagctgagcaaagaggccaagcagagactacagcagctcttcaaggggagccagtttgccattcgctggggctttatccctcttgtgatttacctgggatttaagaggggtgcagatcccggaatgcctgaaccaactgttttgagcctactttggggataaaggattatttggtcttctggatttggaggcaatcagcggacagcatggaagatgtgtgctctggctcggataagagatgggacatcattcagtcactagttggatggcacaaggctcttcacagacgcatctgtagcagagtggaacttgtactaacttatgatagaatgtatcagaataaatgtttttaacagtgt

SEQ ID NO: 329169 - DNA, 672 bp, Homo sapiens
tgatatcgaattcgcggccgcgtcgacacggctgcgagaatacgacagaagggggacgtggttgctgtaaggggtcctccctgcgccacacggccgtcgccatggtgaagctgagcaaagaggccaagcagagactacagcagctcttcaaggggagccagtttgccattcgctggggctttatccctcttgtgatttacctgggatttaagaggggtgcagatcccggaatgcctgaaccaactgttttgagcctactttggggataaaggattatttggtcttctggatttggaggcaatcagcggacagcatggaagatgtgtgctctggctcggataagagatgggacatcattcagtcactagttggatggcacaaggctcttcacagacgcatctgtagcagagtggaacttgtactaacttatgatagaatgtatcagaataaatgtttttaacagtgtccacaacaaaaacactaatatatctacaataccatctcttaaccccactgacctaccaacactccatcatactctcctacacattctctcttccttcatcatacattcacctaccctcatccatcattcatcccacttctcacccttcattccatcactacccctattccttctctcatactctccctcacttacaacctctaatt

SEQ ID NO: 329170 - DNA, 643 bp, Homo sapiens
  misc_feature (475)..(475): n is a, c, g, or t
  misc_feature (479)..(480): n is a, c, g, or t
tgatatcgaattcgcggccgcgtcgacacggctgcgagaatacgacagaagggggacgtggttgctgtaaggggtcctccctgcgccacacggccgtcgccatggtgaagctgagcaaagaggccaagcagagactacagcagctcttcaaggggagccagtttgccattcgctggggctttatccctcttgtgatttacctgggatttaagaggggtgcagatcccggaatgcctgaaccaactgttttgagcctactttggggataaaggattatttggtcttctggatttggaggcaatcagcggacagcatggaagatgtgtgctctggctcggataagagatgggacatcattcagtcactagttggatggcacaaggctcttcacagacgcatctgtagcagagtggaacttgtactaacttatgatagaatgtatcagaataaatgtttttaacagtgtacacaatanaaannaactaataaaaaaacacttccctaccacactcaatctttattccactccttcttcccattatcaatccctctcttccctctttccctcccacaactcacacttcctcccttctctctcattctctctatatcacacttctatacacctatacttaatcctccc

SEQ ID NO: 329171 - DNA, 2056 bp, Homo sapiens
  misc_feature (1394)..(1394): n is a, c, g, or t
gcgagtggttaaaagacagttggtgtcggttcgccttctcgggtcggattccgcggtcccaacccttccccatggccgaccctgaggagttgcaggtttcttcgccgcccccgccgcctccctcttctccctcctcttcagacgcctctgcagcatcttccccgggcggcccagtgagtttgggctggccagttccgagcaggagcagcggcccaacggtggaccagctggaggaagtggagctgcagatcggagacgcagccttttcattaaccaaacttcttgaagccacatctgcagtatcagctcaagtggaagaacttgccttcaaatgtacagaaaatgcacgtttccttaaaacgtggcgggacctcttgaaagaaggctatgattctttgaaacctgatgactgatttggcatacttcgttgtttaataatgactgcaataattcatacttcttatgtcatattttgtacatgtaccacacatataggatgacctctgtccagcagttctgtatatactcagaatgaaatttttcttggttttcttggtttttgtgaaagcagaataccgatgctatttttgttgcggaccagtacttgtttgtccttaaatactttatgcctctgaactttcatagaatcctttatgaaagttaacttcatcaatagacggttaatattaatagagccacagtgctaccagtagcaaactaggtagaccattatttgttttgcaacaagatgctaagcatggcagactttgaagttgcgtttcatcttaaggaccaagggaggtaactttaaggttgccagtggtggatccagctccgttaggctaagttgtctacagctaatgattgtgtctttattctatatccccagcacctaaaacagggtcacacaacattcactaaatgtttgttgaataaaagagttaacaaacataattgaaagctttttttcttcctatatttagcatgaagactgtcattgtttctctaggaaatgtatgaatctgaacttttttgacttgaagaaaaacattctttttttacagagatttggactttgatgataggttttaaaaatatatgataaatattttttgtacttgtttgatttttttttaaagactttacttcagaaagggaaagactgtttagaaagaatgcatattttttccctatttatttctgtggttactgcttttgcagtttaacagtgtttgtatttgatatttgtatatgtttgattgctatctttaaagtgccttatcagatttatggctctgtgctattactttttgagctttgcaagttgtgtacataataattctaaagaagttactttgtttgcaatgcatcaaatttaaatgatgtgatttttntcctttccctttcggattcccgacgctgtggttgctgtaaggggtcctccctgcgccacacggccgtcgccatggtgaagctgagcaaagaggccaagcagagactacagcagctcttcaaggggagccagtttgccattcgctggggctttatccctcttgtgatttacctgggatttaagaggggtgcagatcccggaatgcctgaaccaactgttttgagcctactttggggataaaggattatttggtcttctggatttggaggcaatcagcggacagcatggaagatgtgtgctctggctcggataagagatgggacatcattcagtcactagttggatggcacaaggctcttcacagacgcatctgtagcagagtggaacttgtactaacttatgatagaatgtatcagaataaatgtttttaacagtgtaaaaaaaaaaaacaaaaaaaaaaaaaaaaaaaaaaaaaaaaaaaaaaagaaaaaaaaagaagaaacgcagagagcacaagggggaggagaaaaaaaacgggaacaagaggagaaagaagacaaaaagcagaaacaaagaagaagaagacgaaaagaagaaaacagggaggggaacaacaaaggagaaccgaaaaaaaacgaaaaacagggagaagacgaaaaaaga

SEQ ID NO: 329172 - DNA, 2026 bp, Homo sapiens
  misc_feature (1394)..(1394): n is a, c, g, or t
gcgagtggttaaaagacagttggtgtcggttcgccttctcgggtcggattccgcggtcccaacccttccccatggccgaccctgaggagttgcaggtttcttcgccgcccccgccgcctccctcttctccctcctcttcagacgcctctgcagcatcttccccgggcggcccagtgagtttgggctggccagttccgagcaggagcagcggcccaacggtggaccagctggaggaagtggagctgcagatcggagacgcagccttttcattaaccaaacttcttgaagccacatctgcagtatcagctcaagtggaagaacttgccttcaaatgtacagaaaatgcacgtttccttaaaacgtggcgggacctcttgaaagaaggctatgattctttgaaacctgatgactgatttggcatacttcgttgtttaataatgactgcaataattcatacttcttatgtcatattttgtacatgtaccacacatataggatgacctctgtccagcagttctgtatatactcagaatgaaatttttcttggttttcttggtttttgtgaaagcagaataccgatgctatttttgttgcggaccagtacttgtttgtccttaaatactttatgcctctgaactttcatagaatcctttatgaaagttaacttcatcaatagacggttaatattaatagagccacagtgctaccagtagcaaactaggtagaccattatttgttttgcaacaagatgctaagcatggcagactttgaagttgcgtttcatcttaaggaccaagggaggtaactttaaggttgccagtggtggatccagctccgttaggctaagttgtctacagctaatgattgtgtctttattctatatccccagcacctaaaacagggtcacacaacattcactaaatgtttgttgaataaaagagttaacaaacataattgaaagctttttttcttcctatatttagcatgaagactgtcattgtttctctaggaaatgtatgaatctgaacttttttgacttgaagaaaaacattctttttttacagagatttggactttgatgataggttttaaaaatatatgataaatattttttgtacttgtttgatttttttttaaagactttacttcagaaagggaaagactgtttagaaagaatgcatattttttccctatttatttctgtggttactgcttttgcagtttaacagtgtttgtatttgatatttgtatatgtttgattgctatctttaaagtgccttatcagatttatggctctgtgctattactttttgagctttgcaagttgtgtacataataattctaaagaagttactttgtttgcaatgcatcaaatttaaatgatgtgatttttntcctttccctttcggattcccgacgctgtggttgctgtaaggggtcctccctgcgccacacggccgtcgccatggtgaagctgagcaaagaggccaagcagagactacagcagctcttcaaggggagccagtttgccattcgctggggctttatccctcttgtgatttacctgggatttaagaggggtgcagatcccggaatgcctgaaccaactgttttgagcctactttggggataaaggattatttggtcttctggatttggaggcaatcagcggacagcatggaagatgtgtgctctggctcggataagagatgggacatcattcagtcactagttggatggcacaaggctcttcacagacgcatctgtagcagagtggaacttgtactaacttatgatagaatgtatcagaataaatgtttttaacagtgtgaaaataaaatggtttttttaaaccagtgctttaacaaaaacaaaaaaaaacaaaaaaacaagaaaaacaaaaacaaaaaaaaaaaaagggggggggcgggcagagaagagatcccagggggggcggcccacgcagcacgcgcgcagcccgccgtgtttgttgcacaagggggcgccccacagagagggggcaaaa

SEQ ID NO: 329173 - DNA, 1883 bp, Homo sapiens
  misc_feature (1394)..(1394): n is a, c, g, or t
  misc_feature (1832)..(1832): n is a, c, g, or t
  misc_feature (1838)..(1838): n is a, c, g, or t
gcgagtggttaaaagacagttggtgtcggttcgccttctcgggtcggattccgcggtcccaacccttccccatggccgaccctgaggagttgcaggtttcttcgccgcccccgccgcctccctcttctccctcctcttcagacgcctctgcagcatcttccccgggcggcccagtgagtttgggctggccagttccgagcaggagcagcggcccaacggtggaccagctggaggaagtggagctgcagatcggagacgcagccttttcattaaccaaacttcttgaagccacatctgcagtatcagctcaagtggaagaacttgccttcaaatgtacagaaaatgcacgtttccttaaaacgtggcgggacctcttgaaagaaggctatgattctttgaaacctgatgactgatttggcatacttcgttgtttaataatgactgcaataattcatacttcttatgtcatattttgtacatgtaccacacatataggatgacctctgtccagcagttctgtatatactcagaatgaaatttttcttggttttcttggtttttgtgaaagcagaataccgatgctatttttgttgcggaccagtacttgtttgtccttaaatactttatgcctctgaactttcatagaatcctttatgaaagttaacttcatcaatagacggttaatattaatagagccacagtgctaccagtagcaaactaggtagaccattatttgttttgcaacaagatgctaagcatggcagactttgaagttgcgtttcatcttaaggaccaagggaggtaactttaaggttgccagtggtggatccagctccgttaggctaagttgtctacagctaatgattgtgtctttattctatatccccagcacctaaaacagggtcacacaacattcactaaatgtttgttgaataaaagagttaacaaacataattgaaagctttttttcttcctatatttagcatgaagactgtcattgtttctctaggaaatgtatgaatctgaacttttttgacttgaagaaaaacattctttttttacagagatttggactttgatgataggttttaaaaatatatgataaatattttttgtacttgtttgatttttttttaaagactttacttcagaaagggaaagactgtttagaaagaatgcatattttttccctatttatttctgtggttactgcttttgcagtttaacagtgtttgtatttgatatttgtatatgtttgattgctatctttaaagtgccttatcagatttatggctctgtgctattactttttgagctttgcaagttgtgtacataataattctaaagaagttactttgtttgcaatgcatcaaatttaaatgatgtgatttttntcctttccctttcggattcccgacgctgtggttgctgtaaggggtcctccctgcgccacacggccgtcgccatggtgaagctgagcaaagaggccaagcagagactacagcagctcttcaaggggagccagtttgccattcgctggggctttatccctcttgtgatttacctgggatttaagaggggtgcagatcccggaatgcctgaaccaactgttttgagcctactttggggataaaggattatttggtcttctggatttggaggcaatcagcggacagcatggaagatgtgtgctctggctcggataagagatgggacatcattcagtcactagttggatggcacaaggctcttcacagacgcatctgtagcagagtggaacttgtactaacttatgatagaatgtatcagaataaatgtttttaacagtgtcngatgcngtcaggccccccctcttcctacatcaccttggccttaccgtcccg

SEQ ID NO: 329174 - DNA, 2007 bp, Homo sapiens
  misc_feature (1394)..(1394): n is a, c, g, or t
gcgagtggttaaaagacagttggtgtcggttcgccttctcgggtcggattccgcggtcccaacccttccccatggccgaccctgaggagttgcaggtttcttcgccgcccccgccgcctccctcttctccctcctcttcagacgcctctgcagcatcttccccgggcggcccagtgagtttgggctggccagttccgagcaggagcagcggcccaacggtggaccagctggaggaagtggagctgcagatcggagacgcagccttttcattaaccaaacttcttgaagccacatctgcagtatcagctcaagtggaagaacttgccttcaaatgtacagaaaatgcacgtttccttaaaacgtggcgggacctcttgaaagaaggctatgattctttgaaacctgatgactgatttggcatacttcgttgtttaataatgactgcaataattcatacttcttatgtcatattttgtacatgtaccacacatataggatgacctctgtccagcagttctgtatatactcagaatgaaatttttcttggttttcttggtttttgtgaaagcagaataccgatgctatttttgttgcggaccagtacttgtttgtccttaaatactttatgcctctgaactttcatagaatcctttatgaaagttaacttcatcaatagacggttaatattaatagagccacagtgctaccagtagcaaactaggtagaccattatttgttttgcaacaagatgctaagcatggcagactttgaagttgcgtttcatcttaaggaccaagggaggtaactttaaggttgccagtggtggatccagctccgttaggctaagttgtctacagctaatgattgtgtctttattctatatccccagcacctaaaacagggtcacacaacattcactaaatgtttgttgaataaaagagttaacaaacataattgaaagctttttttcttcctatatttagcatgaagactgtcattgtttctctaggaaatgtatgaatctgaacttttttgacttgaagaaaaacattctttttttacagagatttggactttgatgataggttttaaaaatatatgataaatattttttgtacttgtttgatttttttttaaagactttacttcagaaagggaaagactgtttagaaagaatgcatattttttccctatttatttctgtggttactgcttttgcagtttaacagtgtttgtatttgatatttgtatatgtttgattgctatctttaaagtgccttatcagatttatggctctgtgctattactttttgagctttgcaagttgtgtacataataattctaaagaagttactttgtttgcaatgcatcaaatttaaatgatgtgatttttntcctttccctttcggattcccgacgctgtggttgctgtaaggggtcctccctgcgccacacggccgtcgccatggtgaagctgagcaaagaggccaagcagagactacagcagctcttcaaggggagccagtttgccattcgctggggctttatccctcttgtgatttacctgggatttaagaggggtgcagatcccggaatgcctgaaccaactgttttgagcctactttggggataaaggattatttggtcttctggatttggaggcaatcagcggacagcatggaagatgtgtgctctggctcggataagagatgggacatcattcagtcactagttggatggcacaaggctcttcacagacgcatctgtagcagagtggaacttgtactaacttatgatagaatgtatcagaataaatgtttttaacagtgtaaaaaaaaaaaaaaaaaagaaaaaaaaaaaaacaaaaaaacaagaaaaacaaaaacaaaaaaaaaaaaagggggggggcgggcagagaagagatcccagggggggcggcccacgcagcacgcgcgcagcccgccgtgtttgttgcacaagggggcgccccacagagagggggcaaaa

SEQ ID NO: 329175 - DNA, 458 bp, Homo sapiens
  misc_feature (22)..(22): n is a, c, g, or t
ccgtgatgtggcgcctgcacantcctttccctttcggattcccgacgctgtggttgctgtaaggggtcctccctgcgccacacggccgtcgccatggtgaagctgagcaaagaggccaagcagagactacagcagctcttcaaggggagccagtttgccattcgctggggctttatccctcttgtgatttacctgggatttaagaggggtgcagatcccggaatgcctgaaccaactgttttgagcctactttggggataaaggattatttggtcttctggatttggaggcaatcagcggacagcatggaagatgtgtgctctggctcggataagagatgggacatcattcagtcactagttggatggcacaaggctcttcacagacgcatctgtagcagagtggaacttgtactaacttatgatagaatgtatcagaataaatgtttttaacagtgt

SEQ ID NO: 329176 - DNA, 91 bp, Homo sapiens
gagagctccttcaggtttctaaggtgggctgtaagggattccttctctaaagtatttgtagtctactacaggagattccagggtattgggg

SEQ ID NO: 329177 - DNA, 6636 bp, Homo sapiens
aattaaattatgagaattaaaaagacaacattgagcagagatgaaaaaggaagggaggaaaaggtggaaaagaaaagaagacaagaagcgagtagtggtctctaacttgctctttgaaggatggtctcacaaagagaaccccaacagacatcatcgtgggaatcaaatcaagaccagcaagtacaccgtgttgtccttcgtccccaaaaacatttttgagcagctacaccggtttgccaatctctattttgtgggcattgcggttctgaattttatccctgtggtcaatgctttccagcctgaggtgagcatgataccaatctgtgttatcctggcagtcactgccatcaaggacgcttgggaagacctccggaggtacaaatcggataaagtcatcaataaccgagagtgcctcatctacagcagaaaagagcagacctatgtgcagaagtgctggaaggatgtgcgtgtgggagacttcatccaaatgaaatgcaatgagattgtcccagcagacatactcctccttttttcctctgaccccaatgggatatgccatctggaaactgccagcttggatggagagacaaacctcaagcaaagacgtgtcgtgaagggcttctcacagcaggaggtacagttcgaaccagagcttttccacaataccatcgtgtgtgagaaacccaacaaccacctcaacaaatttaagggttatatggagcatcctgaccagaccaggactggctttggctgtgagagtcttctgcttcgaggctgcaccatcagaaacaccgagatggctgttggcattgtcatctatgcaggccatgagacgaaagccatgctgaacaacagtggcccccggtacaaacgcagcaagattgagcggcgcatgaatatagacatcttcttctgcattgggatcctcatcctcatgtgccttattggagctgtaggtcacagcatctggaatgggacctttgaagaacaccctcccttcgatgtgccagatgccaatggcagcttccttcccagtgcccttgggggcttctacatgttcctcacaatgatcatcctgctccaggtgctgatccccatctctttgtatgtctccattgagctggtgaagctcgggcaagtgttcttcttgagcaatgaccttgacctgtatgatgaagagaccgatttatccattcaatgtcgagccctcaacatcgcagaggacttgggccagatccagtacatcttctccgataagacggggaccctgacagagaacaagatggtgttccgacgttgcaccatcatgggcagcgagtattctcaccaagaaaatgctaagcgactggagaccccaaaggagctggactcagatggtgaagagtggacccaataccaatgcctgtccttctcggctagatgggcccaggatccagcaactatgagaagccaaaaaggtgctcagcctctgaggaggagccagagtgcccgggtgcccatccagggccactaccggcaaaggtctatggggcaccgtgaaagctcacagcctcctgtggccttcagcagctccatagaaaaagatgtaactccagataaaaacctactgaccaaggttcgagatgctgccctgtggttggagaccttgtcagacagcagacctgccaaggcttccctctccaccacctcctccattgctgatttcttccttgccttaaccatctgcaactctgtcatggtgtccacaaccaccgagcccaggcagagggtcaccatcaaaccctcaagcaaggctctggggacgtccctggagaagattcagcagctcttccagaagttgaagctattgagcctcagccagtcattctcatccactgcaccctctgacacagacctcggggagagcttaggggccaacgtggccaccacagactcggatgagagagatgatgcatctgtgtgcagtggaggtgactccactgatgacggtggctacaggagcagcatgtgggaccagggcgacatcctggagtctgggtcaggcacttccttggaggaggcattggaggccccagccacagacctggccaggcctgagttctgttacgaggctgagagccctgatgaggccgccctggtgcacgctgcccatgcctacagcttcacactagtgtcccggacacctgagcaggtgactgtgcgcctgccccagggcacctgcctcaccttcagcctcctctgcaccctgggctttgactctgtcaggaagagaatgtctgtggttgtgaggcacccactgactggcgagattgttgtctacaccaagggtgctgactcggtcatcatggacctgctggaagacccagcctgcgtacctgacattaatatggaaaagaagctgagaaaaatccgagcccggacccaaaagcatctagacttgtatgcaagagatggcctgcgcacactatgcattgccaagaaggttgtaagcgaagaggacttccggagatgggccagtttccggcgtgaggctgaggcatccctcgacaaccgagatgagcttctcatggaaactgcacagcatctggagaatcaactcaccttacttggagccactgggatcgaagaccggctgcaggaaggagttccagatacgattgccactctgcgggaggctgggatccagctctgggtcctgactggagataagcaggagacagcggtcaacattgcccattcctgcagactgttaaatcagaccgacactgtttataccatcaatacagagaatcaggagacctgtgaatccatcctcaattgtgcattggaagagctaaagcaatttcgtgaactacagaagccagaccgcaagctctttggattccgcttaccttccaagacaccatccatcacctcagaagctgtggttccagaagctggattggtcatcgatgggaagacattgaatgccatcttccagggaaagctagagaagaagtttctggaattgacccagtattgtcggtccgtcctgtgctgccgctccacgccactccagaagagtatgatagtcaagctggtgcgagacaagttgcgcgtcatgaccctttccataggtgatggagcaaatgatgtaagcatgattcaagctgctgatattggaattggaatatctggacaggaaggcatgcaggctgtcatgtccagcgactttgccatcacccgctttaagcatctcaagaagttgctgctcgtgcatggccactggtgttactcgcgcctggccaggatggtggtgtactacctctacaagaacgtgtgctacgtcaacctgctcttctggtatcagttcttctgtggtttctccagctccaccatgattgattactggcagatgatattcttcaatctcttctttacctccttgcctcctcttgtctttggagtccttgacaaagacatctctgcagaaacactcctggcattgcctgagctatacaagagtggccagaactctgagtgctataacctgtcgactttctggatttctatggtggatgcattctaccagagcctcatctgtttctttatcccttacctggcctataagggctctgatatagatgtctttacctttgggacaccaatcaacaccatctccctcaccacaatccttttgcaccaggcaatggaaatgaagacatggaccattttccacggagtcgtgctcctcggcagcttcctgatgtactttctggtatccctcctgtacaatgccacctgcgtcatctgcaacagccccaccaatccctattgggtgatggaaggccagctctcaaaccccactttctacctcgtctgctttctcacaccagttgttgctcttctcccaagatactttttcctgtctctgcaaggaacttgtgggaagtctctaatctcaaaagctcagaaaattgacaaactccccccagacaaaagaaacctggaaatccagagttggagaagcagacagaggcctgcccctgtccccgaagtggctcgaccaactcaccacccagtgtcatctatcacaggacaggacttcagtgccagcaccccaaagagctctaaccctcccaagaggaagcatgtggaagagtcagtactccacgaacagagatgtggcacggagtgcatgagggatgactcatgctcaggggactcctcagctcaactctcatccggggagcacctgctgggacctaacaggataatggcctactcaagaggacagactgatatgtgccggtgctcaaagaggagcagccatcgccgatcccagagttcactgaccatatgaggagctgcagaaatctgtacaaactcaacagaggccacctagtcactggtccacataacccttgaccccttcttcttcatagaggaaacaatgtgccagtcttattcttttcttcaacaaccttgacttccatggaggaagtgctggccccaaggggtctgacacaaagacgggaaacccagtcggcctctagttttctgctgctctcaggcagcacatcttgcaaacagtttggagaaggaggctgtttttgttgaatcgagttctcaaatcggtttagaccaaagccattcttctgaccctctagataagcgtagcctacaacccagtgccgtaagtttccaagattcaagaagtgtatcaacccaggcaatatctcaggatatggaagtttctgggtttatttacccctcagtgcccagagttaaagtttcagaagagacttgtgcacataagggcttcatctcaagtgtattgcagtaatggctgaatcggggttaacatcccttccaggcacagcgagttggttctgctttttgcctgtaagccaaagaaaagccacatctaaaaagctactactaaaagccagaaagaaaagtggatttgaactcagtgtcacagactcttctgagtgttttagggtcacagctagtgtaagaggcatgaagaatagacatgcaaaagggaacgggtgcaccagagacccctgttttggctgacagaccatatgtcccaccagctggggaatctgacaagaggacataggtggcactctttttttaaagctatttattgtatctatttttaaataaaattgcccatcctcattcagctcttagaacaaaagcaaaaaaccctgtaaatcaggagatataagcacatctgcacccagaataggcccatatgatagggcaaccctgagcttaaacaatgacatcttcaagggtagaactaatctgaaacccccttccagcctctggaagacactggcctgcatcagttagagtcagagcaagtgtcacttcacagggaaaagaaggattatatagacttcctatccctagagtttataaatgtcaactatataaaaaaagctcaaaacagtgttaaaggaatgaacagtagaattttaataggctgtccaaagaagccaggtctgctgtgggcaagtatagcctaaccctagtcttgtaaaataagccagaaagggttactgagccaccttaagctagtacctatatagtaggcaaaaagtacagaaatagatgcaataagtgtggtgagtctttgagcctacgagtcatgccaccagccataagttgacctatcacttgagaacctcctcagcaaagatgccagaaaacattcaatcaagttggcaaatgacacagggagctggccctctgaccatcttcctggcaaacctggactggaagggccatttgcagcactgtcctggagctaatacactgtttcactgcctctgccatataatgatgccagcactagccagctggtgggtatttggaggaatcctgcatgaggattgcccaataaggggcaggtacacatacctggcaaagtgatgatgatgtgaattgtttccagtgaggggattgagtcaaaacttggatctcaggtacctcaatttttcccccaatttctggctactactaaaagccagaaagaacagaacagtggcctcaggagatctgagtttgaatccttgctctctaggatgcaggtggcttgaagcagaatgccacacctgcaagttgattagaactgcctttcttcccaggcttgacataggtattaagtcaaaattacatgaaacccagtggtaaaaaagcctctgaaagctgtaacaccctcagtaataacaaaagggatttttatttcacagctaaagggaaaataggtggagaagttaaaaaataatgtctgatcctgttcctaagttccaaactatagccaacactctgatgctgctctttttcttgtaggaccaaccgtcccagtttgcctgggactttctcatttttacagagtcccaaatcctaggaaactggagcaactggtacaactggtcacctactcttgcccctctgtaaatcaagccaactgtgaccatccaatgtgccatcttacagggaaaagttataaccactattcccctataacataatgctaatgattgtacttagtacatttttatacttttatgatattttactgattggaaatgtcatcctttattaaaaataaacatggttttccatagttgcctgcca

SEQ ID NO: 329178 - DNA, 6673 bp, Homo sapiens
aattaaattatgagaattaaaaagacaacattgagcagagatgaaaaaggaagggaggaaaaggtggaaaagaaaagaagacaagaagcgagtagtggtctctaacttgctctttgaaggatggtctcacaaagagaaccccaacagacatcatcgtgggaatcaaatcaagaccagcaagtacaccgtgttgtccttcgtccccaaaaacatttttgagcagctacaccggtttgccaatctctattttgtgggcattgcggttctgaattttatccctgtggtcaatgctttccagcctgaggtgagcatgataccaatctgtgttatcctggcagtcactgccatcaaggacgcttgggaagacctccggaggtacaaatcggataaagtcatcaataaccgagagtgcctcatctacagcagaaaagagcagacctatgtgcagaagtgctggaaggatgtgcgtgtgggagacttcatccaaatgaaatgcaatgagattgtcccagcagacatactcctccttttttcctctgaccccaatgggatatgccatctggaaactgccagcttggatggagagacaaacctcaagcaaagacgtgtcgtgaagggcttctcacagcaggaggtacagttcgaaccagagcttttccacaataccatcgtgtgtgagaaacccaacaaccacctcaacaaatttaagggttatatggagcatcctgaccagaccaggactggctttggctgtgagagtcttctgcttcgaggctgcaccatcagaaacaccgagatggctgttggcattgtcatctatgcaggccatgagacgaaagccatgctgaacaacagtggcccccggtacaaacgcagcaagattgagcggcgcatgaatatagacatcttcttctgcattgggatcctcatcctcatgtgccttattggagctgtaggtcacagcatctggaatgggacctttgaagaacaccctcccttcgatgtgccagatgccaatggcagcttccttcccagtgcccttgggggcttctacatgttcctcacaatgatcatcctgctccaggtgctgatccccatctctttgtatgtctccattgagctggtgaagctcgggcaagtgttcttcttgagcaatgaccttgacctgtatgatgaagagaccgatttatccattcaatgtcgagccctcaacatcgcagaggacttgggccagatccagtacatcttctccgataagacggggaccctgacagagaacaagatggtgttccgacgttgcaccatcatgggcagcgagtattctcaccaagaaaatgctaagcgactggagaccccaaaggagctggactcagatggtgaagagtggacccaataccaatgcctgtccttctcggctagatgggcccaggatccagcaactatgagaagccaaaaaggtgctcagcctctgaggaggagccagagtgcccgggtgcccatccagggccactaccggcaaaggtctatggggcaccgtgaaagctcacagcctcctgtggccttcagcagctccatagaaaaagatgtaactccagataaaaacctactgaccaaggttcgagatgctgccctgtggttggagaccttgtcagacagcagacctgccaaggcttccctctccaccacctcctccattgctgatttcttccttgccttaaccatctgcaactctgtcatggtgtccacaaccaccgagcccaggcagagggtcaccatcaaaccctcaagcaaggctctggggacgtccctggagaagattcagcagctcttccagaagttgaagctattgagcctcagccagtcattctcatccactgcaccctctgacacagacctcggggagagcttaggggccaacgtggccaccacagactcggatgagagagatgatgcatctgtgtgcagtggaggtgactccactgatgacggtggctacaggagcagcatgtgggaccagggcgacatcctggagtctgggtcaggcacttccttggaggaggcattggaggccccagccacagacctggccaggcctgagttctgttacgaggctgagagccctgatgaggccgccctggtgcacgctgcccatgcctacagcttcacactagtgtcccggacacctgagcaggtgactgtgcgcctgccccagggcacctgcctcaccttcagcctcctctgcaccctgggctttgactctgtcaggaagagaatgtctgtggttgtgaggcacccactgactggcgagattgttgtctacaccaagggtgctgactcggtcatcatggacctgctggaagacccagcctgcgtacctgacattaatatggaaaagaagctgagaaaaatccgagcccggacccaaaagcatctagacttgtatgcaagagatggcctgcgcacactatgcattgccaagaaggttgtaagcgaagaggacttccggagatgggccagtttccggcgtgaggctgaggcatccctcgacaaccgagatgagcttctcatggaaactgcacagcatctggagaatcaactcaccttacttggagccactgggatcgaagaccggctgcaggaaggagttccagatacgattgccactctgcgggaggctgggatccagctctgggtcctgactggagataagcaggagacagcggtcaacattgcccattcctgcagactgttaaatcagaccgacactgtttataccatcaatacagagaatcaggagacctgtgaatccatcctcaattgtgcattggaagagctaaagcaatttcgtgaactacagaagccagaccgcaagctctttggattccgcttaccttccaagacaccatccatcacctcagaagctgtggttccagaagctggattggtcatcgatgggaagacattgaatgccatcttccagggaaagctagagaagaagtttctggaattgacccagtattgtcggtccgtcctgtgctgccgctccacgccactccagaagagtatgatagtcaagctggtgcgagacaagttgcgcgtcatgaccctttccataggtgatggagcaaatgatgtaagcatgattcaagctgctgatattggaattggaatatctggacaggaaggcatgcaggctgtcatgtccagcgactttgccatcacccgctttaagcatctcaagaagttgctgctcgtgcatggccactggtgttactcgcgcctggccaggatggtggtgtactacctctacaagaacgtgtgctacgtcaacctgctcttctggtatcagttcttctgtggtttctccagctccaccatgattgattactggcagatgatattcttcaatctcttctttacctccttgcctcctcttgtctttggagtccttgacaaagacatctctgcagaaacactcctggcattgcctgagctatacaagagtggccagaactctgagtgctataacctgtcgactttctggatttctatggtggatgcattctaccagagcctcatctgtttctttatcccttacctggcctataagggctctgatatagatgtctttacctttgggacaccaatcaacaccatctccctcaccacaatccttttgcaccaggcaatggaaatgaagacatggaccattttccacggagtcgtgctcctcggcagcttcctgatgtactttctggtatccctcctgtacaatgccacctgcgtcatctgcaacagccccaccaatccctattgggtgatggaaggccagctctcaaaccccactttctacctcgtctgctttctcacaccagttgttgctcttctcccaagatactttttcctgtctctgcaaggaacttgtgggaagtctctaatctcaaaagctcagaaaattgacaaactccccccagacaaaagaaacctggaaatccagagttggagaagcagacagaggcctgcccctgtccccgaagtggctcgaccaactcaccacccagtgtcatctatcacaggacaggacttcagtgccagcaccccaaagagctctaaccctcccaagaggaagcatgtggaagagtcagtactccacgaacagagatgtggcacggagtgcatgagggatgactcatgctcaggggactcctcagctcaactctcatccggggagcacctgctgggacctaacaggataatggcctactcaagaggacagactgatatgtgccggtgctcaaagaggagcagccatcgccgatcccagagttcactgaccatatgaggagctgcagaaatctgtacaaactcaacagaggccacctagtcactggtccacataacccttgaccccttcttcttcatagaggaaacaatgtgccagtcttattcttttcttcaacaaccttgacttccatggaggaagtgctggccccaaggggtctgacacaaagacgggaaacccagtcggcctctagttttctgctgctctcaggcagcacatcttgcaaacagtttggagaaggaggctgtttttgttgaatcgagttctcaaatcggtttagaccaaagccattcttctgaccctctagataagcgtagcctacaacccagtgccgtaagtttccaagattcaagaagtgtatcaacccaggcaatatctcaggatatggaagtttctgggtttatttacccctcagtgcccagagttaaagtttcagaagagacttgtgcacataagggcttcatctcaagtgtattgcagtaatggctgaatcggggttaacatcccttccaggcacagcgagttggttctgctttttgcctgtaagccaaagaaaagccacatctaaaaagctactactaaaagccagaaagaaaagtggatttgaactcagtgtcacagactcttctgagtgttttagggtcacagctagtgtaagaggcatgaagaatagacatgcaaaagggaacgggtgcaccagagacccctgttttggctgacagaccatatgtcccaccagctggggaatctgacaagaggacataggtggcactctttttttaaagctatttattgtatctatttttaaataaaattgcccatcctcattcagctcttagaacaaaagcaaaaaaccctgtaaatcaggagatataagcacatctgcacccagaataggcccatatgatagggcaaccctgagcttaaacaatgacatcttcaagggtagaactaatctgaaaccccattcagcctattccagaatggggatagctgaaacccccttccagcctctggaagacactggcctgcatcagttagagtcagagcaagtgtcacttcacagggaaaagaaggattatatagacttcctatccctagagtttataaatgtcaactatataaaaaaagctcaaaacagtgttaaaggaatgaacagtagaattttaataggctgtccaaagaagccaggtctgctgtgggcaagtatagcctaaccctagtcttgtaaaataagccagaaagggttactgagccaccttaagctagtacctatatagtaggcaaaaagtacagaaatagatgcaataagtgtggtgagtctttgagcctacgagtcatgccaccagccataagttgacctatcacttgagaacctcctcagcaaagatgccagaaaacattcaatcaagttggcaaatgacacagggagctggccctctgaccatcttcctggcaaacctggactggaagggccatttgcagcactgtcctggagctaatacactgtttcactgcctctgccatataatgatgccagcactagccagctggtgggtatttggaggaatcctgcatgaggattgcccaataaggggcaggtacacatacctggcaaagtgatgatgatgtgaattgtttccagtgaggggattgagtcaaaacttggatctcaggtacctcaatttttcccccaatttctggctactactaaaagccagaaagaacagaacagtggcctcaggagatctgagtttgaatccttgctctctaggatgcaggtggcttgaagcagaatgccacacctgcaagttgattagaactgcctttcttcccaggcttgacataggtattaagtcaaaattacatgaaacccagtggtaaaaaagcctctgaaagctgtaacaccctcagtaataacaaaagggatttttatttcacagctaaagggaaaataggtggagaagttaaaaaataatgtctgatcctgttcctaagttccaaactatagccaacactctgatgctgctctttttcttgtaggaccaaccgtcccagtttgcctgggactttctcatttttacagagtcccaaatcctaggaaactggagcaactggtacaactggtcacctactcttgcccctctgtaaatcaagccaactgtgaccatccaatgtgccatcttacagggaaaagttataaccactattcccctataacataatgctaatgattgtacttagtacatttttatacttttatgatattttactgattggaaatgtcatcctttattaaaaataaacatggttttccatagttgcctgcca

SEQ ID NO: 329179 - DNA, 531 bp, Homo sapiens
agtcccctgattcagctgggctttaactggacctgagaatctcaattattaaattcccaggcggttctcatgcaaacagctgtttgggaacagtaccttagaccacctaccttccttacatagcactttactcagccaggcttttgatgaaaagatgtagagagcagacagcttaaggactccctgcattatcttccagggcaacctgacagccaggagagctccttcaggtttctaaggtgggctgtaagggattccttctctaaagtatttgtagtctactacaggagattccagggtattggggatggggatccctgagcatttgtatgtggcctcatgcgggaaaatggctatttgacagtacctgacattaatatggaaaagaagctgagaaaaatccgagcccggacccaaaagcatctagacttgtatgcaagagatggcctgcgcacactatgcattgccaagaaggtaagaacaattcctccaagcgtgctttgaatatcattaaatagctgaatggccttg

SEQ ID NO: 329180 - DNA, 432 bp, Homo sapiens
gaaactcaactgtcggtttcttactatttaagactaacttatccattgaaaaagtcccaattaaattgaaattattcagagcttaaattttcagcatcaatttatatgtcaagctggtctgccacagagtaaaaacctgaaaggaataatgcatgaagccaatatgtttttatgggatgagaaagagaaagaatgaagcaaagatctaaaaatggcacttttcaactggaatagattacgggtggcagggagtgaggtttggagagaagactgggaaagctgaagaggcatattcaaagctataacaccgttttgattttagggggaagtatctgttttcacaattcaaattgcagaaggtaaagttccaccacatcttcttggctgatgaagatgggaagtgggcactgagattgtgtgctcctatcagaa

SEQ ID NO: 329181 - DNA, 408 bp, Homo sapiens
agacatcatcgtgggaatcaaatcaagaccagcaagtacaccgtgttgtccttcgtccccaaaaacatttttgagcagctacaccggtttgccaatctctattttgtgggcattgcggttctgaattttatccctgtggtcaatgctttccagcctgaggtgagcatgataccaatctgtgttatcctggcagtcactgccatcaaggacgcttgggaagacctccggaggtacaaatcggataaagtcatcaataaccgagagtgcctcatctacagcaggtaaagcaaaaaactctggggaagtcttgggcccagcctgatctttttgtggctgctatcactgcagttactgtttgtagaagggatggagtagggagatatcattattttatttcagggaagctgt

SEQ ID NO: 329182 - DNA, 3048 bp, Homo sapiens
aattaaattatgagaattaaaaagacaacattgagcagagatgaaaaaggaagggaggaaaaggtggaaaagaaaagaagacaagaagcgagtagtggtctctaacttgctctttgaaggatggtctcacaaagagaaccccaacagacatcatcgtgggaatcaaatcaagaccagcaagtacaccgtgttgtccttcgtccccaaaaacatttttgagcagctacaccggtttgccaatctctattttgtgggcattgcggttctgaattttatccctgtggtcaatgctttccagcctgaggtgagcatgataccaatctgtgttatcctggcagtcactgccatcaaggacgcttgggaagacctccggaggtacaaatcggataaagtcatcaataaccgagagtgcctcatctacagcagaaaagagcagacctatgtgcagaagtgctggaaggatgtgcgtgtgggagacttcatccaaatgaaatgcaatgagattgtcccagcagacatactcctccttttttcctctgaccccaatgggatatgccatctggaaactgccagcttggatggagagacaaacctcaagcaaagacgtgtcgtgaagggcttctcacagcaggaggtacagttcgaaccagagcttttccacaataccatcgtgtgtgagaaacccaacaaccacctcaacaaatttaagggttatatggagcatcctgaccagaccaggactggctttggctgtgagagtcttctgcttcgaggctgcaccatcagaaacaccgagatggctgttggcattgtcatctatgcaggccatgagacgaaagccatgctgaacaacagtggcccccggtacaaacgcagcaagattgagcggcgcatgaatatagacatcttcttctgcattgggatcctcatcctcatgtgccttattggagctgtaggtcacagcatctggaatgggacctttgaagaacaccctcccttcgatgtgccagatgccaatggcagcttccttcccagtgcccttgggggcttctacatgttcctcacaatgatcatcctgctccaggtgctgatccccatctctttgtatgtctccattgagctggtgaagctcgggcaagtgttcttcttgagcaatgaccttgacctgtatgatgaagagaccgatttatccattcaatgtcgagccctcaacatcgcagaggacttgggccagatccagtacatcttctccgataagacggggaccctgacagagaacaagatggtgttccgacgttgcaccatcatgggcagcgagtattctcaccaagaaaatggtatagaagctcccaagggctccatccctctttctaaaaggaaataccctgctctcctaagaaacgaggagataaaagacattctcctggctctcttagaggctgtgtggcatttccacaagttgcttcctgtatccctgtggtcttccttgtcacagatcagggctgttccaattacttgtaaactttcatttgtttacaaaggttagaagttatcccatatgtggttccccttcagctgatctttgtctggtgccagacaaagcactttatgagacgagttttttatctgtcagcaatggattggagacatttcccaattgtgtgccagtcacacaaccaaggcttaggaatttctcaggccaccttacctgacatgtcagggcaggtctgtgtctaggtgcatggtcagatttaatacatccagaagatgtcttctattctaacagatctcttagcttgtcactgaggcaaagttttgatttaggagatagggctataaaatgcctggactgttaccttgcatggactgaatatgactcataaaactgatctgattccttcagccatcatctgcccaacttggttcccctccccacccccccacaacacacacacacactttctaagaaaagaaaagaaattcttttttttcaatactttaagttctgggatacatgtgcagaatgtgcaggtttgttacataggtatacatgtgtcatggtggtttgcagcacccaccaacccatcatctaccttaggtatttctcctaatgctatccctcccctagcccccaaccccccgatgggctccagtgtgtgatgttcccctccatgtccatgtgttctcattgttcaattcccacttatgagtgagaacatgcagtatttggttttctgttcttgtgttagtttgctgatggtttcctgttcatccgtgtccctgcaaaggacatgaactcatccttttttatggctgcataatattccatggtgtatatgtgccacattttctttatccagtctatcgctgatgggcactggggttggttccaagtctttgctattgtgaacagtgctgcaataaacttacatgtgcatgtgtctttagtagaatgatttataatcctttgggtatatacccagtaatgggattgctggtcaaatggtatttctggttctagatccttgaggaatctttgtcttccacaatggttgaactaatttgtactcccaccaacagtgtaaaagtattcctgtttctctacatcctcttcagcatctgttgtgtcctgacattttaatgatcactattctcactggcgtgagatgttatctcattgtggttttgatttgcatttctctaatgaccagtaatgatgagctttttttcatatgtttgttggctgcataaatgtcttcttttgagaagtgtctgttcatatccttcacccattttttgaagaaaacaaactcttaagagagcagtattcattcttttgagtgtgagggatggagaaagagaaagatggagagagtattataagcagctgtatcccctttgccatggtgatagcagaccattcacatgggagcttctggtctctttgtaataataataagagccacattaccagtacttagagtatgctagttattttaacacattgtatcattaaatcttcaaaacatccctatgagttagaaacct

SEQ ID NO: 329183 - DNA, 6435 bp, Homo sapiens
aattaaattatgagaattaaaaagacaacattgagcagagatgaaaaaggaagggaggaaaaggtggaaaagaaaagaagacaagaagcgagtagtggtctctaacttgctctttgaaggatggtctcacaaagagaaccccaacagacatcatcgtgggaatcaaatcaagaccagcaagtacaccgtgttgtccttcgtccccaaaaacatttttgagcagctacaccggtttgccaatctctattttgtgggcattgcggttctgaattttatccctgtggtcaatgctttccagcctgaggtgagcatgataccaatctgtgttatcctggcagtcactgccatcaaggacgcttgggaagacctccggaggtacaaatcggataaagtcatcaataaccgagagtgcctcatctacagcagaaaagagcagacctatgtgcagaagtgctggaaggatgtgcgtgtgggagacttcatccaaatgaaatgcaatgagattgtcccagcagacatactcctccttttttcctctgaccccaatgggatatgccatctggaaactgccagcttggatggagagacaaacctcaagcaaagacgtgtcgtgaagggcttctcacagcaggaggtacagttcgaaccagagcttttccacaataccatcgtgtgtgagaaacccaacaaccacctcaacaaatttaagggttatatggagcatcctgaccagaccaggactggctttggctgtgagagtcttctgcttcgaggctgcaccatcagaaacaccgagatggctgttggcattgtcatctatgcaggccatgagacgaaagccatgctgaacaacagtggcccccggtacaaacgcagcaagattgagcggcgcatgaatatagacatcttcttctgcattgggatcctcatcctcatgtgccttattggagctgtaggtcacagcatctggaatgggacctttgaagaacaccctcccttcgatgtgccagatgccaatggcagcttccttcccagtgcccttgggggcttctacatgttcctcacaatgatcatcctgctccaggtgctgatccccatctctttgtatgtctccattgagctggtgaagctcgggcaagtgttcttcttgagcaatgaccttgacctgtatgatgaagagaccgatttatccattcaatgtcgagccctcaacatcgcagaggacttgggccagatccagtacatcttctccgataagacggggaccctgacagagaacaagatggtgttccgacgttgcaccatcatgggcagcgagtattctcaccaagaaaatgctaagcgactggagaccccaaaggagctggactcagatggtgaagagtggacccaataccaatgcctgtccttctcggctagatgggcccaggatccagcaactatgagaagccaaaaaggtgctcagcctctgaggaggagccagagtgcccgggtgcccatccagggccactaccggcaaaggtctatggggcaccgtgaaagctcacagcctcctgtggccttcagcagctccatagaaaaagatgtaactccagataaaaacctactgaccaaggttcgagatgctgccctgtggttggagaccttgtcagacagcagacctgccaaggcttccctctccaccacctcctccattgctgatttcttccttgccttaaccatctgcaactctgtcatggtgtccacaaccaccgagcccaggcagagggtcaccatcaaaccctcaagcaaggctctggggacgtccctggagaagattcagcagctcttccagaagttgaagctattgagcctcagccagtcattctcatccactgcaccctctgacacagacctcggggagagcttaggggccaacgtggccaccacagactcggatgagagagatgatgcatctgtgtgcagtggaggtgactccactgatgacggtggctacaggagcagcatgtgggaccagggcgacatcctggagtctgggtcaggcacttccttggaggaggcattggaggccccagccacagacctggccaggcctgagttctgttacgaggctgagagccctgatgaggccgccctggtgcacgctgcccatgcctacagcttcacactagtgtcccggacacctgagcaggtgactgtgcgcctgccccagggcacctgcctcaccttcagcctcctctgcaccctgggctttgactctgtcaggaagagaatgtctgtggttgtgaggcacccactgactggcgagattgttgtctacaccaagggtgctgactcggtcatcatggacctgctggaagacccagcctgcgtacctgacattaatatggaaaagaagctgagaaaaatccgagcccggacccaaaagcatctagacttgtatgcaagagatggcctgcgcacactatgcattgccaagaaggttgtaagcgaagaggacttccggagatgggccagtttccggcgtgaggctgaggcatccctcgacaaccgagatgagcttctcatggaaactgcacagcatctggagaatcaactcaccttacttggagccactgggatcgaagaccggctgcaggaaggagttccagatacgattgccactctgcgggaggctgggatccagctctgggtcctgactggagataagcaggagacagcggtcaacattgcccattcctgcagactgttaaatcagaccgacactgtttataccatcaatacagagaatcaggagacctgtgaatccatcctcaattgtgcattggaagagctaaagcaatttcgtgaactacagaagccagaccgcaagctctttggattccgcttaccttccaagacaccatccatcacctcagaagctgtggttccagaagctggattggtcatcgatgggaagacattgaatgccatcttccagggaaagctagagaagaagtttctggaattgacccagtattgtcggtccgtcctgtgctgccgctccacgccactccagaagagtatgatagtcaagctggtgcgagacaagttgcgcgtcatgaccctttccataggtgatggagcaaatgatgtaagcatgattcaagctgctgatattggaattggaatatctggacaggaaggcatgcaggctgtcatgtccagcgactttgccatcacccgctttaagcatctcaagaagttgctgctcgtgcatggccactggtgttactcgcgcctggccaggatggtggtgtactacctctacaagaacgtgtgctataacctgtcgactttctggatttctatggtggatgcattctaccagagcctcatctgtttctttatcccttacctggcctataagggctctgatatagatgtctttacctttgggacaccaatcaacaccatctccctcaccacaatccttttgcaccaggcaatggaaatgaagacatggaccattttccacggagtcgtgctcctcggcagcttcctgatgtactttctggtatccctcctgtacaatgccacctgcgtcatctgcaacagccccaccaatccctattgggtgatggaaggccagctctcaaaccccactttctacctcgtctgctttctcacaccagttgttgctcttctcccaagatactttttcctgtctctgcaaggaacttgtgggaagtctctaatctcaaaagctcagaaaattgacaaactccccccagacaaaagaaacctggaaatccagagttggagaagcagacagaggcctgcccctgtccccgaagtggctcgaccaactcaccacccagtgtcatctatcacaggacaggacttcagtgccagcaccccaaagagctctaaccctcccaagaggaagcatgtggaagagtcagtactccacgaacagagatgtggcacggagtgcatgagggatgactcatgctcaggggactcctcagctcaactctcatccggggagcacctgctgggacctaacaggataatggcctactcaagaggacagactgatatgtgccggtgctcaaagaggagcagccatcgccgatcccagagttcactgaccatatgaggagctgcagaaatctgtacaaactcaacagaggccacctagtcactggtccacataacccttgaccccttcttcttcatagaggaaacaatgtgccagtcttattcttttcttcaacaaccttgacttccatggaggaagtgctggccccaaggggtctgacacaaagacgggaaacccagtcggcctctagttttctgctgctctcaggcagcacatcttgcaaacagtttggagaaggaggctgtttttgttgaatcgagttctcaaatcggtttagaccaaagccattcttctgaccctctagataagcgtagcctacaacccagtgccgtaagtttccaagattcaagaagtgtatcaacccaggcaatatctcaggatatggaagtttctgggtttatttacccctcagtgcccagagttaaagtttcagaagagacttgtgcacataagggcttcatctcaagtgtattgcagtaatggctgaatcggggttaacatcccttccaggcacagcgagttggttctgctttttgcctgtaagccaaagaaaagccacatctaaaaagctactactaaaagccagaaagaaaagtggatttgaactcagtgtcacagactcttctgagtgttttagggtcacagctagtgtaagaggcatgaagaatagacatgcaaaagggaacgggtgcaccagagacccctgttttggctgacagaccatatgtcccaccagctggggaatctgacaagaggacataggtggcactctttttttaaagctatttattgtatctatttttaaataaaattgcccatcctcattcagctcttagaacaaaagcaaaaaaccctgtaaatcaggagatataagcacatctgcacccagaataggcccatatgatagggcaaccctgagcttaaacaatgacatcttcaagggtagaactaatctgaaacccccttccagcctctggaagacactggcctgcatcagttagagtcagagcaagtgtcacttcacagggaaaagaaggattatatagacttcctatccctagagtttataaatgtcaactatataaaaaaagctcaaaacagtgttaaaggaatgaacagtagaattttaataggctgtccaaagaagccaggtctgctgtgggcaagtatagcctaaccctagtcttgtaaaataagccagaaagggttactgagccaccttaagctagtacctatatagtaggcaaaaagtacagaaatagatgcaataagtgtggtgagtctttgagcctacgagtcatgccaccagccataagttgacctatcacttgagaacctcctcagcaaagatgccagaaaacattcaatcaagttggcaaatgacacagggagctggccctctgaccatcttcctggcaaacctggactggaagggccatttgcagcactgtcctggagctaatacactgtttcactgcctctgccatataatgatgccagcactagccagctggtgggtatttggaggaatcctgcatgaggattgcccaataaggggcaggtacacatacctggcaaagtgatgatgatgtgaattgtttccagtgaggggattgagtcaaaacttggatctcaggtacctcaatttttcccccaatttctggctactactaaaagccagaaagaacagaacagtggcctcaggagatctgagtttgaatccttgctctctaggatgcaggtggcttgaagcagaatgccacacctgcaagttgattagaactgcctttcttcccaggcttgacataggtattaagtcaaaattacatgaaacccagtggtaaaaaagcctctgaaagctgtaacaccctcagtaataacaaaagggatttttatttcacagctaaagggaaaataggtggagaagttaaaaaataatgtctgatcctgttcctaagttccaaactatagccaacactctgatgctgctctttttcttgtaggaccaaccgtcccagtttgcctgggactttctcatttttacagagtcccaaatcctaggaaactggagcaactggtacaactggtcacctactcttgcccctctgtaaatcaagccaactgtgaccatccaatgtgccatcttacagggaaaagttataaccactattcccctataacataatgctaatgattgtacttagtacatttttatacttttatgatattttactgattggaaatgtcatcctttattaaaaataaacatggttttccatagttgcctgcca

SEQ ID NO: 329184 - DNA, 2994 bp, Homo sapiens
aattaaattatgagaattaaaaagacaacattgagcagagatgaaaaaggaagggaggaaaaggtggaaaagaaaagaagacaagaagcgagtagtggtctctaacttgctctttgaaggatggtctcacaaagagaaccccaacagacatcatcgtgggaatcaaatcaagaccagcaagtacaccgtgttgtccttcgtccccaaaaacatttttgagcagctacaccggtttgccaatctctattttgtgggcattgcggttctgaattttatccctgtggtcaatgctttccagcctgaggtgagcatgataccaatctgtgttatcctggcagtcactgccatcaaggacgcttgggaagacctccggaggtacaaatcggataaagtcatcaataaccgagagtgcctcatctacagcagaaaagagcagacctatgtgcagaagtgctggaaggatgtgcgtgtgggagacttcatccaaatgaaatgcaatgagattgtcccagcagacatactcctccttttttcctctgaccccaatgggatatgccatctggaaactgccagcttggatggagagacaaacctcaagcaaagacgtgtcgtgaagggcttctcacagcaggaggtacagttcgaaccagagcttttccacaataccatcgtgtgtgagaaacccaacaaccacctcaacaaatttaagggttatatggagcatcctgaccagaccaggactggctttggctgtgagagtcttctgcttcgaggctgcaccatcagaaacaccgagatggctgttggcattgtcatctatgcaggccatgagacgaaagccatgctgaacaacagtggcccccggtacaaacgcagcaagattgagcggcgcatgaatatagacatcttcttctgcattgggatcctcatcctcatgtgccttattggagctgtaggtcacagcatctggaatgggacctttgaagaacaccctcccttcgatgtgccagatgccaatggcagcttccttcccagtgcccttgggggcttctacatgttcctcacaatgatcatcctgctccaggtgctgatccccatctctttgtatgtctccattgagctggtgaagctcgggcaagtgttcttcttgagcaatgaccttgacctgtatgatgaagagaccgatttatccattcaatgtcgagccctcaacatcgcagaggacttgggccagatccagtacatcttctccgataagacggggaccctgacagagaacaagatggtgttccgacgttgcaccatcatgggcagcgagtattctcaccaagaaaatgctaagcgactggagaccccaaaggagctggactcagatggtgaagagtggacccaataccaatgcctgtccttctcggctagatgggcccaggatccagcaactatgagaagccaaaaaggtgctcagcctctgaggaggagccagagtgcccgggtgcccatccagggccactaccggcaaaggtctatggggcaccgtgaaagctcacagcctcctgtggccttcagcagctccatagaaaaagatgtaactccagataaaaacctactgaccaaggttcgagatgctgccctgtggttggagaccttgtcagacagcagacctgccaaggcttccctctccaccacctcctccattgctgatttcttccttgccttaaccatctgcaactctgtcatggtgtccacaaccaccgagcccaggcagagggtcaccatcaaaccctcaagcaaggctctggggacgtccctggagaagattcagcagctcttccagaagttgaagctattgagcctcagccagtcattctcatccactgcaccctctgacacagacctcggggagagcttaggggccaacgtggccaccacagactcggatgagagagatgatgcatctgtgtgcagtggaggtgactccactgatgacggtggctacaggagcagcatgtgggaccagggcgacatcctggagtctgggtcaggcacttccttggaggaggcattggaggccccagccacagacctggccaggcctgagttctgttacgaggctgagagccctgatgaggccgccctggtgcacgctgcccatgcctacagcttcacactagtgtcccggacacctgagcaggtgactgtgcgcctgccccagggcacctgcctcaccttcagcctcctctgcaccctgggctttgactctgtcaggaagagaatgtctgtggttgtgaggcacccactgactggcgagattgttgtctacaccaagggtgctgactcggtcatcatggacctgctggaagacccagcctgcgtacctgacattaatatggaaaagaagctgagaaaaatccgagcccggacccaaaagcatctagacttgtatgcaagagatggcctgcgcacactatgcattgccaagaaggttgtaagcgaagaggacttccggagatgggccagtttccggcgtgaggctgaggcatccctcgacaaccgagatgagcttctcatggaaactgcacagcatctggagaatcaactcaccttacttggagccactgggatcgaagaccggctgcaggaaggagttccagatacgattgccactctgcgggaggctgggatccagctctgggtcctgactggagataagcaggagacagcggtcaacattgcccattcctgcagactgttaaatcagaccgacactgtttataccatcaatacagagaatcagggggaagtatctgttttcacaattcaaattgcagaaggtaaagttccaccacatcttcttggctgatgaagatgggaagtgggcactgagattgtgtgctcctatcagaaggaagcaggggttggattccatggaggatattaaccagaagagcactctactgcaggggtgtgggcgtagggcccgtagggcacctacac

SEQ ID NO: 329185 - DNA, 4021 bp, Homo sapiens
  misc_feature (205)..(205): n is a, c, g, or t
  misc_feature (217)..(217): n is a, c, g, or t
  misc_feature (2256)..(2256): n is a, c, g, or t
atggtggccgcagcggcggcaactgaggcaaggctgaggaggaggacggcggcgacggcagcgctcgcgggcaggagcggcgggccgcactgggactgggacgtgaccagggctgggaggccggggctgggggccgggctgcgcctcccgcggctgctgtctccaccgctgcggccacggctgctgctgctgctgttgttgctcncgccgccgctgntgctgctgctgctgccctgtgaggccgaggccgcggcggcggcggcggcggtgtcgggctcagccgcagccgaggccaaggaatgtgaccggccctgtgtcaacggcggtcgctgcaaccctggcaccggccagtgcgtctgccccgccggctgggtgggcgagcaatgccagcactgcgggggccgcttcagactaactggatcttctgggtttgtgacagatggacctggaaattataaatacaaaacgaagtgcacgtggctcattgaaggacagccaaatagaataatgagacttcgtttcaatcattttgctacagagtgtagttgggaccatttatatgtttatgatggggactcaatttatgcaccgctagttgctgcatttagtggcctcattgttcctgagagagatggcaatgagactgtccctgaggttgttgccacatcaggttatgccttgctgcatttttttagtgatgctgcttataatttgactggatttaatattacttacagttttgatatgtgtccaaataactgctcaggccgaggagagtgtaagatcagtaatagcagcgatactgttgaatgtgaatgttctgaaaactggaaaggtgaagcatgtgacattcctcactgtacagacaactgtggttttcctcatcgaggcatctgcaattcaagtgatgtcagaggatgctcctgcttctcagactggcagggtcctggatgttcagttcctgtaccagctaaccagtcattttggactcgagaggaatattctaacttaaagctccccagagcatctcataaagctgtggtcaatggaaacattatgtgggttgttggaggatatatgttcaaccactcagattataacatggttctagcgtatgaccttgcttctagggagtggcttccactaaaccgttctgtgaacaatgtggttgttagatatggtcattctttggcattatacaaggataaaatttacatgtatggaggaaaaattgattcaactgggaatgtgaccaatgagttgagagtttttcacattcataatgagtcatgggtgttgttgacccctaaggcaaaggagcagtatgcagtggttgggcactctgcacacattgttacactgaagaatggccgagtggtcatgctggtcatctttggtcactgccctctctatggatatataagcaatgtgcaggaatatgatttggataagaacacatggagtatattacacacccagggtgcccttgtgcaagggggttacggccatagcagtgtttacgaccataggaccagggccctatacgttcatggtggctacaaggctttcagtgccaataagtaccggcttgcagatgatctctaccgatatgatgtggatacccagatgtggaccattcttaaggacagccgatttttccgttacttgcacacagctgtgatagtgagtggaaccatgctggtgtttggaggaaacacacacaatgacacatctatgagccatggcgccaaatgcttctcttcagatttcatggcctatgacattgcctgtgaccgctggtcagtgcttcccagacctgatctccaccatgatgtcaacagatttggccattcagcagtcttacacaacagcaccatgtatgtgttcggtggtttcaatagtctcctcctcagcgacatcctggtattcacctcggaacagtgtgatgcgcatcggagtgaagccgcttgtttagcagcaggacctggtattcggtgtgtgtggaacacagggtcgtctcagtgtatctcgtgggcgctggcaactgatgaacaagaagaaaagttaaaatcagaatgtttttccaaaagaactcttgaccatgacagatgtgaccagcacacagattgttacagctgcacagccaacaccaatgactgccactggtgcaatgaccattgtgtccccaggaaccacagctgctcagaaggccagatctccatttttaggtatgagaattgccccaaggataacccnatgtactactgtaacaagaagaccagctgcaggagctgtgccctggaccagaactgccagtgggagccccggaatcaggagtgcattgccctgcccgaaaatatctgtggcattggctggcatttggttggaaactcatgtttgaaaattactactgccaaggagaattatgacaatgctaaattgttctgtaggaaccacaatgcccttttggcttctcttacaacccagaagaaggtagaatttgtccttaagcagctgcgaataatgcagtcatctcagagcatgtccaagctcaccttaaccccatgggtcggccttcggaagatcaatgtgtcctactggtgctgggaagatatgtccccatttacaaatagtttactacagtggatgccgtctgagcccagtgatgctggattctgtggaattttatcagaacccagtactcggggactgaaggctgcaacctgcatcaacccactcaatggtagtgtctgtgaaaggcctgcaaaccacagtgctaagcagtgccggacaccatgtgccttgaggacagcatgtggagattgcaccagcggcagctctgagtgcatgtggtgcagcaacatgaagcagtgtgtggactccaatgcctatgtggcctccttcccttttggccagtgtatggaatggtatacgatgagcacctgcccccctgaaaattgttcaggctactgtacctgtagtcattgcttggagcaaccaggctgtggctggtgtactgatcccagcaatactggcaaagggaaatgcatagagggttcctataaaggaccagtgaagatgccttcgcaagcccctacaggaaatttctatccacagcccctgctcaattccagcatgtgtctagaggacagcagatacaactggtctttcattcactgtccagcttgccaatgcaacggccacagtaaatgcatcaatcagagcatctgtgagaagtgtgagaacctgaccacaggcaagcactgcgagacctgcatatctggcttctacggtgatcccaccaatggagggaaatgtcagccatgcaagtgcaatgggcacgcgtctctgtgcaacaccaacacgggcaagtgcttctgcaccaccaagggcgtcaagggggacgagtgccagctatgtgaggtagaaaatcgataccaaggaaaccctctcagaggaacatgttattatactcttcttattgactatcagttcacctttagtctatcccaggaagatgatcgctattacacagctatcaattttgtggctactcctgacgaacaaaacagggatttggacatgttcatcaatgcctccaagaatttcaacctcaacatcacctgggctgccagtttctcagctggaacccaggctggagaagagatgcctgttgtttcaaaaaccaacattaaggagtacaaagatagtttctctaatgagaagtttgattttcgcaaccacccaaatatcactttctttgtttatgtcagtaatttcacctggcccatcaaaattcaggtgcaaactgaacaatgaggacgcatggacacaggaaggggaacatcacacaccagggcctgttgtggggtggggggaaggggaagggatagcattaggggatatacctaatgttaaatgacgagttaatgggtgcagcacaccaacatggcatatgtatacatatgtaacaaacctgcatgttgtgcacatgtaccctaaaacttaaagtataattaaa

SEQ ID NO: 329186 - DNA, 573 bp, Homo sapiens
gccactaaatttgtagtacatgatgcctggagtccggcttcccgcatctactgcctgcacgacatatacctaggcctaggtatatgtcgtgccatcctgcttcgtcccacctgggataggaatcatcccttggtccagtgtatccacgcccctatgctacccacccactagtgtcttggttatcagatctaaaaatcatagtatatgtagggttcagtactatccatggtttcacgcatccactgggaggctgggaatgtaaccccacagattaagcaggacactatattgccaaatccaaaggatactttttggttctcctcttcttgacttctcggtgatatcaaccaactgactgcttcatgagcgagactcttccagccgtctctgacccatgctgccctactgctgcttcttagcctgcctattatgcaatcttttctattcagcctctcactgttgattttttcccagaccttgaccctggccgtcttctcactctgtgttctctgactggactctgccttccccatctgcagcacgacatatacctagggggatcctctgagcagc

SEQ ID NO: 329187 - DNA, 678 bp, Homo sapiens
aggcagttgggtgagtgatccagatgtcatggatttcgggtgcgtttgctagttagaattgtggtatgatcccgcctttcttccatgccctgttgctctgctgctgcttcattttaacccagaaatgatgttgtaactgagaaaattgagaggcatgttttatgaggttctctttgttgtagtatttttcccaaagaaaatgtcaggtcctgttgattagaaatggtagtccgtttaaaaatatatttttctttctcctagcctgtgaccgctggtcagtgcttcccagacctgatctccaccatgatgtcaacagatttggccattcagcagtcttacacaacaggtaattggagaagtgattgctccttttcttttgtgtttaaaatgaaaataaagggccgggcacggtggctcacgcctgtaattctggcactttgggaggccgaggcgggtggaatacgaggtcaggagatcaagaccatcctggccaacatggtaaagacccatctctactaaaagtacaaaaattagctgggcttggtagtgcgtgcctgtaatcccccctagttgggaggctgaggcaggagaatcacttgaaccagggagttggaggttgccgtgagacgagatcgcgccacagcactccagcctggcaacagagcaagactctgtctc

SEQ ID NO: 329188 - DNA, 8356 bp, Homo sapiens
  misc_feature (2034)..(2034): n is a, c, g, or t
  misc_feature (5497)..(5497): n is a, c, g, or t
atggtggccgcagcggcggcaactgaggcaaggctgaggaggaggacggcggcgacggcagcgctcgcgggcaggagcggcgggccgcactgtgtcaacggcggtcgctgcaaccctggcaccggccagtgcgtctgccccgccggctgggtgggcgagcaatgccagcactgcgggggccgcttcagactaactggatcttctgggtttgtgacagatggacctggaaattataaatacaaaacgaagtgcacgtggctcattgaaggacagccaaatagaataatgagacttcgtttcaatcattttgctacagagtgtagttgggaccatttatatgtttatgatggggactcaatttatgcaccgctagttgctgcatttagtggcctcattgttcctgagagagatggcaatgagactgtccctgaggttgttgccacatcaggttatgccttgctgcatttttttagtgatgctgcttataatttgactggatttaatattacttacagttttgatatgtgtccaaataactgctcaggccgaggagagtgtaagatcagtaatagcagcgatactgttgaatgtgaatgttctgaaaactggaaaggtgaagcatgtgacattcctcactgtacagacaactgtggttttcctcatcgaggcatctgcaattcaagtgatgtcagaggatgctcctgcttctcagactggcagggtcctggatgttcagttcctgtaccagctaaccagtcattttggactcgagaggaatattctaacttaaagctccccagagcatctcataaagctgtggtcaatggaaacattatgtgggttgttggaggatatatgttcaaccactcagattataacatggttctagcgtatgaccttgcttctagggagtggcttccactaaaccgttctgtgaacaatgtggttgttagatatggtcattctttggcattatacaaggataaaatttacatgtatggaggaaaaattgattcaactgggaatgtgaccaatgagttgagagtttttcacattcataatgagtcatgggtgttgttgacccctaaggcaaaggagcagtatgcagtggttgggcactctgcacacattgttacactgaagaatggccgagtggtcatgctggtcatctttggtcactgccctctctatggatatataagcaatgtgcaggaatatgatttggataagaacacatggagtatattacacacccagggtgcccttgtgcaagggggttacggccatagcagtgtttacgaccataggaccagggccctatacgttcatggtggctacaaggctttcagtgccaataagtaccggcttgcagatgatctctaccgatatgatgtggatacccagatgtggaccattcttaaggacagccgatttttccgttacttgcacacagctgtgatagtgagtggaaccatgctggtgtttggaggaaacacacacaatgacacatctatgagccatggcgccaaatgcttctcttcagatttcatggcctatgacattgcctgtgaccgctggtcagtgcttcccagacctgatctccaccatgatgtcaacagatttggccattcagcagtcttacacaacagcaccatgtatgtgttcggtggtttcaatagtctcctcctcagcgacatcctggtattcacctcggaacagtgtgatgcgcatcggagtgaagccgcttgtttagcagcaggacctggtattcggtgtgtgtggaacacagggtcgtctcagtgtatctcgtgggcgctggcaactgatgaacaagaagaaaagttaaaatcagaatgtttttccaaaagaactcttgaccatgacagatgtgaccagcacacagattgttacagctgcacagccaacaccaatgactgccactggtgcaatgaccattgtgtccccaggaaccacagctgctcagaaggccagatctccatttttaggtatgagaattgccccaaggataacccnatgtactactgtaacaagaagaccagctgcaggagctgtgccctggaccagaactgccagtgggagccccggaatcaggagtgcattgccctgcccgaaaatatctgtggcattggctggcatttggttggaaactcatgtttgaaaattactactgccaaggagaattatgacaatgctaaattgttctgtaggaaccacaatgcccttttggcttctcttacaacccagaagaaggtagaatttgtccttaagcagctgcgaataatgcagtcatctcagagcatgtccaagctcaccttaaccccatgggtcggccttcggaagatcaatgtgtcctactggtgctgggaagatatgtccccatttacaaatagtttactacagtggatgccgtctgagcccagtgatgctggattctgtggaattttatcagaacccagtactcggggactgaaggctgcaacctgcatcaacccactcaatggtagtgtctgtgaaaggcctgcaaaccacagtgctaagcagtgccggacaccatgtgccttgaggacagcatgtggagattgcaccagcggcagctctgagtgcatgtggtgcagcaacatgaagcagtgtgtggactccaatgcctatgtggcctccttcccttttggccagtgtatggaatggtatacgatgagcacctgcccccctgaaaattgttcaggctactgtacctgtagtcattgcttggagcaaccaggctgtggctggtgtactgatcccagcaatactggcaaagggaaatgcatagagggttcctataaaggaccagtgaagatgccttcgcaagcccctacaggaaatttctatccacagcccctgctcaattccagcatgtgtctagaggacagcagatacaactggtctttcattcactgtccagcttgccaatgcaacggccacagtaaatgcatcaatcagagcatctgtgagaagtgtgagaacctgaccacaggcaagcactgcgagacctgcatatctggcttctacggtgatcccaccaatggagggaaatgtcagccatgcaagtgcaatgggcacgcgtctctgtgcaacaccaacacgggcaagtgcttctgcaccaccaagggcgtcaagggggacgagtgccagctatgtgaggtagaaaatcgataccaaggaaaccctctcagaggaacatgttattatactcttcttattgactatcagttcacctttagtctatcccaggaagatgatcgctattacacagctatcaattttgtggctactcctgacgaacaaaacagggatttggacatgttcatcaatgcctccaagaatttcaacctcaacatcacctgggctgccagtttctcagctggaacccaggctggagaagagatgcctgttgtttcaaaaaccaacattaaggagtacaaagatagtttctctaatgagaagtttgattttcgcaaccacccaaatatcactttctttgtttatgtcagtaatttcacctggcccatcaaaattcagattgccttctctcagcacagcaattttatggacctggtacagttcttcgtgactttcttcagttgtttcctctctttgctcctggtggctgctgtggtttggaagatcaaacaaagttgttgggcctccagacgtagagagcaacttcttcgagagatgcaacagatggccagccgtccctttgcctctgtaaatgtcgccttggaaacagatgaggagcctcctgatcttattggggggagtataaagactgttcccaaacccattgcactggagccgtgttttggcaacaaagccgctgtcctctctgtgtttgtgaggctccctcgaggcctgggtggcatccctcctcctgggcagtcaggtcttgctgtggccagcgccctggtggacatttctcagcagatgccgatagtgtacaaggagaagtcaggagccgtgagaaaccggaagcagcagccccctgcacagcctgggacctgcatctgatgctggggccagggactctcccacgcacgagctagtgagtggcacaccagagccatctgcagggaagggcgtggcggggaaatggctgtgcggtgcgggacggaagactggaaaccctcaaagcatctgactcacctgcatgatcacaagctttctttgacggtttctcccatccgtgttccagcatctaaccttttacttttgcataggaaatacttgatttaattacaggtccagggatgagctgatggttgctggaggaggccagtgtagagccagtgagagaactaggaatgacactcaggttcactgtggaaaactgttcttgggactgtctcaactgtgcaaaaaacaaaagatggagtgtttacaagtagacattcgtcatcagttgttcttgaacatggtcttttaaaaactagtcagatgaattaacttgttttcatctgaagcctgctatcttttttaaaagatgtgctatttattcttgcacgatttaggcaattatctctcttccagggagtacctttttttctagttgagaattaataatggtccatctcttttgatcatatcaagctaggatagaaggggggctattttaaatgtcaaggtcagcagtgttactttgaatgtaaactggtataataggtagttttctatagtaacttgattaatttagtcttaatccatttgaaactctctcttcctttctctctgcctgtccctctccttctccatctcaccctccctctctcacacatacacacacaaacacatacacacaacactaagtgcctagactttaaatagatctagcaattggaaagttagtaagcctaagtttttacataattgcattcctacattcttgtaaaatttaaatagctaccattggcaatctgctttttttctaaaatctgatttgcagccaggaaagaattttctcacccaaggaacatttgatctagcagcagggatgagaggaaagcagaaatgaatgaactgtgaaagctcctgtttttattatcaaaaaggacactgtcaagaaggcgccccctgcccccacccccgtgtcaccctaggcctgataagcgatcagaggaaaggactcattcatgtcacgcttccttgagcagaaaagagcactgagagcacttgggacccctggatcagagagcatctgtgtgtcctgcagcctcctctgaacttgtggttcattctcaggctggggtggactcagatgccaggaaagggacagcctcccattgtcaggcagaagctgcccaaagcctggagaaggacttgtttgccctctttcccccaggaggggctcgacccacccaccctccctctcagaccaaggtggtggctgtgaggagggcagcaaatgctgacaaggatgaaaagcacatggaaaaaaatggangaggagggaaaactctgccaaatggaaaatgaccaaatttaagagggtgggacagtcccctgctcctctcccagagggcactgcttggaaattgtgttttccccatttatggtgctctgtattctggcattatgcagcagcctcccagaagctctcttctgcttcaaaacctgggatctctggcattaccctattgggatggaccgctggacagcaatgctcgagtttgtgaatttggagagatactcaaaagagctaaaactgcagcattttacctttaaatgcagtgcctagagagagagtattgtctcttccccaacactaaccccactcccatgaagaattgcctggaaagatgttttcaaggaatttgaaccataaaacactatctgatgcacagaacacctctactttgagactcacctctcataaagcttctttttcacattactgttaaagaccagacgttctagaaaagacccctcctctcatgagctcccccatccctgctacagaacacagcacccatggcgcctgcagtggactggccccttaattcccacaggcccccccagcaaggccaaagggaggcccctgggtattgtcctcctacaaggaagatcctctttgtttgttcaaaggaccagttttcctaggccaaagaagtctcttccccatgttagtcctatgccttgaaatatcatgcaccatgacccacagccatctggttatgtcttatttttttcctaaaagataatgtttatttttaaaaaggaaggaaggagcaagtgaagtttcattctgctccagcggtggggaagccgctgaatccacctgcttctcctttgcaaccgacagcaaacagctttctccggcctcagggcagaaaaagggaatggcagggagtaagaggcgctgggctcggagcctgtttccaagaaggaattggttgtcatctggcagtgttgcgcgtcacaagagagcctgtatataaattaaaatagtcaagacaacactgaccttgcacttgtacataactatacagtagtgtccagaatgttcagacattcggagtgtacataaaacagaaaaaatcttcatgtatttttattaaatataacaatgtctgagtttcacctaagatgtttttgtgccatatgctggatatccaggttctcgccaggccccgatacatgaataacaaacccaagaaacgcatccccattgtgtgatgtgttcagatgcatctggcaccaattaggtatttcttaaaacaggactcatctgtcagagtgcacatgaaaaatcaggcagggaatcgaaacgacagcgctggaggagactcaggaagcagaggcgtccctgccgctgcccttggccctgcaagcacatcatgaccctttctggcagcctcttggtgctctgggtagtgagggatgaccagtcttgtcctgagaaatgtttctcttagtctttaagttcaaagactaacctgtagcaatcagactttccaaaagggggttctccattttttgtagttttgtctaaatttttaatgaccatttcctggaatcagtttattatactgaaaactgggggtgggagtagggagctagtttgttgataaatagttcccatttccccgtggagaatttgacataccctggactcctgtgtgcctcctgccatccctgcacacagcctggggagaagcctgtgcctccccgtgtggagagaaggcaaccccagatcccctgagctaacccggaggaaaggcagtcctggacagaagactgtcagcagaaggaaagtactggactacccgtgggtaagtcctgccattcaagactggagacacctgggaaataaaaagagcagggcactgctggtgggaagaggcattttaccttccagtgcaaatcctgctcctttgatttaatggggtgtactggggccaggggctgattcacttccttgggagatggtggtgttttcatgaacatctttgatccttccatttcatttattcatccatccattcaacaagtatttgctaaacactaacttaagctaatgctagggtagtgactgagatgtaaaaatagattttagaattaaaacaaaatccaagtcctcacacccctgtcatcccaggagatctttccttgtggtggtttctgtgagaattggccatcctgaggacacagccaggacggcagaggcctcctggctcagggcatgccctgcctaccttctgaaatgtttaccccattgaccaaacttggctccagccattgcggtggtttctagatagccaggcccaccaagagatattgccccttgatgagagtcaaacaccctgcctacaaggagatgttttgaaatggagaggaaaattggcacctcatcttttaaaggcagtaatggaattgattttcagtaactgaatttgtgcacaaaacattctaaacactagtgaagcctgtttcgttgaactaattctggctctggaaatgtttttgttttatagttatttacgatttcgtttgtttggattcaagcttagtttgttaatatgtataatttagcatctattacactcatgtaaatatggagtaagtattgtaaactatttcattgcggggattgtgggtgttatacatacatttaggactgcaattttttggtattttttgtattgtaaaataacagctaatttaagcaggaacaagagaactaagggaggtctgtgcattttaaacacaaatgtgaagaacttgtatataaacaaaagtaaatactataatacaaacttccttctgaaataaaagtagatctggtaaaaatgtgaaaaaaatt

SEQ ID NO: 329189 - DNA, 5106 bp, Homo sapiens
  misc_feature (2247)..(2247): n is a, c, g, or t
acgagcttatcccggtttgggtagcatcctccgtcgtatgcagtcaggtctgcttgtggccagctatcaatcttgtggctactcctgacgaacaaaacagggatttggacatgttcatcaatgcctccaagaatttcaacctcaacatcacctgggctgccagtttctcagctggaacccaggctggagaagagatgcctgttgtttcaaaaaccaacattaaggagtacaaagatagtttctctaatgagaagtttgattttcgcaaccacccaaatatcactttctttgtttatgtcagtaatttcacctggcccatcaaaattcagattgccttctctcagcacagcaattttatggacctggtacagttcttcgtgactttcttcagttgtttcctctctttgctcctggtggctgctgtggtttggaagatcaaacaaagttgttgggcctccagacgtagagagcaacttcttcgagagatgcaacagatggccagccgtccctttgcctctgtaaatgtcgccttggaaacagatgaggagcctcctgatcttattggggggagtataaagactgttcccaaacccattgcactggagccgtgttttggcaacaaagccgctgtcctctctgtgtttgtgaggctccctcgaggcctgggtggcatccctcctcctgggcagtcaggtcttgctgtggccagcgccctggtggacatttctcagcagatgccgatagtgtacaaggagaagtcaggagccgtgagaaaccggaagcagcagccccctgcacagcctgggacctgcatctgatgctggggccagggactctcccacgcacgagctagtgagtggcacaccagagccatctgcagggaagggcgtggcggggaaatggctgtgcggtgcgggacggaagactggaaaccctcaaagcatctgactcacctgcatgatcacaagctttctttgacggtttctcccatccgtgttccagcatctaaccttttacttttgcataggaaatacttgatttaattacaggtccagggatgagctgatggttgctggaggaggccagtgtagagccagtgagagaactaggaatgacactcaggttcactgtggaaaactgttcttgggactgtctcaactgtgcaaaaaacaaaagatggagtgtttacaagtagacattcgtcatcagttgttcttgaacatggtcttttaaaaactagtcagatgaattaacttgttttcatctgaagcctgctatcttttttaaaagatgtgctatttattcttgcacgatttaggcaattatctctcttccagggagtacctttttttctagttgagaattaataatggtccatctcttttgatcatatcaagctaggatagaaggggggctattttaaatgtcaaggtcagcagtgttactttgaatgtaaactggtataataggtagttttctatagtaacttgattaatttagtcttaatccatttgaaactctctcttcctttctctctgcctgtccctctccttctccatctcaccctccctctctcacacatacacacacaaacacatacacacaacactaagtgcctagactttaaatagatctagcaattggaaagttagtaagcctaagtttttacataattgcattcctacattcttgtaaaatttaaatagctaccattggcaatctgctttttttctaaaatctgatttgcagccaggaaagaattttctcacccaaggaacatttgatctagcagcagggatgagaggaaagcagaaatgaatgaactgtgaaagctcctgtttttattatcaaaaaggacactgtcaagaaggcgccccctgcccccacccccgtgtcaccctaggcctgataagcgatcagaggaaaggactcattcatgtcacgcttccttgagcagaaaagagcactgagagcacttgggacccctggatcagagagcatctgtgtgtcctgcagcctcctctgaacttgtggttcattctcaggctggggtggactcagatgccaggaaagggacagcctcccattgtcaggcagaagctgcccaaagcctggagaaggacttgtttgccctctttcccccaggaggggctcgacccacccaccctccctctcagaccaaggtggtggctgtgaggagggcagcaaatgctgacaaggatgaaaagcacatggaaaaaaatggangaggagggaaaactctgccaaatggaaaatgaccaaatttaagagggtgggacagtcccctgctcctctcccagagggcactgcttggaaattgtgttttccccatttatggtgctctgtattctggcattatgcagcagcctcccagaagctctcttctgcttcaaaacctgggatctctggcattaccctattgggatggaccgctggacagcaatgctcgagtttgtgaatttggagagatactcaaaagagctaaaactgcagcattttacctttaaatgcagtgcctagagagagagtattgtctcttccccaacactaaccccactcccatgaagaattgcctggaaagatgttttcaaggaatttgaaccataaaacactatctgatgcacagaacacctctactttgagactcacctctcataaagcttctttttcacattactgttaaagaccagacgttctagaaaagacccctcctctcatgagctcccccatccctgctacagaacacagcacccatggcgcctgcagtggactggccccttaattcccacaggcccccccagcaaggccaaagggaggcccctgggtattgtcctcctacaaggaagatcctctttgtttgttcaaaggaccagttttcctaggccaaagaagtctcttccccatgttagtcctatgccttgaaatatcatgcaccatgacccacagccatctggttatgtcttatttttttcctaaaagataatgtttatttttaaaaaggaaggaaggagcaagtgaagtttcattctgctccagcggtggggaagccgctgaatccacctgcttctcctttgcaaccgacagcaaacagctttctccggcctcagggcagaaaaagggaatggcagggagtaagaggcgctgggctcggagcctgtttccaagaaggaattggttgtcatctggcagtgttgcgcgtcacaagagagcctgtatataaattaaaatagtcaagacaacactgaccttgcacttgtacataactatacagtagtgtccagaatgttcagacattcggagtgtacataaaacagaaaaaatcttcatgtatttttattaaatataacaatgtctgagtttcacctaagatgtttttgtgccatatgctggatatccaggttctcgccaggccccgatacatgaataacaaacccaagaaacgcatccccattgtgtgatgtgttcagatgcatctggcaccaattaggtatttcttaaaacaggactcatctgtcagagtgcacatgaaaaatcaggcagggaatcgaaacgacagcgctggaggagactcaggaagcagaggcgtccctgccgctgcccttggccctgcaagcacatcatgaccctttctggcagcctcttggtgctctgggtagtgagggatgaccagtcttgtcctgagaaatgtttctcttagtctttaagttcaaagactaacctgtagcaatcagactttccaaaagggggttctccattttttgtagttttgtctaaatttttaatgaccatttcctggaatcagtttattatactgaaaactgggggtgggagtagggagctagtttgttgataaatagttcccatttccccgtggagaatttgacataccctggactcctgtgtgcctcctgccatccctgcacacagcctggggagaagcctgtgcctccccgtgtggagagaaggcaaccccagatcccctgagctaacccggaggaaaggcagtcctggacagaagactgtcagcagaaggaaagtactggactacccgtgggtaagtcctgccattcaagactggagacacctgggaaataaaaagagcagggcactgctggtgggaagaggcattttaccttccagtgcaaatcctgctcctttgatttaatggggtgtactggggccaggggctgattcacttccttgggagatggtggtgttttcatgaacatctttgatccttccatttcatttattcatccatccattcaacaagtatttgctaaacactaacttaagctaatgctagggtagtgactgagatgtaaaaatagattttagaattaaaacaaaatccaagtcctcacacccctgtcatcccaggagatctttccttgtggtggtttctgtgagaattggccatcctgaggacacagccaggacggcagaggcctcctggctcagggcatgccctgcctaccttctgaaatgtttaccccattgaccaaacttggctccagccattgcggtggtttctagatagccaggcccaccaagagatattgccccttgatgagagtcaaacaccctgcctacaaggagatgttttgaaatggagaggaaaattggcacctcatcttttaaaggcagtaatggaattgattttcagtaactgaatttgtgcacaaaacattctaaacactagtgaagcctgtttcgttgaactaattctggctctggaaatgtttttgttttatagttatttacgatttcgtttgtttggattcaagcttagtttgttaatatgtataatttagcatctattacactcatgtaaatatggagtaagtattgtaaactatttcattgcggggattgtgggtgttatacatacatttaggactgcaattttttggtattttttgtattgtaaaataacagctaatttaagcaggaacaagagaactaagggaggtctgtgcattttaaacacaaatgtgaagaacttgtatataaacaaaagtaaatactataatacaaacttccttctgaaataaaagtagatctggtaaaaatgtgaaaaaaatt

SEQ ID NO: 329190 - DNA, 2539 bp, Homo sapiens
cttgggaagcatggtggcacatgatgagactggaggtctcctacctattaaaaggaccatacgagtcctagatgtcaataaccagtccttcagagaacaagaggagccaagcaataaaagagttcgacctctggctcgtgtcacgtccttggcaaatttaatctctcctgtaagaaatggagctgtcagacgttttggtcaaacaatacagtcatttacccttcgtggtgaccacagatccccagcctctgcccagaagttttctaggaggcccctgggtattgtcctcctacaaggaagatcctctttgtttgttcaaaggaccagttttcctaggccaaagaagtctcttccccatgttagtcctatgccttgaaatatcatgcaccatgacccacagccatctggttatgtcttatttttttcctaaaagataatgtttatttttaaaaaggaaggaaggagcaagtgaagtttcattctgctccagcggtggggaagccgctgaatccacctgcttctcctttgcaaccgacagcaaacagctttctccggcctcagggcagaaaaagggaatggcagggagtaagaggcgctgggctcggagcctgtttccaagaaggaattggttgtcatctggcagtgttgcgcgtcacaagagagcctgtatataaattaaaatagtcaagacaacactgaccttgcacttgtacataactatacagtagtgtccagaatgttcagacattcggagtgtacataaaacagaaaaaatcttcatgtatttttattaaatataacaatgtctgagtttcacctaagatgtttttgtgccatatgctggatatccaggttctcgccaggccccgatacatgaataacaaacccaagaaacgcatccccattgtgtgatgtgttcagatgcatctggcaccaattaggtatttcttaaaacaggactcatctgtcagagtgcacatgaaaaatcaggcagggaatcgaaacgacagcgctggaggagactcaggaagcagaggcgtccctgccgctgcccttggccctgcaagcacatcatgaccctttctggcagcctcttggtgctctgggtagtgagggatgaccagtcttgtcctgagaaatgtttctcttagtctttaagttcaaagactaacctgtagcaatcagactttccaaaagggggttctccattttttgtagttttgtctaaatttttaatgaccatttcctggaatcagtttattatactgaaaactgggggtgggagtagggagctagtttgttgataaatagttcccatttccccgtggagaatttgacataccctggactcctgtgtgcctcctgccatccctgcacacagcctggggagaagcctgtgcctccccgtgtggagagaaggcaaccccagatcccctgagctaacccggaggaaaggcagtcctggacagaagactgtcagcagaaggaaagtactggactacccgtgggtaagtcctgccattcaagactggagacacctgggaaataaaaagagcagggcactgctggtgggaagaggcattttaccttccagtgcaaatcctgctcctttgatttaatggggtgtactggggccaggggctgattcacttccttgggagatggtggtgttttcatgaacatctttgatccttccatttcatttattcatccatccattcaacaagtatttgctaaacactaacttaagctaatgctagggtagtgactgagatgtaaaaatagattttagaattaaaacaaaatccaagtcctcacacccctgtcatcccaggagatctttccttgtggtggtttctgtgagaattggccatcctgaggacacagccaggacggcagaggcctcctggctcagggcatgccctgcctaccttctgaaatgtttaccccattgaccaaacttggctccagccattgcggtggtttctagatagccaggcccaccaagagatattgccccttgatgagagtcaaacaccctgcctacaaggagatgttttgaaatggagaggaaaattggcacctcatcttttaaaggcagtaatggaattgattttcagtaactgaatttgtgcacaaaacattctaaacactagtgaagcctgtttcgttgaactaattctggctctggaaatgtttttgttttatagttatttacgatttcgtttgtttggattcaagcttagtttgttaatatgtataatttagcatctattacactcatgtaaatatggagtaagtattgtaaactatttcattgcggggattgtgggtgttatacatacatttaggactgcaattttttggtattttttgtattgtaaaataacagctaatttaagcaggaacaagagaactaagggaggtctgtgcattttaaacacaaatgtgaagaacttgtatataaacaaaagtaaatactataatacaaacttccttctgaaataaaagtagatctggtaaaaatgtgaaaaaaatt

SEQ ID NO: 329191 - DNA, 2121 bp, Homo sapiens
  misc_feature (205)..(205): n is a, c, g, or t
  misc_feature (217)..(217): n is a, c, g, or t
atggtggccgcagcggcggcaactgaggcaaggctgaggaggaggacggcggcgacggcagcgctcgcgggcaggagcggcgggccgcactgggactgggacgtgaccagggctgggaggccggggctgggggccgggctgcgcctcccgcggctgctgtctccaccgctgcggccacggctgctgctgctgctgttgttgctcncgccgccgctgntgctgctgctgctgccctgtgaggccgaggccgcggcggcggcggcggcggtgtcgggctcagccgcagccgaggccaaggaatgtgaccggccctgtgtcaacggcggtcgctgcaaccctggcaccggccagtgcgtctgccccgccggctgggtgggcgagcaatgccagcactgcgggggccgcttcagactaactggatcttctgggtttgtgacagatggacctggaaattataaatacaaaacgaagtgcacgtggctcattgaaggacagccaaatagaataatgagacttcgtttcaatcattttgctacagagtgtagttgggaccatttatatgtttatgatggggactcaatttatgcaccgctagttgctgcatttagtggcctcattgttcctgagagagatggcaatgagactgtccctgaggttgttgccacatcaggttatgccttgctgcatttttttagtgatgctgcttataatttgactggatttaatattacttacagttttgatatgtgtccaaataactgctcaggccgaggagagtgtaagatcagtaatagcagcgatactgttgaatgtgaatgttctgaaaactggaaaggtgaagcatgtgacattcctcactgtacagacaactgtggttttcctcatcgaggcatctgcaattcaagtgatgtcagaggatgctcctgcttctcagactggcagggtcctggatgttcagttcctgtaccagctaaccagtcattttggactcgagaggaatattctaacttaaagctccccagagcatctcataaagctgtggtcaatggaaacattatgtgggttgttggaggatatatgttcaaccactcagattataacatggttctagcgtatgaccttgcttctagggagtggcttccactaaaccgttctgtgaacaatgtggttgttagatatggtcattctttggcattatacaaggataaaatttacatgtatggaggaaaaattgattcaactgggaatgtgaccaatgagttgagagtttttcacattcataatgagtcatgggtgttgttgacccctaaggcaaaggagcagtatgcagtggttgggcactctgcacacattgttacactgaagaatggccgagtggtcatgctggtcatctttggtcactgccctctctatggatatataagcaatgtgcaggaatatgatttggataagaacacatggagtatattacacacccagggtgcccttgtgcaagggggttacggccatagcagtgtttacgaccataggaccagggccctatacgttcatggtggctacaaggctttcagtgccaataagtaccggcttgcagatgatctctaccgatatgatgtggatacccagatgtggaccattcttaaggacagccgatttttccgttacttgcacacagctgtgatagtgagtggaaccatgctggtgtttggaggaaacacacacaatgacacatctatgagccatggcgccaaatgcttctcttcagatttcatggcctatgacattggtaagtttcccaaaaccattttctcttcaggcatctttttgcctatactataagcagcatttaaaaggagactgaaaatattgccagttcaaaatgatcaggccatttgaaagaggtccaaatggtattttttatattcatttgactaatgttacacatctggtaaaaattatttctacattaaattctttttgaaatcactcctgttaattgcttgaatgctaatttttaaggctgagttgaggtgtctagtctctcctttgtcatgttatgcctacctggtagtgttacatagttgcaaccaccagcattgtgttaagactgtggttcacgta

SEQ ID NO: 329192 - DNA, 3799 bp, Homo sapiens
  misc_feature (2034)..(2034): n is a, c, g, or t
atggtggccgcagcggcggcaactgaggcaaggctgaggaggaggacggcggcgacggcagcgctcgcgggcaggagcggcgggccgcactgtgtcaacggcggtcgctgcaaccctggcaccggccagtgcgtctgccccgccggctgggtgggcgagcaatgccagcactgcgggggccgcttcagactaactggatcttctgggtttgtgacagatggacctggaaattataaatacaaaacgaagtgcacgtggctcattgaaggacagccaaatagaataatgagacttcgtttcaatcattttgctacagagtgtagttgggaccatttatatgtttatgatggggactcaatttatgcaccgctagttgctgcatttagtggcctcattgttcctgagagagatggcaatgagactgtccctgaggttgttgccacatcaggttatgccttgctgcatttttttagtgatgctgcttataatttgactggatttaatattacttacagttttgatatgtgtccaaataactgctcaggccgaggagagtgtaagatcagtaatagcagcgatactgttgaatgtgaatgttctgaaaactggaaaggtgaagcatgtgacattcctcactgtacagacaactgtggttttcctcatcgaggcatctgcaattcaagtgatgtcagaggatgctcctgcttctcagactggcagggtcctggatgttcagttcctgtaccagctaaccagtcattttggactcgagaggaatattctaacttaaagctccccagagcatctcataaagctgtggtcaatggaaacattatgtgggttgttggaggatatatgttcaaccactcagattataacatggttctagcgtatgaccttgcttctagggagtggcttccactaaaccgttctgtgaacaatgtggttgttagatatggtcattctttggcattatacaaggataaaatttacatgtatggaggaaaaattgattcaactgggaatgtgaccaatgagttgagagtttttcacattcataatgagtcatgggtgttgttgacccctaaggcaaaggagcagtatgcagtggttgggcactctgcacacattgttacactgaagaatggccgagtggtcatgctggtcatctttggtcactgccctctctatggatatataagcaatgtgcaggaatatgatttggataagaacacatggagtatattacacacccagggtgcccttgtgcaagggggttacggccatagcagtgtttacgaccataggaccagggccctatacgttcatggtggctacaaggctttcagtgccaataagtaccggcttgcagatgatctctaccgatatgatgtggatacccagatgtggaccattcttaaggacagccgatttttccgttacttgcacacagctgtgatagtgagtggaaccatgctggtgtttggaggaaacacacacaatgacacatctatgagccatggcgccaaatgcttctcttcagatttcatggcctatgacattgcctgtgaccgctggtcagtgcttcccagacctgatctccaccatgatgtcaacagatttggccattcagcagtcttacacaacagcaccatgtatgtgttcggtggtttcaatagtctcctcctcagcgacatcctggtattcacctcggaacagtgtgatgcgcatcggagtgaagccgcttgtttagcagcaggacctggtattcggtgtgtgtggaacacagggtcgtctcagtgtatctcgtgggcgctggcaactgatgaacaagaagaaaagttaaaatcagaatgtttttccaaaagaactcttgaccatgacagatgtgaccagcacacagattgttacagctgcacagccaacaccaatgactgccactggtgcaatgaccattgtgtccccaggaaccacagctgctcagaaggccagatctccatttttaggtatgagaattgccccaaggataacccnatgtactactgtaacaagaagaccagctgcaggagctgtgccctggaccagaactgccagtgggagccccggaatcaggagtgcattgccctgcccgaaaatatctgtggcattggctggcatttggttggaaactcatgtttgaaaattactactgccaaggagaattatgacaatgctaaattgttctgtaggaaccacaatgcccttttggcttctcttacaacccagaagaaggtagaatttgtccttaagcagctgcgaataatgcagtcatctcagagcatgtccaagctcaccttaaccccatgggtcggccttcggaagatcaatgtgtcctactggtgctgggaagatatgtccccatttacaaatagtttactacagtggatgccgtctgagcccagtgatgctggattctgtggaattttatcagaacccagtactcggggactgaaggctgcaacctgcatcaacccactcaatggtagtgtctgtgaaaggcctgcaaaccacagtgctaagcagtgccggacaccatgtgccttgaggacagcatgtggagattgcaccagcggcagctctgagtgcatgtggtgcagcaacatgaagcagtgtgtggactccaatgcctatgtggcctccttcccttttggccagtgtatggaatggtatacgatgagcacctgcccccctgaaaattgttcaggctactgtacctgtagtcattgcttggagcaaccaggctgtggctggtgtactgatcccagcaatactggcaaagggaaatgcatagagggttcctataaaggaccagtgaagatgccttcgcaagcccctacaggaaatttctatccacagcccctgctcaattccagcatgtgtctagaggacagcagatacaactggtctttcattcactgtccagcttgccaatgcaacggccacagtaaatgcatcaatcagagcatctgtgagaagtgtgagaacctgaccacaggcaagcactgcgagacctgcatatctggcttctacggtgatcccaccaatggagggaaatgtcagccatgcaagtgcaatgggcacgcgtctctgtgcaacaccaacacgggcaagtgcttctgcaccaccaagggcgtcaagggggacgagtgccagctatgtgaggtagaaaatcgataccaaggaaaccctctcagaggaacatgttattatactcttcttattgactatcagttcacctttagtctatcccaggaagatgatcgctattacacagctatcaattttgtggctactcctgacgaacaaaacagggatttggacatgttcatcaatgcctccaagaatttcaacctcaacatcacctgggctgccagtttctcagctggaacccaggctggagaagagatgcctgttgtttcaaaaaccaacattaaggagtacaaagatagtttctctaatgagaagtttgattttcgcaaccacccaaatatcactttctttgtttatgtcagtaatttcacctggcccatcaaaattcaggtgcaaactgaacaatgaggacgcatggacacaggaaggggaacatcacacaccagggcctgttgtggggtggggggaaggggaagggatagcattaggggatatacctaatgttaaatgacgagttaatgggtgcagcacaccaacatggcatatgtatacatatgtaacaaacctgcatgttgtgcacatgtaccctaaaacttaaagtataattaaa

SEQ ID NO: 329193 - DNA, 4048 bp, Homo sapiens
  misc_feature (2034)..(2034): n is a, c, g, or t
atggtggccgcagcggcggcaactgaggcaaggctgaggaggaggacggcggcgacggcagcgctcgcgggcaggagcggcgggccgcactgtgtcaacggcggtcgctgcaaccctggcaccggccagtgcgtctgccccgccggctgggtgggcgagcaatgccagcactgcgggggccgcttcagactaactggatcttctgggtttgtgacagatggacctggaaattataaatacaaaacgaagtgcacgtggctcattgaaggacagccaaatagaataatgagacttcgtttcaatcattttgctacagagtgtagttgggaccatttatatgtttatgatggggactcaatttatgcaccgctagttgctgcatttagtggcctcattgttcctgagagagatggcaatgagactgtccctgaggttgttgccacatcaggttatgccttgctgcatttttttagtgatgctgcttataatttgactggatttaatattacttacagttttgatatgtgtccaaataactgctcaggccgaggagagtgtaagatcagtaatagcagcgatactgttgaatgtgaatgttctgaaaactggaaaggtgaagcatgtgacattcctcactgtacagacaactgtggttttcctcatcgaggcatctgcaattcaagtgatgtcagaggatgctcctgcttctcagactggcagggtcctggatgttcagttcctgtaccagctaaccagtcattttggactcgagaggaatattctaacttaaagctccccagagcatctcataaagctgtggtcaatggaaacattatgtgggttgttggaggatatatgttcaaccactcagattataacatggttctagcgtatgaccttgcttctagggagtggcttccactaaaccgttctgtgaacaatgtggttgttagatatggtcattctttggcattatacaaggataaaatttacatgtatggaggaaaaattgattcaactgggaatgtgaccaatgagttgagagtttttcacattcataatgagtcatgggtgttgttgacccctaaggcaaaggagcagtatgcagtggttgggcactctgcacacattgttacactgaagaatggccgagtggtcatgctggtcatctttggtcactgccctctctatggatatataagcaatgtgcaggaatatgatttggataagaacacatggagtatattacacacccagggtgcccttgtgcaagggggttacggccatagcagtgtttacgaccataggaccagggccctatacgttcatggtggctacaaggctttcagtgccaataagtaccggcttgcagatgatctctaccgatatgatgtggatacccagatgtggaccattcttaaggacagccgatttttccgttacttgcacacagctgtgatagtgagtggaaccatgctggtgtttggaggaaacacacacaatgacacatctatgagccatggcgccaaatgcttctcttcagatttcatggcctatgacattgcctgtgaccgctggtcagtgcttcccagacctgatctccaccatgatgtcaacagatttggccattcagcagtcttacacaacagcaccatgtatgtgttcggtggtttcaatagtctcctcctcagcgacatcctggtattcacctcggaacagtgtgatgcgcatcggagtgaagccgcttgtttagcagcaggacctggtattcggtgtgtgtggaacacagggtcgtctcagtgtatctcgtgggcgctggcaactgatgaacaagaagaaaagttaaaatcagaatgtttttccaaaagaactcttgaccatgacagatgtgaccagcacacagattgttacagctgcacagccaacaccaatgactgccactggtgcaatgaccattgtgtccccaggaaccacagctgctcagaaggccagatctccatttttaggtatgagaattgccccaaggataacccnatgtactactgtaacaagaagaccagctgcaggagctgtgccctggaccagaactgccagtgggagccccggaatcaggagtgcattgccctgcccgaaaatatctgtggcattggctggcatttggttggaaactcatgtttgaaaattactactgccaaggagaattatgacaatgctaaattgttctgtaggaaccacaatgcccttttggcttctcttacaacccagaagaaggtagaatttgtccttaagcagctgcgaataatgcagtcatctcagagcatgtccaagctcaccttaaccccatgggtcggccttcggaagatcaatgtgtcctactggtgctgggaagatatgtccccatttacaaatagtttactacagtggatgccgtctgagcccagtgatgctggattctgtggaattttatcagaacccagtactcggggactgaaggctgcaacctgcatcaacccactcaatggtagtgtctgtgaaaggcctgcaaaccacagtgctaagcagtgccggacaccatgtgccttgaggacagcatgtggagattgcaccagcggcagctctgagtgcatgtggtgcagcaacatgaagcagtgtgtggactccaatgcctatgtggcctccttcccttttggccagtgtatggaatggtatacgatgagcacctgcccccctgaaaattgttcaggctactgtacctgtagtcattgcttggagcaaccaggctgtggctggtgtactgatcccagcaatactggcaaagggaaatgcatagagggttcctataaaggaccagtgaagatgccttcgcaagcccctacaggaaatttctatccacagcccctgctcaattccagcatgtgtctagaggacagcagatacaactggtctttcattcactgtccagcttgccaatgcaacggccacagtaaatgcatcaatcagagcatctgtgagaagtgtgagaacctgaccacaggcaagcactgcgagacctgcatatctggcttctacggtgatcccaccaatggagggaaatgtcagccatgcaagtgcaatgggcacgcgtctctgtgcaacaccaacacgggcaagtgcttctgcaccaccaagggcgtcaagggggacgagtgccagctatgtgaggtagaaaatcgataccaaggaaaccctctcagaggaacatgttattatactcttcttattgactatcagttcacctttagtctatcccaggaagatgatcgctattacacagctatcaattttgtggctactcctgacgaacaaaacagggatttggacatgttcatcaatgcctccaagaatttcaacctcaacatcacctgggctgccagtttctcagctggaacccaggctggagaagagatgcctgttgtttcaaaaaccaacattaaggagtacaaagatagtttctctaatgagaagtttgattttcgcaaccacccaaatatcactttctttgtttatgtcagtaatttcacctggcccatcaaaattcagattgccttctctcagcacagcaattttatggacctggtacagttcttcgtgactttcttcagaccttgaccctggccgtcttctcactctgtgttctctgactggactctgccttccccatctgcagcacgacatgcccagaagtgaccaattccatccttcctcaccggtgttccccacctcactaactggcaacatggctctgctggttccaagccacttctcttgctttcactcagcaggcactcccttaccaggccccagagctgtggccgtcagtgcactctccacctccactccccaccccaccaaccctagcatcacagtctcgcctggaccttttcacttgactttggcccctccagaatccacaaaaagtccagagaagacctttaaagatcatgtatctagccccttaccttcctgtcgtatctaaaataaaattcagcgtcctgggtgaactggcgtc

SEQ ID NO: 329194 - DNA, 4689 bp, Homo sapiens
tggatctgggaagggggatagggatggatgggttcatttgagagccacggcttaaagcggttgcgatcaggatgggacacaggtttgtttggggacaacaaagatggcatttgtgagtgttttgaagcaacccgtactgattacatctttctcccttgtgttccttttatcccaggtttgaattttctcggagaaagacaggccggccacgaggaaaacagaaacaagccgcagcaacatctaagcccttgaaaggatcctgagagaggggggaaagggaaaacagcagccaccagcccaaccacttgtgtcttctgccccttcccacctatcttgcccaccccaccagcccacgctgcttgggacttgaaatctgtggccgaaggaccgtcactacataacttcaaaaataatcaaccaccctcccttcccaaaccacccaaattcactcatccagcgtttacttttttgaatccactcagaacttttttctgcgacccccctccctaaatggagttgggtgggggggaaatgaatactgagttggcctttattttttaaaagactttttgatccaatgaggccccctaaataattgagttttgggtcctggttggttgttttattttttttcctccaaaattttaccccctcccccctgagcccgaggtgctgacgtcgcaaaaaaattggataaaaccaccatcatgggttcgggtcccatagaccccaaagaacttctcaagggcctggacagcttccttaaccgagatggggaagtcaaaagtgtggatgggatttccaagatcttcagtttgatgaaggaagcacgaaagatggtgagtcgatgcacttacttgaacattctcctgcagacccgttcaccagaaatattggtcaaatttattgacgttggcggctacaaacttcttaacaattggctgacgtattcaaagacaaccaacaacattcccctcctccagcaaattctactgaccctgcagcatctaccgctcactgtagaccatctcaagcagaacaacacagctaaactggtgaagcagctgagcaagtcaagtgaggatgaagagctccggaaattggcctcagtccttgtcagcgactggatggctgtcatccgctctcagagcagtacccagcctgctgagaaagataagaagaaacgtaaagatgaaggaaaaagtcgaactacccttcctgagcgacctttgacagaggtgaaggctgagacccgggctgaggaggccccagagaagaagagggagaagcccaagtctcttcgcaccacagcacccagtcatgccaagttccgttccactggactagagctggagacaccatccttggtgcctgtgaagaagaatgccagcacagtggtggtttctgacaagtacaaccttaaacccatccccctcaaacgtcagagcaacgtagctgctccaggagatgccactccccctgcagagaagaaatacaagccactcaacacaacacctaatgccaccaaagagatcaaagtgaagatcatcccgccacagcctatggagggcctgggctttctggatgctcttaattcagcccctgttccaggcatcaaaattaagaagaaaaaaaaagtactgtcacctacggctgccaagccaagcccctttgaagggaaaacgagcacagaaccaagcacagccaaaccttcttccccagaaccagcaccaccttctgaggcaatggacgcagaccgtccaggcaccccggttccccctgttgaagtcccggagctcatggatacagcctctttggagccaggagctctggatgccaagccagtggagagtcctggagatcctaaccaactgacccggaaaggcaggaagaggaaaagtgtgacatggcctgaggaaggcaaactgagagaatatttctattttgaattggatgaaactgaacgagtaaatgtgaataagatcaaggactttggtgaggcggctaagcgagagatactgtcagaccgacatgcatttgagacagcgcggcgtctgagccatgataacatggaggagaaggtgccctgggtgtgcccccggcccctggttctgccctcacctcttgtcacccctggaagcaatagtcaggagcgatatatccaggctgagcgggagaagggaatccttcaggagctcttcctgaacaaggagagtcctcatgagcctgatcctgagccctacgagcccataccccctaaactcatccccctagatgaggagtgttccatggatgagactccgtatgttgagactctggaacctggggggtcaggtggctcacctgatggggcaggaggctccaagttgcctccagttctggccaatcttatgggaagcatgggtgctggaaagggcccccaaggccctggaggaggaggcattaatgtccaagagatcctcacctccatcatgggtagcccaaacagtcatccttcagaggaactactgaaacaaccagactattcggacaagatcaagcagatgctggtgccacatggactcctaggccctggcccaatagccaatggtttcccaccagggggtcctgggggccccaagggcatgcagcactttccccctggacctgggggacctatgccaggtccccatggaggccctggtgggccagtgggtccacgtcttctgggtcctccaccccctccccggggaggtgatcccttctgggatggcccgggcgaccctatgcggggtggcccaatgcgggggggtccaggaccaggtcctggaccataccatagaggccgaggtggccgaggaggaaacgaacctcctcctcctcctcctccattccgaggcgccagaggaggtcgctctggaggaggacccccaaatggacgagggggccctggtgggggcatggttggaggtggtgggcatcgtcctcacgaaggccctggtgggggcatgggcaacagcagtggacatcgtccccacgaaggccctggcggtggcatgggaagtgggcatcgcccccatgaaggccctggtggtagcatgggtgggggtggaggacatcgtccccacgaaggccctggcggtggcatcagtggtggcagtggccatcgtccccatgaaggccctggcggaggaatgggtgccggtggtggacatcgcccccacgaaggccctggcggaagcatgggtggaagtggtggacatcgtccccatgaaggccctggacacggggggccccatggccaccggcctcatgatgtccctggtcaccgaggccatgaccatcgagggccgccacctcatgagcaccgtggccatgatggtcctggccacgggggagggggccaccgagggcacgatggaggccacagccatggaggagacatgtcaaaccgccctgtctgccgacatttcatgatgaagggcaactgccgctatgagaacaactgtgccttctaccacccgggtgtcaatgggccccccctgccctagggaccatttgcctgccctgttcacacaacccctgtggactgcagcctcgctctttccaccctgttatggcttctgtgaggcccattttcccttttccccagctgatgaggagccggccccctcagttcccacttgcttgggttcctgggggttttctgatcactggtgcgcattgatgtacatattttcctccagtctggggaggagagagactggaaacgttcctggactgctgaagaggagacccagttggcttcactttttgagaagattcgccctgtaccccaaacccctttccagtattacccttaatgcttgagaacctaaagctggttatcctggcgaacacccctacccttctattgcgggtccccacatgcacacagaactctgacacaggatcagctgcacttaagaaatcatcccagctaagttcattattcctcatggggtggggagatgctgaaaggggtattgtatatcccactgcactgagagggctcaatcagctggatttgagttctggaacacacatcatccccacccctcccccagcgtgggctcaccattcttagtcctttctcaagtgggaccttcaactttctgtgaacacccagtctgcgtcctgggtctgctaggttcgatgatggcgaactcgtatctgcatccggtgcaagttttagctggcagaggtgagaccggtggtgctggtctgcctttgccaactatagccagtctggagacttgataaaatacttcagtgagaccagcttctcatcaacttgggcccggcgtgctgggcctgaaagtcacactacatgcactgcctttgggagtcagctcactccctgctcccacctggaaccttgccagcgtgaaggaggcttccaggtacttcaccctgtcaaccacctctgaatccccaccaggcgccttcctgggtggattcaacaagatgattttgccctttcccagttctctccttcactttggcatcagttgttttctatgaaaacagtggattggttgggttttgtgcagggtcttgggttagagccaaaatggatttgaggatgagtatttttttttttggttttgtatattttgtacattaataataaacagtggaaagagaaagcagcttatttaaaaaaaaaag

SEQ ID NO: 329195 - DNA, 740 bp, Homo sapiens
tggatctgggaagggggatagggatggatgggttcatttgagagccacggcttaaagcggttgcgatcaggatgggacacaggtttgtttggggacaacaaagatggcatttgtgagtgttttgaagcaacccgtactgattacatctttctcccttgtgttccttttatcccaggtttgaattttctcggagaaagacaggccggccacgaggaaaacagaaacaagccgcagcaacatctaagcccttgaaaggatcctgagagaggggggaaagggaaaacagcagccaccagcccaaccacttgtgtcttctgccccttcccacctatcttgcccaccccaccagcccacgctgcttgggacttgaaatctgtggccgaaggaccgtcactacataacttcaaaaataatcaaccaccctcccttcccaaaccacccaaattcactcatccagcgtttacttttttgaatccactcagaacttttttctgcgacccccctccctaaatggagttgggtgggggggaaatgaatactgagttggcctttattttttaaaagactttttgatccaatgaggccccctaaataattgagttttgggtcctggttggttgttttattttttttcctccaaaattttaccccctcccccctgagcccgaggtgctgacgtcgcaaaaaaattggatagtaagtgtcgaattttcaaaaaccagccttgcaacaagaaatca

SEQ ID NO: 329196 - DNA, 826 bp, Homo sapiens
agccatcctaggaaggatgctgctgggagggagggacaggtgtgctgccctactcctccaatcgaattgctttcctgttcagtcacatatgctccccatgcttaacttgccagggctattttctcagtagtggcaagtggtctgtgtcgatttttcatatctaaaaaatagcatagttgaataattagtcattatactttgtcaaatatagagatgtggtttattagagggcctactcgggtagtccttgccacccatttattctgtgggtttgtttgttttgtcctcttaccatagaaaccaccatcatgggttcgggtcccatagaccccaaagaacttctcaagggcctggacagcttccttaaccgagatggggaagtcaaaagtgtggatgggatttccaagatcttcaggtgagtctttacccctttttgtattcactgtgagtagagaatattgtgtgttaaaacatggctgcagttgaggcacactggaatgatcctggaaaggaaagggaaagatagtcagtgcaataggattaaaatgtaacaattttaggataagggataggaaaagatgatcacttgtttctgaccataatggaaactggagatttggacgtccacggtcccaagggagtcatgctttggaatgagagcagggtagcctggtaacagaattctagattgttttggttcgtgttccacctacccataatgttattttccttcagggattctcaggtttttcaggggagagtaaataactaagccagtcttgaacagactattagggacagttgttgagggatagccttatcacct

SEQ ID NO: 329197 - DNA, 4535 bp, Homo sapiens
atgcgtgggagttcgtctgcgagagtttgaagttctgtctcgagagaatagactggccggtcctatacaaagaacagccgcaacatctaagcccttgaaaggatcctgagagaggggggaaagggaaaacagcagccaccagcccaaccacttgtgtcttctgccccttcccacctatcttgcccaccccaccagcccacgctgcttgggacttgaaatctgtggccgaaggaccgtcactacataacttcaaaaataatcaaccaccctcccttcccaaaccacccaaattcactcatccagcgtttacttttttgaatccactcagaacttttttctgcgacccccctccctaaatggagttgggtgggggggaaatgaatactgagttggcctttattttttaaaagactttttgatccaatgaggccccctaaataattgagttttgggtcctggttggttgttttattttttttcctccaaaattttaccccctcccccctgagcccgaggtgctgacgtcgcaaaaaaattggataaaaccaccatcatgggttcgggtcccatagaccccaaagaacttctcaagggcctggacagcttccttaaccgagatggggaagtcaaaagtgtggatgggatttccaagatcttcagtttgatgaaggaagcacgaaagatggtgagtcgatgcacttacttgaacattctcctgcagacccgttcaccagaaatattggtcaaatttattgacgttggcggctacaaacttcttaacaattggctgacgtattcaaagacaaccaacaacattcccctcctccagcaaattctactgaccctgcagcatctaccgctcactgtagaccatctcaagcagaacaacacagctaaactggtgaagcagctgagcaagtcaagtgaggatgaagagctccggaaattggcctcagtccttgtcagcgactggatggctgtcatccgctctcagagcagtacccagcctgctgagaaagataagaagaaacgtaaagatgaaggaaaaagtcgaactacccttcctgagcgacctttgacagaggtgaaggctgagacccgggctgaggaggccccagagaagaagagggagaagcccaagtctcttcgcaccacagcacccagtcatgccaagttccgttccactggactagagctggagacaccatccttggtgcctgtgaagaagaatgccagcacagtggtggtttctgacaagtacaaccttaaacccatccccctcaaacgtcagagcaacgtagctgctccaggagatgccactccccctgcagagaagaaatacaagccactcaacacaacacctaatgccaccaaagagatcaaagtgaagatcatcccgccacagcctatggagggcctgggctttctggatgctcttaattcagcccctgttccaggcatcaaaattaagaagaaaaaaaaagtactgtcacctacggctgccaagccaagcccctttgaagggaaaacgagcacagaaccaagcacagccaaaccttcttccccagaaccagcaccaccttctgaggcaatggacgcagaccgtccaggcaccccggttccccctgttgaagtcccggagctcatggatacagcctctttggagccaggagctctggatgccaagccagtggagagtcctggagatcctaaccaactgacccggaaaggcaggaagaggaaaagtgtgacatggcctgaggaaggcaaactgagagaatatttctattttgaattggatgaaactgaacgagtaaatgtgaataagatcaaggactttggtgaggcggctaagcgagagatactgtcagaccgacatgcatttgagacagcgcggcgtctgagccatgataacatggaggagaaggtgccctgggtgtgcccccggcccctggttctgccctcacctcttgtcacccctggaagcaatagtcaggagcgatatatccaggctgagcgggagaagggaatccttcaggagctcttcctgaacaaggagagtcctcatgagcctgatcctgagccctacgagcccataccccctaaactcatccccctagatgaggagtgttccatggatgagactccgtatgttgagactctggaacctggggggtcaggtggctcacctgatggggcaggaggctccaagttgcctccagttctggccaatcttatgggaagcatgggtgctggaaagggcccccaaggccctggaggaggaggcattaatgtccaagagatcctcacctccatcatgggtagcccaaacagtcatccttcagaggaactactgaaacaaccagactattcggacaagatcaagcagatgctggtgccacatggactcctaggccctggcccaatagccaatggtttcccaccagggggtcctgggggccccaagggcatgcagcactttccccctggacctgggggacctatgccaggtccccatggaggccctggtgggccagtgggtccacgtcttctgggtcctccaccccctccccggggaggtgatcccttctgggatggcccgggcgaccctatgcggggtggcccaatgcgggggggtccaggaccaggtcctggaccataccatagaggccgaggtggccgaggaggaaacgaacctcctcctcctcctcctccattccgaggcgccagaggaggtcgctctggaggaggacccccaaatggacgagggggccctggtgggggcatggttggaggtggtgggcatcgtcctcacgaaggccctggtgggggcatgggcaacagcagtggacatcgtccccacgaaggccctggcggtggcatgggaagtgggcatcgcccccatgaaggccctggtggtagcatgggtgggggtggaggacatcgtccccacgaaggccctggcggtggcatcagtggtggcagtggccatcgtccccatgaaggccctggcggaggaatgggtgccggtggtggacatcgcccccacgaaggccctggcggaagcatgggtggaagtggtggacatcgtccccatgaaggccctggacacggggggccccatggccaccggcctcatgatgtccctggtcaccgaggccatgaccatcgagggccgccacctcatgagcaccgtggccatgatggtcctggccacgggggagggggccaccgagggcacgatggaggccacagccatggaggagacatgtcaaaccgccctgtctgccgacatttcatgatgaagggcaactgccgctatgagaacaactgtgccttctaccacccgggtgtcaatgggccccccctgccctagggaccatttgcctgccctgttcacacaacccctgtggactgcagcctcgctctttccaccctgttatggcttctgtgaggcccattttcccttttccccagctgatgaggagccggccccctcagttcccacttgcttgggttcctgggggttttctgatcactggtgcgcattgatgtacatattttcctccagtctggggaggagagagactggaaacgttcctggactgctgaagaggagacccagttggcttcactttttgagaagattcgccctgtaccccaaacccctttccagtattacccttaatgcttgagaacctaaagctggttatcctggcgaacacccctacccttctattgcgggtccccacatgcacacagaactctgacacaggatcagctgcacttaagaaatcatcccagctaagttcattattcctcatggggtggggagatgctgaaaggggtattgtatatcccactgcactgagagggctcaatcagctggatttgagttctggaacacacatcatccccacccctcccccagcgtgggctcaccattcttagtcctttctcaagtgggaccttcaactttctgtgaacacccagtctgcgtcctgggtctgctaggttcgatgatggcgaactcgtatctgcatccggtgcaagttttagctggcagaggtgagaccggtggtgctggtctgcctttgccaactatagccagtctggagacttgataaaatacttcagtgagaccagcttctcatcaacttgggcccggcgtgctgggcctgaaagtcacactacatgcactgcctttgggagtcagctcactccctgctcccacctggaaccttgccagcgtgaaggaggcttccaggtacttcaccctgtcaaccacctctgaatccccaccaggcgccttcctgggtggattcaacaagatgattttgccctttcccagttctctccttcactttggcatcagttgttttctatgaaaacagtggattggttgggttttgtgcagggtcttgggttagagccaaaatggatttgaggatgagtatttttttttttggttttgtatattttgtacattaataataaacagtggaaagagaaagcagcttatttaaaaaaaaaag

SEQ ID NO: 329198 - DNA, 4791 bp, Homo sapiens
tggatctgggaagggggatagggatggatgggttcatttgagagccacggcttaaagcggttgcgatcaggatgggacacaggtttgtttggggacaacaaagatggcatttgtgagtgttttgaagcaacccgtactgattacatctttctcccttgtgttccttttatcccaggtttgaattttctcggagaaagacaggccggccacgaggaaaacagaaacaagccgcagcaacatctaagcccttgaaaggatcctgagagaggggggaaagggaaaacagcagccaccagcccaaccacttgtgtcttctgccccttcccacctatcttgcccaccccaccagcccacgctgcttgggacttgaaatctgtggccgaaggaccgtcactacataacttcaaaaataatcaaccaccctcccttcccaaaccacccaaattcactcatccagcgtttacttttttgaatccactcagaacttttttctgcgacccccctccctaaatggagttgggtgggggggaaatgaatactgagttggcctttattttttaaaagactttttgatccaatgaggccccctaaataattgagttttgggtcctggttggttgttttattttttttcctccaaaattttaccccctcccccctgagcccgaggtgctgacgtcgcaaaaaaattggataaaaccaccatcatgggttcgggtcccatagaccccaaagaacttctcaagggcctggacagcttccttaaccgagatggggaagtcaaaagtgtggatgggatttccaagatcttcagtttgatgaaggaagcacgaaagatggtgagtcgatgcacttacttgaacattctcctgcagacccgttcaccagaaatattggtcaaatttattgacgttggcggctacaaacttcttaacaattggctgacgtattcaaagacaaccaacaacattcccctcctccagcaaattctactgaccctgcagcatctaccgctcactgtagaccatctcaagcagaacaacacagctaaactggtgaagcagctgagcaagtcaagtgaggatgaagagctccggaaattggcctcagtccttgtcagcgactggatggctgtcatccgctctcagagcagtacccagcctgctgagaaagataagaagaaacgtaaagatgaaggaaaaagtcgaactacccttcctgagcgacctttgacagaggtgaaggctgagacccgggctgaggaggccccagagaagaagagggagaagcccaagtctcttcgcaccacagcacccagtcatgccaagttccgttccactggactagagctggagacaccatccttggtgcctgtgaagaagaatgccagcacagtggtggtttctgacaagtacaaccttaaacccatccccctcaaacgtcagaggtatggaccatattctcaggctctgaatggggtggatctgtggacacaagggagcaggagggggtgagtcggagatgttgatgacagttcctcttctgacagcaacgtagctgctccaggagatgccactccccctgcagagaagaaatacaagccactcaacacaacacctaatgccaccaaagagatcaaagtgaagatcatcccgccacagcctatggagggcctgggctttctggatgctcttaattcagcccctgttccaggcatcaaaattaagaagaaaaaaaaagtactgtcacctacggctgccaagccaagcccctttgaagggaaaacgagcacagaaccaagcacagccaaaccttcttccccagaaccagcaccaccttctgaggcaatggacgcagaccgtccaggcaccccggttccccctgttgaagtcccggagctcatggatacagcctctttggagccaggagctctggatgccaagccagtggagagtcctggagatcctaaccaactgacccggaaaggcaggaagaggaaaagtgtgacatggcctgaggaaggcaaactgagagaatatttctattttgaattggatgaaactgaacgagtaaatgtgaataagatcaaggactttggtgaggcggctaagcgagagatactgtcagaccgacatgcatttgagacagcgcggcgtctgagccatgataacatggaggagaaggtgccctgggtgtgcccccggcccctggttctgccctcacctcttgtcacccctggaagcaatagtcaggagcgatatatccaggctgagcgggagaagggaatccttcaggagctcttcctgaacaaggagagtcctcatgagcctgatcctgagccctacgagcccataccccctaaactcatccccctagatgaggagtgttccatggatgagactccgtatgttgagactctggaacctggggggtcaggtggctcacctgatggggcaggaggctccaagttgcctccagttctggccaatcttatgggaagcatgggtgctggaaagggcccccaaggccctggaggaggaggcattaatgtccaagagatcctcacctccatcatgggtagcccaaacagtcatccttcagaggaactactgaaacaaccagactattcggacaagatcaagcagatgctggtgccacatggactcctaggccctggcccaatagccaatggtttcccaccagggggtcctgggggccccaagggcatgcagcactttccccctggacctgggggacctatgccaggtccccatggaggccctggtgggccagtgggtccacgtcttctgggtcctccaccccctccccggggaggtgatcccttctgggatggcccgggcgaccctatgcggggtggcccaatgcgggggggtccaggaccaggtcctggaccataccatagaggccgaggtggccgaggaggaaacgaacctcctcctcctcctcctccattccgaggcgccagaggaggtcgctctggaggaggacccccaaatggacgagggggccctggtgggggcatggttggaggtggtgggcatcgtcctcacgaaggccctggtgggggcatgggcaacagcagtggacatcgtccccacgaaggccctggcggtggcatgggaagtgggcatcgcccccatgaaggccctggtggtagcatgggtgggggtggaggacatcgtccccacgaaggccctggcggtggcatcagtggtggcagtggccatcgtccccatgaaggccctggcggaggaatgggtgccggtggtggacatcgcccccacgaaggccctggcggaagcatgggtggaagtggtggacatcgtccccatgaaggccctggacacggggggccccatggccaccggcctcatgatgtccctggtcaccgaggccatgaccatcgagggccgccacctcatgagcaccgtggccatgatggtcctggccacgggggagggggccaccgagggcacgatggaggccacagccatggaggagacatgtcaaaccgccctgtctgccgacatttcatgatgaagggcaactgccgctatgagaacaactgtgccttctaccacccgggtgtcaatgggccccccctgccctagggaccatttgcctgccctgttcacacaacccctgtggactgcagcctcgctctttccaccctgttatggcttctgtgaggcccattttcccttttccccagctgatgaggagccggccccctcagttcccacttgcttgggttcctgggggttttctgatcactggtgcgcattgatgtacatattttcctccagtctggggaggagagagactggaaacgttcctggactgctgaagaggagacccagttggcttcactttttgagaagattcgccctgtaccccaaacccctttccagtattacccttaatgcttgagaacctaaagctggttatcctggcgaacacccctacccttctattgcgggtccccacatgcacacagaactctgacacaggatcagctgcacttaagaaatcatcccagctaagttcattattcctcatggggtggggagatgctgaaaggggtattgtatatcccactgcactgagagggctcaatcagctggatttgagttctggaacacacatcatccccacccctcccccagcgtgggctcaccattcttagtcctttctcaagtgggaccttcaactttctgtgaacacccagtctgcgtcctgggtctgctaggttcgatgatggcgaactcgtatctgcatccggtgcaagttttagctggcagaggtgagaccggtggtgctggtctgcctttgccaactatagccagtctggagacttgataaaatacttcagtgagaccagcttctcatcaacttgggcccggcgtgctgggcctgaaagtcacactacatgcactgcctttgggagtcagctcactccctgctcccacctggaaccttgccagcgtgaaggaggcttccaggtacttcaccctgtcaaccacctctgaatccccaccaggcgccttcctgggtggattcaacaagatgattttgccctttcccagttctctccttcactttggcatcagttgttttctatgaaaacagtggattggttgggttttgtgcagggtcttgggttagagccaaaatggatttgaggatgagtatttttttttttggttttgtatattttgtacattaataataaacagtggaaagagaaagcagcttatttaaaaaaaaaag

SEQ ID NO: 329199 - DNA, 5150 bp, Homo sapiens
tggatctgggaagggggatagggatggatgggttcatttgagagccacggcttaaagcggttgcgatcaggatgggacacaggtttgtttggggacaacaaagatggcatttgtgagtgttttgaagcaacccgtactgattacatctttctcccttgtgttccttttatcccaggtttgaattttctcggagaaagacaggccggccacgaggaaaacagaaacaagccgcagcaacatctaagcccttgaaaggatcctgagagaggggggaaagggaaaacagcagccaccagcccaaccacttgtgtcttctgccccttcccacctatcttgcccaccccaccagcccacgctgcttgggacttgaaatctgtggccgaaggaccgtcactacataacttcaaaaataatcaaccaccctcccttcccaaaccacccaaattcactcatccagcgtttacttttttgaatccactcagaacttttttctgcgacccccctccctaaatggagttgggtgggggggaaatgaatactgagttggcctttattttttaaaagactttttgatccaatgaggccccctaaataattgagttttgggtcctggttggttgttttattttttttcctccaaaattttaccccctcccccctgagcccgaggtgctgacgtcgcaaaaaaattggataaaaccaccatcatgggttcgggtcccatagaccccaaagaacttctcaagggcctggacagcttccttaaccgagatggggaagtcaaaagtgtggatgggatttccaagatcttcagtttgatgaaggaagcacgaaagatggtgagtcgatgcacttacttgaacattctcctgcagacccgttcaccagaaatattggtcaaatttattgacgttggcggctacaaacttcttaacaattggctgacgtattcaaagacaaccaacaacattcccctcctccagcaaattctactgaccctgcagcatctaccgctcactgtagaccatctcaagcagaacaacacagctaaactggtgaagcagctgagcaagtcaagtgaggatgaagagctccggaaattggcctcagtccttgtcagcgactggatggctgtcatccgctctcagagcagtacccagcctgctggtaagctccttagtcctttatcctgggagttatttctttcctatgggatgtggcctttaggtgctgccagtttgcttcacctctgacagtgttcatctaaataaaatccttttctgctttgttttttcccaccagagaaagataagaagaaacgtaaagatgaaggaaaaagtcgaactacccttcctgagcgacctttgacagaggtgaaggctgagacccgggctgaggaggccccagagaagaagagggagaagcccaagtctcttcgcaccacagcacccagtcatgccaagttccgttccactggtaagactggcggctggcctctggagggttcatgggcatgtgcacacccagagccttatgggggaatcatttgatgtgtggtatgttaatcgtaaggaagagggaagactagcagaggaagctttggttacaaggctagaagaacatttgcgggtgagaacgggaggaaaattcgggggtctggggtttgagttcagctgcccacaccgtgcttctttccccaggactagagctggagacaccatccttggtgcctgtgaagaagaatgccagcacagtggtggtttctgacaagtacaaccttaaacccatccccctcaaacgtcagaggtatggaccatattctcaggctctgaatggggtggatctgtggacacaagggagcaggagggggtgagtcggagatgttgatgacagttcctcttctgacagcaacgtagctgctccaggagatgccactccccctgcagagaagaaatacaagccactcaacacaacacctaatgccaccaaagagatcaaagtgaagatcatcccgccacagcctatggagggcctgggctttctggatgctcttaattcagcccctgttccaggcatcaaaattaagaagaaaaaaaaagtactgtcacctacggctgccaagccaagcccctttgaagggaaaacgagcacagaaccaagcacagccaaaccttcttccccagaaccagcaccaccttctgaggcaatggacgcagaccgtccaggcaccccggttccccctgttgaagtcccggagctcatggatacagcctctttggagccaggagctctggatgccaagccagtggagagtcctggagatcctaaccaactgacccggaaaggcaggaagaggaaaagtgtgacatggcctgaggaaggcaaactgagagaatatttctattttgaattggatgaaactgaacgagtaaatgtgaataagatcaaggactttggtgaggcggctaagcgagagatactgtcagaccgacatgcatttgagacagcgcggcgtctgagccatgataacatggaggagaaggtgccctgggtgtgcccccggcccctggttctgccctcacctcttgtcacccctggaagcaatagtcaggagcgatatatccaggctgagcgggagaagggaatccttcaggagctcttcctgaacaaggagagtcctcatgagcctgatcctgagccctacgagcccataccccctaaactcatccccctagatgaggagtgttccatggatgagactccgtatgttgagactctggaacctggggggtcaggtggctcacctgatggggcaggaggctccaagttgcctccagttctggccaatcttatgggaagcatgggtgctggaaagggcccccaaggccctggaggaggaggcattaatgtccaagagatcctcacctccatcatgggtagcccaaacagtcatccttcagaggaactactgaaacaaccagactattcggacaagatcaagcagatgctggtgccacatggactcctaggccctggcccaatagccaatggtttcccaccagggggtcctgggggccccaagggcatgcagcactttccccctggacctgggggacctatgccaggtccccatggaggccctggtgggccagtgggtccacgtcttctgggtcctccaccccctccccggggaggtgatcccttctgggatggcccgggcgaccctatgcggggtggcccaatgcgggggggtccaggaccaggtcctggaccataccatagaggccgaggtggccgaggaggaaacgaacctcctcctcctcctcctccattccgaggcgccagaggaggtcgctctggaggaggacccccaaatggacgagggggccctggtgggggcatggttggaggtggtgggcatcgtcctcacgaaggccctggtgggggcatgggcaacagcagtggacatcgtccccacgaaggccctggcggtggcatgggaagtgggcatcgcccccatgaaggccctggtggtagcatgggtgggggtggaggacatcgtccccacgaaggccctggcggtggcatcagtggtggcagtggccatcgtccccatgaaggccctggcggaggaatgggtgccggtggtggacatcgcccccacgaaggccctggcggaagcatgggtggaagtggtggacatcgtccccatgaaggccctggacacggggggccccatggccaccggcctcatgatgtccctggtcaccgaggccatgaccatcgagggccgccacctcatgagcaccgtggccatgatggtcctggccacgggggagggggccaccgagggcacgatggaggccacagccatggaggagacatgtcaaaccgccctgtctgccgacatttcatgatgaagggcaactgccgctatgagaacaactgtgccttctaccacccgggtgtcaatgggccccccctgccctagggaccatttgcctgccctgttcacacaacccctgtggactgcagcctcgctctttccaccctgttatggcttctgtgaggcccattttcccttttccccagctgatgaggagccggccccctcagttcccacttgcttgggttcctgggggttttctgatcactggtgcgcattgatgtacatattttcctccagtctggggaggagagagactggaaacgttcctggactgctgaagaggagacccagttggcttcactttttgagaagattcgccctgtaccccaaacccctttccagtattacccttaatgcttgagaacctaaagctggttatcctggcgaacacccctacccttctattgcgggtccccacatgcacacagaactctgacacaggatcagctgcacttaagaaatcatcccagctaagttcattattcctcatggggtggggagatgctgaaaggggtattgtatatcccactgcactgagagggctcaatcagctggatttgagttctggaacacacatcatccccacccctcccccagcgtgggctcaccattcttagtcctttctcaagtgggaccttcaactttctgtgaacacccagtctgcgtcctgggtctgctaggttcgatgatggcgaactcgtatctgcatccggtgcaagttttagctggcagaggtgagaccggtggtgctggtctgcctttgccaactatagccagtctggagacttgataaaatacttcagtgagaccagcttctcatcaacttgggcccggcgtgctgggcctgaaagtcacactacatgcactgcctttgggagtcagctcactccctgctcccacctggaaccttgccagcgtgaaggaggcttccaggtacttcaccctgtcaaccacctctgaatccccaccaggcgccttcctgggtggattcaacaagatgattttgccctttcccagttctctccttcactttggcatcagttgttttctatgaaaacagtggattggttgggttttgtgcagggtcttgggttagagccaaaatggatttgaggatgagtatttttttttttggttttgtatattttgtacattaataataaacagtggaaagagaaagcagcttatttaaaaaaaaaag

SEQ ID NO: 329200 - DNA, 4453 bp, Homo sapiens
actggtggattttggttacatgtataagttctttaatggtgatttctgagattttggtacactcatcacccaagcagtgtacactgcacccaacgtgtagtcttttactaatgtagattttaaccacatattctgaaatattaggtctttttactccagagtggtgtgatgacatcagagttgaaagttatccaagtagaacacaactctaattcattgttccattttttaagggtttggtttttaagcatatctcatgttcttcttaaaactttgggttactttctccgttacataaattttcacaatattttctcaaacctcccattttctgttcctggaagaatgttactttacattatttaggcatttcccctttctgtcacctgcagagctccggaaattggcctcagtccttgtcagcgactggatggctgtcatccgctctcagagcagtacccagcctgctggtaagctccttagtcctttatcctgggagttatttctttcctatgggatgtggcctttaggtgctgccagtttgcttcacctctgacagtgttcatctaaataaaatccttttctgctttgttttttcccaccagagaaagataagaagaaacgtaaagatgaaggaaaaagtcgaactacccttcctgagcgacctttgacagaggtgaaggctgagacccgggctgaggaggccccagagaagaagagggagaagcccaagtctcttcgcaccacagcacccagtcatgccaagttccgttccactggtaagactggcggctggcctctggagggttcatgggcatgtgcacacccagagccttatgggggaatcatttgatgtgtggtatgttaatcgtaaggaagagggaagactagcagaggaagctttggttacaaggctagaagaacatttgcgggtgagaacgggaggaaaattcgggggtctggggtttgagttcagctgcccacaccgtgcttctttccccaggactagagctggagacaccatccttggtgcctgtgaagaagaatgccagcacagtggtggtttctgacaagtacaaccttaaacccatccccctcaaacgtcagaggtatggaccatattctcaggctctgaatggggtggatctgtggacacaagggagcaggagggggtgagtcggagatgttgatgacagttcctcttctgacagcaacgtagctgctccaggagatgccactccccctgcagagaagaaatacaagccactcaacacaacacctaatgccaccaaagagatcaaagtgaagatcatcccgccacagcctatggagggcctgggctttctggatgctcttaattcagcccctgttccaggcatcaaaattaagaagaaaaaaaaagtactgtcacctacggctgccaagccaagcccctttgaagggaaaacgagcacagaaccaagcacagccaaaccttcttccccagaaccagcaccaccttctgaggcaatggacgcagaccgtccaggcaccccggttccccctgttgaagtcccggagctcatggatacagcctctttggagccaggagctctggatgccaagccagtggagagtcctggagatcctaaccaactgacccggaaaggcaggaagaggaaaagtgtgacatggcctgaggaaggcaaactgagagaatatttctattttgaattggatgaaactgaacgagtaaatgtgaataagatcaaggactttggtgaggcggctaagcgagagatactgtcagaccgacatgcatttgagacagcgcggcgtctgagccatgataacatggaggagaaggtgccctgggtgtgcccccggcccctggttctgccctcacctcttgtcacccctggaagcaatagtcaggagcgatatatccaggctgagcgggagaagggaatccttcaggagctcttcctgaacaaggagagtcctcatgagcctgatcctgagccctacgagcccataccccctaaactcatccccctagatgaggagtgttccatggatgagactccgtatgttgagactctggaacctggggggtcaggtggctcacctgatggggcaggaggctccaagttgcctccagttctggccaatcttatgggaagcatgggtgctggaaagggcccccaaggccctggaggaggaggcattaatgtccaagagatcctcacctccatcatgggtagcccaaacagtcatccttcagaggaactactgaaacaaccagactattcggacaagatcaagcagatgctggtgccacatggactcctaggccctggcccaatagccaatggtttcccaccagggggtcctgggggccccaagggcatgcagcactttccccctggacctgggggacctatgccaggtccccatggaggccctggtgggccagtgggtccacgtcttctgggtcctccaccccctccccggggaggtgatcccttctgggatggcccgggcgaccctatgcggggtggcccaatgcgggggggtccaggaccaggtcctggaccataccatagaggccgaggtggccgaggaggaaacgaacctcctcctcctcctcctccattccgaggcgccagaggaggtcgctctggaggaggacccccaaatggacgagggggccctggtgggggcatggttggaggtggtgggcatcgtcctcacgaaggccctggtgggggcatgggcaacagcagtggacatcgtccccacgaaggccctggcggtggcatgggaagtgggcatcgcccccatgaaggccctggtggtagcatgggtgggggtggaggacatcgtccccacgaaggccctggcggtggcatcagtggtggcagtggccatcgtccccatgaaggccctggcggaggaatgggtgccggtggtggacatcgcccccacgaaggccctggcggaagcatgggtggaagtggtggacatcgtccccatgaaggccctggacacggggggccccatggccaccggcctcatgatgtccctggtcaccgaggccatgaccatcgagggccgccacctcatgagcaccgtggccatgatggtcctggccacgggggagggggccaccgagggcacgatggaggccacagccatggaggagacatgtcaaaccgccctgtctgccgacatttcatgatgaagggcaactgccgctatgagaacaactgtgccttctaccacccgggtgtcaatgggccccccctgccctagggaccatttgcctgccctgttcacacaacccctgtggactgcagcctcgctctttccaccctgttatggcttctgtgaggcccattttcccttttccccagctgatgaggagccggccccctcagttcccacttgcttgggttcctgggggttttctgatcactggtgcgcattgatgtacatattttcctccagtctggggaggagagagactggaaacgttcctggactgctgaagaggagacccagttggcttcactttttgagaagattcgccctgtaccccaaacccctttccagtattacccttaatgcttgagaacctaaagctggttatcctggcgaacacccctacccttctattgcgggtccccacatgcacacagaactctgacacaggatcagctgcacttaagaaatcatcccagctaagttcattattcctcatggggtggggagatgctgaaaggggtattgtatatcccactgcactgagagggctcaatcagctggatttgagttctggaacacacatcatccccacccctcccccagcgtgggctcaccattcttagtcctttctcaagtgggaccttcaactttctgtgaacacccagtctgcgtcctgggtctgctaggttcgatgatggcgaactcgtatctgcatccggtgcaagttttagctggcagaggtgagaccggtggtgctggtctgcctttgccaactatagccagtctggagacttgataaaatacttcagtgagaccagcttctcatcaacttgggcccggcgtgctgggcctgaaagtcacactacatgcactgcctttgggagtcagctcactccctgctcccacctggaaccttgccagcgtgaaggaggcttccaggtacttcaccctgtcaaccacctctgaatccccaccaggcgccttcctgggtggattcaacaagatgattttgccctttcccagttctctccttcactttggcatcagttgttttctatgaaaacagtggattggttgggttttgtgcagggtcttgggttagagccaaaatggatttgaggatgagtatttttttttttggttttgtatattttgtacattaataataaacagtggaaagagaaagcagcttatttaaaaaaaaaag

SEQ ID NO: 329201 - DNA, 4006 bp, Homo sapiens
tggatctgggaagggggatagggatggatgggttcatttgagagccacggcttaaagcggttgcgatcaggatgggacacaggtttgtttggggacaacaaagatggcatttgtgagtgttttgaagcaacccgtactgattacatctttctcccttgtgttccttttatcccaggtttgaattttctcggagaaagacaggccggccacgaggaaaacagaaacaagccgcagcaacatctaagcccttgaaaggatcctgagagaggggggaaagggaaaacagcagccaccagcccaaccacttgtgtcttctgccccttcccacctatcttgcccaccccaccagcccacgctgcttgggacttgaaatctgtggccgaaggaccgtcactacataacttcaaaaataatcaaccaccctcccttcccaaaccacccaaattcactcatccagcgtttacttttttgaatccactcagaacttttttctgcgacccccctccctaaatggagttgggtgggggggaaatgaatactgagttggcctttattttttaaaagactttttgatccaatgaggccccagagaagaagagggagaagcccaagtctcttcgcaccacagcacccagtcatgccaagttccgttccactggactagagctggagacaccatccttggtgcctgtgaagaagaatgccagcacagtggtggtttctgacaagtacaaccttaaacccatccccctcaaacgtcagagcaacgtagctgctccaggagatgccactccccctgcagagaagaaatacaagccactcaacacaacacctaatgccaccaaagagatcaaagtgaagatcatcccgccacagcctatggagggcctgggctttctggatgctcttaattcagcccctgttccaggcatcaaaattaagaagaaaaaaaaagtactgtcacctacggctgccaagccaagcccctttgaagggaaaacgagcacagaaccaagcacagccaaaccttcttccccagaaccagcaccaccttctgaggcaatggacgcagaccgtccaggcaccccggttccccctgttgaagtcccggagctcatggatacagcctctttggagccaggagctctggatgccaagccagtggagagtcctggagatcctaaccaactgacccggaaaggcaggaagaggaaaagtgtgacatggcctgaggaaggcaaactgagagaatatttctattttgaattggatgaaactgaacgagtaaatgtgaataagatcaaggactttggtgaggcggctaagcgagagatactgtcagaccgacatgcatttgagacagcgcggcgtctgagccatgataacatggaggagaaggtgccctgggtgtgcccccggcccctggttctgccctcacctcttgtcacccctggaagcaatagtcaggagcgatatatccaggctgagcgggagaagggaatccttcaggagctcttcctgaacaaggagagtcctcatgagcctgatcctgagccctacgagcccataccccctaaactcatccccctagatgaggagtgttccatggatgagactccgtatgttgagactctggaacctggggggtcaggtggctcacctgatggggcaggaggctccaagttgcctccagttctggccaatcttatgggaagcatgggtgctggaaagggcccccaaggccctggaggaggaggcattaatgtccaagagatcctcacctccatcatgggtagcccaaacagtcatccttcagaggaactactgaaacaaccagactattcggacaagatcaagcagatgctggtgccacatggactcctaggccctggcccaatagccaatggtttcccaccagggggtcctgggggccccaagggcatgcagcactttccccctggacctgggggacctatgccaggtccccatggaggccctggtgggccagtgggtccacgtcttctgggtcctccaccccctccccggggaggtgatcccttctgggatggcccgggcgaccctatgcggggtggcccaatgcgggggggtccaggaccaggtcctggaccataccatagaggccgaggtggccgaggaggaaacgaacctcctcctcctcctcctccattccgaggcgccagaggaggtcgctctggaggaggacccccaaatggacgagggggccctggtgggggcatggttggaggtggtgggcatcgtcctcacgaaggccctggtgggggcatgggcaacagcagtggacatcgtccccacgaaggccctggcggtggcatgggaagtgggcatcgcccccatgaaggccctggtggtagcatgggtgggggtggaggacatcgtccccacgaaggccctggcggtggcatcagtggtggcagtggccatcgtccccatgaaggccctggcggaggaatgggtgccggtggtggacatcgcccccacgaaggccctggcggaagcatgggtggaagtggtggacatcgtccccatgaaggccctggacacggggggccccatggccaccggcctcatgatgtccctggtcaccgaggccatgaccatcgagggccgccacctcatgagcaccgtggccatgatggtcctggccacgggggagggggccaccgagggcacgatggaggccacagccatggaggagacatgtcaaaccgccctgtctgccgacatttcatgatgaagggcaactgccgctatgagaacaactgtgccttctaccacccgggtgtcaatgggccccccctgccctagggaccatttgcctgccctgttcacacaacccctgtggactgcagcctcgctctttccaccctgttatggcttctgtgaggcccattttcccttttccccagctgatgaggagccggccccctcagttcccacttgcttgggttcctgggggttttctgatcactggtgcgcattgatgtacatattttcctccagtctggggaggagagagactggaaacgttcctggactgctgaagaggagacccagttggcttcactttttgagaagattcgccctgtaccccaaacccctttccagtattacccttaatgcttgagaacctaaagctggttatcctggcgaacacccctacccttctattgcgggtccccacatgcacacagaactctgacacaggatcagctgcacttaagaaatcatcccagctaagttcattattcctcatggggtggggagatgctgaaaggggtattgtatatcccactgcactgagagggctcaatcagctggatttgagttctggaacacacatcatccccacccctcccccagcgtgggctcaccattcttagtcctttctcaagtgggaccttcaactttctgtgaacacccagtctgcgtcctgggtctgctaggttcgatgatggcgaactcgtatctgcatccggtgcaagttttagctggcagaggtgagaccggtggtgctggtctgcctttgccaactatagccagtctggagacttgataaaatacttcagtgagaccagcttctcatcaacttgggcccggcgtgctgggcctgaaagtcacactacatgcactgcctttgggagtcagctcactccctgctcccacctggaaccttgccagcgtgaaggaggcttccaggtacttcaccctgtcaaccacctctgaatccccaccaggcgccttcctgggtggattcaacaagatgattttgccctttcccagttctctccttcactttggcatcagttgttttctatgaaaacagtggattggttgggttttgtgcagggtcttgggttagagccaaaatggatttgaggatgagtatttttttttttggttttgtatattttgtacattaataataaacagtggaaagagaaagcagcttatttaaaaaaaaaag

SEQ ID NO: 329202 - DNA, 1593 bp, Homo sapiens
  misc_feature (23)..(23): n is a, c, g, or t
  misc_feature (25)..(25): n is a, c, g, or t
ggcccccattcctccgccaggcntncatggggacatggcactgcaccactgatgccaccgccagccctggcggaggaatgggtgccggtggtggacatcgcccccacgaaggccctggcggaagcatgggtggaagtggtggacatcgtccccatgaaggccctggacacggggggccccatggccaccggcctcatgatgtccctggtcaccgaggccatgaccatcgagggccgccacctcatgagcaccgtggccatgatggtcctggccacgggggagggggccaccgagggcacgatggaggccacagccatggaggagacatgtcaaaccgccctgtctgccgacatttcatgatgaagggcaactgccgctatgagaacaactgtgccttctaccacccgggtgtcaatgggccccccctgccctagggaccatttgcctgccctgttcacacaacccctgtggactgcagcctcgctctttccaccctgttatggcttctgtgaggcccattttcccttttccccagctgatgaggagccggccccctcagttcccacttgcttgggttcctgggggttttctgatcactggtgcgcattgatgtacatattttcctccagtctggggaggagagagactggaaacgttcctggactgctgaagaggagacccagttggcttcactttttgagaagattcgccctgtaccccaaacccctttccagtattacccttaatgcttgagaacctaaagctggttatcctggcgaacacccctacccttctattgcgggtccccacatgcacacagaactctgacacaggatcagctgcacttaagaaatcatcccagctaagttcattattcctcatggggtggggagatgctgaaaggggtattgtatatcccactgcactgagagggctcaatcagctggatttgagttctggaacacacatcatccccacccctcccccagcgtgggctcaccattcttagtcctttctcaagtgggaccttcaactttctgtgaacacccagtctgcgtcctgggtctgctaggttcgatgatggcgaactcgtatctgcatccggtgcaagttttagctggcagaggtgagaccggtggtgctggtctgcctttgccaactatagccagtctggagacttgataaaatacttcagtgagaccagcttctcatcaacttgggcccggcgtgctgggcctgaaagtcacactacatgcactgcctttgggagtcagctcactccctgctcccacctggaaccttgccagcgtgaaggaggcttccaggtacttcaccctgtcaaccacctctgaatccccaccaggcgccttcctgggtggattcaacaagatgattttgccctttcccagttctctccttcactttggcatcagttgttttctatgaaaacagtggattggttgggttttgtgcagggtcttgggttagagccaaaatggatttgaggatgagtatttttttttttggttttgtatattttgtacattaataataaacagtggaaagagaaagcagcttatttaaaaaaaaaag

SEQ ID NO: 329203 - DNA, 1464 bp, Homo sapiens
tatactgctaaggtactctagacatcccattatctggaaaaggggggccccatggccaccggcctcatgatgtccctggtcaccgaggccatgaccatcgagggccgccacctcatgagcaccgtggccatgatggtcctggccacgggggagggggccaccgagggcacgatggaggccacagccatggaggagacatgtcaaaccgccctgtctgccgacatttcatgatgaagggcaactgccgctatgagaacaactgtgccttctaccacccgggtgtcaatgggccccccctgccctagggaccatttgcctgccctgttcacacaacccctgtggactgcagcctcgctctttccaccctgttatggcttctgtgaggcccattttcccttttccccagctgatgaggagccggccccctcagttcccacttgcttgggttcctgggggttttctgatcactggtgcgcattgatgtacatattttcctccagtctggggaggagagagactggaaacgttcctggactgctgaagaggagacccagttggcttcactttttgagaagattcgccctgtaccccaaacccctttccagtattacccttaatgcttgagaacctaaagctggttatcctggcgaacacccctacccttctattgcgggtccccacatgcacacagaactctgacacaggatcagctgcacttaagaaatcatcccagctaagttcattattcctcatggggtggggagatgctgaaaggggtattgtatatcccactgcactgagagggctcaatcagctggatttgagttctggaacacacatcatccccacccctcccccagcgtgggctcaccattcttagtcctttctcaagtgggaccttcaactttctgtgaacacccagtctgcgtcctgggtctgctaggttcgatgatggcgaactcgtatctgcatccggtgcaagttttagctggcagaggtgagaccggtggtgctggtctgcctttgccaactatagccagtctggagacttgataaaatacttcagtgagaccagcttctcatcaacttgggcccggcgtgctgggcctgaaagtcacactacatgcactgcctttgggagtcagctcactccctgctcccacctggaaccttgccagcgtgaaggaggcttccaggtacttcaccctgtcaaccacctctgaatccccaccaggcgccttcctgggtggattcaacaagatgattttgccctttcccagttctctccttcactttggcatcagttgttttctatgaaaacagtggattggttgggttttgtgcagggtcttgggttagagccaaaatggatttgaggatgagtatttttttttttggttttgtatattttgtacattaataataaacagtggaaagagaaagcagcttatttaaaaaaaaaag

SEQ ID NO: 329204 - DNA, 865 bp, Homo sapiens
gtgacacaggattagctgggatgatttcttaagtgcagctgatcctgtgtcagagttctgtgtgcatgtggggacccgcaatagaagggtaggggtgttcgccaggatcagctgcacttaagaaatcatcccagctaagttcattattcctcatggggtggggagatgctgaaaggggtattgtatatcccactgcactgagagggctcaatcagctggatttgagttctggaacacacatcatccccacccctcccccagcgtgggctcaccattcttagtcctttctcaagtgggaccttcaactttctgtgaacacccagtctgcgtcctgggtctgctaggttcgatgatggcgaactcgtatctgcatccggtgcaagttttagctggcagaggtgagaccggtggtgctggtctgcctttgccaactatagccagtctggagacttgataaaatacttcagtgagaccagcttctcatcaacttgggcccggcgtgctgggcctgaaagtcacactacatgcactgcctttgggagtcagctcactccctgctcccacctggaaccttgccagcgtgaaggaggcttccaggtacttcaccctgtcaaccacctctgaatccccaccaggcgccttcctgggtggattcaacaagatgattttgccctttcccagttctctccttcactttggcatcagttgttttctatgaaaacagtggattggttgggttttgtgcagggtcttgggttagagccaaaatggatttgaggatgagtatttttttttttggttttgtatattttgtacattaataataaacagtggaaagagaaagcagcttatttaaaaaaaaaag

SEQ ID NO: 329205 - DNA, 2068 bp, Homo sapiens
tggatctgggaagggggatagggatggatgggttcatttgagagccacggcttaaagcggttgcgatcaggatgggacacaggtttgtttggggacaacaaagatggcatttgtgagtgttttgaagcaacccgtactgattacatctttctcccttgtgttccttttatcccaggtttgaattttctcggagaaagacaggccggccacgaggaaaacagaaacaagccgcagcaacatctaagcccttgaaaggatcctgagagaggggggaaagggaaaacagcagccaccagcccaaccacttgtgtcttctgccccttcccacctatcttgcccaccccaccagcccacgctgcttgggacttgaaatctgtggccgaaggaccgtcactacataacttcaaaaataatcaaccaccctcccttcccaaaccacccaaattcactcatccagcgtttacttttttgaatccactcagaacttttttctgcgacccccctccctaaatggagttgggtgggggggaaatgaatactgagttggcctttattttttaaaagactttttgatccaatgaggccccctaaataattgagttttgggtcctggttggttgttttattttttttcctccaaaattttaccccctcccccctgagcccgaggtgctgacgtcgcaaaaaaattggataaaaccaccatcatgggttcgggtcccatagaccccaaagaacttctcaagggcctggacagcttccttaaccgagatggggaagtcaaaagtgtggatgggatttccaagatcttcagtttgatgaaggaagcacgaaagatggtgagtcgatgcacttacttgaacattctcctgcagacccgttcaccagaaatattggtcaaatttattgacgttggcggctacaaacttcttaacaattggctgacgtattcaaagacaaccaacaacattcccctcctccagcaaattctactgaccctgcagcatctaccgctcactgtagaccatctcaagcagaacaacacagctaaactggtgaagcagctgagcaagtcaagtgaggatgaagagctccggaaattggcctcagtccttgtcagcgactggatggctgtcatccgctctcagagcagtacccagcctgctggtaagctccttagtcctttatcctgggagttatttctttcctatgggatgtggcctttaggtgctgccagtttgcttcacctctgacagtgttcatctaaataaaatccttttctgctttgttttttcccaccagagaaagataagaagaaacgtaaagatgaaggaaaaagtcgaactacccttcctgagcgacctttgacagaggtgaaggctgagacccgggctgaggaggccccagagaagaagagggagaagcccaagtctcttcgcaccacagcacccagtcatgccaagttccgttccactggtaagactggcggctggcctctggagggttcatgggcatgtgcacacccagagccttatgggggaatcatttgatgtgtggtatgttaatcgtaaggaagagggaagactagcagaggaagctttggttacaaggctagaagaacatttgcgggtgagaacgggaggaaaattcgggggtctggggtttgagttcagctgcccacaccgtgcttctttccccaggactagagctggagacaccatccttggtgcctgtgaagaagaatgccagcacagtggtggtttctgacaagtacaaccttaaacccatccccctcaaacgtcagaggtatggaccatattctcaggctctgaatggggtggatctgtggacacaagggagcaggagggggtgagtcggagatgttgatgacagttcctcttctgacagcaacgtagctgctccaggagatgccactccccctgcatagtcccagctacttgggaggctgaggcaggggaatcgcttgaatccaggaggcagaggttgcagtgagccgagataacgctactggatccaggatggacgacagagcgagagtccgtctagg

SEQ ID NO: 329206 - DNA, 1902 bp, Homo sapiens
tggatctgggaagggggatagggatggatgggttcatttgagagccacggcttaaagcggttgcgatcaggatgggacacaggtttgtttggggacaacaaagatggcatttgtgagtgttttgaagcaacccgtactgattacatctttctcccttgtgttccttttatcccaggtttgaattttctcggagaaagacaggccggccacgaggaaaacagaaacaagccgcagcaacatctaagcccttgaaaggatcctgagagaggggggaaagggaaaacagcagccaccagcccaaccacttgtgtcttctgccccttcccacctatcttgcccaccccaccagcccacgctgcttgggacttgaaatctgtggccgaaggaccgtcactacataacttcaaaaataatcaaccaccctcccttcccaaaccacccaaattcactcatccagcgtttacttttttgaatccactcagaacttttttctgcgacccccctccctaaatggagttgggtgggggggaaatgaatactgagttggcctttattttttaaaagactttttgatccaatgaggccccctaaataattgagttttgggtcctggttggttgttttattttttttcctccaaaattttaccccctcccccctgagcccgaggtgctgacgtcgcaaaaaaattggataaaaccaccatcatgggttcgggtcccatagaccccaaagaacttctcaagggcctggacagcttccttaaccgagatggggaagtcaaaagtgtggatgggatttccaagatcttcagtttgatgaaggaagcacgaaagatggtgagtcgatgcacttacttgaacattctcctgcagacccgttcaccagaaatattggtcaaatttattgacgttggcggctacaaacttcttaacaattggctgacgtattcaaagacaaccaacaacattcccctcctccagcaaattctactgaccctgcagcatctaccgctcactgtagaccatctcaagcagaacaacacagctaaactggtgaagcagctgagcaagtcaagtgaggatgaagagctccggaaattggcctcagtccttgtcagcgactggatggctgtcatccgctctcagagcagtacccagcctgctgagaaagataagaagaaacgtaaagatgaaggaaaaagtcgaactacccttcctgagcgacctttgacagaggtgaaggctgagacccgggctgaggaggccccagagaagaagagggagaagcccaagtctcttcgcaccacagcacccagtcatgccaagttccgttccactggtaagactggcggctggcctctggagggttcatgggcatgtgcacacccagagccttatgggggaatcatttgatgtgtggtatgttaatcgtaaggaagagggaagactagcagaggaagctttggttacaaggctagaagaacatttgcgggtgagaacgggaggaaaattcgggggtctggggtttgagttcagctgcccacaccgtgcttctttccccaggactagagctggagacaccatccttggtgcctgtgaagaagaatgccagcacagtggtggtttctgacaagtacaaccttaaacccatccccctcaaacgtcagagcaacgtagctgctccaggagatgccactccccctgcagagaagaaatacaagccactcaacacaacacctaatgccaccaaagagatcaaagtgaagatcatcccgccacagcgtgagtctaaagtggggaagatgtactttgaattaggagcaaacttttttttttttttttttggagacagagtctcactctgtcacccaggctggagtgcagtggcacggtcttggct

SEQ ID NO: 329207 - DNA, 252 bp, Homo sapiens
acgagcccataccccctaaactcatccccctagatgaggtaagtcaatgttctgtgatgatggaagttgtgatggtcattgaattcggtgcatctttcatatgagaatgtctctgttctgtcagtcctgattttttttgttcttctttcaggagtgttccatggatgagactccgtatgttgagactctggaacctggggggtcaggtggctcacctgatggggcaggaggctccaagttgcctccagttct

SEQ ID NO: 329208 - DNA, 128 bp, Homo sapiens
tgtcatggacaaggggtggtgagggtggcattgccctcagctatttcctgtctaactgttttgccatcgttcccacagacatgtcaaaccgccctgtctgccgacatttcatgatgaagggcaactgc

SEQ ID NO: 329209 - DNA, 4290 bp, Homo sapiens
agccatcctaggaaggatgctgctgggagggagggacaggtgtgctgccctactcctccaatcgaattgctttcctgttcagtcacatatgctccccatgcttaacttgccagggctattttctcagtagtggcaagtggtctgtgtcgatttttcatatctaaaaaatagcatagttgaataattagtcattatactttgtcaaatatagagatgtggtttattagagggcctactcgggtagtccttgccacccatttattctgtgggtttgtttgttttgtcctcttaccatagaaaccaccatcatgggttcgggtcccatagaccccaaagaacttctcaagggcctggacagcttccttaaccgagatggggaagtcaaaagtgtggatgggatttccaagatcttcagtttgatgaaggaagcacgaaagatggtgagtcgatgcacttacttgaacattctcctgcagacccgttcaccagaaatattggtcaaatttattgacgttggcggctacaaacttcttaacaattggctgacgtattcaaagacaaccaacaacattcccctcctccagcaaattctactgaccctgcagcatctaccgctcactgtagaccatctcaagcagaacaacacagctaaactggtgaagcagctgagcaagtcaagtgaggatgaagagctccggaaattggcctcagtccttgtcagcgactggatggctgtcatccgctctcagagcagtacccagcctgctgagaaagataagaagaaacgtaaagatgaaggaaaaagtcgaactacccttcctgagcgacctttgacagaggtgaaggctgagacccgggctgaggaggccccagagaagaagagggagaagcccaagtctcttcgcaccacagcacccagtcatgccaagttccgttccactggactagagctggagacaccatccttggtgcctgtgaagaagaatgccagcacagtggtggtttctgacaagtacaaccttaaacccatccccctcaaacgtcagagcaacgtagctgctccaggagatgccactccccctgcagagaagaaatacaagccactcaacacaacacctaatgccaccaaagagatcaaagtgaagatcatcccgccacagcctatggagggcctgggctttctggatgctcttaattcagcccctgttccaggcatcaaaattaagaagaaaaaaaaagtactgtcacctacggctgccaagccaagcccctttgaagggaaaacgagcacagaaccaagcacagccaaaccttcttccccagaaccagcaccaccttctgaggcaatggacgcagaccgtccaggcaccccggttccccctgttgaagtcccggagctcatggatacagcctctttggagccaggagctctggatgccaagccagtggagagtcctggagatcctaaccaactgacccggaaaggcaggaagaggaaaagtgtgacatggcctgaggaaggcaaactgagagaatatttctattttgaattggatgaaactgaacgagtaaatgtgaataagatcaaggactttggtgaggcggctaagcgagagatactgtcagaccgacatgcatttgagacagcgcggcgtctgagccatgataacatggaggagaaggtgccctgggtgtgcccccggcccctggttctgccctcacctcttgtcacccctggaagcaatagtcaggagcgatatatccaggctgagcgggagaagggaatccttcaggagctcttcctgaacaaggagagtcctcatgagcctgatcctgagccctacgagcccataccccctaaactcatccccctagatgaggagtgttccatggatgagactccgtatgttgagactctggaacctggggggtcaggtggctcacctgatggggcaggaggctccaagttgcctccagttctggccaatcttatgggaagcatgggtgctggaaagggcccccaaggccctggaggaggaggcattaatgtccaagagatcctcacctccatcatgggtagcccaaacagtcatccttcagaggaactactgaaacaaccagactattcggacaagatcaagcagatgctggtgccacatggactcctaggccctggcccaatagccaatggtttcccaccagggggtcctgggggccccaagggcatgcagcactttccccctggacctgggggacctatgccaggtccccatggaggccctggtgggccagtgggtccacgtcttctgggtcctccaccccctccccggggaggtgatcccttctgggatggcccgggcgaccctatgcggggtggcccaatgcgggggggtccaggaccaggtcctggaccataccatagaggccgaggtggccgaggaggaaacgaacctcctcctcctcctcctccattccgaggcgccagaggaggtcgctctggaggaggacccccaaatggacgagggggccctggtgggggcatggttggaggtggtgggcatcgtcctcacgaaggccctggtgggggcatgggcaacagcagtggacatcgtccccacgaaggccctggcggtggcatgggaagtgggcatcgcccccatgaaggccctggtggtagcatgggtgggggtggaggacatcgtccccacgaaggccctggcggtggcatcagtggtggcagtggccatcgtccccatgaaggccctggcggaggaatgggtgccggtggtggacatcgcccccacgaaggccctggcggaagcatgggtggaagtggtggacatcgtccccatgaaggccctggacacggggggccccatggccaccggcctcatgatgtccctggtcaccgaggccatgaccatcgagggccgccacctcatgagcaccgtggccatgatggtcctggccacgggggagggggccaccgagggcacgatggaggccacagccatggaggagacatgtcaaaccgccctgtctgccgacatttcatgatgaagggcaactgccgctatgagaacaactgtgccttctaccacccgggtgtcaatgggccccccctgccctagggaccatttgcctgccctgttcacacaacccctgtggactgcagcctcgctctttccaccctgttatggcttctgtgaggcccattttcccttttccccagctgatgaggagccggccccctcagttcccacttgcttgggttcctgggggttttctgatcactggtgcgcattgatgtacatattttcctccagtctggggaggagagagactggaaacgttcctggactgctgaagaggagacccagttggcttcactttttgagaagattcgccctgtaccccaaacccctttccagtattacccttaatgcttgagaacctaaagctggttatcctggcgaacacccctacccttctattgcgggtccccacatgcacacagaactctgacacaggatcagctgcacttaagaaatcatcccagctaagttcattattcctcatggggtggggagatgctgaaaggggtattgtatatcccactgcactgagagggctcaatcagctggatttgagttctggaacacacatcatccccacccctcccccagcgtgggctcaccattcttagtcctttctcaagtgggaccttcaactttctgtgaacacccagtctgcgtcctgggtctgctaggttcgatgatggcgaactcgtatctgcatccggtgcaagttttagctggcagaggtgagaccggtggtgctggtctgcctttgccaactatagccagtctggagacttgataaaatacttcagtgagaccagcttctcatcaacttgggcccggcgtgctgggcctgaaagtcacactacatgcactgcctttgggagtcagctcactccctgctcccacctggaaccttgccagcgtgaaggaggcttccaggtacttcaccctgtcaaccacctctgaatccccaccaggcgccttcctgggtggattcaacaagatgattttgccctttcccagttctctccttcactttggcatcagttgttttctatgaaaacagtggattggttgggttttgtgcagggtcttgggttagagccaaaatggatttgaggatgagtatttttttttttggttttgtatattttgtacattaataataaacagtggaaagagaaagcagcttatttaaaaaaaaaag

SEQ ID NO: 329210 - DNA, 4913 bp, Homo sapiens
tggatctgggaagggggatagggatggatgggttcatttgagagccacggcttaaagcggttgcgatcaggatgggacacaggtttgtttggggacaacaaagatggcatttgtgagtgttttgaagcaacccgtactgattacatctttctcccttgtgttccttttatcccaggtttgaattttctcggagaaagacaggccggccacgaggaaaacagaaacaagccgcagcaacatctaagcccttgaaaggatcctgagagaggggggaaagggaaaacagcagccaccagcccaaccacttgtgtcttctgccccttcccacctatcttgcccaccccaccagcccacgctgcttgggacttgaaatctgtggccgaaggaccgtcactacataacttcaaaaataatcaaccaccctcccttcccaaaccacccaaattcactcatccagcgtttacttttttgaatccactcagaacttttttctgcgacccccctccctaaatggagttgggtgggggggaaatgaatactgagttggcctttattttttaaaagactttttgatccaatgaggccccctaaataattgagttttgggtcctggttggttgttttattttttttcctccaaaattttaccccctcccccctgagcccgaggtgctgacgtcgcaaaaaaattggataaaaccaccatcatgggttcgggtcccatagaccccaaagaacttctcaagggcctggacagcttccttaaccgagatggggaagtcaaaagtgtggatgggatttccaagatcttcagtttgatgaaggaagcacgaaagatggtgagtcgatgcacttacttgaacattctcctgcagacccgttcaccagaaatattggtcaaatttattgacgttggcggctacaaacttcttaacaattggctgacgtattcaaagacaaccaacaacattcccctcctccagcaaattctactgaccctgcagcatctaccgctcactgtagaccatctcaagcagaacaacacagctaaactggtgaagcagctgagcaagtcaagtgaggatgaagagctccggaaattggcctcagtccttgtcagcgactggatggctgtcatccgctctcagagcagtacccagcctgctgagaaagataagaagaaacgtaaagatgaaggaaaaagtcgaactacccttcctgagcgacctttgacagaggtgaaggctgagacccgggctgaggaggccccagagaagaagagggagaagcccaagtctcttcgcaccacagcacccagtcatgccaagttccgttccactggtaagactggcggctggcctctggagggttcatgggcatgtgcacacccagagccttatgggggaatcatttgatgtgtggtatgttaatcgtaaggaagagggaagactagcagaggaagctttggttacaaggctagaagaacatttgcgggtgagaacgggaggaaaattcgggggtctggggtttgagttcagctgcccacaccgtgcttctttccccaggactagagctggagacaccatccttggtgcctgtgaagaagaatgccagcacagtggtggtttctgacaagtacaaccttaaacccatccccctcaaacgtcagagcaacgtagctgctccaggagatgccactccccctgcagagaagaaatacaagccactcaacacaacacctaatgccaccaaagagatcaaagtgaagatcatcccgccacagcctatggagggcctgggctttctggatgctcttaattcagcccctgttccaggcatcaaaattaagaagaaaaaaaaagtactgtcacctacggctgccaagccaagcccctttgaagggaaaacgagcacagaaccaagcacagccaaaccttcttccccagaaccagcaccaccttctgaggcaatggacgcagaccgtccaggcaccccggttccccctgttgaagtcccggagctcatggatacagcctctttggagccaggagctctggatgccaagccagtggagagtcctggagatcctaaccaactgacccggaaaggcaggaagaggaaaagtgtgacatggcctgaggaaggcaaactgagagaatatttctattttgaattggatgaaactgaacgagtaaatgtgaataagatcaaggactttggtgaggcggctaagcgagagatactgtcagaccgacatgcatttgagacagcgcggcgtctgagccatgataacatggaggagaaggtgccctgggtgtgcccccggcccctggttctgccctcacctcttgtcacccctggaagcaatagtcaggagcgatatatccaggctgagcgggagaagggaatccttcaggagctcttcctgaacaaggagagtcctcatgagcctgatcctgagccctacgagcccataccccctaaactcatccccctagatgaggagtgttccatggatgagactccgtatgttgagactctggaacctggggggtcaggtggctcacctgatggggcaggaggctccaagttgcctccagttctggccaatcttatgggaagcatgggtgctggaaagggcccccaaggccctggaggaggaggcattaatgtccaagagatcctcacctccatcatgggtagcccaaacagtcatccttcagaggaactactgaaacaaccagactattcggacaagatcaagcagatgctggtgccacatggactcctaggccctggcccaatagccaatggtttcccaccagggggtcctgggggccccaagggcatgcagcactttccccctggacctgggggacctatgccaggtccccatggaggccctggtgggccagtgggtccacgtcttctgggtcctccaccccctccccggggaggtgatcccttctgggatggcccgggcgaccctatgcggggtggcccaatgcgggggggtccaggaccaggtcctggaccataccatagaggccgaggtggccgaggaggaaacgaacctcctcctcctcctcctccattccgaggcgccagaggaggtcgctctggaggaggacccccaaatggacgagggggccctggtgggggcatggttggaggtggtgggcatcgtcctcacgaaggccctggtgggggcatgggcaacagcagtggacatcgtccccacgaaggccctggcggtggcatgggaagtgggcatcgcccccatgaaggccctggtggtagcatgggtgggggtggaggacatcgtccccacgaaggccctggcggtggcatcagtggtggcagtggccatcgtccccatgaaggccctggcggaggaatgggtgccggtggtggacatcgcccccacgaaggccctggcggaagcatgggtggaagtggtggacatcgtccccatgaaggccctggacacggggggccccatggccaccggcctcatgatgtccctggtcaccgaggccatgaccatcgagggccgccacctcatgagcaccgtggccatgatggtcctggccacgggggagggggccaccgagggcacgatggaggccacagccatggaggagacatgtcaaaccgccctgtctgccgacatttcatgatgaagggcaactgccgctatgagaacaactgtgccttctaccacccgggtgtcaatgggccccccctgccctagggaccatttgcctgccctgttcacacaacccctgtggactgcagcctcgctctttccaccctgttatggcttctgtgaggcccattttcccttttccccagctgatgaggagccggccccctcagttcccacttgcttgggttcctgggggttttctgatcactggtgcgcattgatgtacatattttcctccagtctggggaggagagagactggaaacgttcctggactgctgaagaggagacccagttggcttcactttttgagaagattcgccctgtaccccaaacccctttccagtattacccttaatgcttgagaacctaaagctggttatcctggcgaacacccctacccttctattgcgggtccccacatgcacacagaactctgacacaggatcagctgcacttaagaaatcatcccagctaagttcattattcctcatggggtggggagatgctgaaaggggtattgtatatcccactgcactgagagggctcaatcagctggatttgagttctggaacacacatcatccccacccctcccccagcgtgggctcaccattcttagtcctttctcaagtgggaccttcaactttctgtgaacacccagtctgcgtcctgggtctgctaggttcgatgatggcgaactcgtatctgcatccggtgcaagttttagctggcagaggtgagaccggtggtgctggtctgcctttgccaactatagccagtctggagacttgataaaatacttcagtgagaccagcttctcatcaacttgggcccggcgtgctgggcctgaaagtcacactacatgcactgcctttgggagtcagctcactccctgctcccacctggaaccttgccagcgtgaaggaggcttccaggtacttcaccctgtcaaccacctctgaatccccaccaggcgccttcctgggtggattcaacaagatgattttgccctttcccagttctctccttcactttggcatcagttgttttctatgaaaacagtggattggttgggttttgtgcagggtcttgggttagagccaaaatggatttgaggatgagtatttttttttttggttttgtatattttgtacattaataataaacagtggaaagagaaagcagcttatttaaaaaaaaaag

SEQ ID NO: 329211 - DNA, 3992 bp, Homo sapiens
actggtggattttggttacatgtataagttctttaatggtgatttctgagattttggtacactcatcacccaagcagtgtacactgcacccaacgtgtagtcttttactaatgtagattttaaccacatattctgaaatattaggtctttttactccagagtggtgtgatgacatcagagttgaaagttatccaagtagaacacaactctaattcattgttccattttttaagggtttggtttttaagcatatctcatgttcttcttaaaactttgggttactttctccgttacataaattttcacaatattttctcaaacctcccattttctgttcctggaagaatgttactttacattatttaggcatttcccctttctgtcacctgcagagctccggaaattggcctcagtccttgtcagcgactggatggctgtcatccgctctcagagcagtacccagcctgctgagaaagataagaagaaacgtaaagatgaaggaaaaagtcgaactacccttcctgagcgacctttgacagaggtgaaggctgagacccgggctgaggaggccccagagaagaagagggagaagcccaagtctcttcgcaccacagcacccagtcatgccaagttccgttccactggactagagctggagacaccatccttggtgcctgtgaagaagaatgccagcacagtggtggtttctgacaagtacaaccttaaacccatccccctcaaacgtcagagcaacgtagctgctccaggagatgccactccccctgcagagaagaaatacaagccactcaacacaacacctaatgccaccaaagagatcaaagtgaagatcatcccgccacagcctatggagggcctgggctttctggatgctcttaattcagcccctgttccaggcatcaaaattaagaagaaaaaaaaagtactgtcacctacggctgccaagccaagcccctttgaagggaaaacgagcacagaaccaagcacagccaaaccttcttccccagaaccagcaccaccttctgaggcaatggacgcagaccgtccaggcaccccggttccccctgttgaagtcccggagctcatggatacagcctctttggagccaggagctctggatgccaagccagtggagagtcctggagatcctaaccaactgacccggaaaggcaggaagaggaaaagtgtgacatggcctgaggaaggcaaactgagagaatatttctattttgaattggatgaaactgaacgagtaaatgtgaataagatcaaggactttggtgaggcggctaagcgagagatactgtcagaccgacatgcatttgagacagcgcggcgtctgagccatgataacatggaggagaaggtgccctgggtgtgcccccggcccctggttctgccctcacctcttgtcacccctggaagcaatagtcaggagcgatatatccaggctgagcgggagaagggaatccttcaggagctcttcctgaacaaggagagtcctcatgagcctgatcctgagccctacgagcccataccccctaaactcatccccctagatgaggagtgttccatggatgagactccgtatgttgagactctggaacctggggggtcaggtggctcacctgatggggcaggaggctccaagttgcctccagttctggccaatcttatgggaagcatgggtgctggaaagggcccccaaggccctggaggaggaggcattaatgtccaagagatcctcacctccatcatgggtagcccaaacagtcatccttcagaggaactactgaaacaaccagactattcggacaagatcaagcagatgctggtgccacatggactcctaggccctggcccaatagccaatggtttcccaccagggggtcctgggggccccaagggcatgcagcactttccccctggacctgggggacctatgccaggtccccatggaggccctggtgggccagtgggtccacgtcttctgggtcctccaccccctccccggggaggtgatcccttctgggatggcccgggcgaccctatgcggggtggcccaatgcgggggggtccaggaccaggtcctggaccataccatagaggccgaggtggccgaggaggaaacgaacctcctcctcctcctcctccattccgaggcgccagaggaggtcgctctggaggaggacccccaaatggacgagggggccctggtgggggcatggttggaggtggtgggcatcgtcctcacgaaggccctggtgggggcatgggcaacagcagtggacatcgtccccacgaaggccctggcggtggcatgggaagtgggcatcgcccccatgaaggccctggtggtagcatgggtgggggtggaggacatcgtccccacgaaggccctggcggtggcatcagtggtggcagtggccatcgtccccatgaaggccctggcggaggaatgggtgccggtggtggacatcgcccccacgaaggccctggcggaagcatgggtggaagtggtggacatcgtccccatgaaggccctggacacggggggccccatggccaccggcctcatgatgtccctggtcaccgaggccatgaccatcgagggccgccacctcatgagcaccgtggccatgatggtcctggccacgggggagggggccaccgagggcacgatggaggccacagccatggaggagacatgtcaaaccgccctgtctgccgacatttcatgatgaagggcaactgccgctatgagaacaactgtgccttctaccacccgggtgtcaatgggccccccctgccctagggaccatttgcctgccctgttcacacaacccctgtggactgcagcctcgctctttccaccctgttatggcttctgtgaggcccattttcccttttccccagctgatgaggagccggccccctcagttcccacttgcttgggttcctgggggttttctgatcactggtgcgcattgatgtacatattttcctccagtctggggaggagagagactggaaacgttcctggactgctgaagaggagacccagttggcttcactttttgagaagattcgccctgtaccccaaacccctttccagtattacccttaatgcttgagaacctaaagctggttatcctggcgaacacccctacccttctattgcgggtccccacatgcacacagaactctgacacaggatcagctgcacttaagaaatcatcccagctaagttcattattcctcatggggtggggagatgctgaaaggggtattgtatatcccactgcactgagagggctcaatcagctggatttgagttctggaacacacatcatccccacccctcccccagcgtgggctcaccattcttagtcctttctcaagtgggaccttcaactttctgtgaacacccagtctgcgtcctgggtctgctaggttcgatgatggcgaactcgtatctgcatccggtgcaagttttagctggcagaggtgagaccggtggtgctggtctgcctttgccaactatagccagtctggagacttgataaaatacttcagtgagaccagcttctcatcaacttgggcccggcgtgctgggcctgaaagtcacactacatgcactgcctttgggagtcagctcactccctgctcccacctggaaccttgccagcgtgaaggaggcttccaggtacttcaccctgtcaaccacctctgaatccccaccaggcgccttcctgggtggattcaacaagatgattttgccctttcccagttctctccttcactttggcatcagttgttttctatgaaaacagtggattggttgggttttgtgcagggtcttgggttagagccaaaatggatttgaggatgagtatttttttttttggttttgtatattttgtacattaataataaacagtggaaagagaaagcagcttatttaaaaaaaaaag
